United States Patent Application Publication US 2022/0098672 A1 - sequence listing, part 3

SEQ ID NO: 24868 - DNA, 1123 bp, Homo sapiens
  chr1:63795363-63796486
  hyper
cgcgccgggccggtggaactcagctccgggaaggctgtggacctggaccctggggctccccgctgcctgggcgcctctagcccggcgatgagtggttctgcggggaccgacggccccatttccttcttgcctcgtgatgtgggagggaagaaagaaggcggcaactgcaggcccgaagctcccctcgcccagcggcccaaccacagtgctgtcgtgtcggggatcggtccccaagggagcccccaaccccctgcccacgccgagatcacccccgtgccaacctcgagggctcggcctgcgggactccagctgcccctgcctggagggagggaagggagaagagaatacgaattaattacgaaggaaacccaggtgtgaaaggcacccgccgcggagctgggcgtgcagcggggcgcgcggtgggacctctgctcccgtccccgtcccgcggctactcagttgcccgctcatgggaggctcgcgacggaaaataaatcccctcagagtgaacctgggaggccgagaggacccagcctgggatctctgggggaaataggggcaagtttaccacggtttaattaagccacagccctagcacgaggaccccggcgacccatccgggctgggggatggactggagtgccccccaccccaggccgcgaaccggcagcgagaagcacactctccgccatccccggccccgccgcttccgcctctgcggactccgcgtttgccatgctccttcccggggtccagggaccggagctgcggtgcacgtcttattgaaggggagagctttggttcttttcctccctgcatccctcccactttcctctcaacagatagtaagcaagactcaattttctccaaaaaagcccgttacccctttctgcaaggggcgcatgcctaggttcacagggagctctcttgtcagccccagaacaaccctaaactccaaatgttctgtttgctctcgaggtacccctgggatgcagcgtctcctccgcgaagccttcctgagcctccctgcccagaccagttgctccttcttgaagctcaccgtgccaattaatgagccattgtcattagtgttgccctctgagttcctggtgagttcctgacc

SEQ ID NO: 24869 - DNA, 940 bp, Homo sapiens
  chr1:6479997-6480937
  hyper
cgagctttaagggagcggctcgcccgccccgccccgccccgcggagtccggccgcccgctggtcccacctcctgcctttgttcctgcgcagggtggagccgggaggggagaccgcgacgcccccggggatcccgctccccgcctttgcgtcctgtctaccgcggggtggcggcccccagttttccccgagcacctgcgggagagtggtaaaggcgccatcgggggccttcgctgcgtgaccccgagggcaggagggccaggtggggccaggccttgcctgactggagctacggtccctcctctccaatgctgcccttcattcattccccaggctcgggttcagcgtcttctctgagccccgccctgggccgcagcaggggacccagcggttacgggagctcccatgagggacagcagcgggagggacttgcacccccagctgctttatcgggtgaagggctgagctggacgggaaatccgagttccggagaaaggtcgtgacttgctccagtcctcgacgctgggaacaggccgagcctggacaagggccccagtcgctggacgcccggctctaaggagcccgtagaacccttcggcggcttgcctagttaagagtcttttggttaccccactccaggctttgggtggggaaacggaatcctagagaagcagaggcagccctggagccctcggagctcgttttcattcccaccggctaggggtccgggttctcgcccgcaagacagtcagggctcatgtgacgcgcgggcaggacagttttgggtgcgggccccagtggcccgcccaggaccgccttcgcgccgcgtggccgttgctgcggcaaactggctggcgtcccccgcccatctgctccgggctcccctcccccgaccggctggcggggcaacggccacgcccgcgaaccacactgcgaactgcc

SEQ ID NO: 24870 - DNA, 418 bp, Homo sapiens
  chr1:6500747-6501165
  hyper
cgcggcgagccgcggccacaccaaggtgctcagctggctgctgctgcacggcggggagatctcggctgacctgtggggcgggaccccgctgcacgacgccgccgagaacggggagctagaggtcagcgcgggcccggggtgggggcgcgcgccctctgctggcaccgcgctttcagcacggccctgcccgggcgcgggggtcccagctcgcggccgcggccgggtcctcactgcgtgcccccgcagtgctgccagatcctggtagtgaacggcgcggagctggacgtccgcgaccgcgacgggtacacggccgccgacctgtcggacttcaacggccacagccactgcacccgctacctgcgcacggtggagaacctggtacgatccctgagctgctcctgtcgcattctttcttctc

SEQ ID NO: 24871 - DNA, 2074 bp, Homo sapiens
  chr1:6507073-6509147
  binary
cgctgagttcccaacgcagactgttggccccgcccaaatccacaggacaggtggcccagccagtgccccgtctccaccgttgagcccaagtgccaggtctgcgtggtcccctcctggctgtgtgagccccctcccggctgtgtgcgtccctccgggctgtgtgcgcccctcccggctgtgtgcgcccctccccactgtgtgcgcccctcccggctatgtgcgtccatctcggccgtgtgcgtgctgggccgcaggcgccagggccggggcccggacgctccacaaagggctctttgtgtcgccgcggcgccccccgcgcgggtgcctgaccgggggcgggagcagggtcgtggcgtccgaacctccgggctgcagggggcgcggagcgggcgggctggcccagaaaacaaatcctgcggtgtcgcatttcctgcaacgtgagccaggtcgggcggggtgaagggtctgaggccaccgcagggacgcatgggctggagagtggggcagaggacagcccccacccggtcactcagtctttggcccggccgcctcactctccctcactgagctgggcctagttgggggcagctgcgatggggtgggaagccacgctgtcacccgaccccgccttacggcccctgaaatccgaggcttgagcgcgggtgtcggtgtcgctttcgtggatggcgatggtttccagatgcaggaggggaagggtggggacgcgacccggagccgggggccaaatatgagaggcctcctctgcccacagtcagccctctcccctctcgggcggggatgaaggtgggggctcagctcccagcttagggagaggcgcagggggcggggtcacatctggccggggacgggtgcagagccgcggccaggtgtggcaaagtagttggcgccccctgtggcatccgcgacggctgggggggttcagcctgggattggcgggccccgggtgatgtcaggccgtcggagcccataggctggctgtgcgcgggtggctgtaacctgagaggaagtatcaggtaacgcaggtgtcgggtcctgccgcccccacagccaggtgcacagcgggggccaccagcaccgtggcaggtaggagcagcccccggacgggcaaccggggtccgtggcaagccggagcctccgagagcacaggctctggagggggctccctccggccccggacccccgaaagacagggctccgcggagccctggggacccgcagtccttctgacagccgagagcggagtgcggccgagggcctagtgagggctaagctgggaggtgccccttcgccagctccccctggcgtcggggctgggccaccccgcccctgggcccgcctcttctggcctcagtgggggcccctgtgccccttggccggtgcccagaacccctccctgtaaggcgggcggagcctgcccttccaccgaggcccccatgaccctcgcccgctgcccactgtgagaaccagggggtctaggaagtcagctgctgcacccctcgacggccgctggccgcgagtccccaggaggtgaagagctgggtggggaggcgtggggggcgcctaccgggcaggtgcccgagccccaccggtcactgtcttcccgcagctgagctcctgtgacggccacgacgggctgcggaggcaggactccagccgcaagccccgcgccttcagcaagcagcccagcacgggggactactaccggcagctgggccgctgccccggcgagacgctggccgcacgcccgggcatggcgcacagcgaggaggtgcgtgcccgccagcccgcgcgcgccggctgcccgcgcctcggccctgccgcccgcggctcactcgaaggcccctccgctcccccgcaggcggcgctgcttcctgggaaccatgttcctaacggctgcgccgcggaccccaaggcgtccagggagctgccaccgccgcccccaccgccgccgccgcccctgccggaggccgcgagttcgccaccgccggccccgcctctgcccctcgagagcgctggccctggctgcgggcagcgccgctcctcctcgtccacc

SEQ ID NO: 24872 - DNA, 904 bp, Homo sapiens
  chr1:66998805-66999709
  hyper
cggttgcgagaaaagctccccacctggggaagcgaggccgctcccgtgtgcgctcggcggggaggacgcggtggcggcgggactcgaactcggtcgtcgaagggcgccccgcagggtcccgtctgtagcccggacggcgagcccaggttggagtgggagggagccggcgtgcacagctgtctttggtcgggctcaggcttccgctccctgcctgctcccctttccagcctcccgccccagaaacgatctcgagcgttgccagtttgattccagagccccactcgggtgggttcttttgtttctttgttttaatgacagttcccagcccttcagcatgtcatgcgcaattaattccctggctctcacgaaggcagctggggtgaaatttcttctgcatcatccttttggggatgtttatgatgtgacgtcagtcggattgatttttctctcttgaatgaaggatgggaggggagaaagagagacggagagagagagagacgcacagatgtgcacggaggccacagacactgacatttggaattccttcagggtaaaaggacaccggaatgggagcttagaagtgtgttgctaagatttccggctgcacggaattattaagtttttcttaaaaaaacaaaaaaagaaagaaagaaagaaaaagaaaagaaccccctccgcagcgagccacttaggtgctgctttcacgccagagtcccctgttaaggtggcagcccttgataactaatctcgggcacccagccgcttctgtaagcttaaggagacgacgaggaggggcgggggaagtgcgtcaccaggtggggaaggggctgtgtatttggtgacaagcgggaggcgatgggggtggaggggaatggggacgggaaataggttctgtgtgctctcc

SEQ ID NO: 24873 - DNA, 73 bp, Homo sapiens
  chr1:70710367-70710440
  hypo
cggtcaagaagcagatcgagacggcggtcacattctaagtctaggagtcggcgacgatccaaaagcccaaggc

SEQ ID NO: 24874 - DNA, 622 bp, Homo sapiens
  chr1:75595748-75596370
  hyper
cgtgcttaaggcgctattgtcggcttggaaatgtcacaatgaataaatggtgtgatggactttagcgtttcgcgccatagcttttagccgggaagctttccaggctgccctgcttaatttcggcgtggttcctaattttctctctcccatcctctctcttagactggaaacgcttcccctatttcttccgtagcggaccgggagagcttactggcgctctgcgaaccggctggaaagaaacaccgagtcactcgtacagactcttggtcgcagaacttggctttccgctattggtcctccagaaccgcttgaaacaactggccccagctggcgcatcagaccgcagtgaggaatgccgcggggcgggtggcgaaggcagggtctgcccgccagtggattcccgggtgtcccgcgtggagcaggcttgcccagctgggaagcccatcaaacctcagtcttggcccacagtgggagagagaccagtgggtcccagacggaggccctcgcccgcttttggcgacctccactggcgtgaataaaagcacccctctcttaccctcagaaactgtgggtagcaaggtataaaacggagtctgggaccggtaagtcccaaggtgagccc

SEQ ID NO: 24875 - DNA, 938 bp, Homo sapiens
  chr1:78511432-78512370
  binary
cgtgtttgccttctaaggcgtattgttctgtagcgtcggcatcctcaggcgttcacgtaaatagagccattttttacaaggagtagggataaacctggtgataggatgagggactacgtaactttctttctctccagatccatcccgggggaggctgggcgggcgggcggctgctccggtccaggggtggaggtcggggccctgacccgacgcagccaggcggaagcgcggctgccattggaggctgcttttacctgcgcggggcccggggcgcaaagtccgaggcgccggggggaggaggcggcggacggcagcgcaggtgggcccgcgctctcggccctgcaagatgcccctgaagctgcgggggaagaagaaggccaagtccaaggagaccgccgggctggtggagggcgagccgacgggcgcgggcggcgggagcctctcagcgtcccgggctcccgcacgcaggctggtcttccacgcgcagctggcgcacggtagtgccacgggccgagtggagggcttctccagcatccaggagctctacgcccagatcgcgggcgcgtttgaaatctcgccgtcggaggtaaggcgccaggtgctcaggctctcccgcctctccgccgcgccgcgccgcgccgcgcgtatttctgtgggcccaggagggttgagcggcgtttcccggagcgcgaaatccgatgccgtgttgagtccgccgggggcgtcccgggggaaagtgagtgtgccttccctggaagggaaaatttaacttggcaggaccgcagaaagtcacagtcccccttgctccgagatctggcctttgggaagcgggttgagggaggcaacctttcttccgcttgcaaatgtgtttgctccagatgtcccggattccgccggccgttcaaggcgtgagcaccttcccagactcgagatctggc

SEQ ID NO: 24876 - DNA, 251 bp, Homo sapiens
  chr1:85773944-85774195
  hyper
cgccctttactcagtaaggagggcccaggcgtccaaagcccaccagggggcagcggcggcattcttagccccacttctccgcgctcaaaggccggctgagaaaacgcgagtgactacccgagggcgctgttactccacaatttttctgcaaaagctaaggtcggcaaacatggatattcggatttccattgtttttgaggctaaatcaaaagatgcctctggggaaaaggggcaacatgcactgtcggatc

SEQ ID NO: 24877 - DNA, 207 bp, Homo sapiens; identical to SEQ ID NO: 23750
  chr1:86860814-86861021
  hypo

SEQ ID NO: 24878 - DNA, 171 bp, Homo sapiens; identical to SEQ ID NO: 7743
  chr1:91170461-91170632
  hyper

SEQ ID NO: 24879 - DNA, 1325 bp, Homo sapiens
  chr1:91184657-91185982
  hyper
cgtgtcaacctaattagcagagtaattataaggtgctaatgaatgattcaaagttctttgagttacattttactccaaattaccattttaagaaccctatgaatctgcgaggcgggcatcgcttccgtggctaggtctggaatgatgttcgagtggcctttaatgtctccaaaggctgggccgaaatctggagtttagttgcagttctggaggtcactttctgggccacagcttttatctgttgaggacgaagggaggggtgtcagggaggcaaatgacctcctgggacaagctcttgcctttcggtcggaactgcttctgtgtgagccctgggtccggaagcgggtagctgggcgactcatcctgcctgcgttttcctagggaaatcggtgtgtttgacccagaaaaaaaaaaaaaaaaaaaaaaaaaaacagcactacttggagggtgggttgagctgtttctcatcgtctcagtggcatttttcctagggctgttccgagagaacagcggggattgaagggacggaggcaaggagatgcacaatccgggcagctctcgctcttctcggaaggcgaagggagtttggcggagaagacggggttggtgagccgaggcggggactccggacgtgctccatcccggcaggggccgacagtggccagaggggtgcggggaggccctcgggaacgggtgactgggccccgccgggtggggtcgggccactgtaggctggagcggggttggatcaaatgcctttggcgcgggaactgagtgctggcccgggagaccctccggagagctcgcgggctcggcctcggcctcggcctcggccttcggccgcggttaccgaaacacagacggtagacttgtggaggtggcttatccgaggccgcagggcccgacgctgcacagcttcgcagcctaaatatcctgcgcctctgtcacagttgaccgctgtggggaggacaggaagggctctagggctgcccgagactgcaggctgaccctacctactctaccctcttcaaatatcgattagggttcttcccattccaacatcatcatccaccaacttcccgaatatggtgcgttttctcctagccctgggaggttccaactcgaactcccctcgctgcatattcagggtgggaagtagggagggggagaaaacaaatttaaaatccagaactgacggcactgcacaaatcaattattctcgaccttgataaataattcatttaagcctgtttttgttttgttccgacgcctaaaatgactcaagagctcaaaaggctgatcgcacagcttgtgttgggcggttc

SEQ ID NO: 24880 - DNA, 943 bp, Homo sapiens
  chr1:91189449-91190392
  hyper
cgagagggggcgctctagggcctggatcctgcatccctatttcctggaacacacccaacgcctcattctgaaaaccctgcttaggccctggccctggtgccgctcagcaaccaggaaagagctggacctgccttcaggcagcaagaacaggactgccagcctcctgtggctctgtctcccgaggctccatgagaaggggatgggggtgcaagaagggaagagtgaggtggtgtgctgggcgtcggggacgaggacgcacgccagccaagacgtgcctcccacccagcccacgcgcgcttccccacccccctggccctccaaaatcggtaagagaattaagatttcgaatccctattttgaggagccttccgcatttcctaattgttaaattcctgcttttcaccaaattcccgggggagaaacatttggcaataagaagggactgtgaatttaaatgctaattgagtgggtcctttttccgcagctccacctgcctggcagcctctgttgaaaccaaacacactcggagcgcccagtgcaacattcttggggtgccgagtagaagcgcagtaaagagagaccctagcggactcctgtctggtttgctttttaccgactcttacagaaaaaaagagaatgccattggaagaagctcttttgcgtggtgggcgatgtgtgggtgggggacttgtggcatggcccacggtgttgtttctgtgcctgcgatgacacacgtatgtcttgagctgtgggctcgccttcctggaggtgcgcccgaccgcatctgctggtgggtctgagcgtgcttggggtgtcccaggagaactgagagaacggctcccacgtgcaaagttccaaagcattaatattttcatcatattatcattattcaatataataatatttgttcggttagcggcactaattaggccacattaaaacc

SEQ ID NO: 24881 - DNA, 1454 bp, Homo sapiens
  chr1:92948154-92949608
  hyper
cgtcactggccagctccgcgcaaacgaatctaagcgacaagcagctagggtcctgccgcctgggatggaggcagcagccccagcgggcaagctgtccaagtcccagagaagccggatgcctccttcccctacgaatcagctcccttctcccggaaagactctccaactccccgttagcatttctacgcccaaggtcgcgccaattcccccccagcactgccgggtccctgcagctcccgcccaagaggttcccagtgggttcctacctggagacgcggagggtgacgggggcctccagaagtcctcaaactccgagctccgttcgcagacgctgccttcgcagctgtctggggatgcggaggctctgtctggggcttcggtcagctgcgattcgggggacaaacggtcccggggctccgccttcgccccgcctgcatttgaagtgctgtctgcaaagaggaggcaggtgaggggctcaggctgggaccggttgagtctgagggtgctgaaggctcccccaatcccccgaccagggcagccgagcgtcttcccctctccacccagaccccggccgggaaccctctcggatccgagggcaggcgcagagaggccatggcacctaggagacaaacccggaggaaccaggacagtaggaaacaaaaacagcagcaaaagggacgttggggcagcccctcccagctccggactaatggtgtgccgaggtgcagtaggcatccgggggagcagccccgcctggcccgcgcgcgcctcgcacctgctcggctaggcgccggtacattctctaaacggagggaatagtctggtcctggggagcgcggctggtggtagctgtgagccttcttgcttttgacgagaaatgagcgcggcatggtggtccggcactttccccactgcgccccaagagtccctggagccgctgtcacccacggtcactccgagggcttgctcagccccagcccggaggagacctgagagggaaagaaaaccaggtggagacgtgggtcagtactctccggtgcggcggactgggcacccaggcggagggagagcgcgggccagggaggcgcgcagagggcccacgggaggaggggcttgaccctgctgcgccgcgcttaccaggtggcacttggacaggtggcgcgaacccgccgtcgttgccgccgccgccactgacacagctcagcggtaaaacctgtcccggggccctgtctcaggcccctttcctcctccctgcccacgccccccagctcctcccctttcctagcgaagctcgctccggcaatcaaactccctggagagctgtagttcccatcgggtgggttaccccaactcagctactcatcgcctgcctggctgtgctttacggctggcgagggagggcggggacacgcggatcggtttaggggccggggatgcccagtggtcgaggaccc

SEQ ID NO: 24882 - DNA, 1441 bp, Homo sapiens
  chr1:92949665-92951106
  hyper
cggggggaggggggaacagaacacaagataaaactgtggggcggcgggaggacagcagcagagggattggggacagcagaggccagagaaaggaggtgggagagcaaagggacaggaaagtgaggggaacaacagacgaccaacccccgccccaggagaaactcgcatctgggtgatcccactcgcccctcactagtgccccacgtaggagaaactttgcccttggactcccggctgcggcgggcaccggtcgaggctgcggcgagccatcccagaccatggagacctaacctcgggaatcaggtcccgggaaaaaagcactttccgttctgctcaccaaaaaatcttgtcctagggaggtggagcccgatccacgaacgttgactgggaaatgctaggtgtcccgagtcggtagtgcaccgacaatttagcagacaaaaaagacaggacgccagagcgcgcaggctgcattagcagagagcgggggtcgggcccgggcccgggagggaactagctgcccggggcgtcgctctcattaacccccaatcagttcacctaataccaggtcgaaatctgagcgcagcgggagggcgtggctgcgcctgccgctaggctccagccggctccgggggcggtaccccacagtcgaggtggtctggagtaaacgaatctgccttcctcccggggtgaaggcgatggtgaccgggttcacacgtgagctgcagtacagcagttctccgtggcctcggctggttcagaaacgagggtgctgggaactctgggccggggcaggacctgcagtcctccggcttcgcgctgtttccactgccggactaggagcccctcggcttcctaggcaagatgcaggccacacagtctacgtctgtccgttggcgctctcagctcaaacgagtcctacaggccttggtccctgtagggtgcaggccccctgctccagatccccagccccattgtgtccccttctccggaggaatgggaatagacctgggagaaaagacgcctgggacgtgtcgcggggctcccgcgaagtttcccgctacccaagcgccagaatgcccctaggggtgagagtgccatccgcctccctccggggtggctcctagggctagagctttgtcgcttcctgcacttctcgtccgtacaattagacgccacaaaccccaaacccaattctttaaacagccacgaaactcggaagaaaagaaaaacggagtggcgttgtcccgagggtcccgctgcagcttggacccacgttggctgggagcgggacagatgggggcggggtaactgtcagcgccggagctgggtctgggctggcgccaccagagaccaggcggacgcggaggccgcctccccacccgggctgtaagcccacgcctctctcgcaccccggcccgctttgctggttcctgtggggagc

SEQ ID NO: 24883 - DNA, 460 bp, Homo sapiens
  chr1:9402333-9402793
  hypo
cgatccctccgtgagaatgaagaaatgcaacccatgagaagaggtttgcgtagtgacaagtccagaaactgtgtgcatcagcctggggcacccctagctgtgggcagaagctccatggtgcagctcatagtggcagtcaggccccagcgtcaaccgtgggagagcacggaggatcccagtggcttgtcaattcgctgatagcagaaggtagggcctttgccagtttggagctgcctcagggtgttgacctgctcagtgagaaagtaggcgcctaggaatccaaacgtccctctcccgcctcatcctgccttgttcccagtgtagtgatcaccctgacatcggttctcccatgtcctcatcccccgccagcccgcggggtcatcccctccccagaccacagtttgggcccaggggtctggggcacacatccgagatgcaggcacacatcccggactcctcc

SEQ ID NO: 24884 - DNA, 284 bp, Homo sapiens
  chr1:95428438-95428722
  hyper
cgatttatctcctcctctttttttttttttttccccatgcagagcaaagggaaaaacagctaagtgtttcctggctgaattttattttgctttcagtttctgccatttcagttcctgttatcgtgctttgaggtgcactgaactgcagcaaacccaggggatccaaggctacgttgaaaagcctttgaccacagtgcagggagcagaagacattaatgacgtgatgtcgacacagcccgcactcaggatcctccaggaaaagaacacagagataaccccggatc

SEQ ID NO: 24885 - DNA, 776 bp, Homo sapiens
  chr10:101290467-101291243
  hyper
cgatagcctttctccttttctttttccagaatcatgaaatcaccgaggagaagaaaactggggactagaagagagcagaaacatttcccctgagacagttttgccccggaggtggggtggggaagtggcgctggagctcagcttcctgcttttatgctcggcggccaccgtgatgcacacacactcgaggtccgccaccccgcagtgccgtgcacccctctgcccccacctcggaatttttgtgcccgagcgctcgggatccacggcaaaaccaggcacattcctccctctgcagactcaccgcctggtttgtagacactggtctccgcctggggcgtcaatagtttcaggatttaaagcagaaagacaccgggcgcccctgtggctgaggaatggcggttccagcacaagaccctgcccacagagggtctctccctactgcctgcgggccgccgctaccctaagtactccggggcgcacgtggcccgcgcggcatcccagctccccgggcggacccaggggctgcctctccacaacagttccgctcccttctgcagagccccgcctctcccacctcccgacaggctgttctttctcccttcaaccttgggcacccactcctgtcgccgttgcgggacccgcgtggcagccctccaccctcgtacccactcccagccggtgtcttatgccgctcggaggcaatgtccaccgtccctgcacctttcacctgccccttccaggtgagacgggtctctttcagctccgccatcctgacc

SEQ ID NO: 24886 - DNA, 833 bp, Homo sapiens
  chr10:101292301-101293134
  hyper
cgtggatccagcgcccagtatttacccgccaggaagttttcctgccccgcgcagcagctgaaaaaaacacactcctggggcatccttccctggcgttggttcgtggacagcaagcctcccagaactggcctaggtcgggaaggtgcagccacgcgggaatcaatggttcaggaaccggatctgtgcagcctcgcccgcagcgtctcggacttcaggactctatactagtccttgtctatttctggtagagccgcaacatcccactcgcagagagcagggggcgtggcccacatgagccagaacctatagggagggaggttggggcgccagccccgcccccccaacgtgacgcaaatctcccggacagaggcttaggagcccgggccccagtccctgcagtggctgtaacaaaacccagacccccaggtcccggccaatggaggcgatttagactggagtgggaccgcgtctgtcaaaagcccgactcggcagcagcggcggagtccaggaggagagctggagccgccgcgctgcctccccgcccccgccgggatttattatttggactggacaattaagtggccctgatgatgttaccaagcccggtcacctccacccctttctcagtcaaagacattttgaatctggagcagcagcaccagcacttccatggtgcgcacttgcaggcggacttggagcaccacttccactctgcgccctgcatgctggccgccgctgaggggacgcaattttctgacggaggggaggaggacgaggaagacgagggcgagaaattgtcctatttgaactcactagccgcagcagacggccac

SEQ ID NO: 24887 - DNA, 887 bp, Homo sapiens
  chr10:102490242-102491129
  hyper
cgctgcctctttctcactttttcgttctcccggcggccaccgtctggcgggcttgggtccggctcccccgccgccgcagtgatttattcgcttcacccggcggaatcaggtgctgaaccgagccccggaacgagagaacagatttctcccaggaaaggttttgtgaactaaacgatgctaattacggggtgggggatgcgtcgcccgggaaggggaggcgcgcggggccgagcgcggcctgggaggggagagaccggggctggccgaggccctcccggggcgcctcccctgcacctctcgccctggctttcgcctttccctgggaactttcccgtctgagttaactattaaccaccggcgagaggcaattttcttcggaatttcagcgatttccttttcgcagtggactcagattagcacgcaaacagtgagatgctcggcttgagtctacgcgcgggcgaagatgcctctgtcgcctcaaacagtgtccttcgcgacggcggaaaactacagcccgcccccgctcccgtgcctgctcaggaagccgtgaccaagccagtgcccgccggtgcccggagtgaaggtggaaaaagccgagtgctcctgctcgggggcggggttgagagggggagattaatccgggcaagccaaggggaccttagacttgcagccagggccgccacccgaggagcccgcatgcagggacgcgcctgaaggcttagtcaaacccggggaaatgccctcccccgcctgcagaatccccacgccgtctcttacttcctccctctttgccactggcgagcttacacgtgcacacacacacacccctctctgtctgtgaccgcaacaaactttgtgaaacttgaaccgctgggtgcaaagttcac

SEQ ID NO: 24888 - DNA, 829 bp, Homo sapiens
  chr10:102589614-102590443
  hyper
cgtcggttcgttttgattctttttcttttgtgcacataagaaataaataataataataaataaagaataaaattttgtatgtcactccccatggctccaagtttgtctctccctgtctctgagatgggcctcccctccattggtcgatccccaaaagccccttcaatgatcctcccaactacactcccgctgccacctccaactcctttgccgagacccccttggcggcagctgaaccacggcgaaggccgagactagcctgccctttagtagccaccctcccccacgcaccccggccctggggacaggaagttcttactctccgaaacttcagaataactcctagttaggcgcctatactaggccaactctgtggtcctaccagtacacccgcacccagatttagggtgctggctctcagaacccgaagtctgaggccttctccacgtgggtggaggggtggtcgtctgtcctatctcctccctccgttccctatccagtgcagttgcgcgtgggcgcagcagcaattttatccccgaagtctgcaatgaaacgcgaagaccgcagacgcttgccgcaagtttcctcgctctgcgtttacttctgggcccgaagaatgccccgcagaggccctaggagctggttcatgggacttcacgcgcctccagtgtcttgcggagccccagccccagcaagcagcggctgaaattggtgcgccttgtgctgtggtctgggtgtgtcccggagagggcgcgcaggcgcctatgtctgtcgcggggcggtcggcgggttcctgcataggtatggctttctgttcatctatgtgttc

SEQ ID NO: 24889 - DNA, 988 bp, Homo sapiens
  chr10:102899421-102900409
  hyper
cgcgccttcttctcggggtgcgatttctctcctcttttggactcaagatcaatgcttcccggccggcgcagatcacacagcaggaccccaggggagactgtggccttcttcccgcctcccaattccccaagaccgcctctagaggctgctgtgtccggagaactccgagcattttctggacacagattgcctaacagaggaacaggggttaggtggggagcggctggccggcccaaacacagcagccccaagctggctcccaagcctgggctctccacccccgctcccatcctctcttgagcacagttaggcccaacacccctgtcccccaaaacacctcctaccctccctcccccccagcccccatcttcaggaacatcacagggctcacactcactaaccgcggagagcacatgcaggccggagccctcagcccggcagctctcggaccctgcccagctcgacgcggactcatgcagaagaggacattccgcaggtaggtacaatcccagcgctggggcctggggcgtccggggggcggcctttgagcttcccggataccgctcgcctgctcccggagctgttcggccgccggctgcccgggtcgtgcactttcagtagggccccgctgactctcctgcccttgggctaggcctcccggggatgccagactcctggggacgctgggacccgcggcgcggcgggacacgcaggactcccgcctctccgcccggaattcgttgagacggaatctcagcggatcccgcgtccgccgagcgccgcggccagggagaaaggccggtgtggcggctggacccgcaaactccgtcccaagtggggcggaggctggaggggaggggggctgcgagggtcacagtcaaggccaactactcacaacagaaagctcgaaactctccctctacctcccctgccggaaatgacccgtctctgttcaaaaatagaaaaagaacgatcggaataattgttc

SEQ ID NO: 24890 - DNA, 795 bp, Homo sapiens
  chr10:102989488-102990283
  binary
cggtctctccgacccgggatgtggagcccgaaagagtggtgggaaccccagcccgggagggacgcggccgccgctcgggccaggtaggaccaggagcccgggtgggccccgctgccacccagagtggactttgcggagctgagatcaagagcccagcgcctctacctctgaccctcttgcccctcaccccactgcctgggcgacgcgcctggggagagggaatctgaagccctcctgcgctggcccgcaggaggtcagagccggctgcgcagccttgggtgggcgacgcgggaagggggtggaggaccccaggggttgggggagggggctagtcggagagctcagccttctccacgcggagaggcggaggagggaattgttggcggctctggacgcctctccccggcctgattccgaagcggccgccctacctcctccggcaatcttgctcactttcctccggcagccgctccccaggctggctggggccaccaacggcctgatgatgggcgtctgaagagtagccaggccaggtgccggggctaacggggccggctccgtgcctccctgctgcgctccgcccgggccccggccggggccccgctgccggccccgcctagcccagcgcccggcttgagtgcatggccaggccgactccagctgttccggatgcggggcgggggcccggcgggagccaggccgcggctggggctttgctctcaggaactcgcagggaggccaggcttccagttaggctggggctaaagaccttagggcccgggatctgtgaatatc

SEQ ID NO: 24891 - DNA, 1584 bp, Homo sapiens
  chr10:102995986-102997570
  hyper
cgttaatggtagtcagctccctccctttcacagaggtctcactactgtcggggggcgccgggcgcaggccgggcatggggcctgagcttaggccaggtggaaaggtggaaggacctagtggggacagacgaagagaccgaggagccgcccgcccggctaaatggacacaggaaaggcctgagtcaggcttctcataataaataaactgcacgtgaataattcagcagtcgcgcgggggccggttgcatcagcgccgccgccgccgcgcggcgcccaattccccgcggaggggagtagccaattaaggcacttgaaaagggagtcgggtggaagatcccccgcccaccagtatcctggatttacccaggtcgagttcagagagcctccccggtcccaaccccctcgggccccatgggtcagggggccgcctgctgggaagtgctacctcagctaagccgctcaggtgtcccgagactccgggcaagggaagacaggcggcgagacggagccagaataagggatgcggacgtctgacctgtggaaaacccagcatctgcagtgcccagccgcacagggaacgtgggcggcgtggttccaagcacagtgaagacgccaggctcggatctgtgctcagagccgggatccctccgggctgcttcgtcctggccaggactttccttgccctgaagtgaggcgccagggaagctgcagggccctccgccctctctgaactcccacgtacttgggcctctcccagcctttcttggacctgtggaagcaattcctgcaggaccagactcccctgtctccccgcggccccctaggtacactccgtaacttccgaaaccttatttcgtttgagcgaaacccggcccctttggctcttcccacttcccacaagtccctgggttcccgatcctgagggattgcattcatcccatctcacacccaccaacgctcaatccctccagttcctccccagccccttcacttccattaattaggtcgactcccttccttcgccgctccctcctgtccccactcagcctccctacacctatgcggcgagcctcgggccaagacctccgccctggctccgccagtcctgcgggggccggcatgcaccagacctcaaaagggatcttcacgggaattccgcatagccagatcccaagcctccagggaggccaccagccctcccccatcttcttcttcctcctccgtctcctttcctcttccctccgcctctacgtatttctttctattcgtttcttttcgtttggtgaggtgccacccgccacagccctgtcccctagggagaggcctggactaactttgccgtcctcgtggccttagcccggactgtgagtctcgagcggcttccgagaggcagctcgggtgtcttcgcagagacagatgaggtgggctggcgattccctagcctcagatggctctgccaccagccagctctgtgatcctgggtaagtctttcaacctctctgagtcttgacgttggtaaaaggcaggagatttagagaaggtgttgggagactaaatcttttcattcgtttgagaaagggagtc

SEQ ID NO: 24892 - DNA, 601 bp, Homo sapiens; identical to SEQ ID NO: 23018
  chr10:102998293-102998894
  hyper

SEQ ID NO: 24893 - DNA, 570 bp, Homo sapiens
  chr10:103043865-103044435
  hyper
cggggagcgaggggcgggggaggggcgcctgcctgcgcacagcagatgttgccgctcctcggatggagctgttaatgtaagtggagtttctgcaatggtaattaggagggccctcattaccctggcggagccggctgagagccgataaagccgagggggagaagggccgacatcagggtaatgggggagcagggccattgaggagctggagccgagccggggaccgctccgcgcgcagctggagcccggcgagagggccgcggaaggggggtgcgaaccggggccggaccccggggaggagccgggaggcgagcggcgaggggcactgcgcggctgggtctgccccggggtttcgcactgcgccgcgggtcgaagtaccgcgagttggccctgactgtctgcaggatgagggtgtcgaggagggttccaggccagcgtgcctgcctcgcctccagcccggggtaaggagatccacggaggcctctgcgcctaaactcaggtggccagacagagttggggcgggaggcgggtatacggaaaggacacccttcccctctatgggccccgccc

SEQ ID NO: 24894 - DNA, 358 bp, Homo sapiens
  chr10:103985878-103986236
  binary
cgttttacgggagaaaaggctggggaagtgggcgggcgatggcctacgacgggacttggggcggggtgtgcgaaacgcctggcaggcgggcccttgagtatgaccaatcagaatgcggactgcgtcccaggggcggagcagaggcgtatcttggtcgagattggatagcggcggggcgcaggaaagaggtcgcgccagcccgggcaggcagctttgcaagtccgcgttatatatcgcagtggctgcgcccgggatagctggctgcgccgccgcgcacatgcctaggttcgacgccctcctccctttgcccaggagttccttctgtcccggctctgttccgtctcgccccgaggttcac

SEQ ID NO: 24895 - DNA, 485 bp, Homo sapiens
  chr10:104416719-104417204
  hypo
cgcagcacttggtggccctgccgggcggcgcccaaccagtgcactcaagccccgtgttccccccatcgcagtatcccaatggctccgccgcccagcagcccatgctcccccagtatggcggccgcaagattctcgtctgttctgtggacaactgttactgttcttccgtggccaaccatggcggccaccagccctacccccgctccggccactttccctggacagtgccctcgcaggagtactcacacccgctcccgcccacaccctccgtcccccagtcccttcccagcctggcggtcagagactggcttgacgcctcccagcagcccggccaccaggatttctacagggtgtatgggcagccgtccaccaaacactacgtgacgagctaacgccacgcaggcggcggggcgctggggaatcttcctccccagcccccgggctcgggagttatgcatccagagacctgcccttctaccttcctc

SEQ ID NO: 24896 - DNA, 737 bp, Homo sapiens; identical to SEQ ID NO: 7757
  chr10:111767130-111767867
  binary

SEQ ID NO: 24897 - DNA, 164 bp, Homo sapiens; identical to SEQ ID NO: 7758
  chr10:114200406-114200570
  hypo

SEQ ID NO: 24898 - DNA, 1260 bp, Homo sapiens
  chr10:118890928-118892188
  hyper
cggctgctgtgatctcagcaaaaagcggagctcaaggctcagggactccgccgcccacactgtgccccgccttattttggatgcctccaacttcagcttcaggcacagtacacgagtaggggcagtaaggcctggctagggccggtgccgcacgggagctgcgggtccctgcaacacccaggtgtgcaggcgctacaagaaggagccggggccgctgcccccgcagcgcggacttcgccccgtgctgcacacgctttagaagagcgtgtccggaagtgtcctccccggccctcctcgcttcccaagatttgtttgcaacgtctacacccgtcaccaccgcataagcaccagggtgaggaggtctctttgcaggaattaatatcgatttcagtctcctgctccttcaaagtttctctttgacgatggcgagacttatattctaagtcagaagaaaataaaaccttgcctattctgggcccatgattgcacaaaatccaaaatgctgccggcatgaagatgcagctggaagactctagaaacctagcattaggaggcagagactttatagtgcccagagatgagttcctaaataaactaagaattacgcagtgggaaattaaggaggagggtctgaggggccgacctcagagggacagatagagaaatcgagagcgaaacactcaaggaagtggaacaaatcgtcgtagccaggcgtctctgcctctccggaaacccgaaatccgcccaaacctcatcccaggcgctcacggtaccagtcgcagggccccgcactataggggctgccaccctctgcccccggagtccccacgccgagactcatcatttgctggctctttcttccttttcttcttttgtttttttatccttcaaatataagacaaaaatacacctcatttatcatcatagatatatatatttcactctcaccacataaatacaaaacatccaaatatccaaaacattcagaacaaagttagtagcctggattcagtgacacctacccgcgtttgaatcgttcattattttcttcactatttgcctagaaaaaaaaaaaagatgaaaaagagggggagagtttccgacgtaaataatttacaataaaattactattttaaaaaagtgtttttcgcttgcttcagatggatgaatacattctagacactgcggcacctcgcagtctgggtctgtgattttggttaaaatgtgggtggccgtggctgtagggacgatcgccgctgc

SEQ ID NO: 24899 - DNA, 273 bp, Homo sapiens
  chr10:121397997-121398270
  hypo
cgccgcaagactggcagcaagagaaagccctacgacaagaagcggaagtatgagttggggcacctggctgccaacaccaagattggcccccaccacatccacacagtccgtgtgcggggaggtaacaataaatacggtgccctgaggcgggacatggggaatttctcctggggttcagagtgttgtactcgcaaaacaaggatcactgatgttgtctacgatgcgcccaatagcaagctggtccgtaccaagaccctggtggagaactgcttc

SEQ ID NO: 24900 - DNA, 388 bp, Homo sapiens
  chr10:122708510-122708898
  hyper
cgcagtggtcccgcccatcgccgcctctacagggagggagccgcggccccgagctggccacgcgatggcgctgtgcacccggccgcggagcccctgcacgtccggctcccgctcgcgctctcggctcgagctccggactccaggctcggagcaggggttcgggctacggttcccggctccgagggaccgcggggctctctgcctgggaaggaagcttgcgggcctcctcgggcctcgctgcagcccagctaggttaatcaatcagcagccgctcagtcacccatcccttccgcatcagttgcgtggggctggggatcatgcctagggcgggaggcgtgggagcgcagggcgccccgggtccggatccggctacaggggcgaacagagc

SEQ ID NO: 24901 - DNA, 197 bp, Homo sapiens
  chr10:126314011-126314208
  hypo
cgatgcagcccggtggtgtgcacacagcacaatcccctcaccacggcagagagctggagacggcgacccctgcacaacagccccaggttcctcaccggctcctggccaggcctggacgatggatcggcaaccaggatcctcgcctgcccctggccaggcctgggcgatggaccagcagctcccaaagcgaacctgcc

SEQ ID NO: 24902 - DNA, 319 bp, Homo sapiens; identical to SEQ ID NO: 7762
  chr10:126354246-126354565
  hypo

SEQ ID NO: 24903 - DNA, 380 bp, Homo sapiens; identical to SEQ ID NO: 7763
  chr10:12827582-12827962
  hypo

SEQ ID NO: 24904 - DNA, 53 bp, Homo sapiens
  chr10:129897014-129897067
  hypo
cgctcatccattcattcgtgtttaccgagtgcctgctcagtgttgggacagac

SEQ ID NO: 24905 - DNA, 382 bp, Homo sapiens
  chr10:133783038-133783420
  hypo
cgcacacgggagggcgaggtggagacacgggcagcgctcaggtcccggcccaggaaactcagtggcttttatcccgtttccttcaaccccagatgtgagccctctggccaacctacctaacccacctgcccccagtggcattccggtctttccagtctgtccaacacacggcagccacagaacactgtctgcacgccaggactagagccctcctccccgctgagaggctgggaccagcccgaggaggagccgttttggcttcccgctctggctcttcaccaccgctgcggcgaacgctcttcagaacccacagcggcgcctgcctggtctctgtgttttctgcagggtgagtgagtataagcagccaggaaaggccaggcgc

SEQ ID NO: 24906 - DNA, 977 bp, Homo sapiens
  chr10:134732799-134733776
  hypo
cgtgagggcgggtacgaacctcgccgcagcctcaacttcttcaccttgacgttgtcatacaggaggcagaagcggctcgccgtccgacagacgtcccacacgccttgtttccgggccactttggccagctctgcccaaatctgtatcctgctcaccgagaacccaaacgagtgaaaggtgagtagacaagtgtggttgctgaagttagaaaacacctgggctggctgcctgagaaaaggccactgtggctctgcagtttcaaggtggcaaggagcccggcactcgcgctgggtacggcctggcgggtgcatgtcccagggtcgggcgcagctctccgctctccctgccagccagctgtgcgcggcacctcccttccctgtggtgagaagaaaggccacacaatccactccccgggggagtgcacgggacaggcctcccggggatggtaccgaccgcagggtcggtaccaaaaatcagcctgctctggtcacaggcgctgcgtgtcctccgagtgacagcagtgacaggcgggacagggcagccgcacacctcataggccgtggctgtcatcacaggctggggggtcccgtctgtggcgggactcccaggcagggacctcgtcccaccatcctggagcaggtggcctggcgagtccccagacggccacatgcagggtcagctcagccgccacagacactggccctcgggctgagcgacccccgggctgagctgtgcgtggcgctctggccttttcctcactcacctctccttgtcgttttcgttgcccaggcgccgcaggtgcccggcagctttgtccacgctgacggtgtggtgccacgccttcgcacagaggtaggtgaaccggcccctgttcttcccggtggagactgagggcggaaatgcaaaggcaggtgttgcagctgctggccaagggccggggacgtgcccatcagtaaccaatgccctgcgccggcgcc

SEQ ID NO: 24907 - DNA, 959 bp, Homo sapiens
  chr10:17270867-17271826
  binary
cgctcctttgcccgcgggtctccccgcctgaccgcagccccgagaccgccgcgcacctcctcccacgcccctttggcgtggtgccaccggacccctctggttcagtcccaggcggacccccccctcaccgcgcgaccccgcctttttcagcaccccagggtgagcccagctcagactatcatccggaaagcccccaaaagtcccagcccagcgctgaagtaacgggaccatgcccagtcccaggccccggagcaggaaggctcgagggcgcccccaccccacccgcccaccctccccgcttctcgctaggtccctattggctggcgcgctccgcggctgggatggcagtgggaggggaccctctttcctaacggggttataaaaacagcgccctcggcggggtccagtcctctgccactctcgctccgaggtccccgcgccagagacgcagccgcgctcccaccacccacacccaccgcgccctcgttcgcctcttctccgggagccagtccgcgccaccgccgccgcccaggccatcgccaccctccgcagccatgtccaccaggtccgtgtcctcgtcctcctaccgcaggatgttcggcggcccgggcaccgcgagccggccgagctccagccggagctacgtgactacgtccacccgcacctacagcctgggcagcgcgctgcgccccagcaccagccgcagcctctacgcctcgtccccgggcggcgtgtatgccacgcgctcctctgccgtgcgcctgcggagcagcgtgcccggggtgcggctcctgcaggactcggtggacttctcgctggccgacgccatcaacaccgagttcaagaacacccgcaccaacgagaaggtggagctgcaggagctgaatgaccgcttcgccaactacatcgacaaggtgcgcttcctggagcagcagaataagatcctgctggccgagctc

SEQ ID NO: 24908 - DNA, 89 bp, Homo sapiens
  chr10:17429554-17429643
  hypo
cgcgccgggcccagaaaactaggattttcatagggctatccttctgtgagaaacggagctaacatacaggactggactgctgtcacatc

SEQ ID NO: 24909 - DNA, 873 bp, Homo sapiens; identical to SEQ ID NO: 7766
  chr10:21815648-21816521
  binary

SEQ ID NO: 24910 - DNA, 376 bp, Homo sapiens
  chr10:22047245-22047621
  hypo
cgactaacaatctagctacagggaaagaagcctcaagagacactgtgttaggatcacaccctggggctctctgcagcgcctcatggccagatcacaggaaagaggccgcccaagcccggtgggtgggctctccacagggcactcccgccccctcctcccatctgaggaccatctcagaaatatctgagcaggcaccaagagctaccagcagggagaaaggccaactacaaacggccacggccgtggaaagtaagccgaaccctagctgtcgcctggcactgaccacatacggagatggcctcagggcctctggacagccaccaggtgtacctgctgagtccaaagttattcacatggcagaatcgaagatgatcac

SEQ ID NO: 24911 - DNA, 1465 bp, Homo sapiens
  chr10:22541133-22542598
  binary
cgaaggaaagcgcaggaggccctcgtgagagggcaagggggaaaagatcgacgaagtaagagcgaaaagaggaaaggaaagaaagactttctagatgcggagtctccattttcagcagcgccatattcgcttttcctctcgccgcttttggctgggttttgtgtgcggcggtggacaggcgccagcacatttctgcagcttcagcagctctgctcagacacctggggagggccgcagggcccgggcgggggacgcgcgctcttggcccaggcccgggcgcggccccctccccggcctggcggttcctgcgcagcgccagccccgcgctcctctaggctgcaaagggggcctccgactcgggcccggcccggaggggacacctcactcggggccccgcggcagcccccaggggacgcgggccctctagtttcgcccacggtgtggctgggcatgcgtgccaaggggatgcgtaaccgagaaccgaaaaagacgaacttaaccttcggggaggaggagagggcgcacgctgcgggtaccggggcttgggggcgctcctggaggtgacggggtcacctccacctgcgcggggccactctctgggagccggcgatcgatgcccgccgcggcgcctggcccaggcccccaggcctctcgcggctcccggaaaaacgtccgaggtcggggctcggccgggagccccaagcgggtcccctggcctcgggacgccagtccgggaggcggccggaactccggttttcgcggttctcagcgatattaggcgcggccagtgtctgaaagctcctcggggttacgtcctggggcgactggaggcggctcacgactcagaaagtcggggcttctcgccccggatccccaccgctggcgtctgtcgaatccccacctcggtcctcgggtagaggcgcaagcgcgccccaagaccattctcttcgcgcccacccccgttattcttcactttcacttgacatcgttcttcactcaaggttaggtcctcgctagtgccagagaagcccctgggtccccagtgccctcagccccgcagcgtagggagcagccggcccgggagataaggaggccacagccatggaggccccaggcccggagtccccgcgccgtcgggttttgagccgcgcggctggccaggaccgccggctccttctctgtcccggtcctccgctcgcagccccgcagaggtgacggtacctggaggctggaagcgacggtttcctcgggccggtggagggaaacatgtcagggtcacagcgaaggaaaccgagacccacaggggtccccgggcgtccgggacgcgtcgctggttttgctcctagaaggaaaggccttcccgcttttgttccaccggctcaccaggtcctcccttcctggccaactctaacctcagctttgtgcgtgtcacccggccccgggataatcggatcctcccagaccc

SEQ ID NO: 24912 - DNA, 796 bp, Homo sapiens
  chr10:22625339-22626135
  hyper
cgcttccgagacagcgaagcccccaacctgagagcccttcggccgtctttgccgcacagctgcagtcaaggcccggagggactgcgggacgcgggcgggagcgagagccctgtgggctgccaagccggcgcggccgcgccgcggcagccgcttcccttgccaccttcgttccaggggctgcggggctgcgcgctcggcagaggctcggttgccagtagcaaccacacgacggcgatttgcagccagggccgccgccgcagccgctggtacctctgcctcctcctacacctcgggctcgagcatttgaaaccctgggggttgccttcggtgacatctcccgcccccacctccagtcctcagtctccaaaatcctcagctctgctcaaaagccagcgcccccggctgggccctgcccccaccgcagacaataggagcggctgggagcgcacagggcggcgcgcgccgcgagcagcgggcacctgagcccccaaatccgggcgcgtcgctgagtctcagccccaggtgccctcttcgcggagttgatcagcaattctttttcagtggccaattagaaagcttttcttgacatcagaaataagggtggtgccaaagaaagaagtcaaacgcccactccctttctaataacatcgacacaaagaagagctcatggttgcgtctgcgcttggtaacagtggctttcctctgggttagagccacaggcacaagcacccgctgctatctttcttcttcgcctaccatgaatattttgcatgaaatccagaatgtaaccatttgc

SEQ ID NO: 24913 - DNA, 908 bp, Homo sapiens
  chr10:22764575-22765483
  hyper
cgtaaataatactcgattaccatgccacctacatctttttgttaaaaatgcctttatgaaggctataatccttatcaaattaaaccctgcggatcccccttttaatacacagggagtcctcctcatttatgggcgtcggcgctaagcagctctggaaacgggcagacccagctgtgcagcgatgtccagtgtcgccgcatctgccccgcggggtgcagcatgagtcttcctttgtggcgtgcggctccatcggaacgcgcgttgcgacgacaaattccttttttcccccccgcagttaacagttctggggcagaggctggtggagaggtccagagcccactcagaccgagatgaagatgaggaaaagcatgagcaggaagaggctggcggctgcggcggccacagggaagagctcggtgcgcggcgcagcctcccgcgaccgcgactcctgggctgcgtcgaggagccgcgttgccataggaaccgtagcggcgccccagtgaaaccctgcgttcggacaggagaagctaaccgcggccgcccactcccacccgcgcttcctccccgcccccaccggccgtgcgcgaaaagcagagatccgagaaccgcgtgcggtacaaacggcaaaagcttcgcgcgcattttccgggagttgagcgcgcggccgcaggccgggaacctaccgctctcaggctcccagcccgggcgctacgaccctgtgggcgccgcctgtgcagcccctccttccagcccgctcgggcgcatcccccaggccgggccagcgacgcgggcaccgggagcccctcccgccggtccgggctttggcccacacccggggaccgcggagtgggaaaggaaccaaagcgcggcgcctggccgaccgcggacgaaattcgaggccggagggc

SEQ ID NO: 24914 - DNA, 54 bp, Homo sapiens; identical to SEQ ID NO: 7769
  chr10:27825982-27826036
  hypo

SEQ ID NO: 24915 - DNA, 137 bp, Homo sapiens; identical to SEQ ID NO: 7770
  chr10:30736731-30736868
  hypo

SEQ ID NO: 24916 - DNA, 819 bp, Homo sapiens
  chr10:31609274-31610093
  binary
cgccgggatgggccggtgtgcgtgcgcctcgcgcttttctctttcggtttttggggaagttgttacctgggccggacgcacggagcgctgaagccggataatggggcttggatggcgctctgggtctcgggtggaaggagggtgggggagggggcggacggaccgacggacgcgcggggctgctacttgcaccgcagctgcagtgtttattgatttgtgctgctgtgccaagggaaacacacacccctctgcctggcgtgagagttaaaaaaaaagagagacagcccgagggatcgagacctgaacatgtggtggtggttgcacagtcgccttttccagtttggagagacgttgtaagttgattgtatttctggttatctcggggcgatgctatgctttctctccctctcgtgcagcagcgaaatgtctgctgattgttattgtctggacagttcctgtggcgagaggggcgagacttgtccgcccgggggcggcgggagcgcagggagagcagcccccgcctgcgccgccccggtacctgtttgtataataatgggcggcaacggccctgccgccggccgcagcccaggctatataaggaattacacgtacatttcggaccgaggggctcgctttggttcctgcgttatttttaaaacgacttttaagagaggggcaataaatgcgtctataatgggaccgctgcagcgtcgagaaaacgaggaaatacgtgtttaggagaaaactctctcgtgctcccccagccccaccccccgcgcctgggctccctttctccctcccctctgggatgcgaaacgc

SEQ ID NO: 24917 - DNA, 427 bp, Homo sapiens
  chr10:43600291-43600718
  binary
cgcggcggtgtgcgccccgctctgaccgcagagcccccttcccgaggaaagcggctggcccggtcccggctggtgatcacgcggggcccctgtctgcttggtgcgcaggtgagggtctgcccttccgctgcgccccggacagcctggaggtgagcacgcgctgggccctggaccgcgagcagcgggagaagtacgagctggtggccgtgtgcaccgtgcacgccggcgcgcgcgaggaggtggtgatggtgcccttcccggtgaccgtgtacgacgaggacgactcggcgcccaccttccccgcgggcgtcgacaccgccagcgccgtggtggagttcaagcggaaggaggtgcttgtccgcgcgtgctgtggtctacccagtgtctgtctccggccacagttcgtttctcggtcggtttagtgtcc

SEQ ID NO: 24918 - DNA, 590 bp, Homo sapiens
  chr10:43697752-43698342
  hyper
cgtctgccccctgtggttgaaagggcgacagcgctgaaaggggtgtgaccccgaggggaggcgacgcgctcccgcgccctagtccacaggcatgcacgaccccacccagcacagggcctagggcatggggactggccctcttggctgaaacgactccgaccctctcggaagatgcccgcgcggcctctgcccccggggagaggggactgtgcccgatgctcaggcgccgcgcccccatcctccaatcccccagaacgcaccacaggccaagcccctcctgcgccagccaagactccgcgccagcccacaccagccccactcagaccgctggaccccgcccccggcccccgcaccacccagcccgcaactctgcagctttcttcgcccacgccgcacagcctccaaaccagcggattccgcccacgttgccagcctaggccccccaccacccgctcccaccacgcccctaacccggacccaacccacagctccagcccagacctcaccccagcctggtgtggcgtcacgccccaactcagacccgccccacagccccagccaggccacgccccaaccctagccctgacccc

SEQ ID NO: 24919 - DNA, 424 bp, Homo sapiens; identical to SEQ ID NO: 23449
  chr10:5538706-5539130
  hypo

SEQ ID NO: 24920 - DNA, 1455 bp, Homo sapiens; identical to SEQ ID NO: 23450
  chr10:5540271-5541726
  hypo

SEQ ID NO: 24921 - DNA, 552 bp, Homo sapiens; identical to SEQ ID NO: 23777
  chr10:5874790-5875342
  hypo

SEQ ID NO: 24922 - DNA, 572 bp, Homo sapiens
  chr10:6003417-6003989
  hypo
cgttcagcttgtttactagagaaggcaggcccaacgctggaggctcagctgagagcaggtgaagctgcgctggccgaggacgctcggagcggctgcgtgtgaaacacgggaagcctgggctctggcctgaactctccgggctgtgtgggaggaaagcgtcctgatgagcttgctctcaggaacagaggctgccttgtgttcagcgtcttccctgtcttccttgtccttccctggaaggtggctgcccctgcactgtaagggtgtggcgtaactgtgctgttccctctccatgaaaaatgtgtcttccattgtgacagccacggaatctaggaaacgtgaggccaagcgctgtggctctctggacgcactgttgttgccgcgttcccatggtctcccagccacacaggtcatgagaaggcctcacgccccttaatcctgtgtcaccacctttcatataacttgccctacgctcactgccaatgctccagggctccctgcacaggacgcaccaaggcatcctcagccaagtgcccacggtcgtgccagctcgggtcaaaggctgctgtcacatc

SEQ ID NO: 24923 - DNA, 355 bp, Homo sapiens
  chr10:6018609-6018964
  hyper
cgggacaaaacccctaggaatcgctcattccgtcctccctgccgagatcagagctccgcgacccgctttcttctcgaatacaccaagcgatcacagatctcttccccctttttctgcgagtgtagactccaggctggcccccactccccacccccatccggtcccgaccgcctctgctggtttcctgatcgcttaagaattggaagttgtttccaggtccccaggtgtgcaacttgcccgacgcgtttccccctgggacacagctcctccccaccctcccagctcccactgacataatttacttttgcctgggagtcgggaggagtagtttctcccggacccctccgaggaccgc

SEQ ID NO: 24924 - DNA, 939 bp, Homo sapiens
  chr10:6621854-6622793
  binary
cgcaggccccctttcgttcaggtgagaaggaaaagggagaagaaaggaggaagcgcccccaggccggcggcccccacccggctaaggtcgccagcatcccgcatcccgtgcgacctgcgtcccagaaacccagcggggaaattcttcccggtgcgctcttgcgcccgcttggttccatttcctactccgcctgctcacccggcagccctcaccccttcccggaggctctccgaggggcccgggtagcccttctcgccacgggtctcggcccctccagcccgctccctcccggcggcggcgcggggcgcggggccctacctggagcgagcacggcgccgctgctgcccggtggcgctgggactgcgcggggactgcgcggggactgcgcggggactggcggggctggcggggctggcggggctggcggggctggcgggcccggcgcactgcgggtgcgcctagaaggcggtgcccgccagggggcgctcgccagcctccccgccagcccggcctcccgggacccggcacctctagccagggacgcgcgctcggtcccccgccgtgcgcccccggtcccgcgcccaggctcccgcccctggcctccttaccagccacttgtcgcccagctgcgaactggagcgggaggcggcggccggagggcccaggacagccccgggagggcggcgaggcggagcaggagcgccccggctccggccacattctcagagtcaggaaaaggggcgagaggccacatgtctccctctcgcccaactgaaaacgaaacggcgctccagcagattgggtggaaagagctgggtctcttttctctgtttttcacgctagaaagggcttgtaaacattgttccttttaaaatgacctaccccaggcatttgtttgggcacacttctgtcctggggtcatcgttcctaggtggcttc

SEQ ID NO: 24925 - DNA, 398 bp, Homo sapiens; identical to SEQ ID NO: 6751
  chr10:70184294-70184692
  hypo

SEQ ID NO: 24926 - DNA, 755 bp, Homo sapiens
  chr10:73846836-73847591
  hyper
cggcgtcgcctctggcgcatccgggcccatcccccacagcacccccaacgatctcggggtccagccacaccctccgcccgccctgcctcacccctgcttccccagcccccaacccggcccggccgagaggaaggagccagccccgccgggccgccgcctgcgacttcccctctgatccacaggtgccggtaaacaaaagtgccgcagctacccccccgcccccaccccgcggagttcggcccaaggttacgccggggttcgggcggcgcccgccgggggcccccaaacccagcttctggactctccccggcttctcaagcccaccgggccgggagccttcctctggctccgagctgctcccctcgctccaggctggattcccccctgaaatgttggtccgggaaaaccagcctgggtcctcgcgcgcccttctgcacggggaccccagcccacccccgtacggacacgccttccaccatctcgcctagaaggctgctgggaccccagacccagagccccggtcacactcccgtcccatgctgtccccctcccgcaaagcccacggtgggaacagagggcaccgcgcgagccgatgccaccctcactgccggccccacccagacctgccggtgctgcagtgccccgtatgtgcagcctgcagcatcccagcggctggggcaggcccgggggcggctcgcacaacgcagctggggaccgggtcggggtccagcggcagccggggtccgggtcccccc

SEQ ID NO: 24927 - DNA, 99 bp, Homo sapiens
  chr10:74100516-74100615
  hypo
cgcgctgtccctggcgccctcctcactcacatcaccctggttgtccctgcggtcctgcctttgctggtaggtatagcgcatgcggccgttgctgtagac

SEQ ID NO: 24928 - DNA, 148 bp, Homo sapiens
  chr10:75670652-75670800
  hyper
cggccaggtgcatgggaggaagcacggagaatttacaagcctctcgattcctcagtccagacgctgttgggtcccctccgctggagatcgcgcttcccccaaatctttgtgagcgttgcggaagcacgcggggtccgggtcgctgagc

SEQ ID NO: 24929 - DNA, 102 bp, Homo sapiens; identical to SEQ ID NO: 6754
  chr10:76287784-76287886
  hypo

SEQ ID NO: 24930 - DNA, 433 bp, Homo sapiens; identical to SEQ ID NO: 7790
  chr10:79610504-79610937
  hypo

SEQ ID NO: 24931 - DNA, 261 bp, Homo sapiens
  chr10:7985048-7985309
  hypo
cggttgtgatcctgctcagatcaaaggagtccaatcctgtggttccggttccctgtagctccgtgagactctgagaactccactcggcctccagcgctgcctttgccgttgccttgaatgaaacaggcgctcgatgttggcctcaccttgcttggtttcttggcttctgtcttctgattctggctcctacgcatcacgttctgcttgctccttagcattgcaaactctgacattttagatgatacgtttgtttcctagttc

SEQ ID NO: 24932 - DNA, 1161 bp, Homo sapiens
  chr10:8085011-8086172
  hyper
cgagaaaagcaagtgcccgcgtcagcagaaaaggaacgaggagcgaggccgccagatcgacgggaaacaggcggagagagggtcgtcggcgctcagggccggggtggcccgggggacggaggagagataggagagcccgccctgggtctcagagggtgctgttgcgtgctgcaggttctaagggaaaagggctttcccctggcaggagagccaaaggcggggaagggagaaggaggggcgggagaatgaggaccagaagccggagaagggaggctggaggaagacgcaagtggcccctccgacctagtggacggcgagttgaggtacagttaatgcccgggccaaggagacaactgtcgccgccttggtgacggatgccccctccctgggcccccgccctagtccccatggggggagcagcgcgccagaagggagtaggcgttgttgggaccctctgggggtctggaatgccagcgacacttctcttcccagccgcaggggccttcctgggacaggccaggtagaccccacccccccgaccccgttcgtcagggcaacaggttgggtgcaagctgtcaagagatggccttctccctgggtcctcaaaacgcgccaagaacgtggctctgccacttggtggcggaaggcgggaggcacagggcaggaaggtggaggaggggctgcattcgtgacgacgggggagcagagagggaaggacttagggactccccagagggcagacagacctggccagcttggcaaatcataaatccctctccctggaccctcggcctaaacctacccccagggtgtgcagcggaggcgcacaggggttggctgacgggctggggtgcgcctgggtggaggctggtttggggttctggcgtctggaggcaggccatggaaccagaggagagggcaggagggcccaccgcgcagagctgcggcccggctcctagagtggcgcccccagcctgggcatcgcgctcaactgctctctgaaccccatgtccacgagggttcgccctcaaaccacctccacctctgtccacaccccagttctcccgactccagggaccaagtgcctcggcctccccgccacgaaatggccacccccaagccctttgccccatgaaaatagcaacttcttcctacccaacc

SEQ ID NO: 24933 - DNA, 226 bp, Homo sapiens; identical to SEQ ID NO: 6759
  chr10:80855265-80855491
  hypo

SEQ ID NO: 24934 - DNA, 179 bp, Homo sapiens
  chr10:81023804-81023983
  hypo
cgaggaaaaattacatgcggaatggaaagcaggcgctcagggtggctcctgctggaatgagagctggagtgcaggctccgtggttcctgggcatgcgggtgtggctcagttctcaccttgcagatggagtgggactgttgacccaggccagcctggggactgcctcctcacctccctgc

SEQ ID NO: 24935 - DNA, 185 bp, Homo sapiens; identical to SEQ ID NO: 7797
  chr10:93572713-93572898
  hypo

SEQ ID NO: 24936 - DNA, 667 bp, Homo sapiens
  chr10:93647052-93647719
  binary
cgcgtgaatagcggggaaggtaacgtgactgcggagctcagggccggcccgggaggggcgcgggcctggccagtgggaaggtcggacgccgaggggcgaaatcaccccaccggcatcagaccaccgcctccattcagcggaggaatgtgggcgggcagaggacgcgcggtcccctcgcccggcgttaaccctgtgcgcgccgggagcttcgcccggagcatcgcagcatcgcgcagcgcccggagcccggggccctcacagctccaccggtgcccggagcatctatctccccgcgggcggtgctgccactcgccacgttcacattcctccacgtgcacgcgtgactcttttggtgttatttttaaaaatctcactatttaatcgccatgtttaccttccccagaaccacatagtctcatcgcaattcaaataatttagaaaacattttaagataatcgtggagcccacgaagccagtgcaacgtaggtggcttcccttgctggaagtcaccgcaccgaggccagaagaaggtagccagcgcccaggcaagcgcttaaaactgcagcctcctccacacctttgcacgtggggaaaccgaagcagaaccctgtctctttcacttttcttcccttcgctaagacttttttatatttgtaagtggaggcgc

SEQ ID NO: 24937 - DNA, 438 bp, Homo sapiens
  chr10:94180315-94180753
  hyper
cgtccttcgcctgcagtatttaaacgattgtcggtggaagttcacgtcgtgctcctctttcgacagccgttgggtaacggatcaaaacccttaacggccgcggctggagcgcgagctcggggcgccgaggggctccgggcccgagcgtccaccgctcatctcctgggctcgggaggttttcgcggcgggggctcagccccagatcccgggactcaggaggagctgggccgagctgcgggaggcgtggaagccccaggagagggttttgcactacgaaaaaaccatatgcaaattgcctgggaagagtttagattctgtggccaaactgcaagcggccgttgctaaaatgggaagcatttacaggaaaaagcaaacggtttcatcgaggtggattcgacgacaaactaagcgaaggcaaaaacgatcgcgggagtcgac

SEQ ID NO: 24938 - DNA, 773 bp, Homo sapiens
  chr10:98272415-98273188
  hyper
cgtgagcgtgagcacccctctgtccgtgctggaactgccccacactcatcagcttgctggaacatgcgcttggcccttcggaggctaacgcttcaacgactccagctcggaagccgctcccctcaggactcacgagccgatcagtggccccgaggaagcgggagctgcagcgcccgggcggcgattgcgcccgaaaggcccgtacgtcctggggcgccgcttcctggagggattagagcacctgccggcttccatctccgcccgcccagagcgaccctcaggccggtaccgctacagggaagtttccggctattcgagtcttgctcattctccctcggcgacccctttccttttgcccgctgtgacgcttttctttttaaaatctcccaagagtaaccacagatcttgggaaactttgcgcgaaacttaaaaatgctgtgaaatcggagccaggaactccatctgagcctcggagcgccgcgcccagtccagctcttctgctccggcccggagcgtctggcggtggccagtgctgcccactcgctgtcaggcggccctggcacccaccccggcccctgggcgccctctcggcctctggcacccgctctgattcgctttgggaacgcgccagctgtcgccccccggtgcgcaccgcaaacctggggccgggacatcccagcctcggagtggtttttaagcaattcctcggaggcattgtcttccgggggagccggggatctcaggggaggggaggggagacccgccccatagac

SEQ ID NO: 24939 - DNA, 853 bp, Homo sapiens
  chr11:107799236-107800089
  binary
cgccgccgaacttagcccgcgggtggggcggcccgggagccagcggggcacgtgagcgatggagaccatctggatctaccagttccgcctcatcgtgatcggggactccaccgtgggcaagtcctgcctcctgcaccgcttcacccagggccgcttccccgggctgcgctcccccgcctgcgaccccaccgtcggcgtggacttcttctcccgcctgctggagatcgagccgggcaagaggatcaagctacagctctgggacacggcgggacaggagcggttcaggtagggaccccggggaccttgggcaccgcgccgccccctcagcccgcccggacgccccttccccaggcgtccgccccgccggccctggtcgggagaggctctggcccttccctctcgaaagtgcaaacactccattctcgcttcccctttgcccctcctcttccagggacgacttcctcctccgcaatttctcacttctttctttggcgcccatttcctgcgccccctttccatctttcctttcccgcctgaaccggggtcgtcctcgccgccccctcttccccaactctttcagcccctgtgggtatttttatcccctccggctccccggctgccttcttcccaaactcggcttccctggctgcgcacagcatgacccgaccaccctcctccaagcaggcgccccttttcctaccctaacccagcggctcccacgctgtgtggccggggagaaccgcgagggagggttcccagattcgtgatggatcctttagcttcacagcaaggagcgctccaacccaggttcctgcatgagctcactgggcatggttcacagagaggtggatgc

SEQ ID NO: 24940 - DNA, 83 bp, Homo sapiens; identical to SEQ ID NO: 7801
  chr11:11960229-11960312
  hypo

SEQ ID NO: 24941 - DNA, 452 bp, Homo sapiens
  chr11:119613005-119613457
  hyper
cgcctcctgccgcgcctgacactccgcagggcccgggggtgggtgggcaggggtgcgagggggcgtggggctgggcgcgccggcctggggggaaagccccgcctcccggatgtcgtctcttcgccccctactagctcttgtctcctccccaacccctcgccccaccccctgcctaatttttgccagtggatcatcggcctttggatgaatccgcagcaaatggctcattcggggcgggcccgcctccccatccccccagtgtgcggtctcctctccccagcaaagatgttcggtggcacttacggcccctttttaacaccaggcgaagccaatattgttaggaaggaagaactgctgtggcagctgctgcaaagacaaatcatatgcagtaatgcatcacgggctgagggagggtctgagtgtgcggcagggcagcgcgggcttatcagcgc

SEQ ID NO: 24942 - DNA, 326 bp, Homo sapiens; identical to SEQ ID NO: 7802
  chr11:121349234-121349560
  hypo

SEQ ID NO: 24943 - DNA, 916 bp, Homo sapiens
  chr11:1215132-1216048
  hypo
cgctccagccttgtcaagcgcccgctggatggagctctgtgcggacgctggccacgtgtgttctgatgacgtgagggtcttgtgcgccctgtgagatgagacggtggggggtcagggacagatgtgacctgttgggaggaaagccccagggccatggtgccaccacccgagccacccgtaaggctgcccctggggcctggcaggtgtgtgcagcggctggggtgacccccactacatcaccttcgacggcacctactacaccttcctggacaactgcacgtacgtgctggtgcagcagattgtgcccgtgtatggccacttccgcgtgctcgtcgacaactacttctgcggtgcggaggacgggctctcctgcccgaggtccatcatcctggagtaccaccaggaccgcgtggtgctgacccgcaagccagtccacggggtgatgacaaacgaggtgggggcgcgcccggtgtgccgcggagggggtgggggacgcggctttcccggcaagagcctgagcagcggctgaccgcccgcccgcctgccttctgacttcccgtcgaccacgccctgcgtccagatcatcttcaacaacaaggtggtcagccccggcttccggaaaaacggcatcgtggtctcgcgcatcggcgtcaagatgtacgcgaccatcccggagctgggagtccaggtcatgttctccggcctcatcttctccgtggaggtgcccttcagcaagtttgccaacaacaccgagggccagtgcggtgaggccacagggctcccgggcatcgtctggcattcgcgggggcgggggtgccgggcaggggcgaggccaccacgtgccgcgtgtgccggtgtctctgctttctggctgctctgctgagtgcaggccacaggcatgaggcttacgcctgcc

SEQ ID NO: 24944 - DNA, 981 bp, Homo sapiens
  chr11:128391758-128392739
  binary
cggcctctggccgagagcttgggtgggggcctcggccgtcgccactcacccggggaggggaaaagctccagatcgactttttccgtcttgatgatggtgagagtcggcttgagatcgacggccgccttcatggtgccaggagtgggggacgtacgggatggtagcaagtttgcagttactgttgtttttctttttaatgaggattagtaacagggggaaggggacgggggaaatccgactttcttcccaaaaatctcaaattcccgctgcctttctttcccccgcgcccggacggtgcgcgcccggcactccaggggaagttggcactttgcggcgaagtgagcgcgctcgggtcccagcctcgcccgcgccgcgcccgctcctcctgcccggccctcgcccgctccctcctctccgccggcggctgcctcgttcgctctcgatctcccggccgctctccctccctctcgccctcccgcgctctcccctcctctttagggcgtttctcgcggcgccgcgtctcggccgctgggtccgcgcgccctgggccgggcgatgtccgcttgggggagcgaggggcggggcgtcggggcagggcggggagccgggggcggggccgagcaccgcggccaatctccgcccgcggcccaaagcgaaaggaagggctggcgagcgcggggccgggccgcgaccgcggaggagcagtgcgtggagccccgggcctcggagcccaggcaggggcgggaagggccgggagcgggtgtgcaggctgggtgcacaggccgcctccaccgtttcgggaaagtccgtctgattctccacgcattcttgagggcttggtcacccgctctcgccccctcccagtagcagcatagttttccaagtgcgtgtacatcattcattcacaaagactgacacacaggacgtgaggcatgtggatgaaggcgagcgtgcaggcaggcgcaggggattcgtgagccc

SEQ ID NO: 24945 - DNA, 1308 bp, Homo sapiens; identical to SEQ ID NO: 22770
  chr11:128564211-128565519
  binary

SEQ ID NO: 24946 - DNA, 278 bp, Homo sapiens
  chr11:130785392-130785670
  hypo
cgctcatccttctccgaagctcctggaccaaccctttcatggctgcctccatttcttcctcaaaggctggctcctggctcacggaacggtaccaagataacacaaaatctcgaataatcatctggatggtgcggttgatctcccgttccagctgcctttctgcctcagggcatggaggacaggtggccaacgggatgaagcgttccagatgcagtcgacctgaagccactccagcgaggctggagcccagccatcctcccagcaccactagcaatgcc

SEQ ID NO: 24947 - DNA, 842 bp, Homo sapiens; identical to SEQ ID NO: 22771
  chr11:133938756-133939598
  binary

SEQ ID NO: 24948 - DNA, 824 bp, Homo sapiens
  chr11:1464192-1465016
  hypo
cgcctggggatgcagggaatgtgggggcgtctggcaccacagccctggaggcctccttgagggccctgcggtgcaccatcaccctggggggagggcctggcagcgcccggagccccgccgctgacctctgcccttgcccgcaggtccccccactacgcctgccccgaggtgatccgggtgagtcagcgccgccgcgtgcagctctgtggggcccagggtggcggggacctgaccctggtgggaccccagcctgccgcacccccaggtgctgctaggctgcctgtccccgggccgactccctctgagcccaggccctccaaggcccccgccctgccctgcgccccccaacagcccgggcactgctgtccacagggggagaagtatgacggccggaaggcggacgtgtggagctgcggcgtcatcctgttcgccttgctggtggtgagaccctggccccctcaaccctgccctggcctctccccaaacctgcccccccacgctgacccccacacccggccgcccgcagggggctctgcccttcgacgatgacaacttgcgacagctgctggagaaggtgaagcggggcgtgttccacatgccgcactttatcccgcccgactgccagagtctgctacggggcatgatcgaggtggacgccgcacgccgcctcacggtgcgtgccctcggagcggggcggccccagagcgtggcgggggggcgcgggggcgggcgtgtgcctgtgtgtgcacaggtgtgtgcccagacgtgtgggcacccaggtgtgtgggtcggtgcccaggtgtgtggacgtgtgcacaggtgtc

SEQ ID NO: 24949 - DNA, 368 bp, Homo sapiens
  chr11:232844-233212
  hypo
cgataggttttggccgtccccagaaacaggcacccgagcatcccctgtgagaaacaggcacccgagcctccctgggagaaacaggcacccgagcctccgtgggagaaaaagaatgtgtgcgactcacagagggctcacctctctcaagcccatcgatgttctgcgtgtagagccgcagaagcagccccttgtcatgaagcagccggagaaagtagtgagtgacgttgggcttgtagtttccagggtacagctccttggccaaagtgaaaaagggcttggggttgtgaaagaagaatgggagttcaaaaatggcctcggggtacgggagatcgtactgctggaggttgctgtacaggccactccccggc

SEQ ID NO: 24950 - DNA, 253 bp, Homo sapiens; identical to SEQ ID NO: 7811
  chr11:3145131-3145384
  hypo

SEQ ID NO: 24951 - DNA, 171 bp, Homo sapiens; identical to SEQ ID NO: 7812
  chr11:31808842-31809013
  hypo

SEQ ID NO: 24952 - DNA, 1463 bp, Homo sapiens; identical to SEQ ID NO: 23806
  chr11:31819792-31821255
  binary

SEQ ID NO: 24953 - DNA, 1443 bp, Homo sapiens; identical to SEQ ID NO: 23807
  chr11:31825604-31827047
  hyper

SEQ ID NO: 24954 - DNA, 89 bp, Homo sapiens
  chr11:33181186-33181275
  hypo
cgcgcgcctgtactcccagctacggaggaggctgaggtggcaggatcacagagcgcagggaggtcgaagctatggtgagctgtgatggc

SEQ ID NO: 24955 - DNA, 274 bp, Homo sapiens; identical to SEQ ID NO: 23808
  chr11:34535022-34535296
  hypo

SEQ ID NO: 24956 - DNA, 552 bp, Homo sapiens
  chr11:35547041-35547593
  hyper
cggacgctactcacagtacctcttggcaaggacgagatgagaaggagctgaagaaaagtgagccccaactgcgtccagcaacccagctccatccttgccgcggctggtgcccgagcgtctactggggagggagaggagggacccagggaggccgggggcaggcgggttttacagggacctccccgagccccagctgagcgggagctcgggtttcagctcgccaggctctcccatcctcatctgaggggaaccaccttcagccagagcgacgtcagcccaaacctctcctctctgctgccttaacccttgcggggccccgggaggtgtggccacgcctggagacccgcggacggcggctgcaaaggaagctgcgggggagggaggccagcctgggtacaggtggggtcccagtgttgggtgctgggaggaggggccataggaccctgggcgggagcagaggtacccagggctgcggggcgctcaggtgaggccgggagatcttcctacgggaggctgagacgggagctggctttgccctctctgactgcacgc

SEQ ID NO: 24957 - DNA, 181 bp, Homo sapiens
  chr11:3697413-3697594
  hypo
cgcagataggactgggtaaggctgcgcagttcgtccatggcatagtcctcaggcatgggaagccggccaatgtggggagccaagaggcgcaaagggactcgctgagggtctggtgttgagtcggaggttctatcaggaggatgatgcagactcagcaccacgcgcagcaggttggctacac

SEQ ID NO: 24958 - DNA, 162 bp, Homo sapiens; identical to SEQ ID NO: 7817
  chr11:455954-456116
  hypo

SEQ ID NO: 24959 - DNA, 151 bp, Homo sapiens; identical to SEQ ID NO: 7818
  chr11:46783074-46783225
  hypo

SEQ ID NO: 24960 - DNA, 632 bp, Homo sapiens
  chr11:46938441-46939073
  binary
cgctgtcccaacacgccaaagaggctacaaataaccttccaggagagagccggggaggggagagcgcagagcggagcggaacgtgggccggccaagctaccgctcttcggagagaaagagctcagtccgcgctagagaggacgcggaaaaaagcccctgaaaacccacaggtagtttaaataagagacatgaaaactctgttttggatttgggaggtaaaccaatctttaaaacgagtgcctagacatctccacgccctgccaggcaagttcggaaatctgcactgactttttccacacgagctgtcctacgtgaaagaaagaaccggtaaaagaccaggcagggtctccagacccctccattctgagccccagctcccttcatcggggctgcgaggcaaatggggagactcggaactcccgccacgatgaatagcgatgggtgaatagggctggggttcaaagatcaaagttctttgatctctgggcacaaactagggaaagctgctcaatcacggggtgcacccagggtcgttaagagcccgcggagaagcagattccatcggagccctagtcccacacaacagggggtacgggcaccaaggagtcctgctgcagccgtccagctccccc

SEQ ID NO: 24961 - DNA, 771 bp, Homo sapiens; identical to SEQ ID NO: 23810
  chr11:47208495-47209266
  hyper

SEQ ID NO: 24962 - DNA, 238 bp, Homo sapiens
  chr11:57235266-57235504
  hypo
cgcacgctgcggccaggcacctttgggtccaacctgctcaccctgtggctcttctccaacaacctctccaccatctacccgggcactttccgccacttgcaagccctggaggagctggacctcggtgacaaccggcacctgcgctcgctggagcccgacaccttccagggcctggagcggctgcagtcgctgcatttgtaccgctgccagctcagcagcctgcccggcaacatcttcc

SEQ ID NO: 24963 - DNA, 200 bp, Homo sapiens
  chr11:58668344-58668544
  hyper
cgagtccaagaacggaagctaccattggccttaatcttcacctcccgcttttcttccctgcttcttttctcctccctattccagtaggttagttctctggcgccatcagctggcagcacgcgggaatataccaaacgcggaaacgcgccttcgcctgccctgagtaactgcaaatccagggctgagtgaggtatttaagc

SEQ ID NO: 24964 - DNA, 614 bp, Homo sapiens; identical to SEQ ID NO: 23814
  chr11:60718609-60719223
  hyper

SEQ ID NO: 24965 - DNA, 459 bp, Homo sapiens
  chr11:61664527-61664986
  hypo
cggggagagggaggcctggctcatcccccagtaacccacagccctctgaatactaagggaggactcaaatagtcctccccacagcaagtaagtggtgatggcggaggtggggtggcttcaggatttgggtttaatcccaagcacgagggcgggcagggaaaggatttggtttcattccttcagatgcccaagccttggccagagccccagggtgcaggagtgagggcgcgtggccacccagcctgtaccaacaaagcctgcctttattaaatagagatcgcgttacattccatccaaagaaggaaatccggacgtggtgagggatgcgtccaggtgggagctccgaacgctggtcctgagtgggctctgatgggtgggagggcccaggtcctgcctgcccacccaggccccacatgccagggcgcgtgtctgcatggccacccacagctgaaaacaggc

SEQ ID NO: 24966 - DNA, 137 bp, Homo sapiens; identical to SEQ ID NO: 7821
  chr11:63325873-63326010
  hypo

SEQ ID NO: 24967 - DNA, 143 bp, Homo sapiens
  chr11:64054239-64054382
  hypo
cgagatactccccgcgccaaccgcctggggcccttgcccttctggcttctctactgctgccccgtctgcctgcagttcttcaccttgacgcttatgaacctctactttgcccaggtaaccaactgtggtcccgggtggggggc

SEQ ID NO: 24968 - DNA, 288 bp, Homo sapiens
  chr11:64478744-64479032
  hyper
cggacacacacacacaaccgctgagtggcccacagcttctagagggaccaggggagagaacgtcaggcctgaggcacacacgagctggaagaacagggacgaggggcggggagagacgcgcatgcgccgcccccagaccgatgggggagcccctccccacgcccagccagaccctaatggaagaggctcctcccagtgcttcctctcctcagcgccccctgccccccgacaccacagccccgccccgggccgctcagcccaggacccgcccgcacttcaccacttcac

SEQ ID NO: 24969 - DNA, 1460 bp, Homo sapiens
  chr11:64512349-64513809
  binary
cgcccccgcgccaggctgccccctcccccctccgcccctgcgcggagctccgcaccgccggctgcgccacccccaccgggggctccctctcgccccgcacgcggcggtccctgcggcagcttaacccctcccctgccgcgccgcccgggaggccagggccgcgggcggggggctgcgccactagctgccccgagggcgggcgaccggaggccccgccgcccgggacgcggaggggggaccgaaacgaagagcccctcccccaaccgcggacgccccagtgccccccgccctgcctgggtgtcgggcggaggaagccgggaggggcaggaagcggactgcggtggggaaggggcgccccgcccagcccccagctcgggttcctgttttcgagacaaaccgttcccatggggctaacccggcccgggaccgggcgtcttcctgcaggcagcgggtggcacaggcctagtggaggtcgggggcgtggggacagctggtccttgagatagtctgggggatgggctaggacaagatgggaatattttggggagagggacctgtggggagcgaggaatgaaatcgtggctatctggagacgcggccttgatgtctgggaatgggggcggggggcccagttcacacaggaggaacggggccccggaagcctggctccccacagggtcgaatggaaaggggcagccgcatgtggcggtgggttctccgcagctcggagactggagacctggatgcctggccaacagggaggaacttgggaggggcagccgcaggcggttggggtccccactagccgggcctaggagagcgggtaacggtttccgaccatttggcttcagacacactcactgtgaaaccaccgaccccaaacctcccttccgaggcgtgcccctcccagccttggggcgggggatccaggaccgcccccgcacctcagtcttggtaatgtaagacttagaaacaggacctttctgttcctcagtttccccataatgagggcctagactaggcggtctgcgagtgttccctgccgtaacactcccccgactttggatccagtgtagccacctgctaagagacccttaaacgccgcagtagggcggggctaagggcggagccaagaaggcgccgagcatcctctgcttcctccccctcctgggtcctgccctcgacagcgcggatcctccgtggtccgggaagcctcagcccaagtcccggctcccagccccggtgggccccacccaggcagacgccccgcccccggccagcgaggctggccgctgacctagtatggacacggcactgggaagagaggcgtggagggtgacgccaggaaaggggctggagaggcctaggccccgcccccacgggtcgccccctccacctcccatcaccgtcccgccgtgggacgcacctgccgagggtggaggataagggggtgactgcgc

SEQ ID NO: 24970 - DNA, 921 bp, Homo sapiens
  chr11:64875426-64876347
  hypo
cgcgccatccaggacgactgccaggtcatcacggcccgcctggcccagcagctgcggcagcgctttaggtgtggcccctctgccctgaccccagcgctcccgccagccccgagccccatctgtgcccggctcctgggccctcctggagctgtccccctgccctgtgtgtgctttgctttcctgctcctgccccatccaccggcagccccggccctgcccttcactacctctccctcgtgcagggagggcggctcaggcgccccggagcaggcagagtgcgtggagctgctgctggccctgggcgagcctgcggaggagctgtgcgaggagttcctggcgcacgcccgcggccggctggagaaggagctgagaaacctggaggccgagctggggccctcacctccggctcccgacgtgttagagttcaccgaccatggaggcagtggcttcgtgggcggcctctgccaggtggcggcggcctaccaggagctgtttgcggcccagggcccagcaggtgccgagaagctggcggccttcgcccggcagctgggcagccgctattttgcgctggtggagcggcggctggcgcaggagcagggtggtggtgacaactcactgctggtgcgggcgctggaccgcttccaccggcgcttgcgggctcccggggccctgctggccgctgccgggctcgcagacgctgccacggagatcgtggaacgagtggcccgcgagcgcctgggccaccacctgcagggtctccgggcggccttcctgggctgcctgacagacgtccgccaggcgctggcagcacctcgcgtggctgggaaggagggccctggcctggccgagttgctggccaatgtggccagctccatcctgagccacattaaggcctctctggcagcagtgcaccttttcacc

SEQ ID NO: 24971 - DNA, 471 bp, Homo sapiens
  chr11:65413830-65414301
  hypo
cgccacacaccacctacaggtgggcaccggagtggtcccaggtctcccgtgggcatggagtcctgccgcccctcactaacgcctccctccccgcagggtggccgtgagccgcacccaggacacccctgccttcgggccagctctgcctgctggcggaggccccttcgcagccaacgccgacttccgggccttcctgctggccaaagcgctgaatggtgagcaggcggccggccacgcgcgccagttccacgccatggccacgcgcacccgccagcagtacctgcaagacctggccaccaacgaggtgaccactacgtcgctggactcggcttcacgcttcggcctgccctccctgggtgggaggcgccgggcggcccctcggggcccaggcgccgagctgcaggcagcgggctcactggtgtggggagtgcgcgcggcgcccggggcgcgggtcgccgccggggctcaggc

SEQ ID NO: 24972 - DNA, 262 bp, Homo sapiens; identical to SEQ ID NO: 6782
  chr11:65582723-65582985
  binary

SEQ ID NO: 24973 - DNA, 1101 bp, Homo sapiens; identical to SEQ ID NO: 7830
  chr11:66079395-66080496
  binary

SEQ ID NO: 24974 - DNA, 233 bp, Homo sapiens
  chr11:66513554-66513787
  hypo
cggcgtgagccaccgtgcccggcccgatatgggaatatcgtaacagaggacgtgtgaaggaatagttagactctacacgtacctggaaaccattcttgttaactggtacaaatgaggatcttagttcccagatctccctgcctttaaaaagggggtaataattttccttgtgttgcctccctgtaaaagtgagaatctgtttgcatgaataataatgggagttggccgggcgc

SEQ ID NO: 24975 - DNA, 1816 bp, Homo sapiens
  chr11:66625105-66626921
  hypo
cgggccaggctcacagaagctggcttctgggactgtcctgggcccaagtgggcacctgcgccagccccacctgtgcctgggctgtggccccttcctacagggcgctcaccatggccccgccgctcctgctgctgctgctggccagtggagcggccgcctgcccgctgccctgcgtctgccagaacctgtccgagtcgctcagcaccctctgtgcccaccgaggcctgctgtttgtgccgcccaacgtggaccggcgcacagtggagctgcggctggctgacaacttcatccaggccctggggccccctgacttccgcaacatgacgggactggtggacctgacactgtctcgcaatgccatcacccgcattggggcccgcgcctttggggacctcgagagcctgcgttccctccaccttgacggcaacaggctggtggagctgggcaccgggagcctccggggccccgtcaatctgcagcacctcatcctcagcggcaaccagctgggccgcatcgcgccgggagccttcgacgacttcctagagagcctggaggacctggacctgtcctacaacaacctccggcaggtgccctgggccggcatcggcgccatgcctgccctgcacaccctcaacctggaccataaccttattgacgcactgcccccaggcgccttcgcccagctcggtcagctctcccgcctggacctcacctccaaccgcctggccacgctggctccggacccgcttttctctcgtgggcgtgatgcagaggcctctcccgcccccctggtgctgagctttagcgggaaccccctgcactgcaactgtgagctgctgtggctgcggcggctggcgcggccggacgacctggaaacgtgcgcctccccgcccggcctggccggccgctacttctgggcagtgcccgagggcgagttctcctgtgagccgcccctcattgcccgccacacgcagcgcctctgggtgctggaaggccagcgggccacgctgcggtgccgggccctgggtgaccccgcgcctaccatgcactgggtcggtcctgacgaccggttggttggcaactcctcccgagcccgggctttccccaacgggaccttagagattggggtgaccggcgctggggacgctgggggctacacctgcatcgccaccaaccctgctggtgaggccacagcccgagtagaactgcgggtgctggccttgccccatggtgggaacagcagtgccgaggggggccgccccgggccctcggacatcgccgcctccgctcgcactgctgccgagggtgaggggacgctggagtctgagccagccgtgcaggtgacggaggtgaccgccacctcagggctggtgagctggggtcccgggcggccagccgacccagtgtggatgttccaaatccagtacaacagcagcgaagatgagaccctcatctaccggtgaggatgcgtgccccacacccggctgcactcccggcgcccttcctccgccctctgctccccacaaggctttgcttccacccctcctctctctggggctgacaccccctccccgaccatggctgctggactcttggaggagcagtggcctggcctggcctggctgcctgagggggctggagctcaaggggcggcagaaggaccccaccccgagatgtcccaggtgtcactgagctgtgcaggcctccccggcagcaggtggcggttgggtctgtctgaagcacatggcccgcgcccgcgtgttatttctgcctctgctggtgccatccccccaccccattcccctcgcttgcctgc

SEQ ID NO: 24976 - DNA, 515 bp, Homo sapiens
  chr11:67232076-67232591
  hyper
cgccgcgatcacttctcgaagtagggcaggtagaagaactggaagccccggtggcccttgaccgcgcagtagatgaagatcacgtgatagactgcggggcggggcctgtcagcgcagaagccccgcccctccccgcaacaccgcccccagtgccgccccacagcccccgccccttccgccccggtgcccgctcgcacctccaggcaccaacaacaggaagcccggcacgaagaagatggcgctggagacacctgcgggagggaccagagcccggtcagggcgagggggcggaggcttcgaggccttccgggctgccgctgactgcccgggcaagcctcactcccagctgaaaaggagccgtgtactgccgggaggtgggagggcttgccgtggacccgtggacacaagacaggggtgtcctctgcctgtgggggcgggagggtcgctcacctggagagggggtcgcctccagtcccacgccgaccaggatcagcactgcacacagacggagccgc

SEQ ID NO: 24977 - DNA, 525 bp, Homo sapiens
  chr11:67350943-67351468
  hyper
cgggatcgcagcggtcttagggaatttccccccgcgatgtcccggcgcgccagttcgctgcgcacacttcgctgcggtcctcttcctgctgtctgtttactccctaggccccgctggggacctgggaaagagggaaaggcttccccggccagctgcgcggcgactccggggactccagggcgcccctctgcggccgacgcccggggtgcagcggccgccggggctggggccggcgggagtccgcgggaccctccagaagagcggccggcgccgtgactcagcactggggcggagcggggcgggaccacccttataaggctcggaggccgcgaggccttcgctggagtttcgccgccgcagtcttcgccaccagtgagtacgcgcggcccgcgtccccggggatggggctcagagctcccagcatggggccaacccgcagcatcaggcccgggctcccggcagggctcctcgcccacctcgagacccgggacgggggcctaggggacccaggacgtccccagtgcc

SEQ ID NO: 24978 - DNA, 680 bp, Homo sapiens
  chr11:67462547-67463227
  hypo
cgctttgtcctacctggccactttcctcacgggaatttaggcccctcttagcattggcgtgccggtataaaccccaaggcaagatccgccttaagccgtatgaggtagccacggaaccgcaggcaagactcactcgctcggtccagcagtaggacttatcatgatttacacaagcaacaccagctgcagtgaggcttgtgactattcacacacacttttaacctccagaatatcccgaccaccaagcaagtactttgtcgcacccttgcgacgtttctttactttgctctgtgaacagagtttatctggtccccgaggcagtgcaatgcaagcctattcgccgttttccacgttgctgagggtccgggtttattcatcacaacaggtaagtccggattcccagtccctgaggccaccgcagtaaggcagtggggcgcctccccttggtgggggggcgggaatcagagaccccgacccgaaggagactgggtgatcccagacgagcccccaagactgttagaaataaatccttattccccgatgtcacaaagaagaatcagcagacgaaaagcttcctcagcaaggtgatttttaccttctgcagaaagagtgctgcccgtccgcaatcctgccacgatcgcatacaaaataaaaaaggcactagaatatttatcccttac

SEQ ID NO: 24979 - DNA, 274 bp, Homo sapiens
  chr11:68564274-68564548
  hypo
cgccgccccaccgtcctcgtcagacagcagcccgggcgggtggactcaccatggcataatagttgctgttcaccatgagcggccctcgtcctcggaggtagatgtactcctcccaccagtcgctcacctagtgggcgcaaacaccagacaaacccgcaggctcagcaggggccaggcaggctccctggcagcagcccagagccgcggggaagggcaggcagtgcttttggcagacatttcggcgtctaacaggggccattccagaacagggaac

SEQ ID NO: 24980 - DNA, 751 bp, Homo sapiens
  chr11:69516911-69517662
  hyper
cggctctgggtgggagtcagcgtccagcgtgccgaccaccccctttctctgcagtcctctcacgcaggactccgccataaaacctgaaacaggcgctccgagtacacggagcacggcagaggcaccgagcaattttgagactctaaaatgctttgtcccgctgttcacaaaggagctggttgggccggaggcggccccgcctctgcatcctttctggggtgggggccccgggcaggcgcggccacccccgccctggcccctgctccgccagggagtccggggctgcgtgtgaggcctgcgcgggccgagacctcacacagcctcctctgcgcgcggggccgcgggaggggcgcgggttcgttcctttgaactcccagcctttgttcccggccaccagagccccagcgctcgtacacttccggccccgggacctctgcggttacctgggccttccctgccagcccccaccccctgcccccaccagaaagcgtttacaggacaggtgaggcccgcaggaggaaaagcactcccctggcgcaacatgactccagcgcatctgcgtctaagccacaccgtgctcctggtagattaaaaattaattctaaaaaaaaaatctctcctatcccaaatgcactgttttctgccttgcttgacaattgatttgtttttaaaggaaagttatgggtagatcctcttttttctttcccattctttttttcttcttttatactggagggagggaaacggaggc

SEQ ID NO: 24981 - DNA, 227 bp, Homo sapiens
  chr11:70016958-70017185
  hypo
cggggtgctgactagcactgggctctctctgcagtcatccagtttggcttcgtcaccctgtttgtcgcctccttccccctggccccactgtttgcgctgctgaacaacatcatcgagatccgcctggacgccaaaaagtttgtcactgagctccgaaggccggtagctgtcagagccaaagacatcggtgagtgaccccacgggccggcagaaccggttccgagtgc

SEQ ID NO: 24982 - DNA, 931 bp, Homo sapiens; identical to SEQ ID NO: 23822
  chr11:71192127-71193058
  hypo

SEQ ID NO: 24983 - DNA, 293 bp, Homo sapiens
  chr11:72432852-72433145
  hyper
cgtgcccaacagcaacaacagcaacggcggcacctcgcttaccctcagacgcctgctgggtcttggggctgaggactcccacagctccggccaggcgggctgcgtatgcccaagaatgtcgtgtacctgcccgtgcaagcctgggtcccgcctgggctggtctcgcaaacagcctggcccctggcccctgggtgggtctgaggctgcgttctcttggaggtttttgagcccaggtatggctttgcacctgtgatttatgtctttaagtgtttgtgaatcacttctctacgtgc

SEQ ID NO: 24984 - DNA, 367 bp, Homo sapiens
  chr11:74178245-74178612
  hyper
cgatcactgcgctcgggaggatcggggaggatccgggaggactagcttggtatttgcagcgcccacccctcccccactccccctcggttccacagtctcacggagagcgcgccgtggcccttggaagggaggcgggaagacccctcatttccaccccaggccgcagctcagccttcccagctgggtgggtgccttacctgcctctcagcaaggctccggggcgcccgtttgctcgctggacacggcgccctctgaccgagggtggcccaagcgctgcgaccctgtgcattccaccagccccgttccactccgcgggtgcccagcaccgcccagcgcgctctctggctctgggctcccacccgcgctc

SEQ ID NO: 24985 - DNA, 211 bp, Homo sapiens; identical to SEQ ID NO: 7846
  chr11:75167782-75167993
  hypo

SEQ ID NO: 24986 - DNA, 373 bp, Homo sapiens
  chr11:75852075-75852448
  hypo
cggaggccacgcgaatgtgcaccctagccaagaacaaggagaagccctctccgggcaccgggccacagtcaatggcactctcctacccagcgagcaggccgggtccgccagtgtccagcttccaggcgagttccacccagtctcagaagctgagctctgctgtactgtggagcaagcagaagaaatcatcgggctggaagccacaggtttcgcctcaggtgatcagctagaagcatttaactgcatcccagtggacagtgctgtggcagtagagtgtgacgaacaagttctgggagaatttgaagagttctcccgaaggatctatgcactgaatgaaaacgtatccagcttccgccggccgcgcaggagttcc

SEQ ID NO: 24987 - DNA, 461 bp, Homo sapiens
  chr11:76032911-76033372
  hyper
cgccccacaaggcccacgcttgcgccctcgggctgcgcagggcgagggtttgggggcgcggtactgacgggtgtccaggcctctcctcgaagggttccgcgcgcagaaaggtgggccggggccagaagacgcgctggaaaggcgttttctgccccctccgggcctcgggaatatttgtgggctgccggcggggcaggcggggtgggggaggctgcccggcgggcgggaagccccgcgcactcgggtcccctgcggtccccggcgggggtcggcgcgtgcggaaagcggcccgagcccccaacctcggcccgtccgcaaccgaagaggaggcgaccgcagcctggaaaagaagagcccccagctgtttccttccacccgggcgggcgggacggagaagggagggagcctgggagagacgcaggtgtggcgctcgcctgtgctggcggggtggcagccggggc

SEQ ID NO: 24988 - DNA, 713 bp, Homo sapiens; identical to SEQ ID NO: 22776
  chr11:8615303-8616016
  binary

SEQ ID NO: 24989 - DNA, 555 bp, Homo sapiens
  chr11:89224244-89224799
  hyper
cgaattaagacaaaacttccacttccagcttcccacccgtgcacgctcagagaatgaatcaaaatcactgcaggacagagagaacgcaaggagagcctagcccgccatcctaccaggcagaggtgtttaaccccttcgttggcgagccagctcctccaggacacagccatgccgccggccccgccgcgctgcgctctgtgcccgccggaccgagaaggagcgggcggcggccggggcagcggttacagttgtgcggcctgccgggccgctgagcgaggaccgagggtcaaagactgagtggaagcccgaaggcccggcgccgagccagcccgggcggggtctgctacccagagccgggttttccgggcgccctgactcccacccgcaccgggtcagctctgcccactcagctgcccagacgcccagcgctctgagcgcgcggcccaggctgcaccagtctgctccgccgcgccggcccctttgtctaggggcgagcctgttgttgtggctgctgctgttcaggatgtcccgggtgggaacttggaggcgtccccc

SEQ ID NO: 24990 - DNA, 276 bp, Homo sapiens; identical to SEQ ID NO: 23831
  chr11:9405271-9405547
  hypo

SEQ ID NO: 24991 - DNA, 311 bp, Homo sapiens; identical to SEQ ID NO: 6799
  chr11:9554670-9554981
  hypo

SEQ ID NO: 24992 - DNA, 886 bp, Homo sapiens; identical to SEQ ID NO: 7853
  chr11:96122370-96123256
  binary

SEQ ID NO: 24993 - DNA, 807 bp, Homo sapiens; identical to SEQ ID NO: 23835
  chr12:104609351-104610158
  hyper

SEQ ID NO: 24994 - DNA, 838 bp, Homo sapiens
  chr12:104851980-104852818
  hyper
cggctggtgccccggggcctgctccagcccccagccctgagctggaaactccgagctcctgggtcacgccttgaccactgcagttttggaggaaactttggccaggtcctgggctgaccgtccgtttgcatcccccacttctgggatccgagcaacgggaatcccccgggcggcgtgggaatgaaccccattcctccggtcccttgtggctcaggcaaagttccacgtccgaaatctggactgggggagggacgaggctcgtcgcttcctaggggtgcgagggaaagtttgggttctggagagggaggggcgccctcgagcgcggcggccgggggtgagcagctcggctgcgaagcccaacaggtagaacgttccgagaagccttccgggtaacgcgggtctccccgccaagccgtggctcccctgctcccttttaccctcccttagcagccccctgccgggccacgttggctcagaaatccattttctacgcctccgagttgcctttctcagcgtagtcacagcaataatttgcttttctaattgcaaggaggagggaggtggaaacgcatttccttccagggaagtggggttggtgtttttcatttttgcctcccgccttctcctttcactgtgtatctaacactttaaacagacgcagtcccgaattcatcaagcctgcgtttgggtcgatggcagaggaataaagctgttctttccatcaaacaggcagggctgcaggctgcagattccttgacagcgcagggacagacggcccctttgccccactcggtctggagcagttgttaaggcagccacactgccaaggatatggtcc

SEQ ID NO: 24995 - DNA, 674 bp, Homo sapiens; identical to SEQ ID NO: 23459
  chr12:110352780-110353454
  hypo

SEQ ID NO: 24996 - DNA, 380 bp, Homo sapiens; identical to SEQ ID NO: 7855
  chr12:111402659-111403039
  hypo

SEQ ID NO: 24997 - DNA, 499 bp, Homo sapiens
  chr12:111844290-111844789
  binary
cgtgttagggagagcgttggggtaactgaggccgtgggatgggggagagggcatcgctgacgcccccagcccaccctacggtagcctcgccggttgggggcggccctcccctcaacttgtgcctggggaggagcggtcaggggtcacccattgctaccctgaaagtgaaagtagtcaaactgaggctgtgagcacagatgagcccttgggtgtgggggcagcgggggaggatgcgccggcccctccccactccccattccgggccatgtggctaagagggtagcgccctgattcaggaagcccctctccccagttcctgcactgccgaggtcgaccgggccaggcccccgcatgctgctgaattgggcggttcaccagggctaggcgtcccagagacaggtttctggtattgatcctctcacacctcttgcctggggttccctgggaatcccccgaccaaaaaacgtctggagtgggtgttggtcttctagatccgcac

SEQ ID NO: 24998 - DNA, 799 bp, Homo sapiens; identical to SEQ ID NO: 23840
  chr12:112204379-112205178
  hyper

SEQ ID NO: 24999 - DNA, 321 bp, Homo sapiens
  chr12:114290596-114290917
  hypo
cgcacagctgcaaagaggccgcttgatgtcacaggccacactaaccagcgtgcagcacgttcctcctctgcactcagtttaaacaaacgtgttgaacgcacgccactgacaatctaatagcgatggtttactgtgcacacaacacggctcagcactgtgctgggtgcgctgggcacccggcgaggaggaaggctgtcccggccttaatgagctttgtccggctcgctcatcattggtcccttccactacaggtcctgtttggctagaatctgccaggtgaagacagtaggctcacagaacactcctcgagaggcccagtgc

SEQ ID NO: 25000 - DNA, 146 bp, Homo sapiens; identical to SEQ ID NO: 7861
  chr12:114334084-114334230
  hypo

SEQ ID NO: 25001 - DNA, 169 bp, Homo sapiens; identical to SEQ ID NO: 7862
  chr12:116394813-116394982
  hypo

SEQ ID NO: 25002 - DNA, 230 bp, Homo sapiens; identical to SEQ ID NO: 7863
  chr12:116443638-116443868
  hypo

SEQ ID NO: 25003 - DNA, 528 bp, Homo sapiens
  chr12:116946078-116946606
  hyper
cgccaagctctgcaagctctcagcggctccagcgttttcaaggagcggggtcaaggtcaaagggcccctcccaggctgcccgggcggggctgtagtgggatgctggtccccaggctgcgcctcggttctccagggcgaaacgcaggggcggggccgtgcaggggctgggcgtcgccgccggagagggtcccagcgcgcccaggcctcccgcaggcgggacgcggcgtcggggggctgctgcgctgctcggccccagcgggcccgccgcgccgccgcggctctggctgcctcctgcatgccaattaggccctaatttgatttctgttctatctgtgcgaaccccattaaaacccaattccgcttattaccaacagctttcttgcaacgcgacgcctctccctcccagggccgctgctcaggcgcgccgaggagccaggctccgcgcaccaggctggcggggacaccttccccgttccccctgccctgggacgtgcagggtccccgctgattcccgccccggggctcccc

SEQ ID NO: 25004 - DNA, 218 bp, Homo sapiens; identical to SEQ ID NO: 7865
  chr12:117466159-117466377
  hypo

SEQ ID NO: 25005 - DNA, 182 bp, Homo sapiens
  chr12:117474002-117474184
  hypo
cgctgctgtctggtgtctactaggctctgccaggtgcttacaatgacaatgacagcacagagtcaagagcctctcagccgcagcttggcacctacccaggaggtcgtgcgcattaaccaaaagctgagcctccccaggccgcactcactttcccggggccattcgcccgctccctgtgtagc

SEQ ID NO: 25006 - DNA, 108 bp, Homo sapiens
  chr12:120574331-120574439
  hypo
cgagcagagccgccttcacattccagctgaacctgtcccccaggatgcggatcagagggccagtgatgctgaccacggagggcctcagggcgtcagccgaggtcaggc

SEQ ID NO: 25007 - DNA, 200 bp, Homo sapiens; identical to SEQ ID NO: 7867
  chr12:121205162-121205362
  hypo

SEQ ID NO: 25008 - DNA, 81 bp, Homo sapiens; identical to SEQ ID NO: 6808
  chr12:121328606-121328687
  hypo

SEQ ID NO: 25009 - DNA, 56 bp, Homo sapiens; identical to SEQ ID NO: 23844
  chr12:121667875-121667931
  hypo

SEQ ID NO: 25010 - DNA, 350 bp, Homo sapiens
  chr12:122192684-122193034
  hypo
cgtgaattttggaaggatgctattcaacccagtacaccttctataggctaaaaacggggcagaggagggggattggacgggccgttcatctctgtgccggtgcccccgggaagcctgccctgctgtttaaccttaggcaaatgacgaacctctcccagcctcagtttcttgacagatacagtgagcgtgacaggagctacttggcagggcagcttggagggcaggagaagctgtgtctggagactggttagactggtgcctgtttaaatattagcaccggttagcatcaccgttgttttgggctaagactgggcatacgggaaaaaggctcacagcttcatagctagtgc

SEQ ID NO: 25011 - DNA, 67 bp, Homo sapiens; identical to SEQ ID NO: 7872
  chr12:122474899-122474966
  hypo

SEQ ID NO: 25012 - DNA, 286 bp, Homo sapiens; identical to SEQ ID NO: 7873
  chr12:124843509-124843795
  hypo

SEQ ID NO: 25013 - DNA, 183 bp, Homo sapiens
  chr12:124989213-124989396
  hypo
cgcagtctgtccatcaatggactacgattcagccacgcaaaggtaagcgctgactcagccacaacgcaggtgagccctgaagacatggcacaaaaggcaaagaagccgctcagaaaggccacgcactgcatgattccattaacttcacaggaggggcagattcccaggacagaacaaaggccc

SEQ ID NO: 25014 - DNA, 425 bp, Homo sapiens; identical to SEQ ID NO: 7875
  chr12:12618418-12618843
  hypo

SEQ ID NO: 25015 - DNA, 186 bp, Homo sapiens
  chr12:12848356-12848542
  binary
cggaaggaggcagacacttcaggtgttgggtggtacctttaagatgttgcggggccaaatccaatgccggtgcaggtgtcccatatatcctgagagacaaaaagaggtcagattggtcagatccctcgagacagttcccaaattcctgacttctgttaccgcgactgttcttcgcaattccacctc

SEQ ID NO: 25016 - DNA, 165 bp, Homo sapiens
  chr12:13215231-13215396
  hypo
cgtgtgctcacgtggagcggaataaataacatccttcccaggtttagaggttggagtttggtcgcggggtgcttctgagtgaaaaaaactgggatttgagttaactgtagaactgaagccatctggaaaacttcctatgatgctgtggtgcttacttatgtgacc

SEQ ID NO: 25017 - DNA, 234 bp, Homo sapiens; identical to SEQ ID NO: 7877
  chr12:132249441-132249675
  hypo

SEQ ID NO: 25018 - DNA, 200 bp, Homo sapiens; identical to SEQ ID NO: 7878
  chr12:132250682-132250882
  hypo

SEQ ID NO: 25019 - DNA, 236 bp, Homo sapiens
  chr12:132377956-132378192
  hypo
cgcgcaacgtgtacggtgaacagcactaacttttccccggtcctctctcccagagcaatcgctgttggctgtgtcttctgtgagtgagcccccgggctcttttggctgccggcggtgtgactttggacacattctccaacttttctccgccttgatttcctcatctgtaaaacagggacataacagcaagtgcctcgtggaatcattgaatggatgcactaatcgctggaaagtgc

SEQ ID NO: 25020 - DNA, 480 bp, Homo sapiens
  chr12:132592879-132593359
  hypo
cggccacagatcgaggtttcaactggacttcaaacaaagcttcagtgcctagggccagatttgttctttccagccctgtgaggcctgaaattgcatcagcgagccaagtgtccccgtgcccctctgttagtggctgaggccgccagctgcatgggatgtgcaggcggtgatcaactttgcaaagcttaaacattattttcccttcttcctcccttccctttgaatattccctctcaggtaaaggttgtggccagaaagcacgggcagcctgggactcctgttgccatagcaacccagctaccgccgaggacttctgcggcttttccagcccagcagcagccgctccaggtactttctgatggctccacagtgcagctccccagactttcctcactcggatttgaggactcgatgtgctgaggcaggacccagaggggtcccaagagcctgtcctcttttgttcaaaatacatcttgaaac

SEQ ID NO: 25021 - DNA, 494 bp, Homo sapiens
  chr12:133199822-133200316
  hypo
cgggcatcggcctcaggtcaccccacggcctgcacatgctgtgtggctcacaaatatccagctcatttttggagaaactggctcttctggttgagccgctgcttgggaaccagggccagagcttcccgtttctgacccctccaccactactcaaatgcccgcagctagcctcacagtgaacccaggctgactggcgcccacggctgcaccgggcgacccctggtcctgctaggtggccttcctgggggacgagcggctgtcccctggccccatcactcctcattcctgagggttctccagattcgcttccaggaatgaagcctagtcagccagcctccctcctcccctgcttgccctaatttgatttgatctccactctggaggcctcagcactcctccatctgagcaggcatcaggtttctccaggcaggcggccccagcagcatccaggggccaaacacgtgcccagtggtacccagtccccgatctgaggc

SEQ ID NO: 25022 - DNA, 801 bp, Homo sapiens
  chr12:22093660-22094461
  hyper
cgctgcttcaaacccctgccggtgcacttgagctaccttcaaaacaccgacttcctacactgtcttaagatgtaaatttcaaacccggacgcagaactcctaaaaaaaagtaaagagtaacaaaaattaagcagatagaaaactacttcttgaacatacaagaattgtctacaagaaaggcggtaataataactcctaataataataactcctttcactgtttccagttgatttgagtaggagacggcagttttgaagtaaaactggaaacctgatccccaccccttcacttctcgagccgggcctcgtcccttaattctagaaatagcgatcgcgaaagctaagtgccgagaagtgcgagagagtgcgagggcgtttttggatagcagaaatgttagctcaaaatcgacaacttacagttattcctaaaaatgtttaaatggcattcatgtaaaagacacggattcacttactccgatgacagttttcctcccctaggcgaagcacgcagtgcgccggaacggattatttttagggtggtgggagaccagctgctgcctcctatcgagtttctaaattgcacagactgctctgggccggggcagacaccgcggctgagaagcaggaaactgggcagaagccccgcgcgccgcgcctggggccggagaccttccccatccctgctctgctcagctttgacttggggcgggcgcgacgccgcgattttacaaacccaagtaataggcgtccccttaaacttcattagacactgaaacttggaatatgattccatgattctcc

SEQ ID NO: 25023 - DNA, 151 bp, Homo sapiens; identical to SEQ ID NO: 7883
  chr12:287260-287411
  hypo

SEQ ID NO: 25024 - DNA, 116 bp, Homo sapiens
  chr12:2921013-2921129
  hypo
cggaatccaggcaaccttcacttccagcctgaagactctcctacgaactatgatagtaaatgatggagaggccctagggtttgggatcaaacaattctggtttgagcacgcacccc

SEQ ID NO: 25025 - DNA, 895 bp, Homo sapiens
  chr12:30948583-30949478
  hyper
cgacgcaggggacgcccacttgtctgacgcaggggacgtggctgaagtcagtcgggccgcccgcttgctgcacggcagccgtgggactggcacaggctcctcggcagcattatgggcagctggtagagcggccacttctgagagccggatgggccttccgaggtcgggccgtgccccgctgggcagcgcagagggggtgtgtagggcacgcgacttggagccaggtccagacccatcctggctcctctcagggctccttcccctgcccccattccaccccagccctgctggctgtcccgcaggacccagcgccgcggtagccttctctgaactgcggctcaggcggaggtgtcactcctgcctccagcccaggagggcaggtcaggttatgcaacgcgtgccgcgcgatctccccccacctccaacccccttttctcccgggtccacaccgcagttcccaccgctccgggtgtcctccccagtgcgccgcgatttttgtgtccaagccccagagtccctctgagaccaacccccagccagcacagacttcctgccttcccagctcgggtgagtagccctgaaacgcccgcccccgccgccccgcggccgcagcatcctctcgatggccgcgcctccgggacgacgtggtcccctcgagtagtacaggagctgcaagagaggcgcgccggggccagcaagctctagaacagcaggagcggccccagttgggaccccgggacgacgagtggccggcaacgcggcgcccgcatggcccaagcagtgtccgggaggggtcggggccccggactaggggcgcagcgaggaccgcccggaggctttcccttgggcagctaagtccgagtcagctctactcggatttccagcttccagcccc

SEQ ID NO: 25026 - DNA, 74 bp, Homo sapiens; identical to SEQ ID NO: 7887
  chr12:3901132-3901206
  hypo

SEQ ID NO: 25027 - DNA, 235 bp, Homo sapiens; identical to SEQ ID NO: 6834
  chr12:417402-417637
  hypo

SEQ ID NO: 25028 - DNA, 1877 bp, Homo sapiens; identical to SEQ ID NO: 23865
  chr12:4377809-4379686
  binary

SEQ ID NO: 25029 - DNA, 1982 bp, Homo sapiens
  chr12:4379716-4381698
  binary
cgttcgctaaagtttatcaccagtcctacatgggatatatatatatgtatttttttttccgtgaagggtgaaaaggagataaggaagaaccaacaatctaccccctcccgccgccccccacccccgcgccacggtgatcagtttggacttcaaagccagagcacaggctcttgcgctttttcttgaaaccgaagtctacactgaaagaaagtgtgcacttttgcctagaaggcaacatgcgttttcccgcgtgctaggtggagtgcattttaacaagacattagggttttaacacatggctggagtggcgaccaaaagggaaaactcagtttccagtccaagcctcctagagacattcctgccaacctccgcaccctctcacgccccaccccacgtgtgagagtctgcaaaaccaccggggattggattcgatggcgagcttcacgctcgggaacagtcagtaatcggaaggggaagtggacaggggaacttcaagaggcgagcctgccacgcgggaagcgcccgaacttgcgggtctccatgaatgcagagggcgccgggaagggggggcatccggccgcgaccctctctgcccctcccattcgctgcccccctccccgctggaatttctctgtaaagcaagacggagtagggggagggggagagggaaggggcgagagggccctcggctcactcccgagacgtgaggactcgccacccaggcattctcctcggggtgggctgggccccgggacgaccacccgcttcttcctcgcccccgctgcccccacttcgggagacccagagctctggatgcctttccccggagaagggggggtgtgcggagtcggggtggaagagaccttgctcgcagagctatatcaagtgatgtccagaggctgggagccccggcggcctctgtcccttgcctgtcgggttagatttatactttaaaaatacctcccgccctccctccttctctcgcctctccccgctgcaactttctttgatccgctcaaaggtggcttaggtgaaattggagtaattcccttatgggggtcttaaaatgtaagtgaatgtccttatccggggtgactcaaaagcttaagtcgggaagcccaacgtgactaaaaccaataggtgattgttcggggccgactgtgtgcgggtgtacacggtattcggcccgggtgtcatccgcggcgctggactgtttcattttgagtttgcaacttgggtttttcagcgagctttttttcttcctgaaagctaatggcttccacagcaattagacattttcctcgcccgccccttccctcccctttctttacatataggagatgggatactcattcccgctgctattgataaggtcggaggcggccgggcctctccccagctttcgcccgccccagcgcccgctctccctccgccctcccttggcttccttttgatgtagtggggaacgcgtcctactaaaaaaaaaaaaaaaaaaaaaaaaaaaaagtaatctgcccggtaacaatcagcgcgcagtagcaggagccccagagctattggctatgcaaatagagggaggggagacggcgccccaaactcttcctcacccttttaaagcgatatcccctcctttcccccccaccaccccttccgccccaccctcgtttaaagaggctggctccggggcctgagttaatcgcttgcacctctagtttattcgctcccctcctccgccttgcagggaacctagtgtacggctcacccagcccgcgccccaccccgccttgctggctctccgcgcccctgcccgggccccctctctcggtgagggaggcactcagtcggcctcggtgtgcccagagagctcgagccacgccatgcccgctgcacgtgccagcttggccagcacatcagggcgctggtctctccccttcctcctggagtgaaatacaccaaagggcgcggtgggggtggggggtgac

SEQ ID NO: 25030 - DNA, 1343 bp, Homo sapiens
  chr12:4383269-4384612
  hyper
cgagacgaccgcgtcctgcagaacctgctcaccatcgaggagcgctaccttccgcagtgctcctacttcaagtgcgtgcagaaggacatccaaccctacatgcgcagaatggtggccacctggatgctggaggtaggtcggggggtggcgctcgccaggagccaggacccctccggatgctcgggtccccggccggagccctaaacctgggagagggcaatccccgcgccggcctcccggctcctgtgcgggagtttaccgcgcgccttctggcgagacgcgtggctttatttctgttcctctccagataaactggggaggcagaggggggaggaaaatctgggagaagcgaggctgtcctgggcgggggtaggggagcatcccgcgcgcgtgttcctgcatgtggctgcctcttcttcccacccccctcgcgacctgtcttttgcgaagccgccgcggctgcttgcgctgcggccaggaagagagtcggggcctgaaatcgggaccccgagtagaaaggcaaccccccccaaaaggccagagcaaattcgtcttggcctcaggtccccgcctgtggtcgcgactccgcgctggcacttcaccggggaggtggagggaggagggagaaggagagaaacggggaattcgggagccccggaagtcccattgaagaaacgcgtgtttcaggggaacccaaaagaaccgcttcttgcccctcactccaagtctttgcccagcgagccgtgtgcccacgtatgcacagctctggacctgccgtggtttcgccatgttgctttgcaaactccctttggaaaggctgggaaacgtcgcccgcttaccctcgcaccccattatcccggccaccccacttctaatcgtgccctctcccccaccccccacctcacgaagattacttacagtttggttttccagcttcctcggtgcggagatttgggtggggtaggaagggggggagggggtgtgtgtaggggggataccgggtcacccctgaaggagaggtgggagccccccgtgcctctttccagggctctctgctcccgtctttcccctcgctcgtcaccgcgttccctagtttctgtccttgtgggccgcagccggacactcccgccgcggcgctcaccccttcaagtttcctcccgggatccaaagccccaggggtcggaatacagacctttctggcacccgaaacctctgtttcgggaagcctggctcttctttggggttttcacgccaaaagggcttttctaggatatttcctcgatttttaattattttttgaaaccatccccccctgctccgactccagctgccgaggctgcggc

SEQ ID NO: 25031 - DNA, 1049 bp, Homo sapiens
  chr12:47628738-47629787
  hypo
cgctccgcccagaggtgagtccctcccagcccttctctccttctgtcctagccatccgcagagccatcctgtgcaaaggaaggagctaggctgtgcgccctgggcgtcatgatccttctgcgggcctccgaagtgcggcagctgcttcacaataagttcgtggtcatcctgggggactctgtgcatagggcagtatacaaggacctggtgcttctgctgcagaaggaccgcctgctcactcccgggcagcttagagcaaggggggagctgaacttcgaacaagatgagctggtggacggaggccagcggggccacatgcacaacggccttaactaccgtgaggtccgcgagttccgctccgaccaccatctggtacgtttttacttcctcacccgcgtgtactccgattacctccagaccatcttgaaagagctgcagtcgggcgagcacgcccccgacctggtcatcatgaattcctgcctctgggacatctccaggtatggtccgaactcctggagaagctacctggagaacctggagaacctgttccagtgcctgggccaggtgctgcccgagtcttgcctcctggtgtggaacacggccatgcctgtgggcgaggaagtcaccgggggttttcttccgcccaagctccggcggcagaaggccaccttcctgaaaaacgaagtggtcaaagccaacttccacagcgccaccgaggcacgtaaacataacttcgatgtactggacttgcatttccacttccgccacgcgagggagaacctgcactgggacggggtgcactggaatggacgtgtgcaccgctgcctctcccagctgctgctggcccacgtggccgacgcctggggtgtggagctgccccaccgccaccccgtgggcgagtggatcaagaagaaaaaacctggcccgagagtcgaagggccgccccaggccaacagaaatcacccggccttacctctgtccccacccttaccttcccccacataccgccccctgcttgggttcccaccccagcgcttgccgctgctccc

SEQ ID NO: 25032 - DNA, 185 bp, Homo sapiens
  chr12:49297817-49298002
  hyper
cgaccgcggtcctccactgggtagggggcgctccaagacagggactcttctagcctgttgcctctccatgttagcgatatcctcgttgctaggagactagacgcgtcttacagtgggagagctcagcctcactgatagccggggatctctcctgttcgagggctgagatctccggtcccacaacc

SEQ ID NO: 25033 - DNA, 2132 bp, Homo sapiens
  chr12:49390799-49392931
  hyper
cggcggatacgggacacggcttctcgcagggccccggcgtagggccctggggtccgcgcccagccccggccggcgcgccgctggaccaccgccacttccgacccctcggctctgccctgggctcccgaagctgctgggcctaaggcttggtgctctgggctacctggctgcgtgggggcgtcccgcaggtttacttcgggggccgggagccccaagatgcggaaagtgcgctcctccagtgtggagtcccccggcctcccgccctcagcttcgcccccgcggcccccgccgggctggtgtaaaaggcgactgctcgacagccgcttttgacaaggggaaggaaagaccgtggccccttcaccctcctccttgccgggcttcgattggctgggggaatcccccaccacgcgtgtcaccccagagggcaaaagctgcacctgctgggttcggggggttggaacatattgggatcgtatcactacgcacgtggcgtcaatgacaaagacgccttccccacgggacaggccctgggaactgcggggcaaggtgtgggcacggcgggtcgccttccaaccctccagggtctccggtcctgccccctctccaagacccagagattctctccatccggtgcctccgggagcccagggtctggggagtgtctggctatggcggggcggctgctttttaggggagggaatccagcatttgggaaaccagatctgttctccttctttcccttccctcgagcccttgaggtggtgcctggatctgggagcgggatgcggggcacagggagccgcagttgcagaccccgcaggagctatctcggtgcctgcgctccctgtagctttggcttggggatggctgtcgctaccactgttcaggtcagcagcagccagccccaggcttttctccacgacccccttgccgggctctggccttgctctggccgctccacagcctggggatccccccaagagaccttgcccctgtcggagaccccaagccccgaggacgtcccggtagatccgaggatccagcctcttctttgtgcgccctccgtctgtcctggctggagtcgcagctggggctgatgaagtgggcacctgagagttcccggggcctctcttagtccccaaggtcctatgggggccttcgtaagaaggtggagccacgtagggtggcggccggtcccagcggcgtcgtggggcggtcccggcagaacctctcagcagcaggtgagcctcgtagcttgggggcccgggccgccgacctccccagggccccgcccacgccgaccctgggtcgctctgcggctgcgcggatggacggggcgctcgccccacaggcgccaggcgctccggccgcaagggagcagggagccctgccagctgggccacccgaggggcgttgcggggctccgggcggggtcgacccggggggctccgtcgggccccaccagccttgcgcctttttcgctcggtctccttggcctcccgctcctgcgacgccgctttccttttctcttgctcccgagctcggacctcggccaggggccccgcccgccagttggtcgcctcctgcagcaccctggaggcccagggccggcggggcggcggctgtggggatcccgggcgcggcccacacctgggacaatgagcaggaacccaggtgagcagtttgtgggggaagggagccgaggtccggggagctgggagcactggagaccacttggggcagccatgtgaaggggtgtgtgtgagtgtgtgcgcgtgtgcacgtgcgtatatgttaggactgaagtcgaagcgggactcctcgccatctctccatgcacactttaacagcgtctgccccatctcacctcctgccctttctcacacccacttctgttcccccaaacaacgggatgagtcaggccccagccctcgggagcgggcagaggtggaaggcgtgggaaagagaagggggaccagcagtgctcgctggtgcctgcggggaggtccggaccccactccccgccccaccactctcttcccctcacccctgcttcactcacgtgcggttctggaacccgcgagcccagtggctggcctggaagtccatgggctgtcgagaaggggcgcggc

SEQ ID NO: 25034 - DNA, 1359 bp, Homo sapiens
  chr12:49735805-49737164
  hyper
cgccgcgcgcagcgcctcggagccagagaccgctgcccggtgcttcctcccatcttcttccatcccttccctcttgctccccctccctcctgcactccctccccggcggccgcggcctttattagggattccgcggctgtcggtcccgccatccatcctgtccgccggcaattaggcggccagacaaagagcagcttcggatggatgagggtcccagcggatcggaaatgtgaagggtcagcgctgccgcccgcggcgcaccccgctcccccttccgcataatcaccggccgcccgtcactcagccggccgcccagggagctcctgggcccggcccgggagagggcggggtgcggctgcagcctaggcgcccaggacagggcgagggcggacctgcggcaggagcgcctcctgcggggcagtggaggactgtggcctgaggcattggccgaagggtgggggattatggccccgggcactccccgaagggaaactggggctagcggcttggggcctcccagtggggaagagggaacaaaagctgcggagaccggaggcccggggtccagggcgccccctgctgggaagctgggaaccaagccttagaggtccggcaggtacagatggaaccaggcccagggcgacccctcctagggaaaccaagggtttctagcctggcgcgcctcctgccggctttgaatgacactgcgcttctatgcccgctccgttcagtgaaatccaaccaatccgcatccgctcaaaaaaggctccaagtcctggcgaacccgaggggagccgagagggagttcaaggagtccaggttttactgcagattctttggcgctagctcccagctgacaaatcaacatctcaatctgacaattagtggtcaagatgcggggtgaggggctcttacagccccggccgcttagccctcccggcgggaggcagaggggtgggcggtgctggcagtgatgaacgactccaggggggcccgtggccccgagcgcgcattcattactcgactgacaggcgggtggcgggccgggcgggctgcgagtggacgtgccgggaaagaggccagtagcaggaggggactaaggcaagcgtttaacagtcccactgctccatctgctcccggtccttcgccttgaccctgggacttgacttccttgagctcggcctcccagttgttggagctggccctggctgggaagcaagggcggggacctaagccctcttctggggttaggtgatttaaggtctgagatgtcaaggaagggtattaggcaggtctcaagactaggcgattcggcctgacctctgagagattgtgcgtgactgtgcactcagagatggc

SEQ ID NO: 25035 - DNA, 598 bp, Homo sapiens
  chr12:50297476-50298074
  hyper
cgtggtccagagggcttgctgaggatgacagggagccgggagccggaggatggaggatggtgcaggctggggagatgccggtacctttccctgggtcatggtgccgtctctcggggaaggggtccctgaggcccgggtggccgcttgggtaaccgcagcctgcctgcgtctcttccttcctccgcgtgggttctagcaacatccactgcagccgggccaggcgagccggcgcgtaccatcggcgcggggggaggagagggccgggcctgggaagatgctgcggaggacgctgcggattcgcgagcccggggtaaggcggcggcgcaccgccccctcccgccgcttcccccccaccccgccccccaccgccgcccttagccctcccccgggatgagagagagtcgcgctgcggagcaaccccagtggatgggtccgcgggggctgagcgggcggaggacgcgggaactccgtgacaccgaccagctgacgctgcccgcgtgaaaccagagccgggcatcagggcctcatctccactgtctctgcacctctctgcagctccagctgcgcctctgccttttcctcctccctctttggatgc

SEQ ID NO: 25036 - DNA, 525 bp, Homo sapiens; identical to SEQ ID NO: 23869
  chr12:51421158-51421683
  hypo

SEQ ID NO: 25037 - DNA, 190 bp, Homo sapiens
  chr12:52388315-52388505
  hypo
cggaagaaccagaagtgcagcccctctcacaggcagctctgagccgcgctttcccctcctccctgggatggacgctgccgggagactgccagtggagacggaatctgccgctttgtctgtccagccgtgtgtgcatgtgccgaggtgcgtcccccgttgtgcctggttcgtgccatgcccttacacgtgc

SEQ ID NO: 25038 - DNA, 1389 bp, Homo sapiens; identical to SEQ ID NO: 23870
  chr12:52400270-52401659
  binary

SEQ ID NO: 25039 - DNA, 501 bp, Homo sapiens
  chr12:52652140-52652641
  hyper
cgtccgcaggagccggcgcggaagcccccgcacacgctgtggctgccgaagcctccggtgaggccgcggtagcaggagacgccgcggtagggggcggcggtgatgcagcagcggccgggccggggcccgcaggccgagatgcagctgaaggcgcggaccccgcagggggcgctgaggcgggagtagaggcaggacatggtgcggtggcggcaggggcgggcggctggaccccaagccggcgctgcgccttatatgacggcccgcgggcccggggagggagctcgcggccaaggcgtttacgagcttggagggctcggccctcgcgcctcgcggagccgggaatgaaagcgagccaggccgcccggccgcctgcataaaacggcgttcgcctcccgcccgagttttatggggccgggaagcgcctggtcagccccgctgcccgtgcgctgcggtcagtgcgagtggaacccctccacctgtccgcccctccgccgggactcc

SEQ ID NO: 25040 - DNA, 291 bp, Homo sapiens
  chr12:53359290-53359581
  hyper
cgcagtgaggttagggagctgctccccggctctgggaagccgctatcctgcccataccctcctttctctccgctgctgcccctgcctcgctcccgcgcgctcccattgggtggtgcctgggtgtccccggctcggcagctgcggctgcttcccagccccggggtctcagggccgtcccgccggtcccagggcaccgctcctgtgccccacgccgccgcttccccagttgccccctgactgcaagagtctcctggttttcggcttgtcctgggactcctgggagagcccacc

SEQ ID NO: 25041 - DNA, 211 bp, Homo sapiens; identical to SEQ ID NO: 23468
  chr12:53662999-53663210
  hypo

SEQ ID NO: 25042 - DNA, 771 bp, Homo sapiens
  chr12:54088889-54089660
  hyper
cgtacgaacccagaggcaaacagaaaggggcggcaaacactgggcggctcagatttatccttcggcctccgcagggcccggccggacgagatttactgggcctcgaacacggcgacagttcaaacctttgattaatcatgtttttctgcctaccccataatttagttgctctttttccctccctgcctttttttttttttttatcagcggaaacagagacggagtcctcatcagcttcaattacaaatattaaggtcccggacagcactttgacagagaggcggccagccccccacttcgtaccacccccctaaatcatctccgaattaacatcacatcggcggctggcgcgtgttcagatttaaatggtggcatattgttcgcggacggtctagctcagaaccgcgagctcgcagctcccgcggcgggccccgcctctgcccacaccggcccctgcggcctcccgggaggctgtgactcaggagtcgcgggaggctccgactcaggagtcgcgggaggctccgggccctgtctccagcagggggctgcaggcgagggcgcgctggggcgggggcgggcgggctgcacagaggggtcggatgtggggcgagttgggcagaggaagaggaaccgcagatgccgggtggcgggagaggggctggggctgcagggagacaggtgggtttggtcggggttgggggttaggaggggaggacatgctctctgcaaattaggtgcaaacgaaggctcagaatgagcgagtttgggaac

SEQ ID NO: 25043 - DNA, 1176 bp, Homo sapiens
  chr12:54144782-54145958
  binary
cgcgcagactgtccctgtggaggagaaaggcacatgagcagccaaagggacggacactcacacacacacacacgcacacactcactcctgcgcacacaggctgctccgcggacacgcttcacggagcaggtgtgcccacgcgcaataccctcctggcccacaggcctccgcacgcacaggacacacacacacactctctcctggcctccctcccgccgcccctcctctgagccctgcggcccggccttccgcacctcccaacgcctgcaggggttgggggcgctggggctcggggcgctcactcggacctcggagccaatcgccagagatctaatggctcctttggcagtgggaaggggtgtgcgtgggtgtcctctccttcactctttccccagccctgtcgcctcccaccccccttccggccgcggcagtttccgaaatcgcccggcggccgcgaattcattagtggggggcggatgtaaacgcagcgcggtggaacgttttaattaggcctgaacaataaacaagctaaacgaggcgcgcaggactccctggtgggccctcagcctcctccgcgcggcgcggactcattacggctgcagccaatttcatgccagcgccgagcactggctgggccgggagtggggtcgggggtgcgtgcgggtgcgatccgggcctgcagggtgcggagcgggggcgtcccggggcgagggcagcgggccggttcccgcccgcccggggccgcggcttccgcatttctgcaccatccacctgcctttttcagtgtccttgagatgacgctccctccccacaccagagcggccggctggagagtctagcttgctttttagggtctctctcccgcctcttttcctcccccgctccctctctccttgcggctgactccagctccccctcggtgcccgtaaccctcctttcctctttttgccgcagtctccgtctctcttccacagggtctctccctccccctctccccgtggttgtcagactttctcctggactttctccgccccgcaccgcccgccccggatgccgagcgtggtagactctgcagccgggctcctcgctgcccgctggcgctgcctacacccccttgggctcccctccaaggtcccctccgctcgcccctctctgcccgctgccgccgccgccgcc

SEQ ID NO: 25044 - DNA, 952 bp, Homo sapiens
  chr12:54321265-54322217
  hyper
cgttccaatgccatgatggagaaggacccctaaaatcgcctttggcgtgtgcagctcgagcgttacaacgatgcaaagtgcggtctttggaggatgcgggagtcggtaacccctcaattcactctcgccgttccttctctccagtctgcgcgaaagccaggtccgagggcttcgaagatctgggggacccgagctgcgcacagtggcgggaaacgagcgggctcagctggccgggccgcgtcccctagccaccgcccgcccgcccgctgctttggcctccggagaagcctggagaggggcctgcgcctcttgaaaaatggcttttgggggcggtaggtctcgggagggcgactggggaaagtgacttgccgcggcttcgagtagagacgttggtgcgggacccaactcctggggaaggcggggagcgctgggcggatgcctggccctagtgcggcgccaacacatacaagttccgctgtgaatgtttgaaagtgtaagtttctctcggattgatttttttttcctttaaatgtatccccttcaaaaaaaaaaaaaaacaaacaaacaaaaaaaaaaaaaacaaagacgtggacaggcaggcgccacccggtctgggagctgaggttcgtgactgctgccgatttcgtttggttcaagttgagaaaataagggtctccccgtcccaggctgggagcgtggggacttccgtctctggactgtgcaaaccgtctggggctgcctcccagactggcatgctctccccgccccctgaaacctagggaaggtttcctggaggcactggactccagatccctgcagggcgggacggagaaaaagccctgaataccactgcccacacccctccaagtcgggagcccccacgcgccagtcgagcctacgcagctgtggggtgggaaggagaagacaagtcctccgccaagaactcccccac

SEQ ID NO: 25045 - DNA, 1064 bp, Homo sapiens; identical to SEQ ID NO: 23875
  chr12:54338511-54339575
  hyper

SEQ ID NO: 25046 - DNA, 342 bp, Homo sapiens
  chr12:54343505-54343847
  hyper
cgtgactaggtctttctgaccttgacatcacagggagcacagggaaggggggggaggggtggaaaaggccttgatcttccggtggccagcgaaggggagggctgcttgcccccttgacgcgccatcccccttcccgcaggagcccgccgcctctgtttacacacagaggaggtgtcgtctccagtctagacaagggcgctaataacgcccataaaaggcggcctctccagagatgctctggcaactccgctcccgcgcgcctgccgctggccgctttctccacctccccccgccccgcccttctctgataccttggcgaggccggcgcacgggcctggggac

SEQ ID NO: 25047 - DNA, 1011 bp, Homo sapiens
  chr12:54402667-54403678
  hyper
cgcctgtcttcatgtcgtggattgatgaacgcgaatcgcgtgtaagcgccgccaccgccgggagtctgaggaattcgcctgggctgttagaggaaagagctaagtgagagagcgcgagctctacctaccgacagtgaggagcgccgccgccgccgccgccgcccgctcgccgcccgccgccgccgccgcccgcgccccagccccgggagctctgctgatccggccgagctcagcaccgaggcgccccccaacctgcccagcccccagcccaccagcccagcccagtcccggggagccagctggcctggggttcggtcccggggggaggggagtttcgggggtactgggcggggtactcgtgagccagaggggagggggccgcgggttttcatgtacccagcatgagctcctacttcgtcaaccccctgttctccaaatacaaagccggcgagtccctggaaccggcctattacgactgccggttccctcagagcgtgggcaggagccatgcgctggtgtacgggcccggcggctcggcgcccggcttccagcacgcttcgcaccacgttcaagacttcttccaccacggcacctccggcatctccaactcaggctaccagcagaacccgtgctcgcttagctgccacggagacgcctccaaattctatggctacgaggcgctccccagacagtccctttatggggctcagcaagaggcgagcgtggtgcaatatcccgactgtaaatcctccgccaacactaacagtagcgaaggacaaggccacttaaatcaaaactcgtctcccagcctcatgtttccatggatgagaccccacggtgagaagccttttctctttcccccttggtctcccgcgctccagggtttccccccctccctcgcctcctttttgtctgccctcgctttttctcctggctttggggtctctcccgccccacccccgtgcctgtgcctgggtggttttctcgaagttgggaaggctccgctggggc

SEQ ID NO: 25048 - DNA, 803 bp, Homo sapiens
  chr12:54422126-54422929
  hyper
cgatttttttcccccttcctgacatctggcttgcgattggctgggagggggtcagctgactttgtcattttgtctgtcctggattggagccgtccctataaccatctagttccgagtacaaactggagacagaaataaatattaaagaaatcatagaccgaccaggtaaaggcaaagggatgaattcctacttcactaacccttccttatcctgccacctcgccgggggccaggacgtcctccccaacgtcgccctcaattccaccgcctatgatccagtgaggcatttctcgacctatggagcggccgttgcccagaaccggatctactcgactcccttttattcgccacaggagaatgtcgtgttcagttccagccgggggccgtatgactatggatctaattccttttaccaggagaaagacatgctctcaaactgcagacaaaacaccttaggacataacacacagacctcaatcgctcaggattttagttctgagcagggcaggactgcgccccaggaccagaaagccagtatccagatttacccctggatgcagcgaatgaattcgcacagtggtgagttttacagctccgagatataaattaaataaactgaactggctttatgaccggcttccctagaagaacgggcggagagagttttttatggccccataaaaacaatcacgctcgtctcctcaccgagacagggccccctcttctgccccctcagctcgcctctcgctcgcttgcaggggcctggcccccttggcccctgacggattggagggccccaaggc

SEQ ID NO: 25049 - DNA, 852 bp, Homo sapiens
  chr12:54520189-54521041
  hyper
cggatcgctgctcgggtccccactttggcgaccgtgcccccgagtcctgcttccccggggcctgctctgtatcaggcgcctgcgccttcaagggtacccggcccgcctgccctccccaagagccgagtttgcgctcctcccggaatcgtttgagagaaggacaaacttttggcaggatggaaatctagatgagcctgtccggagcaggtaagctgggcccgggacgggtgcgattcagcccgagaacaatctgtctctccccgtcccggtctctccctccccttacccctgtttcccctgcaggctgacatattaatctgccttcccccgggagaaatttgggctggggttgggcttctgtcagatgcatggggtcagagcagctttcctccccgagtttagggactaaggtggtagctggcaggggagggggagggttgcttccgaaactgaggattgaggggagggttaggggccgagaaacccagagtctgagggagacgacttctttcctcaaacgcaacttgggggaacttcggaaaagttttttgaggggagatggagaagggagcggagttggggtttcgagggctaaagtgggagagagggtgctccgcttcccgtactgaaggaaggatgtgtgtgcttattccccagtcgggaccgattaccagcctagaaaaacccagccgcgtcccaaacccgctcaccccagcaggcccttagagacgcttggagatccccagacacgccccgcggaaagggaaggaaatgccagcccgagttgccgactctgccgggacggggcgggggatccgcccagagcggtcccctgctgtcctgggcccttac

SEQ ID NO: 25050 - DNA, 757 bp, Homo sapiens
  chr12:57618589-57619346
  hyper
cgtcgatagggctctggcaggatggcgggggacaaccccagcgtctctctctcctctttcttcgtgcacaggccgtcagtgcccagataccagagtccggaaggccgcagtacctggggctgcgccccgccgcggccggagcgggtgcccccggccagcagctcccagagccaaggtcttcggacggcctaggcgtgggccgcgcctggagctgggcctggccgaccaaccacacgggggcgctggcccgggcaggggcagccggggcgttgcccgcgcagcgcaccaagaggaagccgtccatcaaggcggcgcgcgccaaaaagatcttcggctggggggacttctactttcgggtgcataccctcaagttttcgctgctggtgaccggcaagatcgtggaccatgtgaacggtaccttcagtgtgtatttccgccacaactcgtccagcctgggcaacctcagtgtcagcatcgtgccgccctccaagcgtgtcgagttcggaggagtctggctgcccgggcctgtcccccaccctctgcagtctacgctcgccctggagggggtgcttcctgggctggggcccccgctggggatggcagcagcagcggcggggcccgggcttgggggctccctcgggggcgcactggcggggccgcttgggggcgcgttgggagtgcctggggccaaagagtcacgcgctttcaattgccacgtggagtatgagaagacaaaccgcgcgcgcaagcaccgacc

SEQ ID NO: 25051 - DNA, 419 bp, Homo sapiens
  chr12:57943755-57944174
  hyper
cgcccccgctcctccatcgcggccccgcccaggcccgcagcgcggcgctgcagcgcgaggggcggagaggcagagagcccgaaaggaccagacgcccaggtcgcccgcatcccgctgccgcaggagagagacagcgcgccccggccctgctccccaggcttcgcccgggcgccctcaactctgtccccagagactgagcacctgtcctccgcctcggcctctgctgagagccctctcctctggagcacacaccacccctgcagcccaagaagagtcccagccccacgccggctaccaccatggcggagaccaacaacgaatgtagcatcaaggtgctctgccgattccggcccctgaaccaggctgagattctgcggggagacaagttcatccccattttccaaggggacgacagcgtc

SEQ ID NO: 25052 - DNA, 267 bp, Homo sapiens; identical to SEQ ID NO: 7917
  chr12:6344323-6344590
  hypo

SEQ ID NO: 25053 - DNA, 928 bp, Homo sapiens
  chr12:6664180-6665108
  hyper
cggaaaagtaggaatccccccgtgttccgctcccagcgtccttcttcctgtcacgagcagggcttctgcattctctgcggattctagtctccctgcatccaattgcttccaagctcctcattacacagcacaaactttactctcattcttttcacccctgattcttcggaacccacaccaactcgcggcccgttgtgagtggtatgacacagagagacctgtccccctttcccaatccctacctccgcttgtactcgtcccgctcccgcttcactttggccagcacgttgtagagagcgcggatctcgggcgtgatggtgtcgatctggacgcccaccccatccgggtgcacccacgacaagccaggcccttgcaccagagtgggctccagtcccggcccgagccggcgggcgtgcgagaacgaccagatggtgccgggcatgaagcgggccgacgaggaataggtggtggaggtggaggtggaggacgacgagaggctggccgcggagggcgcgagggggccggccggggagcgcgcgggcgagcccagcacgcgcgccgaagggctgcagacagcggccggccgggcgcccagctgcagccccaggggccggatggggctgacgaagccggtctgcactgcctggtcgcgacgacccaggccccgccggccctgcttaccctcctccagcgcttgctgcagttgcttctccaacagccggttccggcgctccagctcatgcaccttggccaggaagcagcggaaccggaggttcagggtcttgagcacgttgatgttggagcccaggtcattgcggagggccatggcggcaggcggggccgggcccggcccgggcggcgagtaggcagcagggccggccggcgagagaggcgccgggggcaagtctcctcccccggcgaagtggtc

SEQ ID NO: 25054 - DNA, 350 bp, Homo sapiens
  chr12:708894-709244
  binary
cggaggccctcccagccccacgactgcgcttggcctactgcctctcctcctcagcttggttggacctgcaccccagcacgcccggggggctcacattcctccccgagatgccgccactgattcaccatggtgccagtgtcccattgcccgtctcgggcacaggagtagccgtgcactcaggatacctctgatgccaaggtttgagcagctctggcccagcccgcctccttctgcccagctgccagggccccgatactcagccctcccctgcctggtttctgagtctgaggaatgtgcccagaagcaaattggcgctgagattcacatttactcctttactccttccgaac

SEQ ID NO: 25055 - DNA, 406 bp, Homo sapiens
  chr12:75728083-75728489
  hyper
cggaagctgcgtctaagaaacgaatatatagtgctttgcactcgactggcccattgtcagcatcccgcacttgttctttacctaacttgtgtggcttgcatattgcaatctgtattacaatccagacgcgctctgcagattacagattggatccacagaaagcagtttggatggttgaaattccctccaccagagggcgactcagagctttcccctgtagctcagagctttgtggaaggggaaccctgctgcctgttcttccccacagcgacactgacaagttgatccagccgcgctgggctcgagcctgtgcggcaggatggagccaagggagagcgtggtgcgggggcgtggggaaatcgggttgccccagccgttactggtccgcgcagtcagggcatcctcc

SEQ ID NO: 25056 - DNA, 214 bp, Homo sapiens
  chr12:8088740-8088954
  hyper
cgtcctcaggaaggatccaaagtcttaccattacagcatctctgggtctcgctgggatcatgactatttataatctccgcaaagggtggagcctgaaagggcgacaagcccccagccccaccccaccccaccccacccccctgaagcaatcttgtgatctctcggaattctgtgttatcagaactacccccgcccccgccccacagacaataac

SEQ ID NO: 25057 - DNA, 214 bp, Homo sapiens; identical to SEQ ID NO: 23881
  chr12:90313473-90313687
  hypo

SEQ ID NO: 25058 - DNA, 77 bp, Homo sapiens; identical to SEQ ID NO: 7921
  chr13:111911450-111911527
  hypo

SEQ ID NO: 25059 - DNA, 667 bp, Homo sapiens
  chr13:113400167-113400834
  hypo
cgtgcagcggaactccagaaattctccgtcttgcaaaactcagcctctgggccgttaaactaggtgtccccacctcccctcccccaggccctggtgaccaccgttctgctttctctgtctgtgattttgaccactttagatacgtcatttcagtggactcatcctgtgtcgttttgtggcggaatcacgttctgttgtgtgtatacaccacgtttttcttgtccgttcacctgtgatggactcttgggcgtctgccgtaggccgctgtgaatgctggcggcggtgatcgtgtgctgacgtctcctccacgtactgagttcgtgtcttttggatgcgcgcccagaggtggcactgctggatcctgtgctgggtcatacctatgtttaattctctgaggaacctccgtgctgtctccatagcagccgtgtcgtttcacacttgcaccaacagtgcacagggctccggttccccacgtcctcaccgggtaactggggttccggctccccacgtcctccccgggtaactggggttccggttccccacgtcctcaccgggtaactggggttccggctccccgcgtcctccccgggtaactggggctctggttccccacgtcctcaccggcacttggcactgtctagtgttttggtagcagccatcctgctcc

SEQ ID NO: 25060 - DNA, 281 bp, Homo sapiens
  chr13:113547097-113547378
  hyper
cgctggggagggcaggttccccagtggagccactccctgcgggtctgagtggggcccggggtctctgcacggtcaccgatgctgctgctgctccagggagcgggcttgcaggagcaaggatccagtccctgaacgcacgtgctccccccgggagaaattctgcagccaggcttggtccacgcaccgtcctcccggcccacacaccctcctcccggacctcagtctgtctctgtgtatcacatgcctgttcccagtgttctgacctcaggtgggcacggcgc

SEQ ID NO: 25061 - DNA, 288 bp, Homo sapiens; identical to SEQ ID NO: 7925
  chr13:113667314-113667602
  hypo

SEQ ID NO: 25062 - DNA, 93 bp, Homo sapiens; identical to SEQ ID NO: 7926
  chr13:113887577-113887670
  hypo

SEQ ID NO: 25063 - DNA, 484 bp, Homo sapiens; identical to SEQ ID NO: 23887
  chr13:113985425-113985909
  hypo

SEQ ID NO: 25064 - DNA, 552 bp, Homo sapiens
  chr13:114122902-114123454
  hypo
cgcgagacgtgccacgctccatcaacctctccttcagacaagcggcctatgaggacgcagcactaaagggggcgggggagggccctggacaggcggggcggaggcagcacagtgtgtaaccttccctgaatctgcgcataaaagcagatgcagcaattagaaagcaaagccaaacacccagaggcaacatttaccataaatttaggtgagaaagtatcaccacaaacccaagttgtaagctaggggatgagccactgccagcaacaggacccgtgtgttgccgtcatgccggggacgtggggggcacagggcctctgacagatgtgagaacaggagggcctcagaggtgcctacacgccgggaccaggtaaggacgagcctgaagtaggctgtggctgagggcagaggccaccaacagggaagtgcctgggagcagaacaggctgggcgggaaagggacaatggagatggaaaagagagaaaagctgaggaggggggaggagcagtgccagacaatctcagacagcaaagccgacatttctgtctactacac

SEQ ID NO: 25065 - DNA, 677 bp, Homo sapiens; identical to SEQ ID NO: 7929
  chr13:114293940-114294617
  hypo

SEQ ID NO: 25066 - DNA, 541 bp, Homo sapiens; identical to SEQ ID NO: 23891
  chr13:114304580-114305121
  hypo

SEQ ID NO: 25067 - DNA, 107 bp, Homo sapiens
  chr13:114802589-114802696
  hypo
cgggtacgcagcctcgggcgttaattatgagattccaccagctgtgagatcaacctgcggcattcttatttacagctttgtggagatgcaacgtctgagtcctgatc

SEQ ID NO: 25068 - DNA, 775 bp, Homo sapiens; identical to SEQ ID NO: 23900
  chr13:22243231-22244006
  binary

SEQ ID NO: 25069 - DNA, 226 bp, Homo sapiens
  chr13:28239924-28240150
  hypo
cgataaggaaccagcgaagagccaggcccagaaagaagaaaacccgaagaaacacagaagccatccttacaagcacagcttccgcgctcgaggttccgccagttactccccgccacgaaagcggagcagccaggacaagtacgaaaagcggtccaaccggcggtgaggctggaaccagggccagccagccctgcgggcctccgtgctccttcggggtgcggtgtgc

SEQ ID NO: 25070 - DNA, 1000 bp, Homo sapiens
  chr13:29106323-29107323
  hyper
cgtttcgaacccgcagctagccaagggcaaatgcatactcgaaagtgccacgcctctcgtccaccctgcgccgcgtccagtccacccccttcatcccgcgccccatgtccacccgcccgctgtccaccctgcgccccatgtccatgcgccccctgtccacccgctcactgtccaacccgcgccccatgtccacccgcctgctgcccaccccgcgcccccagtgcacccgcccagccccgagcgcccgcggagccgagtggagagcagcggccgcagcgcggcgccaggctcgggctgggctggccggcgcgaacccccgggggcgtctgggcggccaggccgggtggcggctgcgcacgtaggagtaccccctgagcccagccgctcggccggcctgacccgcgggtgaccggatacgagtaacgcgtgcgccccgatctgtgccctgcgcggggtcgggcggggaccggccgggggcgccgcgcgcccggtcgggttgactgtcgggggcgatttccgcggggcaaggcgggggcgcgggagcagcgcgcagctgcggggccattccacctgagcgccctgaggtcagggccggggcctgaggacacggcgctgggctccgggggacgcgggttcacgccggcgcccgagcgccacctccccgccctccgccggctcacgtagtcccggggttcggtacgtgaagtgccggcgcgaggctgctcaggccaccgcatgggccgggcgataaacaatcgcacaggatacacaacaccctggactgtcacaagcccctcgcaggaaaagataaataacatctgaggcgctgcggcgcggcttccccgggctgaacaaaaactaggaggtggggggcggtggggcgaagtaaacaacagaaccgaagaattgccgcacggagcctgggccggcggagaaaatcagatgcagtctccttccctttggtgactatccgtgggggtttctcccggtggaaatgagc

SEQ ID NO: 25071 - DNA, 417 bp, Homo sapiens
  chr13:30106987-30107404
  hypo
cgaatatgtcggggttttcagccagcacgccgggggcgttcagagtcatgtgtgtccgtgagaactccccgatgggtctgcctatcagctcgtcgaaggtggcgctccaggccctcgctacgcttgaagtacctgccacaaagcacacacaacagaggagatgtgaggacaactgttagccaggtatttgtagtggagctccatgttgataacatcattgcaggagtcaccgacggtgcactggaatctggcagcagcagccagaccacagtgtatgctgagccagaagtgacggtcgactagtgctaagtgcgagaaggcttctagggcctacagaggaatgcacttcacatcctacccaatatacacaggtgtattctatcaaatatatatatccgaataaaaagttcgcaaaac

SEQ ID NO: 25072 - DNA, 707 bp, Homo sapiens
  chr13:43565935-43566642
  binary
cgactcaatttataaggtgcggcatggatactttcatttaagcaaatgagctttcattcagtcaaaatccctgttgttgggcccctgtggttttaaactccaaggaccaaggtgcttgtgagtgagtatgtttggggcccgggctcccgccccgaagccaggttgttaaaatactcaccgcctctggcccgcgtgcacgacgctctcccgcgaagggcccttaggggctgcctccaaaccctctctctggtcttccacggggctcagctccccttgccgcccagaagggtcctggggatcccgggtcgggcgggaggcaggggaggcgccgagcccggagttcaccactctattgcgggtgttcatggttcacagcccgcgggtcccgggccgccgtcgctgcgggagggatgcggctgggacgcttagcgagtctcaagatgggattccaaagtgcagaggcagcggttttaacagctgagtttcggtttctcagaatcagcagcagactgcgcccgccccagagaacttccccacgtattctccactgaggccccgtccgaccttatcgcgggttaacagcccaggatgttgacttgagctggcttggtcggctacaggtgagacggtttaaagtctcacaatcaccttagaggttaatcagaataactgggatcagccacggacacctggtgagcgattagccc

SEQ ID NO: 25073 - DNA, 64 bp, Homo sapiens; identical to SEQ ID NO: 7932
  chr13:44981967-44982031
  hypo

SEQ ID NO: 25074 - DNA, 1110 bp, Homo sapiens
  chr13:53312858-53313968
  hyper
cgtgccttccccacggtcgcgccactgcttagtgggagatgagccgagaacggcctttctcggaccgtccactacattctcccctactctacgcttcaatcttctcccgtgaaaccttcacttgcttttctacaacgttgacctaaggcggaaagccgcgtgccagagtgggatgggagaggggagctcacgctgggcccgaggggcccgccggcagccgcgcgcccctcgccggcccgcgctcgggctccccctaggggcaccatgggcgacacgggggtccccgcgcgccgccctctggacttacgtgactgtcgctccccttccagaagtagaaggccccgatggccccaaagagcagcagcacagctcccgaaatgaggaccacggctcccaccttgagcagccgcgcggggctggagggcttcaccgtcagcgtagcgtacgcctgcgggccggggcgggagagggaccgtcgcgtttgtgccgccagcacctgcggcccccagcgcacccgggccccacgcggtagcccccagggagtggggagtcgggcgggaaacagctcgcccgggctcctacgggtgcccctttcgccgcgctccctcccgagggtcctttgcagtcgggcgtggaagtgggatgagcaaaccccgcagcacagggccttcgccccaggacctgcaccctctaccggccacgggacgtccctccgcacccgcctgtggatgccgtgacccctgcacactcatacgcgtggggcgacatcccacccacacatttgggacccaaatttatccccccgccaacacacccattcggtggcacgcacccctgagtccgaactgtggaacctgatactcacacaacccaggccctgcgtgtggaatccctggcggtactcaccggggggctgcagaattccacgtcatcaggtcccaccagggcaatgggaactttgtcggagttctctgtcatgtttgcggcgggaggagtgaggcacttggagactccctgggcaccctgggatctgtcccgctgccccgacgtgcagggcatttcaacgccgcgcgcacacacggtgcacggtcccgcctgggccagcccagc

SEQ ID NO: 25075 - DNA, 797 bp, Homo sapiens
  chr13:78271860-78272657
  binary
cggtggtggctgccgcggccggaggcgagggcccggtgctgatgcgaaccgccggctcggcctcagcccgcgcgtggtcggccccccaggccggggcgacagggaaggagccgtagcctccccgtggcccgaggagccggcgcggcggcgcgcactccccggcggccgcggcgccctcggggcccacgatgatggcggagcaggtgaaatgcgcctcggcaggggtcagctctggagcgggctccgggccggtggtgaacgcggagctggaggtgaagaagctgcaggagctggtgcgcaagctggagaagcagaacgagcagctgcggagtcgagcggccagcgcggccgccgccccgcacctgctgctgctgccgccgccgccgcccgccgcgccgccccccgctggcctgcagcctttgggtcctcggagccccccggccgccacggccaccgccgcggcctcagggggcctggggctcgggctggcgctgggcgcggggggcggtggcggcagcggtagtggcagcggcggtggctccagccccgcgttcccgggcaccttctgcctgcctagccccgcgccctccctgctttgcagcctggcgcagccacccgaggcgcccttcgtctacttcaagccggcagcaggcttcttcggcgcgggcggtggcgggccggagccggggggcgcggggacgccgccaggggcagctgcagcgccgccctcgccgccccccacgctgctggacgaggtggaattgctggatctggagagcgtagccgcctggcgggac

SEQ ID NO: 25076 - DNA, 807 bp, Homo sapiens; identical to SEQ ID NO: 23912
  chr13:95201113-95201920
  binary

SEQ ID NO: 25077 - DNA, 124 bp, Homo sapiens; identical to SEQ ID NO: 23915
  chr13:96409593-96409717
  hypo

SEQ ID NO: 25078 - DNA, 166 bp, Homo sapiens; identical to SEQ ID NO: 23916
  chr13:99851637-99851803
  hypo

SEQ ID NO: 25079 - DNA, 371 bp, Homo sapiens
  chr14:100643121-100643492
  hypo
cggctcacgtctgacttctctccttggcctcatgcccagggcaccttcctgaatcccagaggtgagcaaaactccacctccacaaccccagggcaccccattgccaccacccctcagccttggaaatggagtcaccaggcatgaagtttagatgtgcacaacctggcaccgagtccctacggtgggaccatgcccgcagcggcagtgtggaagatgggacagacacagcgaaatgcctccagggcgtggtgggaggggccggaacagggagatggcgcgtgagtagcatctgttcttacagcaaaacctgtaaaagtaaaatatacgtaggtttgtcactaaagacgtgtctgcataaatacacccacgcc

SEQ ID NO: 25080 - DNA, 372 bp, Homo sapiens
  chr14:100749240-100749612
  hypo
cggggcagttcttgcggcttgctttctcacacacaggactgggaactcccaggatttggtctcacaccagcaagaaatgcttctgtaacctttcagctccaaggtgggctcaggagcaagagggcgttttaaagagagcctcacccactgttcagaaagcacagcccagtgaaatgcccacgcagccggacctatgagcccatgtcagccctggaagctccggagctaactgggatggactcggaagaacttgaccaaatacactgagagctacttaggatttagccaaaagcaaaatgcagagcagagcttcctccctctggttggggccttggtgtctgatgttctgcagagcaaggttcagagtgaggc

SEQ ID NO: 25081 - DNA, 604 bp, Homo sapiens; identical to SEQ ID NO: 7942
  chr14:102939202-102939806
  hypo

SEQ ID NO: 25082 - DNA, 774 bp, Homo sapiens
  chr14:103021331-103022105
  hyper
cgaggccacctcgctttgggtcttgtcgcgcccaggccagcgccagcccaggcttgccatggactggctcctgggcgttagatgaatgaatcgactcaacccgggccgccacgttgtgttcagaacaccgacagtcgctcccaggcaaccagcacctgctgcgccccgtttccagcgacctccccaaccgcgtggactcgcatccacgtgcccggcggggccgcagcagaaaggctcggaccccccaggacgatcggccggtgggggccggtggggccgcagactcggggggcggggggcgccaggcttccgggtcctgcccccgccccgtggggaacagcaggacggcgccgaggccgtttcgctttcctccgcgcccatttgccgggaggggaccccgtgctccgacctgaaggtgacggcagagcctgcgggaggcctaggccggtcccgccctacgggtcccgggggcgaccctcgcgctgacattggcgtccaggccgcggcccctgcctccgcgcccacccacgccgggcctggccctcgctcccccgggaaaagccccgccggcggccgcgagagcgcggaagcgcagccgtagtgaccgcgagacaaagacccggcggcgggggaggcggcggagagaccccgccagcgcggagaccccagggaagcttctctggaagacctggtgctggtccgctctcccgggacctcattttccttatgtggacaacgggggcggggtcacagcagcccctcgggcttatagcc

SEQ ID NO: 25083 - DNA, 346 bp, Homo sapiens
  chr14:104159197-104159543
  hypo
cgtgctgtcagtttgacactaaaacctgaagcactcggtgcagttgctcgggcctcacacagacacatcaggtttacatctgaaagtactgcctcccttccccatcacggaggccgtttgagttttcatccactccgccctttggtgtggctgtcagtgggtggccgggtgcctgtggctgctctagaacctgtttctcaggtgcctggggcccacccggcagctcgagctgttgggacttggcagtccctgcccctgtgctggtgctgagagttcgcgacagtggccaggcactgccctcccagttgtccagatccactaatcctcacagacaggccagtgcccc

SEQ ID NO: 25084 - DNA, 365 bp, Homo sapiens
  chr14:104159892-104160257
  hypo
cgaaataattgtctggccgactcgcgagctctgagtgccagccacactgacctggcccactgagagccagcagggctaggtaacctgtcttgggagtgtgagaccgccccgccctgccacgcccctcaccgccctgcccggaggcgccagccgcactccttggcttcctttcctagatagtgacgtccaccaaccttggaggtgccttttcaaaacacccgggaggccgtgcctcagcattctgttactcggcctgcagccccagtgccaggagccaccccgaccgcgacccggccaggctggctcagggaggccgaggtggcgctgaggtggcttcagcacgctggggattggctcctgctcac

SEQ ID NO: 25085 - DNA, 457 bp, Homo sapiens; identical to SEQ ID NO: 23925
  chr14:104202370-104202827
  hypo

SEQ ID NO: 25086 - DNA, 852 bp, Homo sapiens
  chr14:104617964-104618816
  hypo
cgtggctctgaagagacgttgcttttaaggggccctgcttcttgccagtctcctgcgtgtccccggccaggcggccttagctgacagtggtccggttgtccgggagccgcaaacctgccttgttagccgcaggccggggcgcttaatgacggctggggaaggtggacagttaacaaggacattgtgagcctcacgatgaagcccgatcattattttcctgctgggcttgtgtgggtgaaagtgtttgggcttattaatctgttacggatggtgcggtggccaggcgggagctcgcagcgtcatggacggtgagagtgctggtgggctctgggtgccggccctccctccccaggcactgaccctgcctttgtcccttgctgtcctcaggatccttgcctctctgccctgcttctcgacaagctaccagcacctggggccctgccagcctgtcgcccagaggccgagcgccgctgtgacgtctgcgccacacacctgcagcagctcacacgggaggccatgcacctgctgcaggcccctgccagccatgaggaccttgacgccccccatggaggccccagcctcgcaccccccagcaccacgaccagctcgagggacacgccaggaccagcgggtcctgcagggaggcagccaggacgagctgggccagacaggaccaaggggctggcctggtcccccgggcccagtgtccaggtgtctgtagcacctgcgggtcttggaggggcgctgagcacggtcaccatccaggcccagcagtgcctggagggcatgtggagtgtctcgcgggtcaacagcttcctcccgccggcgtgcctggtgagtgtcttgctcagc

SEQ ID NO: 25087 - DNA, 885 bp, Homo sapiens
  chr14:105240770-105241655
  hypo
cgagacccaccctcccgccttccaccacaggcgactgtgcttttaaagcaaaggccccatctgcaggagaatcgtccccaaacacagtgacctggaactaaccaagtggctggaccctggcccccttcacagtaaatacctcctgggccaagtccccagaacaggttctgcaggacagagcccgggcctcaacaaaagcctggcaggcagggctgcagggcatggggagctggggcctcctggagcctcggcagagtgcaaggaagaccagggccacctgccccacccacctgcccgcacacgggagcagcgagcacagcccctagcccacactgggcacctccacagcctgaccctccagggcaggcctgtctcaccagcggcggagtccacggtgtgtaaagccctcacgtgcccaagaagacaggacatcgtcccctagagacagccccaggagtcgctacctggccccagcccttcagccccatctgggctcccactcactgtgaggaaggggtgcctggagttctgcaggacgcggttctcggtgagtgtgtgggccacctcgtcctgtaaagcagggctgggtgagctgccaccccgcaccctcatctccaccctgccccaccgccccggccccaccttggccacgatgacttccttcttgaggatcttcatggcgtagtagcggcctgtggccttctccttcaccaggatcaccttgccgaaagtgcccttgcccagcagcttcaggtactcaaactcgttcatggtctatgggcaggcaccagggtcagcaagcggcgctgccaacagtgcccagctggtcggcatgcgtggggtggcatgaggggccccagagtcggaggcagagccaggagaggc

SEQ ID NO: 25088 - DNA, 319 bp, Homo sapiens; identical to SEQ ID NO: 6898
  chr14:105546630-105546949
  hypo

SEQ ID NO: 25089 - DNA, 189 bp, Homo sapiens
  chr14:105739056-105739245
  hypo
cgcggcgtgccctccgtacggcagaccaggtagaggcaggcagcaatcacgtgggccatcttccggccgcgggtcaggtgcctgctcacggccatcttgaagaagttgaaggcggtgtccaggcagtgctggttcagctgcagctggttccccaggtggtggatgtggcgcctccctaggacacagcac

SEQ ID NO: 25090 - DNA, 185 bp, Homo sapiens
  chr14:22004982-22005167
  hyper
cgttctcagacgcgctgggaccttcgcagtccgagattaactgttggggtttccgctgctttcgccgagacattcccgggtagagagttgggagagggaggggcaacgctcacttggtcttaaccggggtgacctggtctcgtctcccccttgggtccgaagccaattgatgcctctcccccagc

SEQ ID NO: 25091 - DNA, 137 bp, Homo sapiens
  chr14:23707512-23707649
  hypo
cgatcgaacaaataggacaacgaagctcgtggcactgtgggatgcgtttgcgttgagctgtttattcagtacattttttatcgtaaatcttacgaagtttgtatccctcagcggttacacacacacacacatcctac

SEQ ID NO: 25092 - DNA, 1091 bp, Homo sapiens; identical to SEQ ID NO: 23940
  chr14:36974427-36975518
  hyper

SEQ ID NO: 25093 - DNA, 920 bp, Homo sapiens
  chr14:37127458-37128378
  hyper
cggctagaagtcaatgcactatgaaaatcccagtcccggacctcggactctggctgtcttacaatccctgcaactcctccgagtggacaagaggcgggcaccgtcgcctgggcctcgcttggggggggggggtcctgtccccagcagggggcaagttggaggaatcagctccttaatattttctgctagctctgcttgtcataactgcaactcggaatagaacaacctctctcccgtgcatacgcacccccaactctcgccctatcctcccatccacagtcatcactgacctgtagacccggaggagcaggcttccgggggtcggtccaggttggggatacagggaggggtcctcgcgttccgcacaacctgtagtgcttgggtctgacttcggcagccctcgggtacagtctgccgggctagattcccgttgcttctccgcgtctctccgcgggccgctctagcgccgggaagggggcgccgcaggtgactgcccgcggcactgggacggctgacagatttatggagacttcacagcatctggctggggtccgcgagggcagggcggagtccggtcgatccgatgctggggtctaaagcttccccagccacacgcctgggccgagtcgcccccagagtccccggcccctgctccccttgggcgggtgtacacaaggatccggccagcgccgagtgtactggttcctcccacccagtgtagccccctccttcacactctcggcccggcttccagtctcccactgagtaaatatttatccagagagcgagtcgcccctcggaggaggcctcgacgcggctagggaaaggctttttggcttctccctggcctgagccagctgcaggccttactggtgttttggttttggtcttaaatttctccttttagtcgaaattcttcc

SEQ ID NO: 25094 - DNA, 770 bp, Homo sapiens
  chr14:38724165-38724935
  hyper
cgtgctctgtgatccccatcgaggaatctcaggaatagatgttactgaattgtcttgttcagggacaagtggtgtctctcccagcttctcgtcgaccctgattggccatgttctctgcggcacggggctggttgcagtggccggcgggcgcctggtgggcaccccggtccccccaagggtcggctgtccttccccactggtcacacaagagcggccgtccttccccagctcgaagcccgtagcacattcgcaggcaaagcctcccaagtcgtctaggcagttagggagctctgcgcatttgccagcacggaggtacctcccggggcagggacacaacacatcgcccgagagtttgtcccagcgagcgccgatttcgtccgcgatgcaagtaactgagatcgggagctgtccccggcagagcgcactcacctcggtcccaggtggactgaagtccagagcggcgctgtgcagctggaagggcgcgcgatagctcaagttagaggcggccccggggcgcggcgcaggacacaagacctcaaactggtacttgcacaggtagccgttggcgcgcaggtggcatcgcatctccttccagcctgcgggctcgaccccaccggtggcctggagtaccgcgcatctccgcgcggtgcaggagcgttggggctcctccacccactgcagcgtgtcgctttcgagaccgccggggtcggaggacagccaggagaaaccccgcaaaggctcgttctccagggtgcagtgggaacgcctgc

SEQ ID NO: 25095 - DNA, 770 bp, Homo sapiens
  chr14:38724944-38725714
  hyper
cgacccagaacagcaggtctttggagccccctccgggccctgggcctgcccgcaggagcgcgagcacagcgcgcagctcggcgcccgcacgcacggtgctgagcgccccacctcgcaggatgcaggcctcctcggccgcctgccgcttcatggtagcgtggtgcaggctgtagcaggcccccgaggccgagcagccagcacggtcggcagtggggtgttcgccgccgcccggcccgggccagagcgcctgccagaggaggcacagggcgaacgccggcctcattctctgaggccccgcacgcagagctgctcccaacttggatctgtcccgctcgaggacgcagagctgtgtctggagcgcggtcaccgccctctacagctggcttccccaacccggttccccctcccttcccctccgccctcgctcccgacggaccccccaactgccaagaatccccccgcgggcccagcggccaacagtttcccttaggccgcgacaggaaatgtgtgcggagcgctgccaggcccggtgcagccctgagttattctggggtcaggaacacagctggcgccgggtacaggggacgcagtcgactagaaggtcaaacaccctgcttagagcaagaggagaaattcgccactgggatgaagtgtgtggtttttctccgttcagggagtttcatcaggaccgcagaacccataacacgtaagcgaacataggcaggaaggacttgagaaaggaactggcttatgattataagaccacgccc

SEQ ID NO: 25096 - DNA, 869 bp, Homo sapiens
  chr14:51410195-51411064
  binary
cgggggagtgtgtgtcttcggggaggacgagtccagggcattgcctggccctgggccgcctttgcgaaagactcacggaattccaggagctacacccactcaggagaatgggtgggcggcgctctacgcttggagcgggaccctgcccctcctctgcaccacacttagccactcccagaggcctgagacttacgaccttttcccagctcggcgtttgtctcccctcccaaaataccaagctccagcaaggcaagatttttgtcccttttgtttagggctgagtgtccagggcagagaatagtgtccggcatacaggacaagaggcccccgtcacctcttgattaaatgctgagagtcaaagttccaaaaaagtttgtgaagtggacaggcgagaggggcctgggcttttgcccacctggcggtttccaggggcggacggcacagtggtttgggcgggacactggcgggtggcacctcggagacatgagttcggcgtctgttgggaggcctaatctgtcccccaggctgcccgcccacagcctagacacgtctcctctggacttcggggcaaggaccgggtgcaagggaccactctgaggggttctccacctcgtcccgcccggccgcggccggagactccgactccgggctggaccccggcccgccgtcccgcccccggttaccttggggcacttgtcgtagtagtgctgctgcgtgcggatccagcgccccaccaggtggtcgcgcaccgtgtgcgccagcgcgaagtagtagtcgcgggtggtggccacgttgcggtccttgaccagcgtgaagtgcaggtgccggttgaaactcttcttcagctctgccacgttctccacgcccac

SEQ ID NO: 25097 - DNA, 260 bp, Homo sapiens; identical to SEQ ID NO: 7958
  chr14:52327346-52327606
  hyper

SEQ ID NO: 25098 - DNA, 839 bp, Homo sapiens
  chr14:55765300-55766139
  hypo
cggaggagggcgggcgccggagcccagccggagcgggcgttgaaggctggcgcggcgagcgctgttcggggctggagggggtaaggccggcaagggcggcctgaccctccaggaggccatccagcggctgcgggacacggaggagatgttaagcaagaaacaggagttcctggagaagaaaatcgagcagaggcacggcaccaaaaacaagcccgcggccctccaggcactgaagcgtaagaagaggtatgagaagcagctggcgcagatcgacggtacattatcaaccatcgagttccagcagcaggccctggagaatgccaacaccaataccgaggtgctcaagaacatgggctctgcagccaaggccaagaaggcggcccacgacaacatggacatcgataaagttgatgagttaatgcaggacattgctgaccagcaagaacttggggaggagatttcaacagcaatttcgaaacctgtagggtttggagaaaagtctgacgaggatgagctcatggcggaattagaagaactagaacaggaggaaccagacaagaatttgctggaagtcagtggccccgaaacagtccctctaccaaatgttccctctatagccctaccatcaaaacctgccaagaagaggaagacgacgacatgaaggatttggagaactgggctgggtccagcgcgggcaggatggatgtggtgcaggcaggttccatcgctctcgactctcactccaaagcagtagggccgcattgctgctcgctctctgcatagcatggtctgcacctagtgggatgggtgggggcgggtagaggggggttgcggggcac

SEQ ID NO: 25099 - DNA, 910 bp, Homo sapiens; identical to SEQ ID NO: 23073
  chr14:57261312-57262222
  hyper

SEQ ID NO: 25100 - DNA, 454 bp, Homo sapiens
  chr14:60794412-60794866
  hyper
cgctcaagactcagacccggactgatgagctaagactgcttgcaagagggagtgggagtcgttaaaaaaatatcctcgtggcttaatgaccaaggcgggtttattctcaaggaagggggagcggcgtggtggtgttactaaacataacagatggcagctgtctgcggctatatagggcgcgctgacaaatccctctggatggccacgcggcgctgggctgcggggcctgggtgcacttcgcgcctggctcggagggcgccgcctgcgggaggacctccgggagccgagctgcctccccgcaaacccggcccgggcccacgcgggctcagggcgccaggcggggtgcgccgaggtgcagctccccggccctaggcttcgctggggtgggggtcgaggcctctccgcgggtggctccctccaccctgccgccccgcctcgcggctgggagttgccc

SEQ ID NO: 25101 - DNA, 959 bp, Homo sapiens; identical to SEQ ID NO: 23945
  chr14:61109043-61110002
  hyper

SEQ ID NO: 25102 - DNA, 241 bp, Homo sapiens
  chr14:68067574-68067815
  hypo
cgtgagccaccgcacccagcccaaacccacagttttaatcatgcttttgcttggcaagccgatttctctaagccagagtgagccgcaaggagagcccacgggtattcatttcacttactcttttcctgtgccgggtagtttgaggtgcttgaggatgcagcagtgaacgatgttgatgacagtctctgccctcgggcagcttcctttctagtaggagacaatatggaaataagagagtatc

SEQ ID NO: 25103 - DNA, 62 bp, Homo sapiens; identical to SEQ ID NO: 6908
  chr14:73390972-73391034
  hypo

SEQ ID NO: 25104 - DNA, 903 bp, Homo sapiens
  chr14:88789348-88790251
  binary
cggccagggggtggccggccgcggccccgtgggtaaaagaaaaagtaagatcggcgaggggtggatgaaaggatggagaggaaggcttggggagatggaagagccaagctgcttcccaaaagcggtgccggcaggttaggggctgcgcagcctgaaggctggggctacggagaagcccactgcagtgtcactccagcccccgaaggcgtgtgcgcacacactcccgcacacacacacccgcacacacactcccgggcgcgcgcttgggcgggcacgtcagcctcgctcggccgcgctgagcgcacacgccccaccccggccgcggctcctcgcccccggcgacgccccccacttcccgctccccgaaagccattggatgtaggggtggcgcggcgcccgggcagcgcgcggcgagggcgaccctccccgcggcgcgccccagacgccgcgccccggcaagagggagcagggcgagcagcggaccgaggctcccagctgggaaggcgcgctgagcccccggcacccggctcggggcagcgggaggcggtcgcggacttgcccgcggggcggcgggaggcggtgggcggtggcggggaagccgcggaggggcggggaacgagcggtgggcgcgccgctacttactggctcggccggccggcgggcgggcgtggaggcggcagcggcgcgcttgctggagttgcagccggagacacgcttggttgcctggaaggcgctgcaggaggcggaggaagggccgctgcggctccgccgcagacctcggcctccgggtcacctcttctcaccgctctcaccctgagctctccctccttctcttttctcacttcattttttttcctcccgcgtctggctctctcgcctgagtcccgaacccacgtccccgcc

SEQ ID NO: 25105 - DNA, 620 bp, Homo sapiens
  chr14:90084014-90084634
  hyper
cgtgtaagctagtagctgacgtctgcaaagaaatttgtcaccaaaatggcctactttatgtggatagaaacaacaacaaaaaattaaacataaaggtatctcgagcaaactgcacccaaatgaaaaaccgaccctgcagaaatctgtgcacaagagggctatctgaaactacagcacgattttaaaagaaggttttgggtgactgttttcataagtctcaatctaactgaccaatcagtgtgagagttaaagtgggctccagtcattcgtgcagccttcagagctctgcaccctccgagctgctctcctctccaaggcagagtcggcgatcaatgaaaaacagggaacaaaaggaatataacaggatgtcttccttagctaaggaaaacgattccctttttcctcaatgagccagtcgcaccctgcctacgacagctccacacgggagcttccagcagaccagtcctttcgggtgaggcacattttacatttgcaatcatgtgtcccaactgctagcaaatgtgtcaccttaagcacagcctgtgacggagggctccccgagcccaaccaattgaaactaataaattaaataaattaataatcccacaattaaaacctcc

SEQ ID NO: 25106 - DNA, 1142 bp, Homo sapiens; identical to SEQ ID NO: 23955
  chr14:90849401-90850543
  binary

SEQ ID NO: 25107 - DNA, 259 bp, Homo sapiens; identical to SEQ ID NO: 6918
  chr14:91757493-91757752
  hypo

SEQ ID NO: 25108 - DNA, 896 bp, Homo sapiens
  chr15:101459489-101460385
  binary
cgcgccgccctccccgcccgcccgcctcaggattgaggaagtgcgtctgggcccggccccggcgcggggggcagacggcggtgggacggccaggccccggccccgccagtgtgtccgcccggccccgcgtcccggagcgcccgcacccggccccgccgccgcctcaggtaagcgccgctcctgccggcgccccccggcggcctggctgcctcccggccccgcccggggaacccagagcccgcgcccggcgcccgcggggagcctcggcctctgcctgcccgcgggcccctgcgctccgggcggccgcgtggtcgggcacggggggccgttgcgcaggggccgcggcccgaggggcgcggagggcgtgtggggcgaccccggtctcacgtccccgctgcctcccgccgcgcccggagcccagccagcctgtgggaggggagcgcgcggggcccgagcagggaaccccgaaaccccgtccgggcagggtcgggaaagctgggaagcggaggcaagagacacgagtcgggagacacgagccggggagcccataggtttcctctgcctttggagcgaacccagtcccttagcggggagcgggcggagtgtgagcgcgcgggtgagcccgtgccggggtgtcggcaagagaccgcccgggagcctctcgctggtccggggcttcctggggttgcggggcggcccagcgaggcttcaccctcctcgatgtctgggtcacgcttcttgcccaggtggtctctggctggcgcagatacaactgctctgtctaccatggtctctgcaagctacaggggaccttcctggcaggcagggacgcgggaaggaagcctaggaaggccggggtcagcgaggagacgctggtggagaatctgagaaccccc

SEQ ID NO: 25109 - DNA, 124 bp, Homo sapiens; identical to SEQ ID NO: 7972
  chr15:102226045-102226169
  hypo

SEQ ID NO: 25110 - DNA, 416 bp, Homo sapiens
  chr15:22876766-22877182
  hypo
cgcacgagcaccacagcctctggcatggctaaaataaaaagaccggcatgtcaaataattttcaaggatttagagcaactggaaattacaagatggtacaagcacttggggaaactatatggcattttcttacaaaggttaacatgtatctacccctgagaagcagcagttcacccttaggtatttatccaagaggaatttttaaatgcgtccacgcagagatttgtatctgaatattcataagagctaaaagctagaaacatcctgatgacggtgaagaggtagatggatcaacactgaagtatatgcacgcagtggaatgcagttcagctgtgaaaacacagctcatccacataacgacataagagaattccaggaactttatgtcgaaaaaaaagccagacttaaaaggatcc

SEQ ID NO: 25111 - DNA, 136 bp, Homo sapiens; identical to SEQ ID NO: 7975
  chr15:31571220-31571356
  hypo

SEQ ID NO: 25112 - DNA, 134 bp, Homo sapiens
  chr15:40676552-40676686
  hypo
cgacagagcgagactccgtctcaaaaaaaaaaagattgagctctgaagtaaataggcttttctccaaaggcttaatgggttgtttgttgtcttgtgttgccgcagaacacctgaatggtaatcctggcaccagc

SEQ ID NO: 25113 - DNA, 1266 bp, Homo sapiens
  chr15:41804824-41806090
  hyper
cgcacgtggacttcgttaccctgagggtgaaacctccaactagcaggtcactgtccaccctacctccgccgtgcacttacagatactggccagggcccggcacgcgccacagctgcacgcctctcagctgcccggcggcccccacggtcaccaccacgctggtccccgcgtacgccccgtcacattgtgtctgtgtgggcccatgccggccgctggccccgcaggtagaaaacagccaagacccctcggtgcctgagagcaaggagcgaggcaagggtcgtcgagcccctggctgggccagaggggtctggtatggtgagcgaaagaggaaggaggcgtctaaagctcacccggagaattcagcggggaggctggctccaagatactaggcggggcgctgactttcgggtcccgggggctgggacttgccagcggcaggggcgaggaccgcagaaaagtctcctgggaccccgggctagagcagagaatggcgcctgaaaggtgttgggagaaggcgcaggacgttaaggcgggtggaaataggatatgaaagaaagagagaaccccgcaacagctgcccttgcggtcgcggccacacccgtcacccggcccagccgcgctctcagcctggaagccactacccgactccggtcgcagaagccccgcgggtgcgcgctgataggtctgccagtttctctcctcgagcgcctttcccagtgaataacttaggggccgcaatgaatttggtcctgcagcctccccaatgctttcctcaacttagattggtggccccgccccaaggcggtgctgagaccccaaagaatgttcctccttcccaagctgcgtgatccagactctgggattcgcacgcacttggcgcttctcggcccgcactccagaagcacggaccggagaaatttggctgtgagagttcgaggcctctggaggaaccactgacacctggcctgttgaccggccacccccaagcctaggaaagtgcctcaggctggacggtcccctgaccgccagatagcacttacccgcggctccgaaccacaccagcagctgtccccagcagcccatccctgttgggtccacccggcaacaaaagcccttgcggtcgcggccacacccctgtcaacctaaagttgacagctcattttgccacggcagccctggccaccacttacaggggtgtgctgccgctggcgagacactccccggacctaaagctggtctggccacgcccacctcagaccccaggac

SEQ ID NO: 25114 - DNA, 406 bp, Homo sapiens; identical to SEQ ID NO: 22804
  chr15:60289235-60289641
  binary

SEQ ID NO: 25115 - DNA, 76 bp, Homo sapiens; identical to SEQ ID NO: 7979
  chr15:63695768-63695844
  hypo

SEQ ID NO: 25116 - DNA, 324 bp, Homo sapiens
  chr15:68260415-68260739
  hyper
cgttgccctggcaaggtcagaccctttggctgcaacacgtccgtcaagaagccaggcaaatctagcatgcaaactaggatcattttcgggcgttggggcccccccgcttgaaatctggtttccatgttcacaaaacgcagcccgactggtggaactcgcgactccagacgcagagaagctgtgggcagaggcggaggcagagggtgggaatgcagcctggcgttggagtggggagaaaggggagggaggaaccgcgcgcccaggccccgcccggttgcctaggtgacggggagcgagaggaagaagtgggggctgagctgatcc

SEQ ID NO: 25117 - DNA, 901 bp, Homo sapiens
  chr15:75250996-75251897
  hyper
cggccctcggtccctgctgttcagaaccgggatttaccctcttaccacttcctgggagtggctgcggcgactggaccttggcaccgcaatgtgtgaatggctgaccccctccccgtctcctggtgggatcaggaaccctcggggtatgctccgaaccgggacttcggtctcggtccagtctccatgggccccacacagcggtgggggctggaggcacagcagccttgggaagaaacaaagactgtccgcagcgcgtagcggggcgtggagaaccgagggctgtgtaaggtcaggccctgagaaaaagcccccgaaaggctggaagttacgttggaacgggctggttgtggaaggagcgagctctccgtccccgggagtatgcaagtttgggctgcacgatcacttggaagggattgggcggagttctgtcatttggagaaagggtcctgggagcttcaggtttgtgtagggcgaggacggggcggttctgcgtccggccaggttggccctcgaggacccagccgtccccaacctcctaaactgctgtcggatgtagaagactcgcattcactgctctccacagtcggtgaagggagaacgccgaaaagggccgcattccctcctgccggtcccctccccttcccgcgctccctctgcagcacttaaaatgtaaatgtacatcgtgattagccgcggggtcgctaattacagctgaagccattcattacactgtcagcgcgcgtcgcagcccgccggctgtgcgctccctcctagccgtgaaggggtgtagggggtgggggcgggagatgcggggagtgagggaggaaggatggggtgctgtgaattagggtaatgtggcaggcctggaggaagctggagtgggagagagcgggcagcgagc

SEQ ID NO: 25118 - DNA, 127 bp, Homo sapiens
  chr15:76197442-76197569
  hypo
cgtgagccaccgcgcccggcatgttgggccttttaagtatccacattttcactattaacaacaacgctgtgcagaaccttcccttcacctgcttcccttgaagcaactttttgttgtctgttttacc

SEQ ID NO: 25119 - DNA, 440 bp, Homo sapiens
  chr15:78236702-78237142
  hyper
cggccggcctgcgctgtcttacccgccccgtacccccgcccctgtctcgggagcggagtagcggtggacttttctcacgcccgcacacactgtttgcggagaggccagggcagacaacctccacccgtttccggagccactggcgccccctcattcccgctccagcagcccatgcctcgcttcacccctggtgcctcatcatcgcaccaggaagccagggcccgggaatttctttttccggtccgacagggtcaactgagtcgacgatcacttgacttggactaacggcctctgggagggcggggcctgctcgagtgaggccgggagcggaccgcagcccgctggaggtgccgggggcgaaatgctggcgtctcctcctccgtctcccagaatccttccctggaaaaaaacagcatccaccgtcagtttaactgaggacc

SEQ ID NO: 25120 - DNA, 293 bp, Homo sapiens
  chr15:79502053-79502346
  hyper
cggggagggctcgccgggaaatcaaacgtccatttacatcttgtcctgcaaagcttcatcaaaacttctttgccggccagtcacgtccccttatcacttttccagcccagctttgtgactgtaagtgttggacggagaactgataagggtaggtgattgacactcacagcctccggaacccccgcgccgcctgcacttgcgtgatggggaaaacctggcgttcccgctctgggtgcccgaggacagcaggggattccaggaggagaccttgggcatagggggcccaggtatgc

SEQ ID NO: 25121 - DNA, 912 bp, Homo sapiens
  chr15:89438052-89438964
  hyper
cgccatctcccacccagggctctgccctccaccctccctacccttctggcctcgctgtccctggggcaagaaccccggtgagcgaggtctggaacccataggcatcagttgcctttgccccaggcgcccagagccggccagctgcggtccagaggcgcaggtccgccagccgcctcgcaggttgccctcagcccctcccaggactcccggggcccccggagcatccaacagatacccaggggcagggcctggggcgccgcggacggcactggaggcagccgaccctggacagacgacaggggagagagccaagcggaccctggcaggaagggggctggaggcggacggtggtctcggaggccacggggtccgctcgggctctgctccctcacggtgggcacgagggtccggcgcccgcatccccgcgccgctccctccccacttgtgccccgggcgcccctcgcccgcgatcacagcccatctcagcccgggcctccgcagtgcccggcccacgcctcctgccccttccccggaccctgcccgggaggtgtggggacccgcagggcacccaaagcggtaagggaggaacccggcccgcacacagccccagaagcccagcgacccctaagccacgtaccgtccccaggcagctcctcgacggctagagctctcgggggccgcgagctgtcccggtccaaggcagcagtctgatttcggggaaattaaaagggcagaaaggaagcggcagcagaaaaacccccgcgctcccgccagaccagccccttaaaggaacacgcgcacctttccctcccaagggctgggctcgaagggaggagctgctgcaggcttgagcggtctccagactcgctgggaaccaccgcaaagagggtgtgcaagagttgaggccctcac

SEQ ID NO: 25122 - DNA, 165 bp, Homo sapiens
  chr15:89908837-89909002
  hyper
cgaaatcaggcttttaattctttctcccaaagccccaacccgccctaggcttgcaggccggcctccgcgcgcggttaccgcgagtctcgctgaggagccattttgtgcagcatcctgcttaaatcacactccgaggggctcgttcctcgctccctcttccccctc

SEQ ID NO: 25123 - DNA, 106 bp, Homo sapiens; identical to SEQ ID NO: 6938
  chr15:90501638-90501744
  hypo

SEQ ID NO: 25124 - DNA, 104 bp, Homo sapiens
  chr16:114357-114461
  hypo
cgctgtgggaaggccctgcgggcagcccggggacccaagaggggcagagtgtggacacgcccgaagcgtacttgtcggctgctaagaggcaagagcatccgggc

SEQ ID NO: 25125 - DNA, 573 bp, Homo sapiens
  chr16:12132253-12132826
  hypo
cggggcagctcttctcaacaccccttcctggcacttgttcttgttggcattcggctttcaggtgtttggagaaccagaagcccttgcccgctttttgacttaaccccatgtttcaaagcagatcagtgtatatccctaaattaaattacggacaccgcaggcgctaattggcaggtgagctgcgctttaaatagaccacattaattctggcagtggaagcggaaccctgctgggataattcttatcatcatcagcatcaccctgactagctttaaaaggattctgtagcagtaagcaatttgcagaattgaaaggtgaaaacacactttaaagcgttcatgtagattcaaggtcggagggaggtgactgcatttttcaagacaggctgcaggtgagagtcacttgactggaaatgtgatggacgtaccgacaatggtctggggtatttcgaaatacgttgttggccagctggcccagggtgttgttgtcgccagattccccgtcctggtttcttgagtgaggcggagaatggaaggaaggctgttttgtacagttgtgtggagtagactgatc

SEQ ID NO: 25126 - DNA, 96 bp, Homo sapiens; identical to SEQ ID NO: 7991
  chr16:12289463-12289559
  hypo

SEQ ID NO: 25127 - DNA, 402 bp, Homo sapiens
  chr16:1417690-1418092
  hypo
cggatcttcctcttggcctcgtccagctgccgcctgacccgggccagctcagctccgtttggacttgcactcgaagaggatggggggccggcactcaggatgggggaggggctgggggagaagctgccggaaacaaagtcccagatgctcccggggacaccgttcaaacctgagtgtgaaacggtcgatgacggcccagccctgctgtgctcgcggcctggtgggattggtgggtgctatgccccaggccccaccgctacgtgggcaccctctggggctcacctgccctggcagcaggggtgcagccacgcctgccccttgccccactcctggaccccaccaggctcaggaagaggcgctgacagtgacacctgccccggccggtctccccaccagatctac

SEQ ID NO: 25128 - DNA, 765 bp, Homo sapiens
  chr16:1428128-1428893
  hypo
cggcctccaagccctgcatggaatgccccccactacatccttgcaggtgtcagcctgaaccatgtcagggccctggacagactcactgaggacaggcaccgaccccccaacccgcaggcctgcccacagccccctcatgctcccatacgggggcttgatgacgggcagggccaagcggtttgcccatagtcaggtcagccaggctcgggaacctggacctgccctctgcacccaagtcccaggatcaggatatggcagccccttcagagctcaccgcccctcacacctggcagagatccagaaactcctcatgaaaatcaaagacgcaaagaagttgggggacaggaacggaggcgccttttctccccttggagtggggtgatcccaccaggctccgtgctaagtcggcagaagcttcacccaccagctgcagagtgcgcagcatgtggaggggctaagctgccttcaatgctcacccgacaaactacggctcgcactcaactcagagggcgtcagccaccacctacctcagccaagtcacctgtgctgaagcccgggaagctgcctggagaggggacgttcagggagcgtgtgggtgcccccgagagactccggccccgcttcaaagccaagtgcccctcatccaaagagagcaccggagagggtcctggaggctccaccacccctagggtgctatctagggctcactcccagaaatcaaggggggagacggctgctgcaccgtcctggcccactttctcaccc

SEQ ID NO: 25129 - DNA, 53 bp, Homo sapiens; identical to SEQ ID NO: 6945
  chr16:1472227-1472280
  hypo

SEQ ID NO: 25130 - DNA, 108 bp, Homo sapiens; identical to SEQ ID NO: 7993
  chr16:15129362-15129470
  hypo

SEQ ID NO: 25131 - DNA, 301 bp, Homo sapiens; identical to SEQ ID NO: 7994
  chr16:1652282-1652583
  hypo

SEQ ID NO: 25132 - DNA, 422 bp, Homo sapiens; identical to SEQ ID NO: 7995
  chr16:1682411-1682833
  hypo

SEQ ID NO: 25133 - DNA, 284 bp, Homo sapiens
  chr16:1704554-1704838
  hypo
cgatcacattgttctgtggccaccgtctctgtccagctccagagcattttcatgacgctagaagaggccctgtgcacctcagcactcactcctctattctccattctcaccctcccacggccgccggcacctcccagtccgccttgtgtctcagtggacttgcctgctctgaacgtttcatagaaacggaatcacacgcagaggcctccgggcctggcatctttcactgggcgtgatgcttttgaggttcacccatcatagcgcatcagtacttcattccttcc

SEQ ID NO: 25134 - DNA, 754 bp, Homo sapiens
  chr16:1730112-1730866
  hypo
cgatgtgggaccaggagtttaaactagtgctcagagcgaatccggtttctggttcctggtggccagagttttgcaccacccacatcagtggggggagggactgcatccccagccctgtcccagttgtgtgcatttagtacgtttcctttttgtttgtgctgcctggcactggctgcccggtaaatgatggtgtttattatcaccctgagcgacgccgatgtttttatattgactttcacgctccagaagttagctgcacagggccgcactaaagtcatactcacactaccctgggggactggtttctggacaaggtgttgagaaagggagaaaactcttccttttaggatggtgaggaaggaaagccggtctgaactggatgatgaggtatcactggaagcttctgcttggggtccaccagacgctgcacatttgccactcatctgaacggggtcgagtcgcagggcgggcgccttgtaagcgtcacatttagttttgctgtgaagcgagtcaggtggtggctgtaagattacctagccaggttttcctctcctgagacctcacatctctcctttccttgctgagggattgtcttgtgttaaaggggtttcgtaaaagcgttatgctttagccgcgattaacctgaggtcttccttcaagctggaacatttctatttgtaaggaatttaatccaagtttatttctcactgcttctctctaagcctgaccagtcccctcatcctttctgaaactc

SEQ ID NO: 25135 - DNA, 759 bp, Homo sapiens
  chr16:1737575-1738334
  hypo
cggtaccactttgcccgttccacatggtctcatgcccagtggggagcccggccccttgcggttagtgagccagcctctactcctggtcacagtgtgtggtgccagccatcatggctccccatgccaggttcctgcttctcatggtccttctcacggttgttgggagttttcctatctctccagtgctcttggaagacggtttatggtatattatcaagggaagcctgaaagggaaactgctagttgtgttcaccacccaacgagatctggagtcctgccttctttctacacttagtcacacagacctagccccacagccctctagttgcagggcttgattgagaaaagtatgcagaggccgagagtgtgtgtgaccgaccacatcatagccatcgaatgtttatcaattcccattcagtgtttcagtgaatcttcagtagtctctgtgttctttgttagtcacctggtttagatgttccatgaattgttcttcctcttctagcaatgatgaccaacgtctatgaattgttaatatttaccggggactgtgctaagtgctttgcatgtgtatttttcatttggtgttcgctataactaggagtaggttgttttgctcctttcacagaggaggaaacaggcttggaaaaggtcactggcatgcataaatcccaagctagtcagtagcagagctagtcggtagcagaactagtccgtagcagagctagtcggtagcagacctagccggtagcagtgctagtc

SEQ ID NO: 25136 - DNA, 114 bp, Homo sapiens
  chr16:18802552-18802666
  hypo
cgctagcaaggccctggggtacgaggtgcccacacaggcaccatttagccagttctgtccctgccggttcttccagcttcgtcctctctcacacgtcaatgcccctgctcattc

SEQ ID NO: 25137 - DNA, 221 bp, Homo sapiens
  chr16:19708387-19708608
  hypo
cgccagccagtttgcgagtccgtgcccagcaggtgccagcccgcgtgccctgtgccaaagcgcttttctcttgtagcccgcgggcctgggcgcccacagcacaacctgctccctgatgattgggctctttgccgtcggctctgctgcttctgtgactgtcgctgctctaggctgttgccaaggcaggctcaattttgcccggagtggggaggggaggtgcc

SEQ ID NO: 25138 - DNA, 280 bp, Homo sapiens; identical to SEQ ID NO: 8003
  chr16:2035689-2035969
  hypo

SEQ ID NO: 25139 - DNA, 1789 bp, Homo sapiens
  chr16:2040762-2042551
  binary
cgtccctgggagggccctgctgctccttccctccggcaggggaggtggcagttgggtgccgagctctgggttttgtccaggtggcaacctctgggccagccgcacctcggcgcctgtcttggaggagggcggtgcccacggtggggcaggggctttggcctcccctgcggagtggctctgaccagaccgggaggcaggacgctgcgttttggtccgagcgcacgtcccgacttgtggcccactcttggggacaagtgcatgtcccggcttcccccttggctccactctcggagctggagcgggaaaggagcgaagggatgaggttgaggctggaggtcgtttcttggaaacacagggctgccccgtgcagcgctggttaaaatgactgcggtccccctcatgcctgtctcccggaactggtgggcaggaggcattgaggtttgacggaacctcagaggtcaacggtgtcatcttttcagcccaaacacttacaggtgatattaataatcagtcacgtgggggctgtcatccctcgggtacccaccacgtgcaggaagctgggtggacatgtctgtcccagcactgcatgagctgtgcccgtcaccctatttgcatgctagaaaacaggccagacagttcccaaccgcgcaggaagcaacagctccgctgcctccataccctccctcccgccccgctctgcctgctgcactctcacctccccttcgccgttccggctccagcctgggaatcgcgggcccaggtgaaggctcctgttcccacactcttgagtgggctctgaggggactccacgggcccacgcggtgcagagtacctggcttgaatcaaccccggcttttgtcagccatgtgatcccggacaagtcacttcacctgttggggtcccaatgtcccccgcatttataaagagaataagaacaatggcgatcccacggggactttctgaggatttggtgaggggacgcatgtaaagtggctgtttaacacaatgtctgggcatagtagatgctcactaaacggcccgtgttgtcaataattactaaatacgcgagggttcgggaaagaaagaggtgacaccgccccccacccagatacgggcctgggaacgcagggacaggcccaggggcgtgggcgctcgaggcgggctcgcagaggtcgggtcgccgcagggccctgagcgccgcgccgcacgcaggtgttctccatcgccgtcttcgggcccatcgtcaacgagggctacgtgaacaccgacagcggccccgagctgcgctgcgtgttcaacgggaacgcgggcgcctgccgcttcggcgtcgcgctgggcctcggagccttcctcgcctgcgccgccttcctgctgctcgatgtgcgcttccagcaaatcagcagcgtccgcgaccgccggcgcgcggtgttgctggacctgggcttctcaggtgggcggggccggggcggtgagcgcggagagccttccgggtgggcggggagggggcggggcctgggcggggaacaccgctggagtttccagctgggcgtggccgtgacgaggggcggggactgaggcagggagtgtcaatgggcctcccgggtgggcggggagggggcggagcctggacggggagcgccgcgggactttctaggtaggcggggcccgggtctgggcggagcctgggcgcggaacgggtctggcgctcccgggtgggcggggtcagcgcaggagagggaggcgggacctcgcgccacgcggcgagcccaggcgaggcgccccaagcctc

SEQ ID NO: 25140 - DNA, 394 bp, Homo sapiens; identical to SEQ ID NO: 23996
  chr16:21831549-21831943
  binary

SEQ ID NO: 25141 - DNA, 460 bp, Homo sapiens; identical to SEQ ID NO: 23997
  chr16:2278311-2278771
  hypo

SEQ ID NO: 25142 - DNA, 106 bp, Homo sapiens; identical to SEQ ID NO: 8007
  chr16:23497832-23497938
  hypo

SEQ ID NO: 25143 - DNA, 1768 bp, Homo sapiens; identical to SEQ ID NO: 22807
  chr16:23846783-23848551
  binary

SEQ ID NO: 25144 - DNA, 364 bp, Homo sapiens
  chr16:2391749-2392113
  hyper
cgggtcgcggtctaacgggacgggagtggggaggtgggtcggggtgtccctgggccggaccgggtcgtgggactgggtcgccccaggcaggagagcctgggaggggcgggcccccttggcgtggcagggagaggtggagtgagggactcccgggctccagcatgagggcgggcgccgcgcggggccgacagttgccgcgggccggggccaatgggtccccgagcgccgccagcggccggaccacagtgaggtgcgtccgtggtcccggcgccccgggtgagggagggctgctgccggtcctgccgctgggagccgcctgcgacccgcaccgccagccccgcgcccagccagccgccggcaccac

SEQ ID NO: 25145 - DNA, 905 bp, Homo sapiens
  chr16:2546133-2547038
  hypo
cgagcacagcggcgctatggactctccaggatacaactgcttcgtggacaaagacaagatggacgctgccatccaggacctggggcccaaggagctgagctgcactgaactgcaggaactgaagcagctggcgcgccagggctactgggcccaaagccacgccctgcggggaaaggtgtaccagcgcctgatccgggacattccctgccgcacggtcacgcctgacgccagcgtgtacagcgacatcgtgggcaagatcgtgggcaagcacagcagcagctgcctgccgctgcccgagttcgtggacaacacgcaggtgcccagctactgcctgaatgcacgcggcgagggggccgtgcgcaagatcctcctgtgcctggccaaccagttccccgacatctccttctgccccgccctgccggccgtggtggccctgctgctgcactacagcatcgacgaggccgagtgcttcgagaaggcctgccgcatcctggcctgcaatgaccccggcaggaggctgatcgaccagagcttcctggcctttgagtcgtcctgcatgacgtttggggacctggtgaacaagtactgccaggcggcccacaagctgatggtggccgtgtcggaggatgtcctgcaggtctatgcggactggcagcgctggctgtttggggagctgcccctctgctacttcgcccgggtctttgacgtcttcctggtggagggctacaaggtgctgtaccgcgtggcgctggccatcctcaagttcttccacaaggtgagggccgggcagccgctggagtcggacagcgtgaagcaggacatccgcacgttcgtcagagacatcgcgaagacggtgtcccctgagaagctgctggagaaagcgttcgccatccgcctcttctccc

SEQ ID NO: 25146 - DNA, 456 bp, Homo sapiens; identical to SEQ ID NO: 24000
  chr16:2770043-2770499
  hypo

SEQ ID NO: 25147 - DNA, 200 bp, Homo sapiens
  chr16:27750001-27750201
  hypo
cgtgtgaagaaatcatccggagaacttgttctgagtccagaagttacctacaggctgccttgaggcagtggtcctcacacggcatcctcctggctcccttccaactgcagctgccgtgaacatgggacagtccccgcatgtggacagtgccctgcctcaggtgctcgtggggtgctctgccgtgggagcacactcagctc

SEQ ID NO: 25148 - DNA, 368 bp, Homo sapiens
  chr16:2806210-2806578
  hypo
cgaagacttagtgtgaagatcaatgttgaattagggatgaaggagagcagggacttgggtgtggggcggtaagtggttagtttggggccaggggcctgacccgtgtctccccgctccccctcaggagcggtggtgccccccccgggcacggggccatgtacaacgggatcgggctgccgacgccccggggcagcggcaccaacggctacgtccagcgcaacctgtccctggtgcggggccgccggggtgagcggcctgactacaagggagaggaggaactgcggcgcctggaggctgccctggtgaagcggcctaatcctgacatcctggaccacgagcgcaagcggcgcgtcgagctgcgatgcctc

SEQ ID NO: 25149 - DNA, 177 bp, Homo sapiens
  chr16:28878657-28878834
  hypo
cggccccgactcagcatcccctgctcttctatcacagacgtccggacaaccacagccctggagatgcctgaccgggagaacacgtttgtggttaaggtaggaattcaacttcccagccgccggcagtgcttgtgttaaggagaaagccctcagcgcatttaagcaagtggcgtcgcc

SEQ ID NO: 25150 - DNA, 405 bp, Homo sapiens
  chr16:29153172-29153577
  hypo
cgtggcacgaggaagcagtggaataatcctccatggcacaagggagcggtggaataatcctctgtggcacgcgggggggggtgtggaataatcctccgtggcacgagggggtggtggaataatcctccgtggcacggggggtggaataatcctccgtggcatgagggggcggtggaataatcctccgtggcacgagggggcagtggtataatcctctgtggcacgaggggtcggcggtataatcctccgtggcacgaggatggtcaccgcattcgtcactcttagctgcagtgcgtgtgacagtcgccagggctgctgtttgaggaatgggagttgcctgcgtctgctctgccccaggtggtttgtagggtggtttttactccttgccaaagcccacacagcccc

SEQ ID NO: 25151 - DNA, 173 bp, Homo sapiens; identical to SEQ ID NO: 8016
  chr16:29857096-29857269
  hypo

SEQ ID NO: 25152 - DNA, 176 bp, Homo sapiens
  chr16:30116125-30116301
  hypo
cgatgtgatcgaaaggcaaatatttatttttcaggaagagaaacaggagacctcgaggcttctggacttaggaggtccgggcagctggtccatggttgtccaggtagtgccgcagggctgtgggataatccgttatgacgccagtggctcccacgctgaaggctgcttcaaaatcc

SEQ ID NO: 25153 - DNA, 838 bp, Homo sapiens
  chr16:30566776-30567614
  hypo
cgcccgcagtccgggcacgggtagggcttctcgccggtgtgggtgcgcacgtggcgccgcaggtccgaggggtaggcgaaggcgcggccacagtccgggcaggggaagggggtctcgccgctgtgcacgcgccggtgctggtagagggcagagctctggctgaagcggcggccacagtcggcgcagccatagggtttctcgccggtgtggacgcgcaggtgcgaagtcagcgccgagcgctgcgtgaaggcccggccacactccagacagcggtggggccgctccccacgatggatggcccggtgtttgctcagggaggaagcgtggccgaagcccttgccgcagtcagtgcagtggaagggcttctcgccagtgtgactgtagacgtgctccaccagtgtggagcgccaggcaaagctcttcccgcacacgtagcagccatgacgctggtcagctcgggggacaggggggtgggcacagagggaggggcgtccccggtgcggtgccttggacagctgctcccaaccataagggggcccggccgagggggcttggggagacttcagcccaggagacccggcggccacagggtcgggcttctccagggctcccgtcccttccctttgtctttcctttttcttgtttctggaatctgctgagagataaagaggggagagttcaggctcggctcatcctggtccttgaatcccacagcccgcgtggacagggacaggcctgctggatccccggctgctcctgggagatggaggagtgacacctgttcctcggctgcagagccagacagagccgggagggagagaacagcccattccgcctc

SEQ ID NO: 25154 - DNA, 1135 bp, Homo sapiens
  chr16:30620879-30622014
  hyper
cggatctagagcagccggttcccagtcatcggtgtttcgttccaaccaggagatgagggctggtttgggacctgcgcaccctggggaaagagaacaaatcagaaggccagctcctagatcacgccgagtagtatctccccgacggcacctcctgctaagcccctgcccacctcccctgacaacctggtcgcctgccaggaccgtggcctccctgcctacaccctctccggctcctgcatcccttcgcgccccgcggcagcggatggggccggcctcaccgagcgcgcccaggtgaccgtaggtctcccgcatcacgtcccggtacagggccctctgcgcgggccgcaggcagccccactcctccggggagaagtacacggccacgtccacgaacttcagagccctcggcctcctgccccttttccgactgggtctggcctttcctggtccctgcgcagggagcggagccgaaggtggcgccatgggacccgagaagccggcgccacggccttccgtgtccaggcctcggccctcgggcgctggcggcccctgggatcgaggagcccctgccggaccagggctgagcgtggccggggaggcccggagggaatcggaattggtcgcccgcggggctaacggaaaccttttgctgttattcaggaaactcctgcccgaacttgggtgaaaggcaccggaagatgccttcggggaaaatggcggcgctgctaccgcaccgcctttgcctggaacacaggcagcttccagctatcgattttattgaccggagcgccatgccggcttcctaacctctttgccctcaagtgtaatggcgctgcgattgggcttcacgccgtcttttttcccctccccaatacgcgcgttcattggacgagagccgaagatcgagcgttctgattgggtgctagcaaaggcggtccgtttgaacgaagccaagagctgcataagggcaggaagctggactgctaggatcaggcgactacaaggagttgtgaagcgacttgcaccgacctgggggcagcaagaggccccggggctgctttccgctgttcgactctggcaggctcagccaatcactgaaggagggaacgatttgagcgatggagccactctggcc

SEQ ID NO: 25155 - DNA, 575 bp, Homo sapiens
  chr16:3078144-3078719
  hyper
cgggcccggggcccaggcgcagcgagaagcggggcgcggcacggcgcggggtcgacgacgacgcggaggcgctcagctccttctggcgctgtgagcgcagctgctgcccgatcaccacctgcatgtcgtcctgcgggaggccgtggtcggctcagcgccggtcccgccccttgccccgccccgcacacgggccccgcccctcacctgccaggcctccagctcctgcgtgagcgccaccttctggcggatggcgcgcagcagctcccgagacagggagtctcgctccagcgagacgcggttgagctgcagggacagctccagggccctaggcgggcaggagcagaagacgcgtttgagggcgctagggcctcagggagccggggtggcgggggacttctgtacccgggcgggaggagggctgcaaacacctagatcaaggaggtcagggggcccctgggtgggagtggggatcattataacccgtatcagaagaggaatcaggagcccaggagggcccagagggcgctggggcggtggtcaatggcttgaggcttacttgttcacggcctcgtccc

SEQ ID NO: 25156 - DNA, 384 bp, Homo sapiens
  chr16:31138407-31138791
  hypo
cggtaagtggggctgggaagctgcctgcaggtcccccgtctccccttgccgaggagcccctgctgagccgtgcactgtgcctcactcccaccctgcctgcagatcaccaaggtgaagtatgtggacaagatccacatcgggaactacgaaattgatgcctggtatttctcaccattccccgaagactatgggaaacagcccaagctctggctctgcgagtactgcctcaagtacatgaaatatgagaagagctaccgcttccacttggtgaggctgggccggccgggccgagctgggcaggggcccggtgagaggcagaggcaggcatggagactgagggcggctgcgccggcagctccagggaggagacaggcccaaaggagc

SEQ ID NO: 25157 - DNA, 313 bp, Homo sapiens
  chr16:318513-318826
  hypo
cgaaggaagacttgggcagggaggatcagggacgcctggcaaggatccaccctatggaatcgggcctcgtcagtggggtgacaatgtcagagttgtctataaatcgggggggaggccgcggcctcgaggtgggaaagcaggtgccggcgcacctgtggacaaattctggaacgcgtttggcgagggaggaataggcgcagctccggaaggcagtgacctcgaggcagcctcagcacggcactctcttgggtcctcttccaggctcacactgggcgacagcggagaggctcttggacggggcagagctcgcgcc

SEQ ID NO: 25158 - DNA, 314 bp, Homo sapiens; identical to SEQ ID NO: 8024
  chr16:3193333-3193647
  hypo

SEQ ID NO: 25159 - DNA, 1326 bp, Homo sapiens
  chr16:3221125-3222451
  hyper
cgctctccataaacgtcgatgccagctctaggagcgtggccgggagcccacgatcgcggcagcgagaagcccaaccagaggggaggagggagtccccggagtgggacagcgctcaggtctggggtggggttgatctagggcaaaatagggcgggcggcctgtggcgatgggcaggaccctctcgcccaccacacgcggaactcgctggatcctctccacatccaggccgcgtccactggctttccaacctgctcaggtccttaaagaaggattcaaaaggtgttgcggtattggcccaacaggatttgaccctgaggcccactctcaccctaatcataaccgcaaaaccacagcgcctggagagagagtgagagagaaacagaaacggagcgagtgtgtgtcgctgtgatgccctttgccgtcgctgctcatccccagtgacctcctggaactttttcagctcttgctgacagaggaagacacgggggcagagctaacgtctgagtcagggcagaggcgctgggctccatccgagggaggctatgggggcgcctctgggatggagccaaccaccggcgcagtcggatgaaaggtgggctggccgctcagccatcctcctagggcaaggccttgggtatgagtcagcagccccaggtgtgagcgcagacccggtaaccccggcgcaggggaaaatacagcggggagccccaggctgcaggcctgaccctgagcatcccctaccaagcccagtgtggatgggctctgtctccaaggggctggttcaccagggtctccccgcagcgaccccagaattctgccaatcacttggggacggcgatgagctctatccacttcggaatcagccgatttgtgccggattggtggcaggtgtctgaaatgtcagcggaaatacacgcacgggaggctcgttggtctaggggtatgattctcgcttcgggtgcgagaggtcccgggttcaaatcccggacgagccctagaagtggttacttttcccttgtcattttagagaatatagagctagaaaatcggggaccgagcctgaagcctcaactaccagtcgcgttgctccgcttcaggtcggtccaggtctgtgcctcagctacaagggacaaggatgctcctgaggctggcctggtcggcacttgcctcagcctcgagggagtcccgcgcccttctccttcccaaccccagaccagagaagctgtaccctctgcagcccgggtcgctcagctccacatgggctccgggtatggtggaggccggtggttgggttctgagtgatcgagtagtgtgcacggtctgggc

SEQ ID NO: 25160 - DNA, 937 bp, Homo sapiens; identical to SEQ ID NO: 22810
  chr16:3233501-3234438
  binary

SEQ ID NO: 25161 - DNA, 1375 bp, Homo sapiens
  chr16:3238154-3239529
  hyper
cggacgagcccccttttccttctcttttttcccatttcgcattttcagcaaggacaggagactaggaaggcggagggaggctgctattggcagggcctcagtggagacctcccggggtcccgggacgcagacggacgggcctgaatcgctcgccttggtgaaatgggatccagcgctgccaactgcggcaactgcggttaaaggagacgaccccgtgcagcaggaggaggttatttagaataaggaagaatgcgccgggctcattggtcgctacaggggcataaattttttctaggattccagagtatggctgctccagtcccaggtgagccctcctccgcttaaaattccagtttattcggagaaggggagaataccggaagcgggggagaagggaggggagtgagtgagaggagggaggcggggaagaccgggcatccgcgggcagcacttcagtcggccctggcggggtgggggtctcggcccttgtccccacccccagaccccggggccttcccactgagagcgagggaattcgcggctttgatctggaggggacagggagccccttttagcccagatctgctggattctcgggagtcaggtgaaatctggatacagggaagggcagagtgacagtaaagggtgccccggaaccgatgcccgacgcctgctgccccacggccttcattcttgctcctcctcacgtcctggggactggaggtcccgccagctccccccagtgaagggcaagggggcgcatcgcagaatcgcccctggtgcgcagcgtagttggtggcctaagccgtcttctccgagagctcagccatcctgggcacttgaggccaggcaggcgctgcggggctggttcagtcgatggagaaaagagactctcagcgtcagcctttagggttcgaggcccacgtgggaaactcgctttctgggttttggcttccctggggagaagggaggaccggagccggagaagcgtgaggtgcggcgaggtagggtgcctggtagctggtgtctcgtgcactccgtcaggcctttattgaacacccattggtgccacgctgagggactgcagcgtttccaaggcgagcttgcagtgatcgaggctcgcagaccctcagcgcagccgctgcctgctattgggaggttcccatgtcctgcggaagctggagctcctcactgcgcgcctcggagacgccgaatccccaactcaaggccgagtggcggtggcgggcgaggacccagggcccttctggattgtggtagcgccagggctgctccccattttgtgcgtcgcggaggaggggccggggctctgggcttccgccacacccatcctcacttgaaattgccccttccaggc

SEQ ID NO: 25162 - DNA, 97 bp, Homo sapiens; identical to SEQ ID NO: 6960
  chr16:3537877-3537974
  hypo

SEQ ID NO: 25163 - DNA, 179 bp, Homo sapiens; identical to SEQ ID NO: 8027
  chr16:3811586-3811765
  hypo

SEQ ID NO: 25164 - DNA, 263 bp, Homo sapiens; identical to SEQ ID NO: 8028
  chr16:3821348-3821611
  hypo

SEQ ID NO: 25165 - DNA, 366 bp, Homo sapiens; identical to SEQ ID NO: 23098
  chr16:4363872-4364238
  hyper

SEQ ID NO: 25166 - DNA, 59 bp, Homo sapiens; identical to SEQ ID NO: 8031
  chr16:4719497-4719556
  hypo

SEQ ID NO: 25167 - DNA, 227 bp, Homo sapiens
  chr16:4723492-4723719
  hypo
cggcagccctcggacgacgagaacagcgacaacagcaacgagtgtgtggtgtgcctgtccgacctgcgggacacgctgatcctgccctgccgccacctgtgcctctgtacctcctgcgccgacacgctgcgctaccaggccaacaactgccccatctgccggctgcgtgagttccccggccggctgttctgtggaaggttctggaaattagggactggccacaccac

SEQ ID NO: 25168 - DNA, 256 bp, Homo sapiens; identical to SEQ ID NO: 8033
  chr16:4787730-4787986
  hypo

SEQ ID NO: 25169 - DNA, 409 bp, Homo sapiens
  chr16:4845976-4846385
  hypo
cgtcgcccactgctgctgctgcagctcccccgggccccgcagggaaagccccaggaaggtgagcccctggaaggtgagccctgccggcctctgggacctgcacggaactgtactgggggtggaggcggaaggtgaggggagtggcgggaagggtgctcatccccctagggaacaacgagcgaacctgcttggtcccgctgtgcttctcgtgcaggaaagacccaagggagtggataacttggccctggaaccctgaccctgtgtctcctgcccggtggcagtaacaaagccttctgtctgcccagagcctgagtctgcagtgtcttccagtccccgtctgggtgggtgacgcgggactcgccgccccactcaggtggccacctggcctctccaagccttcagtcagcac

SEQ ID NO: 25170 - DNA, 724 bp, Homo sapiens
  chr16:4920116-4920840
  hypo
cgttggctcctagctttcctctccacgtacggtgagctgatgaagacaggagttgcagtgagctgcagccggtggtgactgtgttttgttcttcagcatagaggcgcagactcgggagctgagcagtcaggtccgctctggggtgtatgcctatcttgcgtcattcctgccctgcagcaaggatgccctgctcaagcgtgctcggaaacttcacctctatgaacaggtgggtgactctagagtgaagccctttggctttggggtcctggcggaggggtgactgagtcttaagcaatgatgcgtctgctgccccactgcctccttgtgatcaccccatcatgcgtcctgagcgtaagagcgatgtgtaaacctgccttgaattgtgtcccgctcttcgcaggggggccgtctgaaggagcctctccagaagctcaaggaagccattggcagggcgatgccagagcagatggccaagtaccaggacgaatgccaggcacacacgcaggcaaaggttgccaagtaagtttgtcctggcgcttgcaggtgcaaccctcccgtcttgcctcttcccctcccgtttctcggtgtgtactgccgtttcccaaggagcctcttggctcttctttggccttttctccttctctgtgaagtcccagtagtgcagagtgaggggagaggcggtgggcaggagcaccttggggccccatgtaattctattcacccc

SEQ ID NO: 25171 - DNA, 169 bp, Homo sapiens
  chr16:54128660-54128829
  hypo
cgccaccgaagaggcgtaagatattttgcttcatcaaacgaatactgtgtgtaggtagagcatagaagtttagtctcatgagatgactccattcctaagggaatctagaggctttctgcggagcaccgtgacatagatcatatcatcctcctgcttaaaaccctccggc

SEQ ID NO: 25172 - DNA, 695 bp, Homo sapiens
  chr16:56665945-56666640
  binary
cgaagagaatggacgggagagagaggccgaccagtgttccccgtgttgctgtgtacggaggagccagtccgagggaccgcggtgtggacagggacaggcaaggcggggaaggaggagaaacgaaagccacattggtggcgggtgctctgcacacgactcgctccctaccacacgccccccgctccgcacacgaccgatccggggactggagcaggagggctgcaccgggactccgggacaggcccagttgaaaacggcggggcgagggggtggggtggagacgcccgcgacgccaaggctggggtcccggaaagcgcggggaggagggtggaaggcaaaggcaacttcggggaaactgggaaaggcggccgggacctcggggacactgcgtaccacccggcgcacagcccctcccgcgcaaacccgagccaaaggggcggtcgagcggcgcactcggagcggagctcaggggatggtgcgcccggcacttatgctgggctcagcccagcccagcccaggaccgctggcggtgcgaacccagccgggcgggtgcaagcgcggggcagggcctctgcgcccggccccctcccctgagtagaaaagcagccgcaggctgtggcgctccaccacgccgtccgggtgggcctagcagtcgctccatttatcgcttgagatctccagccttaccgcggctc

SEQ ID NO: 25173 - DNA, 721 bp, Homo sapiens
  chr16:56671950-56672671
  hyper
cgagagtgagaggccgacccgtgttcccgtgttactgtgtacggagtagtgggtccgagggacctaggtgtggacagggacaggcaaggcgacagcgaggagaaacgaaaatcacatcggtggcggttgctctgcacacaactcgctcgctaccgcacgctccacgctctgcactacgccgatccggggacaggagcaggaggctgtggctgcactcagacttcgggacaggccgagctgaaaaccgtgagaggggtggggtggaggcgaccgaaacgccaaggctgggttcccggaacgcgcggggactagggtggaaggcaacttcggggaaactgggaaaggcgaccgggacctcggggacgccccgtaccccgggcgtaaactcactcccgcgttagcggccccaaagcggggagggggtggtcccgtggtccgcacccaggggagctcagtggactgtgcgccttgcctttctgctgcgcaaagcccagtccaggtcatcacctcgggcggggcggactcggctgggcggactcagcggggcgggcgcaggcgcagggcgggtcctttgcgtccggccctctttcccctgaccataaaagcagccgctggctgctgggccctaccaagccttccacgtgcgccttatagcctctcaacttcttgcttgggatctccaacctcaccgcggctcgaaatggaccccaactgctcctgc

SEQ ID NO: 25174 - DNA, 477 bp, Homo sapiens
  chr16:56677120-56677597
  hyper
cgctgcgcttcccgcctcggtcttatctggggacgtgagcactaggctggggtagcacatggactcccacagagccgaagctcacgtcactggtgcggggtgcgggggtggggataccgcgaccacctgaggctgggttcccggaccgcccaagggcaggaatggagtgcaatctccgggaaattcgggagggccgggattatagcagggacgccgcgtaccgccaggagcacagcccctccaaagcgagcgtgagccaaagggccgcccccagggtgcgcaacagccacgttaaggaggatcctgcgcccggcccgcctggtgcgcacagccccgccctgaaccctgggcagcgctgacactgagctgggctggtgcgagacctggggcggggccactgcacccagcaccctgccctgactgtaaagtcaggcggcctgctcctgttccgcctcctaccggcccgcctgttttttc

SEQ ID NO: 25175 - DNA, 450 bp, Homo sapiens
  chr16:56703387-56703837
  hyper
cggggtgtggggcgcaggtcaggatctcggggcacgcggaacgccaaagggcgggagtagcaggtaatctcagggaactgggcaggcccggcagggtgaaacaagcagctcacccgggtgcacagcccctcccgcgggagccgctgcgaaagggccgtccccgcggtgtgcaccgacctgcgctcagggtactttgcgcccgacccgtctgctgcgcacagcccagcccaggaccgcgggcggctcggactcagtgggtcgggtgcaagggtggggcagggtctctgcacccggctccctcccctgactagaaaaggagctgccaactgttgcgctccaccacgccctccacgtgttccactgcctcttctcttctcgcttgggaactccagtctcacctcggcttgcaatggaccccaactgctcctgcgaggctggtaaggaacgccc

SEQ ID NO: 25176 - DNA, 281 bp, Homo sapiens
  chr16:56709754-56710035
  hyper
cgcgaccacctgggaatgggaaatggccctcagggtggcaggggcggcgcgtacctctggcagcatagcccctcccgcacgagcgggccccaaaagggcggtccccgggagcccaccaggctgcactcaggggatggtgcgcctgacccgcctgctgcgcacagctcaacccaagaccgcaggcgccgcggattccgcgtgggggtgggtgagaagggtactctgcacccggccccctcttctaactataaattgagcttccggttcctagaatccaccac

SEQ ID NO: 25177 - DNA, 783 bp, Homo sapiens; identical to SEQ ID NO: 8044
  chr16:67204024-67204807
  hyper

SEQ ID NO: 25178 - DNA, 62 bp, Homo sapiens; identical to SEQ ID NO: 8045
  chr16:67472428-67472490
  hypo

SEQ ID NO: 25179 - DNA, 420 bp, Homo sapiens
  chr16:67678724-67679144
  binary
cggtgggccgcggggatccccaggcaggcagcgtcccctggtgttcgcggcagggactgcggggcggggtggaagccgggggcaaggacccgctggaggcccgccacacccgcgaccctcccggccacgccactgcccaccccgacgtctaccctggcggagaagctcctgggcgacggggcgggcgggcaggtgggactcggcccccctcccacaaccccgctcccgggcaagctctcgagccgcgaggccggggcggggaggggccgggccgggggcggcctggcaggaagcggcgcgcaccttccgccgccggaggagcaggtggctgccgtgcgggtctgggccccaggcttcctgtgtgcgcgctcgtcctctgctgtttcccgccggagctcgttgggcctccccggcccgccc

SEQ ID NO: 25180 - DNA, 827 bp, Homo sapiens
  chr16:68118222-68119049
  binary
cgtccctgtccaccttgcgcctcagcggagccttaggtaaacaagccaggctcccagtccccaaggacggccttcaccccagaccccaggaggaggcgtcttgggccatctcgggaaggctagcttgctcgggaggggcagatcacgaaaacggttctttaggcagtgtcacttcctctccactgccagccacccaatttaggcggctccatccctcccgctttcatggatatgcagcaggatgcagagagcacagagctgtgattggcacgagctcacaacgggctttcccgctcaatctactcaacttccagcaagggacaggccctgcccattggggttcgctgaggcctcaaacgcgcatgctgtcaagggagcagctgcgggggcccgctagtggggacaaaggcgcagccaccggggcgaaagctccgccccgcagagggtgggcctgcggcgaccgcgagctcagagtccggacttgtcgcgcaatctgtctccttcggttccaccccaacctagctggactctcggtccggtccctgccctctggagactcagccattaaagttgaggtggggggatgaggatgtgggcggcgtccaggtaactctgaggggccctgatgccttccctagagccagccatcaggagtaacacgatgcgcccccacatcaccgaacccagaacctcagtgcttcagcaccccttcctcgacatgagctccgcccaatgaggagaagggtcttctgcattggccggtggtggtcccctatccaattagagaggctaacggccttctctcgtctggtttagaaggaatcgcc

SEQ ID NO: 25181 - DNA, 395 bp, Homo sapiens; identical to SEQ ID NO: 8048
  chr16:70433888-70434283
  hypo

SEQ ID NO: 25182 - DNA, 851 bp, Homo sapiens
  chr16:734744-735595
  hypo
cgcagaggtggccgcagcctgcgggacagtgggagctgccttccagccacttcatgatgtgctgcaggtggccgccgtggctgcagccctggcaccacacgaagagacccttgactacgtggtggcagacggcacacatgctggcgcagcggtggcacctgggggcgggcgggagggagggtgcctcagcgggggctgctgcgctgcctgcaggcccctgccccacctcccgaccccactgccccacctgtcgcagacccagccccggctgctcatgggccgcttgcagtggctgcagttgacgtgcagggtggtggaggcctggttgaggcagctgacggcgcggctggtgctcagcttgaccacctcgttggacacgttccagaggcggaagcgctgcagcaggtcgatgtaggaagtgtaccagtgctcctgggggagggagcgcccggcagtcaggatctgggtgccaggggcggcgctgcaggggggaggccccgcccaccacacacctgggtctgctcgtcgatgtccttgcgcacccgttcacccaggacgatgagcacagacacagccatctgcacgtcgccctgctcagcgtagaagtgcagcatgtcgcgcaccagcacgccgaagaagtcgggcggcaggcggctgtcgtagagcgcgtgtgagacagacaggagcgagaaggaggagtccacgggggccagggaggccacatccgcctcgctgccgctcacgtgcggggagtcggccttgtcctgcaggtgctcgggcccgggaggcgtgtccacgatctcgtggcgcagcggaaaggcctcctgcggcagcacgcactcagggtcctc

SEQ ID NO: 25183 - DNA, 634 bp, Homo sapiens
  chr16:740897-741531
  hypo
cgcgcctggcctgttttttaagtctcaatttcagtattttaatgccatcacctattttaatccccaggtccatcatgacatctggtcatccctagacaagttccgagtgcccccagtcttcccctccttcctcactcctcgacctcgggagcagcctcccaacggctttcctgggtccgtctttcccctttgatcagaaacccgcacagaagtcaggcaccaggtcttctgcctgaggcctctggcagctcccactatgctgtgaatgaaccccaactcctggcctccgccttcccctgcccacctccagccatggcagcctccacccccattcccagcccaccaagccctttcctgcctcagggacattgtacgtgcgtgcgatgcctcctccacagagcggacctccctgaccactgccctaatgggcttctccatcactgtggcctccacggcacttgtcaccacccattcgtttgtttactggttgttgtcggtcacatacgagtgtgaattccaccaaggcaggaatcacattctggctcaatccccaccgaatgcccagtgcctgacacacctgttcaaccagttgctctcgttcttttttttaaaaaactttttgagacggagtttc

SEQ ID NO: 25184 - DNA, 222 bp, Homo sapiens; identical to SEQ ID NO: 8050
  chr16:75222813-75223035
  hypo

SEQ ID NO: 25185 - DNA, 263 bp, Homo sapiens
  chr16:81632835-81633098
  hypo
cggggcaaggagaggtcatattacctgagggaaaccaggggagggagagtgtgaacggcatttgagatttcttctgggaccaaggcccaaaccggcccttctaggatcatatcgttacctgccactttgcgtttgctgtatgactttccgtttgtgagattaaaaagaacatgaaatattttgacgggccttccccaaatgagcatccatgggtttctgccttggaggccaagctgatctataggtgtctgaggacctgctgc

SEQ ID NO: 25186 - DNA, 203 bp, Homo sapiens
  chr16:84328207-84328410
  hyper
cgccccagcctgcaaggaagtgctcattatggagagtggagagtgacaggccactcccggccacgtctccaagcaagccggtgccccctcctcctgctgccaccgcccactgagctgcctgggctgcagacgccctggttggagcgtctggggccagatgttatagggcaagctaaaaataaccgggcaggccagccaccatc

SEQ ID NO: 25187 - DNA, 766 bp, Homo sapiens
  chr16:845724-846490
  hypo
cgctggtgtccggcatcgcgccagccacgcgcagccgggccacgccccaggccctgctcctcgatgccctctgcctgctcctggacattcttgcacccaagctccgccccgtgagtgccgtccccggggtgggggattccccgcctgctgccctcctgtcctaggtgagcacacatttgtacagcctgctcagctccctgtctgctgcctcccatcccctaggtgagcacacagctgtacagcacccgtgaaaagcaacagctggccagcctggtgggcacgatgctcgcttacagcctgacctaccgccaggagcgcacgcccgatggccagtacatctacaggctggagccgtgagtcccccagtgcctggggtgtgctccagggtcatgctccccggctgtgctccatgttcagggcccgcatggggccaggagtctgaaagcacggtcatggcgtctgggggtggcgggccccagcttatcttttgctcagatgtaaccgtgaaggggggtcacttccagctacttgagattggctctgggacctgagttttgctgcagagctgctcccagccttagcacccccacatggaactggagccgggggccccgagagtgactgcactttccaacactccgtttcccgctgtgggatggccatgggggtggtgggggtgaggcatggggcagtggccccggggtcctgctgccccagcgacggcaccaacttgcaggacgctgagtcactctccgtggcagccatc

SEQ ID NO: 25188 - DNA, 102 bp, Homo sapiens
  chr16:84780638-84780740
  hypo
cgccactaggcggcaggacgtttcagttccactagaatcttgtgggaccatcatacgtgcggctcattgttgaccgaaatgttacgccgcgcgtgactgtac

SEQ ID NO: 25189 - DNA, 591 bp, Homo sapiens; identical to SEQ ID NO: 8055
  chr16:84822987-84823578
  hypo

SEQ ID NO: 25190 - DNA, 439 bp, Homo sapiens
  chr16:85009963-85010402
  hypo
cgggccaccttttctgggtctcgtgggcagtcgcctaaatcggaagcccacaaagggattcatccagaggagtgaggggggccccccaaagacggacttcatcccttcccatcgcagcctccgctcccatgtgggcttctcacttttcaatcgctcgatctcctggaagcagaaagaaaagcaagtggcagcggctccaggaagctcggcagaccccaccaagcctcagaatcacaccgtgctcaagcacagtgtgggctcgatggagggtaggtgagtgaactctccttcccagctctgccccgatccagaccccgtggcctctgtgagcccagcccggctgcagccacgtggccagcccagactaccacaatggccctcccagccaggcaccaacatttgtcgctcgttagttactgtgtacagacatttactgagc

SEQ ID NO: 25191 - DNA, 319 bp, Homo sapiens
  chr16:85328796-85329115
  hypo
cgcttcccagggcctccgcacacaccggtccaccttctgcctgaggatggcctgtgctgggcatttcctgggaatggaatcctgcagtacaagctcttttgtggcttctctcactcgggaccagcctggggcgaaaccctgtctctactaaaaatacaaacaaatcagttttcaaggttcacgcgtgctgcagcgcgggtcagcacatcagcccttttatggctgagtgattattccaccgtgcgcgtagaccgcgtcctttttgcccatccaccgccgatggccgtttgggctgtctccacctttcggctgctgtcac

SEQ ID NO: 25192 - DNA, 337 bp, Homo sapiens; identical to SEQ ID NO: 23505
  chr16:85670994-85671331
  hypo

SEQ ID NO: 25193 - DNA, 427 bp, Homo sapiens
  chr16:85699437-85699864
  hypo
cggttacttaaatgttccccgggtcttggttctttgcgctaggtctttgttaagtgtaagctctagagaccaggatctgcgtgctggacactcagcctgttaacttgcatttcttaatattttccttcactttgtctctaaaagaaccagccacgcagcaagcctctctggatgtggagaagccggttggtgttgctgcttccttgtctgacatcccaaaggccgcggagcctgggaagctggaacaggtccggccccaggagctgtcgagagtccaggagctagctcctgccagcggggagaaggccaggctgagcgaggcccctggaggcaaaaagagtctgagcatgcttcactatatccggggcgctgcacccaaggacattcctgtgccgctgtcccacagcaccaatgggaagagcaagcc

SEQ ID NO: 25194 - DNA, 224 bp, Homo sapiens
  chr16:85741349-85741573
  hypo
cgctccctttcaccaggccggagtcagcaagaacctggaggtgtcagaggtccggtccactcagcggggcctgggaaacactgttctggaagtggacaggctggattcctcgctggtcctgccacgtctctctgagcggaggcccgggttcgctcagttcccatccagggtattcagcacacctgctccaggcagccacgcccccggacacctgaagccgggcc

SEQ ID NO: 25195 - DNA, 910 bp, Homo sapiens; identical to SEQ ID NO: 22812
  chr16:85932121-85933031
  binary

SEQ ID NO: 25196 - DNA, 546 bp, Homo sapiens
  chr16:87417704-87418250
  binary
cggcgaccacttcgcgccgcggcttttgtggagataggggtcgcccctcgcgcccgtgcgtcccgcttccggcgcccgaaactgtgccgcgccggccggtgagtagaaagatgcgccttacagcctccaaatacagaggcagcagccagaaccccaaagggcgcctagaagcccttttgtccattgaaacaacgcgcgttccatcgtctccgccttatggtaaccaaaaggcccgagctgcggagctctgcagggaccttcggggatcccgagctccctgcggaagccccggggagggcttggaggggcggcggccggcgcggcccaagagatccggggatgcgcgcccggtctggaaagggaggccctgccatgcggcgccgcccaaagggcgcctgttcctgcagctgctgggagccgcgcacgcctgctccagctgggctccgccgaggccgctgagcggggtcgtctcccaggtccgcgggtggtgaccgcgaaggcgtcctctcacctgagcagccgcgcacgtcgccgtgggctcgcctc

SEQ ID NO: 25197 - DNA, 496 bp, Homo sapiens; identical to SEQ ID NO: 8064
  chr16:87738520-87739016
  hypo

SEQ ID NO: 25198 - DNA, 811 bp, Homo sapiens
  chr16:88101501-88102312
  hypo
cgcagttacacgttgcacggggcctccccgtagcatccactgtgtcaatgccccctccgtccccaacagacccgccctccccccactgtctgcctccttgtgtcgtcagtccgtgacacgccacgtgtgtgatgaggaggtgcttggagtggcactgctctgcgtgtggccacgcacttcgtttccattttcacacgtagttcagagctgggtgtccgacagaggtgcccgaggtggaaagcgtcgtgcactcgtcccacctgtggcccctgcagagctccggctgtgtggcacgggctcctgagagctggggatggaggaggtgcgggcttaccgtgtgctcctctgctgctcgccccaggcttgggtttcctggcggtcacctggttggcgtgaaccttgggcgtgcgccagggtccctgtgctgtcgtggagtgcaggcaggtgggcaggcgcttgggagttaccagtcaagtccctgcaccgcgcagaccattgcctggtgttcaggagttttcaaggcctcggcctggtgggaatagttgagaaacgctggttcaggcagcttgctttattcacagccctgagacacctctgggacagcccctgaggatatttttcccggaactttctcggggccaggagtgtgcctgtgctgtgatgagtgggaaacgcagtttgtgcagggcctcacagaagagcccactggtgcgggtgctggctgcctcctccagtgggcgccagctcggggtctgtggcaggaacgtgggtggctgcggatccacccaggacagagtgactgcctgggcgc

SEQ ID NO: 25199 - DNA, 342 bp, Homo sapiens
  chr16:88106152-88106494
  hypo
cggagagctccctgccccactcgttgaaggtctcagctcggggcagagccagtacctcgggctgctgtggccctagcgtccacgaaaacaaagcgcagggctgctgtgctctgtggatggcccagcgggcccaggccagcatctccatacctcgcaggcagaagcccccgagggtgaggccgtgccgaaatctccagcgtggccgaggcccagacaagagccccgtgatgccgtgggctgtttgctctgaacactggaggcagaaggtggccctgcatccgggagcagtcttggccccgcagcctccgtgccacctgctttgggaacgtgcccagcggggac

SEQ ID NO: 25200 - DNA, 328 bp, Homo sapiens; identical to SEQ ID NO: 8069
  chr16:88111298-88111626
  hypo

SEQ ID NO: 25201 - DNA, 526 bp, Homo sapiens
  chr16:88826974-88827500
  hypo
cgaggggaacgacccgcctttaaggcagcaggacccagggagcccaggacaggcaggggcccgaggggagccacccgtcttcgaggcagcagcacccaggaagcccaggacaggcagggtcccaagcggagacacccgcctttgacgcagcagcacccagggggcccgggacaggcaggggcccgaggggagccacccgccttcgacgcagcaggaggtaaacggaatgttcctcacctacttggagcccggccagcagcctggggcactgaggagcttctggaccatttaattagctcggtgtccaggtttaattagctcagtgtccaggaaactcagttttatggctcatctgacctacacggggcagggtcctgcaggcctggtggctgctgtgggctgggcacccaccgcacctgccacagccatctgctctcagacctgctggcgtggagagtcaggacaccctcccggacacactcagcccgcagcccctggaggggtttgcagggcagggtgggggtcc

SEQ ID NO: 25202 - DNA, 235 bp, Homo sapiens; identical to SEQ ID NO: 8072
  chr16:88910584-88910819
  hypo

SEQ ID NO: 25203 - DNA, 559 bp, Homo sapiens
  chr16:88994153-88994712
  hypo
cgtccgcccgtgcggacacccgggagccaacactgacccgaagacaggtcagccagacttcccacctgctccctcaggaggtgggatccggtcccctcctgctgggctgcacgggccacgatggaaaggcgcctcgtgacacgctgcggtcagctcagaaaagccgcagatgctgacacgggcaaccctgcccagtgtggggcgtcctctgaagtgggagccgcagggagggcctcacggaggcctctgtccacaggcagcggctcccggcacccaccgctgctgaccgagcccctggcacccccaagccgagcctttgaaccccagcagggaaggccacctggccgagaccctggccaccacggggccatcactgtcccacggggctctgttccgactccttggcccgagggtctctgagcaccaccagggttgcctcacgcctctgagtttggggtggtttgttcggcagcactggggcccggggcagcttcttgcccggcgtgtggcacagctgtccttgttgggggcgtttctgggatcctgtggtttcggggac

SEQ ID NO: 25204 - DNA, 335 bp, Homo sapiens; identical to SEQ ID NO: 24039
  chr16:89072478-89072813
  hypo

SEQ ID NO: 25205 - DNA, 783 bp, Homo sapiens
  chr16:89220237-89221020
  hypo
cgcccaaggcctgcacgcaccatggcttctgtggtaccagtgataacaccatgccgggcacctcctgcagtcaccacccctgggctgctagggcagagacagctgcggtggcccggtgcacctgcctggcctcaggatggccgaggcgcctggcaaggctgcagggtcccaggggcacctgtccgtactgctgggcgcctgagttcctcctgctgggcactgtcagggcagtgcgcctcaggctgtgcttgtctctgcagaaatgtcctggccccgtacgcggtgccctcggagctggtgctggtggaggagatcccgcggaaccagatgggcaagattgacaagaaggcgctcatcaggcacttccacccctcatgacccggcagactgggactgcgggtctggtggggagcagcagacgtccccttcacaccgagaaccacgggggcccgtccaagacctggcctcccttaaacctgaaccccccaaatcaggtcacgtagaatcaagaactgtttgggatgaaatcaccatgtggggtccccagcctcgggccagttgttgcagctcaaggagaccgtccctggtgtcacctctgcctggtcaccgccgacctcatctgtgcagcgcggtgcagccagcccctggccccacgtgctgaggcacctcccgccccacagtgccctgcagttgccaggctctccagggcaggtcccagaggtttcccacaaaaaacaaagactccactggaggaaacaagcccctgtcccacgccgtctgcac

SEQ ID NO: 25206 - DNA, 378 bp, Homo sapiens; identical to SEQ ID NO: 24040
  chr16:89254530-89254908
  hypo

SEQ ID NO: 25207 - DNA, 570 bp, Homo sapiens
  chr16:89641257-89641827
  hyper
cgccggcggggccctgagcctcctcgccctgtcggcggcggtcccctctgaccgcagggtcttcttctagagtcctgatcgccgaggctgagcggaggcgcccggtcttcccgcctcttcagtcttaatgtctccctcaccctcgccccccacccccgtggcttttggcgaggtccgtgccctatttttaggcagaaatcggcaaaaagagtggactgcgaggtggtttctgtccccgccgacgcctcctcttccgctgctccctcccccgggaccggtgatggggaaggtgggggagtgagttcagggcggagcgggcccaccccccacggaacccaggcctgccccgccccgccccggcctcgggggactggtgtggaccgtgccccgcggacccctcggaatcagaccgcgattcagccctcggccccccgggacggtccttccagccccagacgagcgcggcgcctgcacacaacaggcgcccactaaatgcttgttgatggaggtggcgagtacccgaaaccagcggagcctggaaatgggatcctagagatccgggaagggcgc

SEQ ID NO: 25208 - DNA, 426 bp, Homo sapiens
  chr16:89883921-89884347
  hypo
cggcagagcgagactctgtctcaaaacaaaaccaaacataagaattcgtaaaagcgagtgcctaggcgaagctaatgtgcctcaaagtcctgggtaagtagaggccctggagacccgtccgcatcctctggcagtggccttggaaccaccgaagggattcagccgaagggccgcgttcccggcaggcgtctttattgtgttgattacgtagatggcgtagatgacgtagatgacgttcagcaccacaaacgaagagccgaggcacagagtggggccttggattcatgagatggggatggagcagaaatgagaattcggagtccatgaaacccccacaaagactcctgcacggcccgactcggacactttgcaatctgctggttgagggggatggtgtgaactcagggaacagcctgagatcgcgcc

SEQ ID NO: 25209 - DNA, 1365 bp, Homo sapiens
  chr16:89899939-89901304
  hypo
cgccctgctgggctcaggggcaggttcagctcaggcctacggcctgctgggcttgagaagcttcgcctttgtgcctcggtttccttctccgtgaaatgggaggtgcagcgtggtgctaacgtctgtgcagccctgggcacgcctggctccggaagcactggccagtggaggtggcagcaagggatctgcacctgtgcactcgctggacctgccttggggagcagcacgtgtgggtccaggctgcgaatcccgaccggattctcagggaggggttctgcaaggtgcacccggtgggggctgggagctcctccggggcgtgtttccctgtgacgtaaaatgacctctatccctgagccctcccatgtagaaagcgggaaggaggctggccgctgtgtgtgggtgtgggtgtgagctgggtgtgtctctgtgtgagctggggtttgtttgtagatggcattcccgatatagtctcacctctgagcaagggttacctcacaggaaggcagtcctgcagcaagactcttctctttacggagacatctgtgaacctgcctgcgctcgcggttggccgtcgtagaagcatggataagcatagcccgtgtgaatctgtgaacctgcctgcgctcgcggttggccgtcgtagaagcctggataagcatagcccgtgtgaatctgtgaacctgcctgtgctcacggttggccgtcgtagaagcatggataagcatagcccgtgtgaatctgtgaacctgcccgcgctcgcggttggccgtcgtagaaggccccataagcatagcccgtgtgaatctgtgaacctgcctgtgctcacggttggccgtcgtagaagcctggataagcatagcccgtgtgaatctgtgaacctgcccgcactcgcggttggccatcgtagaagcctggataagcatagcccgtgtgaatctgtgaacctgcccgcactcgcggttggccatcgtagaagtgtggataagcatagcccatgtgaatctgtgaacctgcccgcattcgcggttggccgtcgtagaaggccccataagcatagcccgtgtgaatctgtgaacctgcccgcactcgcggttggccgttgtagaagcctggataagcatagcccgtgtgaatctgtgaacctgcccgcactcgcggttggccgtcgtagaagcctggataagcatagcccgtgtgaatctgtgaacctgcccgcactcgcggttggccatcgtagaagtgtggataagcatagcccatgtgaatctgtgaacctgcccgcattcgcggttggccgtcgtagaaggccccataagcatagcccgtgtgaatctgtgaacctgcccgcactcgcagctggccgtc

SEQ ID NO: 25210 - DNA, 170 bp, Homo sapiens
  chr16:9009875-9010045
  hypo
cgtcttttatcacaactggaagaatgaggatttgctagtgattagtgatggcgcggggagagtaatcaccgcatgctgaggtctgctcaatgagaacctcgctgcacaggaggggtctggacactggagtaacaacagaagtcaccactgtacagtgactcaggaccaac

SEQ ID NO: 25211 - DNA, 295 bp, Homo sapiens; identical to SEQ ID NO: 8080
  chr16:94400-94695
  hypo

SEQ ID NO: 25212 - DNA, 405 bp, Homo sapiens; identical to SEQ ID NO: 24045
  chr17:16282222-16282627
  hypo

SEQ ID NO: 25213 - DNA, 705 bp, Homo sapiens
  chr17:1958915-1959620
  binary
cgcaggtaacgggccgcggggccccgcgggccaggaggggaacggggtcgggcgggcgagcagcgggcaggggagctcagggctcggctccgggctctgccgccggatttgggggccgcgaggaagagctgcgagccgagggcctggggccggcgcactcctcccgccctgtctgcagttggaaaacttttccccaagtttggggcggcggagttccgggggagaaggggccgggggagccgcggagggaggcgccgggcccgcgcgtgtagggcccaggccgaggccgggacgcgggtggggcgcaggcccgggtcagggccgcagccggctgtgcgccgtgcccgcccggggcgctgccccctccctcccctgggagctgcgtggctcccccctcccccccacctgcttcctgcctcagcctcctgccccgatataacgccctccccgcgccgggcccggccttcgcgctctgcccgccacggcagccgctgcctccgctccccgcgcggccgccgcccgggccccgaccgagggttgacagcccccggccagggcggcgccagggcgggcaccgcgctcccctcctccgtatcacttcccccaactggggcaacttctcccgaggcgggaggcgctggttcctcggctccctttctccctacttgggtaaagttctccgccctgaatgacttttcctgaagc

SEQ ID NO: 25214 - DNA, 331 bp, Homo sapiens; identical to SEQ ID NO: 23511
  chr17:21104016-21104347
  hypo

SEQ ID NO: 25215 - DNA, 101 bp, Homo sapiens
  chr17:2207862-2207963
  hypo
cgatatagttggaatcgtgtggaaggaagtacatcaggaggcatataagtccatttgggacctgtaatcccggcgactcggaacgctgagacgggcggatc

SEQ ID NO: 25216 - DNA, 200 bp, Homo sapiens
  chr17:26961722-26961922
  hypo
cggcgcatgggtgtgttgccatagagacgacgggaacgctggatgtagatttcaatgtttttgcgttccaaagaggcatagagctcctcaattttgcgggcaggcaacaactccccatgctgcttccgaagggcggccactttagcatccagtagctgtagtcttttggcactctccttactttcatccttcatcagctc

SEQ ID NO: 25217 - DNA, 897 bp, Homo sapiens
  chr17:27038294-27039191
  hyper
cgatagccgagcgttccagctctggctggaaccagacttcccgcccatcccgcgggcgacccagcagggcctcaggaccccagtcctcaatcattggcccgcggctcgacgcgagcccgcccccggccctagctccgccccggccctagctccgccccggcccagcactgggccccgcctctctcgttggtttgcccgtctccctcgtcggtttgccggcttcccgcgtgcgccgctcggggtctgcgagccgggccgcgccctctgcccagcccctgccccgcccctcttaccgcggcatctgctctcatcccacgagcgggccttgggctcggtcttttccttagtccatctttcaattgtgagcgtcgtcctgacccacatcgctctccgcccaggtcttcgtctctacaggactcttgcgtgaagtccaaccctgagcctcagcccggccgagccctcggcccagccgtgaactccagtctcggcttcgcccccgcctagcccctaaccccgcctcatgctggcgcagcccccgccggcctccccagcccggctccaggctgcgtagtcttcccagctgggtctcagcgtcagccgcgttcttcatccggggcctccggcgcctcccaggcccctctttatctcagaccttaaccttacaggcccagctctcaccacccatctctggttccagcttgcagtccaaaccccagattttcaccctgcctccagatcgtagccccaattcttagtgttacaacgagccttgcccccagccccattcttagccccgccccggccattctctaaaccgcacactcccgtcccgctccccgccccaccgacccttgggaacccagccgcagccccgcctctgcccgctggcgagagagc

SEQ ID NO: 25218 - DNA, 592 bp, Homo sapiens
  chr17:27893139-27893731
  binary
cgctcgtagggccagggcaggccggcctcgaaccactctcggcagcgcagcacgggcgagatgcaggcggcgcctgtcacgtagctggaggagccgcactcgcccaggtaggacaggagcagcgccgagcccgagccttcgctcaccgcgaacagcggcgccgccgggtgtcggaagcggatgtatgtgaccgcctccttgaggtcggacgggtccccgaaaggctgcagccgggggctgaccagtgggcaaccgtggtggccgcggcgatggaagatgaccgggtagtagccgcgctccagggcgagcaagcaaaggccgagcacgttgcgggtgaggcgaccccacgcattggggatcaccagaagcaccgcaggaaggcccccggcgctggtgatccggcggccccgaacacaaggtcctaccacccagtccagggccactagcccatcgtccgccaactgcaggtactcccgggccagctcaggcccaggcgctacgggcaggacgaagtggcagagggtctgcaggtggggcccggagaaccaggagcgcgggccggcctccagcgcctctgagcgccgcagggcgc

SEQ ID NO: 25219 - DNA, 807 bp, Homo sapiens; identical to SEQ ID NO: 24058
  chr17:27940157-27940964
  hyper

SEQ ID NO: 25220 - DNA, 847 bp, Homo sapiens
  chr17:27949429-27950276
  hyper
cgtgtgcccttcaaggcgcgtctgcggccccgagcctgaggcccggcctccctgcacccttcttcagcctgctgccctgacactgcgttcttgcgagacgaggtgtctgcgccctccgggagcgctggctgctgtccggccaaatatagacaccacgtcctccccgcccgaaaccgaatttggcggcgcggggggaggaggcgcagacctctgcccctcagggaccccgcccgctccgctggctgcggtgacggccgggtgtggggggctgggtacctggtcctgagcgggctgcggggcgctcacgctgcgaatcctctgcggaaggggcccgagtgcgtagggggccgaggaaggcttcagggcgaaggagccacctctccgggtgtctgtagtatctgggacccgggtgtccagctccgcactctggccgatcctgcggctctctagagcccggcgccgctgcagccccagctgccgctgccatcaacctaagagggcggggctagcataggggcggggccagagcccaagttgccccgccccctccagcggcgggaaagtcgagcgaccccgactcccctcccagcttccgccggcctcggagaaccatcgaaaataaatgtgcagctgtgtgctaggtgcgcacgctgcttccctccctccatgactcccgggtaggctggggaggctcgggttcgcagacctagagcaggacgcttggagagggaacgggcgagggggcgtgcgcccctagagcgggcagccgagggagaccaggtgcctccacccgcattccagcctcaatcgcgctcccaatttagctgtcccgatcggccgggactgc

SEQ ID NO: 25221 - DNA, 500 bp, Homo sapiens
  chr17:29335357-29335857
  hyper
cgggtccctcagacaaaagggcgggtggaggaggagaagccgagagtcctgctccggcgccgccggagcaccgcctgcctcagccgaccagcgccgtcgactactgggcctagcccagacgagaggagggaaaggccgcagaggccgcgaggatgctgcggaggcgcgggcggccggctgccgcctagttgtgcagcccagaccaaggaaagagaagtgggaggagcggggagctcggcgtcccgcgtcctccgcggctcaggacgactacgctcggcacgtccgggaccctccggccgtggcggttgcagcgccaaaagctcgggcctcagcccctgacgctgtggtgactccgccgcgcctcgccgtcgcccctgtccccgtcctgcccgccgcctccgccgctggggacatgtccaaccccggaagccggaggaacgggcccgtcaagctgcacctgacaggtgagggggagcgccgggccgggctgggcagccgcc

SEQ ID NO: 25222 - DNA, 280 bp, Homo sapiens; identical to SEQ ID NO: 8088
  chr17:30347571-30347851
  hypo

SEQ ID NO: 25223 - DNA, 171 bp, Homo sapiens; identical to SEQ ID NO: 8089
  chr17:33213953-33214124
  hyper

SEQ ID NO: 25224 - DNA, 531 bp, Homo sapiens
  chr17:35078547-35079078
  hyper
cggaaataaacaggcggtttggtcttctctttcttccctggcagccttaattgctacttaagcgtgggccctgcacttaacatccggggggcaggcccggtgcgtggtgcacgccgggcgcgctgtgcacagtctccggaggccgccagtgcgaccccgccccacccgcgcacccccgcccggagggccccagcgcgcatgcgctcgccgcagggcggcctgcggggctgtggacgcgaggccagctcgtagggggctgggcggtcagcggggtcaagggacagccacgctgggacggaggacggggacaggggagcccctgcggcgccacttcttcctctccgagtcctgtctgcccttgatggagccactggtggggttacttgctggcggtcggccactttcgcccctccctcgccagcccgccagctccctaaggttttgtggttttttgtcaccaccacacctcagtgttgagctaagtgaggacgtccccccagcaaatgtattggacggaaggaaacggtgtgc

SEQ ID NO: 25225 - DNA, 130 bp, Homo sapiens; identical to SEQ ID NO: 8091
  chr17:35545278-35545408
  hypo

SEQ ID NO: 25226 - DNA, 987 bp, Homo sapiens
  chr17:36102841-36103828
  binary
cggggcgcctggctgggtgcgcgctgggagcggcgagcagccccgcgcccgcgttttgatctccttcccccctctaagccgcgtttacaacttcaccaatgaataacccgcctctcttttcaacctaatcacggctctttgtgtatctttctgttgatgatttatagaaataaattaataacaccccaactccacgtgctgcagtttatgttacgtctcagctgcggccagcccggcgcggggctgggtgcggaggggcgccccaggtccttccagcgccgcgctagaaagcgggcgcctgcggccgggtgggagggcctaggccctgtggcccccggtggccggcggtgggagcctggttcatccgccaggtcctgagcgacctccccggcagccctggcgccccagccgctcctaggggccactctctcgacccctcttagcctccgcgactcacaccttccgcctcgcggaactctcttgcaggagttctctcccggtaggggagaaatcacctccgggcgggagagcgacgagggaagaacctcaaacctatgaattataccaaagtgtgtttggggaaaaaaaatctacaagttcccctgattgttttggctagagggcaaaccgccaggccctcggagcacaaattcaaatgcaaggtcatatcccaccccaaaccgccgctgcggacgtgcggccaaggctcagccccgaaatcgcggcgcttcagtgtccgaagccacgcgatgggctctgtcctaaagcggagtggcccgggagcgacgtgctgtctcagggaaccgctcggctccttagataattagtaaccagctgtcaaagtctagggcggtcggggaggacccacaaacgatcccggccctggggatacactgccagccggcctgaactcccggggagaggccgggggtgggcagcgaggtctggaaacgccctcctttctcagactgagaccagatcctctgc

SEQ ID NO: 25227 - DNA, 1886 bp, Homo sapiens
  chr17:36103844-36105730
  binary
cgcgttcgcccccacaccaccgcgcttcgtttctttggccccgcgcgtgtccacccggaccctgcatggaacatgccctttgcaaatctaaacccgcgttggggatcccggataattccgggccttgcatgggcgcggctaacaagagtgcccaccagggaactcgcctcccagatcccggctccggatgccgcctgtccttcggcaaagaactgcaggtcatcatgcaggtcaatgtgtccgaggccgacatgcggctttccagacccgaggcagcgcgcaggaaaaatgcgcggcctggggcttgcagcggcgcgaggctctgctcccgggaagtcgcagcggtttcactgcacccactcgcaccttcagtcgcgtgggcaaacctcccggcaaagggctccacagctccagttctccccggcccagccccagccccgcggggaaaagcccttgggtctcggacgctggcctgggcctggggagaagaagcccggtgggccgcagggtcgtcccgctaagggattgggaagggtccgggtgttgggagagaagcagagcgccccccgggggacttctctggtgggaaacgggcttggcgagtgtggtcgggcgcagtgtcactcaggcccggggccggggctccaggggttcgggtgggtcccctccacctcgctctgcgcctacctgagcatccggtccacctccgcccgctgctccgccgcctcctcggtgttgagcgcctgcagctccttgaggatgggaggtgtgtcatagtcgtcgccgtcctcggagccctcgtcgccggacaagcggcccttggcgtggccgttggtgagagtatggaagaccggcttggtgtcgggctcggccccgctgccaggggacaggggcagcgtctccagcttcaccccgaagttcggggatggcagcaactcctccaaggcctgaaccagcacctccttggtgaccccggagctcagcagggcgctcaggagttcttgctggagcgacgtgagcttggacaccattttccaaggacggaaaaagaagggggtgagggggtgggtgggtgcgagagaggagggtggaggggagtttcacaagcaaaccccaaatccaggaacccctccacccttcagcctccagacacctgttactccccggggtcccggaggctcctccgaaaggagtcagaaaacttctaacttgccatgatcgccaccattaggccatataagatatgcaaattagtgggaagggcccagctttcggctggatgcaaatgatggtggggagggggaaacccggagagagggagagccggaggggcagacctggagagcagaagacctgggccgggagcggggctttgccagggtccattgtactcacgctggggggctagagaccttcttttactggttctgcttatcagccaaacttcacctaacctttggacttgttaagccagtgccttgcagcctaggcgcggggcttttccaccggttctcagttccgctttagtccagagagaagacactacgcttcggggttcaggtgagagccagaggaagctggggtgctcgtggaagaaggggacgcaggaggaagcgaagagtagagaccctggatgcgtcccggccgacgcaggtggtgggccaggagagcccgcagggcggaagagaaactgaccacttaggaaggggcgccgaggccacgggggaggtgaggcagcgttaggtgtggtgagcatgccctggagggactccatttatttctacctcggttactacctccaggccccagaacctccctggcctggtctggcggtttgggtttgcagaactgcccgccagagagcgtaggcgagggtgaaggagtcc

SEQ ID NO: 25228 - DNA, 1503 bp, Homo sapiens
  chr17:36714786-36716289
  hyper
cgaaggggtgggatggcgaagggcaggggcgggatggcgaagggcaggggcagagggctaagttctggggaagaacagaggcaggaggagaacggatggggatcgtggagaggggagcgttaaaatgggccatgcaaagggggagctgcatggctgtggccgcgagcaggggtggtattgcagggggaggagggcaaggttaagttctggggaatatgaggcaggagaaggggttgggaatatttgcgggacagggtgtagccctatgtaggtccctgccgacagtgcggccgcatggctatggcttccatcatcccggaatggggacgggactggaatgaaggactcaagcgctggcatttgatagagcttctatggctgggacaggaagactaagttgatgatcgatccaaccctgttccaagcctgaatggcgggggtgggcaagatcttacccgttgcccagatggcaattctctgccccctccccagcctgtctctgctaattatcctcacctgacggcccctgggcctgcttgaggagcggactcggcgatgccaagctcctgacaggtgggaccatctgccaagcagggccggggagactgttggggctcaggagggaggagctgagaggacttgggggaagggctctcgctgactcagggaaagggatgcagggcaggaaggaactggaactgccccgagggatactgacgacggaggggctcagtgggtgactggggctccaggagggcgatggggactcagggaaggagaaggagggctcaatgagggggtcacgggcgagggataaggccttggtgaggaagtggaggttcagcgagggagcggaagctcaagaaaggggaaggggagaaagggttcggagagaggccagtgagcggcgaaggactcgggcgtggaagctctgggaaaaggatgaggtagtaggggatggggcgggacttgcggcaagggacttctaccagtaggtgggcgttggtggggcggggcccaggacggggcggtacctggagcttgcgcaactgctggagctggccgcgcaagtcactggcgctgttctgcaggcctcgcaggtgaagctgcatctgcagccggctaacggcggtaggctgacctgcgggggtgctgctggccgagggcgggggcgggccggacaccggggtggccccgctgctccggccgcctgacccacaggctgcagaggaccacgaggatgggagaaagtgaacaaactgtgagcctgggaaggactgggctgggacaaagtcctccctactctccgaccccacacagtagccagagaagcccgtggctctacctgccccaagtggtcagccctaacggtggggaccaaagtgccaggaaaaagacctcttgggctaaggccagtgatgtagctattgcttaatccccactttatagattagaaaacaggctcggagagaacaaggatgggggagggggaggttcactcac

SEQ ID NO: 25229 - DNA, 665 bp, Homo sapiens
  chr17:37365986-37366651
  hyper
cgggggctgtaaaccggaaccggtggaggagggggcgctcatcaggaaaggcagcccccactctgcatccgggcagcgccagcagtgccccagcacccccgcagcccgcctctccttggcgccccgctcccctccgcctataaatagcacaggacgtgctcgccgtggcgatgacgcggctgggcaggcggaggggaaggaggcagctctgccagagcggtgggcggcgagcgcggcggcgggaggggtgcggcccctccatgctgggctccgatgacaggggcgactgagtcatcccggggacccacgggccacgactgtccccgccgccagcgtttctgtctccggcttgggggactgcggggacgaggctgacctcggatgggtactgagccctcccagacccccggcacgcccggtctcggagggcacctctgggtgggcaagatcggcctcgacggccctggcgcgcaggagcatgtccgcccctgcgcgactcaggtgcacatggaggcggaaagtgaccgcagccccaagccgtttccctccagcgtccccagacctcctcccactttcctcaggtccccttttggctctccccagaccccaccctcctcgggctgctggaggaaagggatgaggcctgggacccctgccatgttgcc

SEQ ID NO: 25230 - DNA, 814 bp, Homo sapiens
  chr17:37380796-37381610
  binary
cgccaggagtctgggctccgcctgccttcgcggggagtaatttattcatggtgactccctcaggagtaacaatcatccataattagggttaatgatgacattcattaattacgatgacttctctttttgcttctacccgctccccctcctctggtcccgctcccgtggtggggcgcggggctgcctgtctttctggtctggagccacaaccgcaggcccccgtcctcgcccgtgaccgacggccggcgctgctgcaggccccctcgcggactccgcagctgcgcacccccggccgcggcctcgcgtccccgagcccaacagggctaggagcggggaatgcaggactgcggaggggcagggagagacgccctgagacgcggagataaacacccggagacgccgggagagacggggagagacgcacacagagacaccaagacacagacacgcaggttgtagagacaaattcagagacacgagcgaggatagaggcgcggactgagcccgggactgggacccggcggccgctggagggtgcgcctcgcacgcacagccgggcgcgtaccccgcccgcaccgctccacgcgcgccctccggcctcgctgcgcccatctctccaacgaagaccagtggccgcctccccagaaggtcgcgatggcgcgcgcgggcgtgcggtgccggtgtgatcgggggctccttgtggcccctcgtcgccaacccactcctacccccgggagcggcgcggagcctcagtggtcacgcgggcctcgcgaccgcgaccctaggacgcccgggcccacaggaggaccccgcc

SEQ ID NO: 25231 - DNA, 797 bp, Homo sapiens
  chr17:37760007-37760804
  hyper
cgtgagaaaccggtccggctttgcatctcatttacataaatatttattaatcgtcattaaactgaacagaaacacgcaatgcacttcgggtgtccgacgggagtttcatcttcgctacaagaggaaggtaaaattgcgtgtgtgtgggtgagtgtgtgggtgtgtcgcctgtgggattgcatttttgcatcgtgtatttggatgcctgatcccctgcctccggtgggcagagggtctccttttgcccctttttgggggaacctccagtaggagccctcagacctctccccgcccacccaccagctaaagccaagaggactccttggaccaaaaaatactctctccagacaccggaaatcgccaggtggcacccaccgaggcacagtccgggcaggggtggggctgcccccaggtctccatccccacccctcaccccaggaggggacagaatggccgcggggaggaggagccggcgagctcacctccttctgccccccggacgccggcgccgggcctgcttgtgcgtgcggtgtggtgtgcgtgtgtctttcatgcaaaccctccctccccaaaccgaccccccaacagtttgccattccatacaaatttggaaacaggtttttaaaaaacagcatgacgcacaacggggacggggcgggggagggcagtggcactggggccccaaatctccgagtcactgattgtaagaacctggggagggggagggggcggcgcgggcccccacttcaccaaagtgcacagatccgcgctcgggcggggcggcccgcaggccgggc

SEQ ID NO: 25232 - DNA, 92 bp, Homo sapiens
  chr17:37879800-37879892
  hypo
cgctgacacctagcggagcgatgcccaaccaggcgcagatgcggatcctgaaagagacggagctgaggaaggtgaaggtgcttggatctggc

SEQ ID NO: 25233 - DNA, 156 bp, Homo sapiens
  chr17:37880961-37881117
  hypo
cgtacccttgtccccaggaagcatacgtgatggctggtgtgggctccccatatgtctcccgccttctgggcatctgcctgacatccacggtgcagctggtgacacagcttatgccctatggctgcctcttagaccatgtccgggaaaaccgcggac

SEQ ID NO: 25234 - DNA, 215 bp, Homo sapiens; identical to SEQ ID NO: 24064
  chr17:39682514-39682729
  hypo

SEQ ID NO: 25235 - DNA, 442 bp, Homo sapiens
  chr17:40332770-40333212
  binary
cgcacctccattctctcccctcgcctcgggtctcaccatgtccaggagatccgagacggccccgaggatacttgccccccagctcgaacctcaagccccgacctccgtcccactcacgcgttccgtcaaaacgggtggcgatggtgtccaggaaggtgttttgcggggccagcaaccccttcatgaccggcatggccccggggcgtgggttcaaggcgcggcgctggggagctttcagcgcggccgggccggagggggcgcgctgtcggaggggccggggcgccccatgcgccctcctgcctcctcccctccctcttactgccgctgccgctgccgctgcctctgctccgaaccccgtagctctcggctcggctcagcgccgtttcggtcccccccacctccccacgggccaggttcttcccctcgggctcggcccgcaccc

SEQ ID NO: 25236 - DNA, 960 bp, Homo sapiens
  chr17:41984320-41985280
  hyper
cgacccgccccgctacagcttgggaagcgggagaagcagcgcgcgcccttctgcggaccccctcccagggaagattgtggtgttagctgcctagggggaccagggggccaccgggacccagcgcaacctctgtctcgctccccaacccccggaagcgctaacagcacggttcttacgtaatgccgggcttctaagtacccccaacccgcacagcccccggggaggccgcgcagataccggggcccctcacagctcaccaccttggtgcctgaagccactttggagcccctaccgcaggggcggggaccagtgtcaatgggcagcggggcttggttctcccaaccagcaccccagaaagagggcccaggggcgggggcgggtggacagggagggaacgggcctgggtgaaaggggcctgtggagtttaaacccagtgaatagggtcctaagtgccgtgtcaggacgaaaagaaggcggaggtcttgggataggagctggcccgggggccgggggacgcctacctgcgccccgggaagcccctagctccgggcggctccagcgcagccgggcgctcagcgtttattgcttgtcaatcgctagcccggctcttaaagcggcaaggcctctccgcgagggggcggaggtccggaggagaggggaggtgaggagaacgcggaggccggcacaactcggaggaagtagtctttcccagcagctggtacgggggcagccaggtagtggtttgggagacaccgcacagaccacgacgccctgctggagtcccactgggaagggttagggaggcaggactggtaccagtacccgctggtgcccctcggctcccaaggatcccttaaaggggcgatggtaaaagtgcctaatgagaccggcttgattactccgcccacccatcttggcttagaccggcgttctagttccaggcgtgcctcacttttcctc

SEQ ID NO: 25237 - DNA, 794 bp, Homo sapiens
  chr17:42081919-42082713
  hyper
cggaccccgccccgaccaggtccagccccgcccaacggcaagttaagagccccccagtgccagacgctccagacagactgccactcttggggggcaagagttggttgtcgtcatggcgacggcgctgatggctgtggttctgcgggcagctgctgtagccccgaggctgagaggccggggaggcactgggggcgcccgaaggctgagctgtggcgcgcggcggcgggcggcgaggggcaccagcccggggcgccggctcagcaccgcctggtcgcagccccagcccccgcccgaggagtacgcgggcgcggacgacgtctcccagtcgcccgtcgccgaggagccgtcgtgggtgccgagtcccaggcccccggtgccccacgagtccccagagcctccttcgggccgctcgctggtgcagcgggacatccaggccttcctgaaccagtgcggggccagccctggggaggcgcgccactggctcacgcagttccagacctgccatcactccgcggacaagcccttcgccgtcatcgaggtgagcggagcccggcgtgggccgtgacgcagcgaggggatggggttgtgcggccacctgtcctcaggcatggcaggatacgctgcgggctctgcgcagcggaagcgggaaggagcccggcagggcccagaccagcgccgccgggaatgggagaggccgtaagctcctccggaagcctcccgcccagcccgagtgaggatcctgggggaccccacccgccaggtgtgatgctctgaagaaggcccccaacatgggc

SEQ ID NO: 25238 - DNA, 815 bp, Homo sapiens
  chr17:42091712-42092527
  binary
cgaggcgctcaccttcagccagtccccgtagtggacgtagcccccgatgtaggcggcgtaggtgctaatggccaattggagtgcggcccccagcgcgaaccagcgccgcttcacgccaaaggacatgaaactagcgcacagcacggctgcccccatgtcgaaatacaggtaaggcactgggatgtcgggcttcctgcgagccgggagtggggaagcaacgaggacagaatgaagcggtgggggaagaagcttgagaccccttgagttcccacaggctccactgctcccccaaaccagactcccctcccatgggcaggaccgccctaccagatttggtccgacacccagaccagaacccctcccagggaggtcccaattcctcccagttcaagggtcccgacttctagcccccaatttcttgcccacatcaccgccccctgccgcgtttagcggctgcgtaggcctgctcaccggcgtgcctcagccctctcagcgtacagcatgagctggctgaagcagccccaaaaggggcagcgtgtgagcagcaccgaacccaactgcatgatcagctgcaacatccaccgtctcgaacctatcttcgacgccatcttgggaaagggcagtccgctgcggcctcaccccagtcagagaagcaggcgcggggatgggacacgcagcttccgggtcaagcgctttttctttttcctcccggaaacaacggtgtcattctctagttccggatctaaggtgacccagttgcgaagtccagccttctcgtctgctcatggagccttcagggccatatttgtccctgc

SEQ ID NO: 25239 - DNA, 135 bp, Homo sapiens
  chr17:4236565-4236700
  hypo
cgttcacatcaaaagtaatgtaaagaatgtgtgtatctcagccatcattttaaaagaagagaagaaaaaaacttacgggcgaagctgttccctaaacagctaaaatatgtaaaatgtaaaagacgggccgggcac

SEQ ID NO: 25240 - DNA, 502 bp, Homo sapiens
  chr17:42988603-42989105
  hyper
cggttctcctcgccctctagcagcttcctgtaggtggcgatctcgatgtccagggccagcttgacattgagcaggtcctggtactcctgcaagtggcgggccatctcgtccttgaggctctgcccctcttcctccagccgcgccagcgcctcctgataactggccgcctcccgcacgtgccgctcctcctgctcgcgcatctgcctctccagggactcgttctgtgggatggagccggccggtcccgcggagccccgacccgacttggggaggtttcgaggcccggcccccggccccaggccccgcctctagcccgggggtaacgttcaggccccgccctcgacccaggtcctcgtccctggcccttctcccctggcatctcctggggtggccgtccctgctccgcccgtccccgtcctgccctggccgcgctcaccgtgccgcgcagagactccaggtcgcaggtcaaggactgcaactggcgccggtagtcgttggcttc

SEQ ID NO: 25241 - DNA, 242 bp, Homo sapiens
  chr17:4446272-4446514
  hypo
cgcagccctcagcagtgttgcccttcaagacccggagcaggtagagagaggcgttgaagtggtagagggcggtgggggagtcgggctggcggccagcctgctgcaccaaccgctccacctgggcgtgcagggcccctgcgcgctcacccaagtcgtggcagtagcgccgggcacggcacaggtggtgcctgtgggtggtgaggacgagagctggtcagaacattctcggtccaccctgctcc

SEQ ID NO: 25242 - DNA, 107 bp, Homo sapiens; identical to SEQ ID NO: 8109
  chr17:46006406-46006513
  hypo

SEQ ID NO: 25243 - DNA, 784 bp, Homo sapiens
  chr17:46654966-46655750
  hyper
cgaaaaagtcgctggtgagaatggtgaagaggatggggaacctacttcaaaggcgcagggcccaccaggccataaaaatttatgggggatgtaattatgtggctctgaaaacaggcgaccgtaaatctccggcaatggcgagtttatagcggggacaattggcttccccagctcaacccccccccaacccatgcctccgaagtccctttggtgtaaagctccaggggtgggagggggaaggggtgcccacgcactcacccgtgctcacgtgaactttgcgcatccaggggtagacgacgggctctttgcacgcggagtgggacgggctggggtgcagggggttctgggcgcagggaggcggcggggggctgctgctgaccgcctcgcagcgctggccgggctccgggaggagggccccggcgggtggcggcgcaggagcccgaggggacagaccgggcggtggcgggggcggcgggggtggtggcggaggcggcgggggcccagggtcccggcaggccgcgtagcgctgcacggtgcacgccgcgcgccgcccgaagcccgcctccggctggaagctgctctctcgcctctggccgccggcgtagtacccgggcgagtggtcgctgggtaggtaatcgctctgtgaatattcctcgcatggagggaacttggggtcgacatagtttgagttgatcaaaaaagaactcatagccattaatttctgggaattgcccacaaaatatactaaaatttattccgacccctgactcgttttcctgtttcc

SEQ ID NO: 25244 - DNA, 754 bp, Homo sapiens
  chr17:46655789-46656543
  hyper
cgcccacgtgatcctccgagccaatggccgccccgcctgcgattcccggataaggaaatctgctcacccggaccccactccagccaaagaggtttatttccccttcttcccttccccctccccacccacccacccaacaccaggatttacatagggctcctgcggggcgaccccctccttgcctcgctctctccgggatcagagagagagcgagagagagagcgcgcgcaggttgcgactggagggcctgttggggcgctaggcagagcgcaaaccctagatcccttaagaagttggggctcccggtgtagccctcctgttctgcctcacctctgcccagcattctgtaccttccaaaggccccagtctcctcccctcggcgggagggagcgctagcaccctgcgtctctatggggagttaggttactggcgggttgggggctccgtctcgaaaggggaacccatacgggggccagagcacagagcttggggcttttctctgcagctggatggggaagggtaggggtgagagaggaggcgtccagagctagagggcgggtgcgcagagggacttgtcagagatgaatggaaccgcgggcggatcgataggaaattcatgcactaattcggggagacttcgccttccaaatctcatttagctgcacggttagctagactgtgtccgtcagtccgtctgtcccccttctcctatccactcctccctttaacccacacggcccaagcctggagaaac

SEQ ID NO: 25245 - DNA, 802 bp, Homo sapiens
  chr17:46659093-46659895
  binary
cggcagagccaccgcgggtttgggtatccttgatcctggcgcccaagagcagagatttttctcctctgcgccctggaagtcaccacctgccaatcccaccaaggcgccgcacccccctcacccctccagccgcctgagatggagaacagggtttatgggcgactcccaggacgggtttcaccggagcgggaggctgcctctccccttcaccgcccagaaggatacgaacagcaacacgcataatagtaaaataagagcaggggctgcgcgcgagctgagccacctcccctgcgctcccgggtctttccgtggcttcccagccgccttctcctggcagccacaggttgctagcgtgacctcgcccctcccagccaccctccgccgtccaggcgtgcccagtccgctaggaatcatcaccttttgttggcggggagaagggactcagcgagggagcgaaaccgaaggcccgagcggaggcgagtccccagccggcctgcgcaccggcggcggcggcgcggaggagagaaaggcccagagggggcgcgggcgagggtactcaccgggaggctccccagccccgccggccgccgagccgcccgcggacgcgccgggcaacagctgagctctctcctgtccactattgtgtgtccggaaaaccggaccgcggcggcggacacagccacgggctccctcagaagccggaacgtgacttttttttttggtgtgtttttgttttggaagcgcaagttttcgtgttaatctcatactttggcagtctttgttaaacagctaggcgcgtcac

SEQ ID NO: 25246 - DNA, 639 bp, Homo sapiens
  chr17:46723731-46724370
  binary
cgggtgccagcggacagggaggccaaggcgttttcgggtgcgccccgaggccctacccgggaagctgcctcggtctggagatcaaggttaagccggtggccccgggaagcccacgcctgccacgggcggttggtcctgaaagctcgggccacggggctgcccagcttggagaggggcctttcacgccgcagtccccagctgcgagaggaagggctgcgcccgcctcctcacctacctctcggaaccacgccgtcccccgcgcgtcttcgtagactgcaggagtccagggcgtctggggactgtgacggcgcccaaggcgggggatgtggcggctctgggtcgccgccttctgcccccgcctctgtgaggcctctcgaggcagtgtctgtgtctggggcagcgacgccgacggcgctgggggcgcgaaggggctcacgctcctgcgttcccctggcgccggtgagtggcgggcgaggacagggtccgggagggggataggcgagagcgcttcctgcctccgcccgggcggggctcggccgtctcacctgcccccacccacggcgccgtcggatcccagagcggctggtgaggagatgggcctggcgcgccgcggggaggccagaggcgcggaggagcagc

SEQ ID NO: 25247 - DNA, 1190 bp, Homo sapiens; identical to SEQ ID NO: 24069
  chr17:46795376-46796566
  hyper

SEQ ID NO: 25248 - DNA, 951 bp, Homo sapiens; identical to SEQ ID NO: 24070
  chr17:46802321-46803272
  hyper

SEQ ID NO: 25249 - DNA, 637 bp, Homo sapiens
  chr17:46806440-46807077
  hyper
cgtccggggggaggggaggcgtggtgggcggaggaagaggggacgaggagccgggccccacctccttctcctcctctccctccctagctttctgtctcctgcgctttgacaggtttaacgagagaataaaaagctctctctataaagtgtccatctcctgggggggaaggggagtcgggggtggggctgggaggccgctcccggcctcagaggagaacccgggaatgcgcctgtgtaagaggaggctgggaaatgggggttaataggtatttctggcagcccctggctttgggtcctgggtactagcaccccagttcattcccggtacccttcctgtcccagatgtcctggaatgagctgctccgggccccagggaggtgccctggacgccccttacccagggactcgctactgcccagaatgctctggaggccctgattcgggtgaggctgagggaagaggcgggagacacgaacgtagacgtagaagacatgcgatctggatggaacccaggacactccacttccggacctgaaggggaaatggagcctctagagtggcctgtggaagggtctggatttccctttaagtaaagacatacggagggacggagacccacaggacttgagggagggac

SEQ ID NO: 25250 - DNA, 819 bp, Homo sapiens; identical to SEQ ID NO: 24071
  chr17:46810263-46811082
  hyper

SEQ ID NO: 25251 - DNA, 1406 bp, Homo sapiens
  chr17:46824276-46825682
  hyper
cgctttataattccacgatgtttgcatcattttggcttctgagaggctgcgttttgaggagacaccagaagcctgggaagttcgcttactggttctcaagtcagagtcccccttcccggggctccttctggggactccgggggagagggatctctctgtccatcctgcaactcctctcctggcatagatgccccgcacccccaccttgggccatccttatctgcctgttccccatcacgattgatcctccagggtcgccaaggctcctgctgactacaaaaacatccccaagattcccttcttgacccggttcaggcatatctctttatacttccatgtctccgtttctctatatttttactgtggaggactcagaagagagctgaggctattgtccggggaggaaaggaattcgggcaaatttgtgggtaggggcccagacccaagacccgtgtttctcctgcgtgggttggagtctgtctcaggtcgctccagggacatcaagagcccgcgccgccgagagcccgcgccgccgtccagcgggaagcagcggacccacaggggcctccagccgcctccccgctcccgccccgtgtttctcctgggcctccagctccgtggagagagctgagagttctcggcccgcgggcttcctcaccaaatccccaaaaaccgacgcaggcacagagggctgactgtgttttgagtaatgcacgcgaggcagtccaatccggcgagatggcccgaagcggggcccagcggtcgggggtgtgggtctggagagagagggtctccccacttccttcctccggctgctcggtcacccatcgactacccgggcggaagcggggcgcagaggggcgcagagggaggcattgccctccaggagtatctattcccatcggggtatggtgaatgccatctaggcccatgctccattcccagggccccctcggttcctccaaaggcgtccacccagaagcagccccagtgtcgcgcattgactcccgccggccaagtcgccgccgaaacaggatctcctaaagcgggctccaccgggtcccagggcgaaaaggtccgaagatctacgctgtcggaaagacctggagaactcgggaagcccagcaacaacaaacaggtttcaacttggaaacaaaccattaaagtttggcttagtttttggtgtgaatggtgcaaataatttctcctcttcactcttcagtcgatctcagctgtatagagctgctctgcaagctaaaaagaaattagtatctattccccccgccaacaatttttttttaacccgggctaccagcttaagcaactggtatcattcttgttgaattaagctctgaaagctcgcctcagaaaaaaagtttttattttaaaaaacgaattattaagtc

SEQ ID NO: 25252 - DNA, 231 bp, Homo sapiens
  chr17:46826849-46827080
  hyper
cggaattccgaccttattgaaaaaaatgaggagaggtttgttttgtttcttaatcatttcttcgccatctctgactctctttaaggttagaagacacggaaaagttccacattgggccgggatggcaaaggctggatcactgcagaacaaagacctcagtcctcgcatccccaccccgacccccggcagcctctttcgctctaagcctcagcctagggcaaactcccctcc

SEQ ID NO: 25253 - DNA, 397 bp, Homo sapiens
  chr17:46827345-46827742
  hyper
cggctgcttaggagtgggacagtaaggactaggctgggtctggagggctggcggggcaggagttgggggccaggtaggaaagccaggggtcgaagggatcgattctaggggccgcagaggctactctcgtgctctggagaagcaccgcatctttctccggacccccgcgctcagccaatcgccccaaagtctccaggtgggggctccgcattaccagtcttggtcgcaaaagcagccctttcaatcgcaccgaatttcccctggtgtgaaaaggcgccatcgccagcattttgccggggtttatgcctcaatcccgcattccagccacttccacgaattacttggaagacagaatggtttgtgcccatttatcctacctggagcacagacaagaaac

SEQ ID NO: 25254 - DNA, 1263 bp, Homo sapiens
  chr17:46829437-46830700
  hyper
cgcacctccaggcgaccctgcagactggggtcgggaaaaggacaggctgagaagtctagaaaggcaaagaagttaacgatgtttggcagtctgaggtcttatcagtgtgttggggtcaggtgggggccgaggcaacaagctcaggcagacgccagccggggctgggacggtgcaggtgaggaggggctgcctgggggacagcccgcctcactgacccaacctgggacaaggtagtggctgggttaggggctggggtgtgtcttggagcccccaggtgacaggagagggaggaagggagtgactggtgaaacattaaccccctcagggttctgaagggaaggggaacatccttagaggacacagggagaagacaaacgtcccttcatcctgagattcacttggaaatcccctgaacttccaactcctggctgatgaaacggagcaagttgtctctgccttatggcctccatcaccaagcctgaaggagagtctctcagcccggtttgggagtaaacccaaaaccgttcattcgtcagggaatgccccaggttggttcacgcgagttttaaaatgaatcggaggtgaaatggagctcattaccctctcttcagcccgaccctcaatctttggcagcgaggggcagttatgggacggggggcgggtgggaagagcgcccagggccccctccgggttctcccacggtttcccgcatctgggcctggccagcgcctttgggaggaagggcctaggcgcggtagggatgcctgggagtctagggagtggcgggggtgtttcttggcccggcagggtggggtttccaagcgtgatctcctcgccctggcagagccggggtgccgggtgggggcaggctcgggggcctgcctgcggtgaatcaggcttgtgacctcaggccgtccaggtaaacatcctctgcgctttggaaactgttgggactagaaaggagcgggcggcagggagagggaagggggaaggagggattctgagtggaggagacctctgaaatcctctctcctgccaggaaaccagggcggtcttccaagcgggcagccacgttgcctacttgaggccaaggcagaagcatcaatcacatggggcgtagtttctgtctggctaaagaacggctcacgcggacctcgggaatgcgactgtggaaacgacggggaagctggaagggctgggtggcgggggaagctggagggcacagcttccagattccagtttgttaagaatcacctgaaggac

SEQ ID NO: 25255 - DNA, 1722 bp, Homo sapiens
  chr17:46831220-46832942
  hyper
cgctgcagagccccgtgcttagtgaccaaaataatgtcccgcctgcctcatcttcctctcggatttttgccaaggccaaactgcgcgtgtcccagaaaaaaaccctcggacacttggcctctgccctgtctcagccgagtgactaggatgactgggaagtgaatcacaggaaaatcacccaagcccactcttctccacagccggtgagcagaaggaaggaagcaaagaaggaagggaggaagggaagaagggagagttcagttccctttcgtcgttcacacagtggtcctccacaccaggaaacctaagggctctgtggagggccaggtgccgtggcagcaacactcctcagggcctgtttcagcaccccatttacgtggcacatgaaaaattcaggatgaacgccctggctgaaagctcttcctgggtttgggacatcagaagaccttcccgggatgggctcttgtctctgcagtagctatgacctgcacataaacctgtttcctacactgtaaaattggcgtaaccaccattccctcccagtctttctctggagtcctaatgggaacagtgacggaatgaaagtgaccacgctggaacccgaagcgctgttcccctccgtggcttcacactgatctccacactagaattccgtgtctgcagttcaagttcaaactactgtggtcggggaagggctacagagatctcgcttggccgtggagtcaccggccccgtccagtcttgcttgggacacatactggtttacactctctcgggttcagtttcctcatctgtaaatggggctcgtatccccctcataaagtggtttgggggataataaagcttgtaaaagcgctttgccccagtgcttggcacataatacgcgctacgttaacaatgtcgcgtacacgcccgaaccggaggaaccccattccacgctccttctggaaccgaattcacctctgaggctttggggcttcagagccggagccgcttgggcaaaaccagcagaacagcgagagggaacgggctggtctagccctgccctgagcatttctactgagacccccggtcctgcttcttccagcctctgctggatttctctccgacccctctggagcgaagccctttggccctgcgttgcatgcggcacggtgcgggttcgggctctgcgctggagccgggatgccctccggcggagggtgcgcgtaggcggcgcctgggcgtgagccccgcctgcaaggctcagcgtcggggaagcacttttctcgtcgacccggggtctttttccgccaaggagctcggggctcaagaactcgggactgggctgtgggcggggcatggttttcctctctgggcgtcctaatctccaatttcaggcaaattcgctaggaagaaccttcccgagcgcgccttctccaacaggacctccaagccagcctcacgcacgcaggcctggctctctcctgcagaatccccacctgccctataactacccacttcagatatgggggaatggaggagatattccaatcacgccatctacctacagtttccacggccccttctgttgaatggtattttcctttagggtccctagaagcagagcaaatgaaaaggccagggggaaaaaaaaaaaaaaaagaaagaaccggtgaattggctctgagcccaataaacggttcctctttccttctccggtcctttcccttccaacagagc

SEQ ID NO: 25256 - DNA, 163 bp, Homo sapiens; identical to SEQ ID NO: 8119
  chr17:47657789-47657952
  hypo

SEQ ID NO: 25257 - DNA, 822 bp, Homo sapiens; identical to SEQ ID NO: 24073
  chr17:48619111-48619933
  binary

SEQ ID NO: 25258 - DNA, 713 bp, Homo sapiens
  chr17:58498618-58499331
  hyper
cgacaacaataacaacaagacgtttgctgaacatgctggcatagaggacaagttaaaaagtttctggactcaaagggtgctcctccaaagctccgggcctccgggctacccctacttgaagccgctatgcccctctcctgtgcccgaggtggccgctgggtggcaggggaggcccgggccgacggcggtcccaccgcactgtcgcgaaggcaggcgaagaacagggccacactgagtggggacaactgggcccgggcccagaggacacgaaggaaggtccgggagaaggaattcctagtttcagggaagaaaaggtggctcgagtgaggaaactgcgggggcaacggtctctcgtcgccgggaccccgccgtgtgccgcccagggacgcgagggggcgctgctgccgcgccaggggcgagggtcccggggcctcctgagcacctcccggccctgcccggccaactcagactacacccggactctgcccaccgcgtttccgccctcggcctcgggtccctggagggctcgcgggtaggaagagtcggggtggcgggactttcgccgacacccggctccccgcctggtggctgcgcacacgaggccggcgacgggacttgcccgcgtctcagcgcctcctgtgtgaagcgggaccgctgcggtacctgccccagggaaggccgcggggagggttacagagcccgtaggcactggc

SEQ ID NO: 25259 - DNA, 1447 bp, Homo sapiens
  chr17:59528891-59530338
  hyper
cgcggaatcctggccctgggccgcagtttccccaggaggctctgccaagcctggcaccttgcagcccggcctgggctctgtcaaggcccgagccggactcggctccactcagaggccggcccagcacttccctgccgccgccgccccgcacccggccaccgggcttcctcccagtcctcacccctgacctccgcggccgacttcgaggcgcgccaggccgggtccagcgcccgcggccccctgggccgggacaaggagggcgggtgagcagaagggccgtgcccagggcctggaagtgcaaggccgcgtggtgggcatggtagggaagcggagcgtgggcctgtgaggcgcgtgtgcgcctgcgacctcgggaccggggctcccaaatgaacagcgcgcacagctgggagcagggcttggggagcggggctctgcggccggggatccgtagaagccgctgcctggaagcgggcgccggcagggggtggccagacccggtcgtggagcgtcctagtcttcgggcacggcggggccaggcgagccctcctggttgtcgagcctcggctgagagccgggctgctcgcccttgcttcccgcctctctaatctaaaccatgcggggctcccagcccctacccggctcgcggggcccgagggccaagaggagggcactgggccgcgcggtggaggagccggcggctcgcgtggggctcgggatcttggggaccgcgacgccggggaaccctggagcccccctccccgggggacagcgggcgcagactgattgacagcggcgacgtcagcgcggagggggggcggccccagagggagggagggaggaggagggaattgaggccccaaagtgcagccttggagatcaagggcccgctccagagccgggatgtgtccagccccgagggcacggcaggcagctggaccctgacccagcggcgcggagtcggagccccggccgtcccgcgctcctcggacccgaacctgcaggggacctcgggccgctggcgcctccgcatgcggcaccgcaattagggtgagtgtgggttccagccgagtggggacgagctgggcgtgcggggctggggccacaggggctcagggttaggctgcggggacggacaggaggatgagctggaaaggggtgagtcacgcgacccggggaagaacttcaggggcggtcaaagttgcaggaaggcggcgcgaagtgccttgggtcgggccgccgcctcggcccgacacccagtagttggggcacgagccctcctctctgagtaacgcgatgaattgggtctagagatccaagagcatagaaatatcgacagcgccagcaccctaagaacaaggccgtgacaggcggagcggtggcctggaaattggtgtttgcagaatatgcaaggccaaggaagagggccccggtactggagcgaaaatcc

SEQ ID NO: 25260 - DNA, 910 bp, Homo sapiens
  chr17:59531682-59532592
  hyper
cgtctttggaaaacgaggcagctgaaagcaacagaccccatcgcaaaggcagcggaggttgcgggccgcacccgcggaggagtggatgtgaaggacgagagcggaccgctatgcggtgctgagtgcgggaccccgcggtgctggcggcggccgagcgcgcccaagctcgaggtccgagaggaccgcgaggacggccgccccgggccagccgggcgtggaaaaaaggaaattgctgggaagggggcaagctgtcccgaggtctggatgtggcttcgtggcggagagaaaaggaagaggcaaaccctgagcccgggagggagagcactgagcaggcctcgtccccagtccgagctgcgggaccggcgtcagtggacgcgggcggtgaaccagctcctcacagggcagggctgagcgcgtaggactgagagcgcagggcgcgagccgcagggctccgctgcacggctccgggtgtgacaagagcccagcagaggaccccatggccatgcgggccaagcgcgagacggcccctccttgcgaccccgcaggccgccacatctgggaccagcggatcgcttggtcgctggagccgatcccgccggggccctagatatagttggacccagcgcgctggccggagcgggcagctaccctactggcgcagcggccctgtgtggggactcctaggtttccgaggctcggcccgcgttcgcacgtggcccgaggcgggtgctggcgctggccatgtccagcgagtctcactccctgcaggctgtggccgaagactggtccgcctgtcaaccttatctttatgggtttttcccaacccagactggccccggcccctttttatctcctgggttgcacttggcttgtttactttgcgaggtcctgggagtcgaagtctaagccc

SEQ ID NO: 25261 - DNA, 499 bp, Homo sapiens
  chr17:60766832-60767331
  hypo
cggggtgagggaagcagagcccagcctgaaccctgaccccttccctgtagacccctccctgagcccgtccccagcagcgctgccccccgccccgggcactgagctctcctacctcaacggcaccttccggctgcttcagaagccgctgcgctggcacgatgccctcctgctgtgtgagagccgcaatgccagcctggcctacgtgcccgacccctacacccaggccttcctcacgcaggctgcccgagggctgcgcacgccgctctggattgggctggctggcgaggaggtgggctcccgacacttttgccctgggccccagccttgcccgggttcccctccctgccccttcctgcccccgccttatccgcaccctatcctgactattcccttcctcccaccccatggccccccatgcccagggctctcggcggtactcctgggtctcagaggagccgctgaactacgtgggctggcaggacggggagccgcagcagcc

SEQ ID NO: 25262 - DNA, 738 bp, Homo sapiens; identical to SEQ ID NO: 24077
  chr17:61777761-61778499
  binary

SEQ ID NO: 25263 - DNA, 523 bp, Homo sapiens; identical to SEQ ID NO: 24078
  chr17:61926187-61926710
  hyper

SEQ ID NO: 25264 - DNA, 57 bp, Homo sapiens; identical to SEQ ID NO: 7023
  chr17:66913081-66913138
  hypo

SEQ ID NO: 25265 - DNA, 999 bp, Homo sapiens; identical to SEQ ID NO: 23108
  chr17:70215682-70216681
  hyper

SEQ ID NO: 25266 - DNA, 973 bp, Homo sapiens
  chr17:71948405-71949378
  binary
cggttcctcgcattcatcccccaccgaacccacccacaaaatgctgaatcggtgggtgagatccccatagcaacggctccgatgccagaacccaggattacgacaccggatcagccagagacgcgctggaggggcccaggaggggctgcagcgcgccgcaaatcccccggggcttacgggagccgctctttaggagacagcgctggacgaaccgggcggggtggggatggataatcttcaggcgccaacgcaaaacggccgcaagacgtggccaggccaggaggctcctgggtcccgggcccgcgatgtggcccttgcgcggggacaaagacgaggccatcgccctcacgtgttcccaaagacgcccaacctcatcaggaggccgccccatccgccacctgggagcgtcccacacgcccgggcccttgaggatgtcccctcggcgatgtgcctgaccgggcgctccccgcccgccaacctccaacctccaacctccgccctccaccctccaccctccttgctctgtccgcgtggacgcagcccccggttcagacactagcgggtgcgcggggccgcccaggacggcgggagaggacggggccctccctcccctctggtcccccaaagctccccggacgccgcggccgcgccccctgccggctccctccggccggctcccgcgtcccactggggctcctctcccgctgcaaggtcagcgcttccccgccccacgccctccacaactccccgcccttccgttcctgctgccgccgccctctccacccaggctcctgtcacccaccacgggagttcacacgctccagtccatcggcctcccccggcccgaccgccctggctcaggcaaatcccagcctgcacttcccgaaggaagtcccctccacgcacacaccctacacgcacgcacacatttacacacacgccctcacacatttacacacacgccctcacacac

SEQ ID NO: 25267 - DNA, 595 bp, Homo sapiens
  chr17:72367880-72368475
  hypo
cgcagtggccctggcgcgccttgccaccaggaccaggaggccctcctactactaccttctggcgctcacagcctcggatatcatcatccaggtggtcatcgtgttcgcgggcttcctcctgcagggagcagtgctggcccgccaggtgccccaggctgtggtgcgcacggccaacatcctggagtttgctgccaaccacgcctcagtctggatcgccatcctgctcacggttgaccgctacactgccctgtgccaccccctgcaccatcgggccgcctcgtccccaggccggacccgccgggccattgctgctgtcctgagtgctgccctgttgaccggcatccccttctactggtggctggacatgtggagagacaccgactcacccagaacactggacgaggtcctcaagtgggctcactgtctcactgtctatttcatcccttgtggcgtgttcctggtcaccaactcggccatcatccaccggctacggaggaggggccggagtgggctgcagccccgggtgggcaagagcacagccatcctcctgggcatcaccacactgttcaccctcctgtgggcgccccgggtcttc

SEQ ID NO: 25268 - DNA, 603 bp, Homo sapiens
  chr17:73073429-73074032
  binary
cgcagatgctgtgctcgcgcggcctgtccgagggccgccactaggacgggaggtggaggtgtccaactcgtgggtgtgcctgggcgtcacctacccccgcagctccccgctcggcggccgcccgagccgcagcgtggtctacctgctgggccgcaaccccttctcgtggtgcctggagtgggacgacaacgcgcagaccgtgctgcacggcgcctaccaccgcacgctgggcgtggcgctcgactgcgacgccggcggcttgtccttctacggcctggcgggtggcgccagcctcttctaccgcttcctggcagccttcctcgagccgctctaccccgcggtcatggtcagcagcggcgcctcggccacgctcaagcggcgcccggagcccgcgccgcccgtgacagcaccccataaataaacctggacttatctaagcgctggctggcgcgccaggacggttcccggccctgcgccatcccacctcccaaaacgcaggcgaccctttctcgccacagccacaggagggctctaatccggctagagttcccccaggcactggggacagtcccgtggccttgtgggtgggggattcctgactgc

SEQ ID NO: 25269 - DNA, 127 bp, Homo sapiens; identical to SEQ ID NO: 8131
  chr17:73100161-73100288
  hypo

SEQ ID NO: 25270 - DNA, 141 bp, Homo sapiens; identical to SEQ ID NO: 8132
  chr17:73242514-73242655
  hypo

SEQ ID NO: 25271 - DNA, 968 bp, Homo sapiens; identical to SEQ ID NO: 24081
  chr17:73584153-73585121
  binary

SEQ ID NO: 25272 - DNA, 383 bp, Homo sapiens; identical to SEQ ID NO: 24083
  chr17:73635994-73636377
  hypo

SEQ ID NO: 25273 - DNA, 377 bp, Homo sapiens
  chr17:74269555-74269932
  hypo
cggctgtctctgcagcagcccactcaagggagagaagcggagggcggcaaacagaaacctgcccagccggctgcaggggttcgcctccagccattggcactgcttccccggaatcccacgccaggggtcaggaaccaccctgagccagcagcaagagcgcagcaggcagctgccaccctcacccccagagtgctggacactgacagcacgggccccagcaccccaggctagaaggcaggtctagagccagaaggcagggcacccccaatctagctgaggccaggagagagctggtggggtgagcaccggcccagctggtcccggggccaggagtctccctgtccccagtgcagtgtccagccctccgaagccccggc

SEQ ID NO: 25274 - DNA, 600 bp, Homo sapiens
  chr17:74965156-74965756
  hyper
cgcagccggcctcggctgtttaccaggcacccgttacgctaattgaaatgtgccaaatagctgcccggggcggggccgagcggagcagcgggctccgggtcacctgcggtgttgatgaggtattcaagaggaaaaagcgccggagcggcagcttcatttgcaagggaaatgacttgacgaggcccttcatttgcatctttcggcccagaggttctgattagctgcggaggaaaagcccgcctgttttatgcatgaggagctctgcctggagaccctcggctgctcacccgccccagccctgccttctcctcctaagtcggggaggaggagaggggtccccagagggcaggatccaaggctgaagcctaagaccaacccttggtggtgaaaatagaaatttcttgaggcaaggctgccataaagtgcagtgagactcatcggtgaggggggcactgtgcgatctccatccggggtcttcagggcaattgcatgagctcagcctgctaagagcctggcaggcagcgcgagctcccctggagttccggccgctccgcccagtggctctgtgcagcgcttcccgcccggagaacctagtgcccc

SEQ ID NO: 25275 - DNA, 514 bp, Homo sapiens; identical to SEQ ID NO: 8137
  chr17:76425233-76425747
  hypo

SEQ ID NO: 25276 - DNA, 604 bp, Homo sapiens
  chr17:77807474-77808078
  hypo
cgggcgcagagctgccctgtccgttccgggggtccatctccagcggggaagggcaggagagggcgagccccgccggcaccgcgtggaaggggcctccgcccaggtctgacagccgccgcagggggaacatggttacctccgctccgggcgtcctcaccctgggggccagcctgggtctctcgcggttggcgggttggcgagaggggagcccgccccgaggccccaggtgctcagctccccgcccccccgcgggaatggcgcttccccttccgacgccctccggctacaccgtcacgtactccttgaaagtaacggtgaggcagttcgcggtgacgtcggtgataattatattcccaaagaagggcttgaactcgctcagcgactctgcaggttcgtcctgggcctcggctggaggcttctccgccgtcgtggtgggtgccgctgccgccgccaccgccaccgccgccgacgccggtgtctcgggcttcacctggagggagctgggcggctccccggcctcgctgcgcgtcttgacgcagcgcaagtctatgggttcatccaggtctgagtctagcaggatgacctcgggctgcgggagggcggc

SEQ ID NO: 25277 - DNA, 183 bp, Homo sapiens
  chr17:78143796-78143979
  hypo
cgttcagttcagccagagattgggccacattcagtcctcgcttccctgggagggggaaggtaagtgcgcgcagtccatccggcgaagagcaggtcagcctacggagggctcagcctacggaggggctcagccgacacaggtctgatggggcccgagagtggtcccaggggagtgggaggggcc

SEQ ID NO: 25278 - DNA, 677 bp, Homo sapiens
  chr17:78271713-78272390
  hypo
cgctgccttgatgacagagtgagactctgtctctaaacaatgaaaataaattttacaagttgctttatatttagatttactgttgccagatggcctgggttcaaaccccagctctgtcagtcaggaccctgcgttgactacttagccaggacccctgcttctgagatccctcccctgtcctgggagtttgttgtggggattcggtgagggcctgcaaaggagctgacgccctaggctgggggctgagggaagccctgtctcctgcgtgagttaaactctgctcagccacgcgcggtgctcctcttgctctgtgtgcacggtgcttgcttcctgttgggactccagactcccagggagatgactccctggccagctcagctcactgcgggatctttattcccttccagctggcggctgtacctggtgaacctgtgccaaagatgcatggacacaaggacgtacacctggctgggcgccctgcctgtcctgcactgctgtatggagctggccccgcggcacaaggatgcctggagacagcctgaggacacctgggccgctctggagggactctccttctcaccgttccgggaacaaatgctagatacgtaagtcgtagagttgtgcttatctacatgaatctgggaagactgactcctacattgtgcacccggagtccc

SEQ ID NO: 25279 - DNA, 162 bp, Homo sapiens; identical to SEQ ID NO: 8142
  chr17:78590602-78590764
  hypo

SEQ ID NO: 25280 - DNA, 398 bp, Homo sapiens; identical to SEQ ID NO: 8143
  chr17:79873436-79873834
  hypo

SEQ ID NO: 25281 - DNA, 800 bp, Homo sapiens
  chr17:80186335-80187135
  binary
cgcaggccgcgggccgctcccctagccaggaagagccgccgtccgcaccgggaccggagaggaagcggaggtctgaagggggacaggtcggacgtggcctcagagagggaggatgtgggccccggagctgagccaggcggccggaaccccacgggacccgcgcgcacctccccaccaaaggggccccggcgttggggggcgaggggtcgctgccctggaggacgttgggacctgccgcgctgcgctccgaggcggggaaacggagggacggcggggcggaggggcgaagcgagcctggactccgggggaggcgaggccgggaagacccagtcccgaggagcagagggggcgggccagctccgggccgggggcgccgacggggccggttccggttgggggggtccctgggcccggcggggttgcgggacgcgccgtcggggagctgcggcccgggagcccgtccggaggcggcgcggggtccgggcggggcgcgcaggggcggcgccaggcggtgacgtgcgcgggggacgtgccgcgccagcgacccgagcacttaaagtcgcccccggcgcggagcggaccggcagaggcgggcagaggcggcgagaggcggcgagaggcgggctgaggcggcccagcggcggcaggtaggcgcggccgcgatgctcgcgcgcgggccggggcccaggagctcccccgtgccgggcaagggggcgacctcggggtccgcgctctcacccccaccccgcccactttgtccatcaggtccgggggcgcccggggcatggactagccttctc

SEQ ID NO: 25282 - DNA, 357 bp, Homo sapiens
  chr17:80394871-80395228
  hypo
cgactgggacccgggccggccgcatacactctggagtctcctacactgagacccgggcctggctgtctcaggcggctcccatgttggctctgggtacagccccgggaggcgtgtccagggccgtgttggccgcctcccctggagccactcacctgtttgctttctcacccagtcctcctcatgcagaagtaccggcggtgcggctttccgcagctgtgggcagccagtgccttcaagggtgccacggggcccagccaggccgtgccccctgttgagcaccacctcaggaaccacgtgcagtggctgcaggtggcgggcagcgggcccacggactcactgcagggcatcatcctgacc

SEQ ID NO: 25283 - DNA, 179 bp, Homo sapiens
  chr17:80479366-80479545
  hypo
cgctttcggttgttggagatgctggtaagagctgttgcttttcttcttgacttgcgtgttgtgtgtgtgtgcatgcgctgttctgtttcttagcatggaaaggtgcaccagcatattccttaaactttggtagtagcattttaaagaatgttattttcaggccgggcgcggtggctcac

SEQ ID NO: 25284 - DNA, 748 bp, Homo sapiens; identical to SEQ ID NO: 24101
  chr17:8055144-8055892
  hyper

SEQ ID NO: 25285 - DNA, 1173 bp, Homo sapiens; identical to SEQ ID NO: 23533
  chr17:80797632-80798805
  hypo

SEQ ID NO: 25286 - DNA, 510 bp, Homo sapiens
  chr17:8104433-8104943
  hypo
cgtcttgagaaaaagcaaaaaccttgcctttatctcgtttgaattcttgccctcgagaaaacagaggagagaggttgctgcagagttgcaactccggagtttcccggatagctgcaggcttacccgcaggtaacagtagaagtaggagtcagcgttaaggctgtgggaaaataggtgtccttcattattgccggtgggagtgtaaactgtccaccacttagaggggcatttttggtgatatctatagaccgtttacctgcgtgtacccagcattaccacgtctttctctagatgctggtactctccattgccatgtctttcttcagatgtcccctagaggacaactagagaccatcacaaaggtgcacaggaggcactcaaaagacactggccacagtgcaaagcattggaaataatctgcatgtgcatccagtagaagagctttaaaaaaaaccctagggatatccttattaaaaattataggctgaaaggccgggcgcggtggctcac

SEQ ID NO: 25287 - DNA, 871 bp, Homo sapiens
  chr17:8229957-8230828
  hyper
cgccctcttccccccacgccccggcccccaagcctgctcactagctctctcctcctccttccacccgcaaggaaccctccagcccacttcctgtgatcctttccggagcccttcagcctggctggctctccagccatctcggaaagcttctctttcctaaaccctccatactcgcaggttcagctacagaggtaactgcaggctcaggttctccagggtggccagcccaccagcccaccgtcccggtgcagcagtgcctctccagcgacagctccaccgcgagcctggcgggctcccgaccttgctccccagcacgtcgtctccaagccacggtctcaccaccctccatcagcctcgggcgacaccaaggggaacagagcgctggagctcctcgaagtcctcccgaccttagcggggctccgttcatcctcccggacgtggccaggccccgctctggccccgcgcccgcccctcccgcggggctgcccctgtctctctgccggagacccggactcagtgagtgagcgcagcgcggccatagggcttcctgcagcggggtctcagcacgtcttctggctggactctggggtctcctggcctggctgtgtctcctggttctcagcgctcgcctcccacgcggggcggagtatgggagtgggctgctcccgcggaagaatcctggggaagttgaggcactggctcccgctgttcagaacactgcccgacgtccccagagctagccactcctccttcccacccacccgcagcactctcgaggtcgcaacggcagtcaccaggtcccggggcctgcgttcagctgcttgatccgactaggtttggcttcggacccgaatgggtcagctccacgccc

SEQ ID NO: 25288 - DNA, 520 bp, Homo sapiens
  chr17:8384370-8384890
  hypo
cgttggcgcaccccacggctcccccctgcggtgtgcagggctcagcaggactggcacgggtgcagtgcccgttagtgcacaccacggctcccacctgcggtgtgcagggctcggcaggactggcacggggtaccatggctgaggcagcccaggcccagcgagggaggagcaaaccacccgctgatgccaggtgtgtggacacctccagccttctcagcagtgcgcgtgcctgagggcgaagaacccacccccggccgtgggagactcacttgccagaggcgctgttggtgatctcgtccgccagctcatctctctcctgctcggcgtgtcggcgggctcgctcagatgaggcaagttcctaagcagtggagactgcgttaagctctggctgtgaatagtttcctcacctgtggaatctgacagtgcctggagctacagcgaccttgctcctgtcactgtttacctgcacctcaagctgtcatttagatttgagaaattaaactgtcaagaaaatctgctc

SEQ ID NO: 25289 - DNA, 514 bp, Homo sapiens
  chr18:10589052-10589566
  hypo
cgtgtgctccgggagtgtgagccccagcttctgctttcactgaattctgctgccagccacgtccttgatactttgtgggtgatttatttcattggctcgctattacttggcagcggcggtggctcctcaagccagcgtgggctccaggtggccccgggccgggaggcgatggccccgggccaggaggcgtggccacggccgctcgccggcgtccgtccccaggaacggccagcactggggcagcggaggaggcagcggtggtggtggcaccgggtagaaggcggtggcactgggtagaaggcaccgccgccgcccgccgcgggaggcttccgcggagactcagggctgcagagccagcggaggctgaaggaagagaaaggtaattttcctactcgcatatattaatttcagtaaacagataaaacaattagtaaatcaaacatataaaacagaatttttaaagaaaataatctcccaaaatatataaaagtagaatagttaaaaaaacagaacc

SEQ ID NO: 25290 - DNA, 317 bp, Homo sapiens
  chr18:12911091-12911408
  hyper
cgggtggggcccagcgagtgggcgggggcgcgagcgggagcggaagcgggcccgggccgcactgctgccgcgtctagccgcctcccaggctgcctgcgccgcgtggctcgcccccgggacttgccagcagcgagtggggcctgactagctcttcaccacgctccactgcatcggcaagggctggttctgggagaggcgcaagggcatcgacctccgcaccaatcaggtggtggtcattagggcagtggacccggaggaggccgaggacgcccagcaggagaaccctgcgctcagctgtgctacagccccgagtcacc

SEQ ID NO: 25291 - DNA, 133 bp, Homo sapiens
  chr18:13135171-13135304
  hypo
cgaggaggcgccaagagtgagcgagggctgccagcaccctgtcatctctcaggttttagctcagggctgctgtccagcacccgctcttgcttggatactttcggtggtgtggctgctggttactgtattgcac

SEQ ID NO: 25292 - DNA, 148 bp, Homo sapiens
  chr18:13425955-13426103
  hypo
cgagggcaggacggtggaccacagtgaccctgtgggaagaggtctggggacggatggcccatggcggcagggtgcgcagagctcctgggtgctgggccatcaggccacactgcacaggtgaaaccggctctcaacaggacatgccctc

SEQ ID NO: 25293 - DNA, 419 bp, Homo sapiens
  chr18:13826252-13826671
  hypo
cgccggcatctgggctttctgcacgggctgcggcattgtcttcatcctgtactcagaatccacctacgtcatcctgtgcctcatctccatgttcttcgctatgctgttcctcctggtgtctctgtacatacacatgttcctcctggcgcggactcacgtcaagcggatcgcggctctgcccggggccagctctgcgcggcagaggaccagcatgcagggcgcggtcaccgtcaccatgctgctgggcgtgtttaccgtgtgctgggccccgttcttccttcatctcactttaatgctttcttgccctcagaacctctactgctctcgcttcatgtctcacttcaatatgtacctcatactcatcatgtgtaattccgtgatggaccctctcatatatgccttccgcagccaagagatgc

SEQ ID NO: 25294 - DNA, 216 bp, Homo sapiens; identical to SEQ ID NO: 8156
  chr18:196827-197043
  hypo

SEQ ID NO: 25295 - DNA, 1466 bp, Homo sapiens
  chr18:2846938-2848404
  binary
cggcacccggggggacctgtgcgtcattgagggaccggggagaagcgcagggcgcacggggctgcagaaggagaagtaggaacgagaagccggagggggcggccgcggagcactggttggagcgccgcgaagcgcccgagcctcttgccttcgcgggcggcgccctggccgccggcagccttgtggccggtgccccgatccgccgcgctccggacccgggcaggcggggcgcgcccgctgcgcgcgggatgtggcagcccagacggccctggccccgcgtgccctggcgctgggcgctggcgctgctggccctggttggcgcggggctgtgccacgccggcccgcagcccgggtatcccgcgcggcccagcgccaggaacaagtaagtgcgcgccccttggctggccccaaaccgcctacccctccccggcccccagttgagccccagagctgccctgccaaagacgacgagcggcagccgggggcctcccttggacttccccgggcggctccctctgcgggggaccgcgcgctccgcagccggcgcctcaggcagagctgactccgggggcgtgggcgcagagagcgtcccgcagacccgggcgatccgaaaacgactcccaggaattccatgagcccctgggaccatgggtgcttttctttcccgtcttggtcgggtccaggcgcgcgctctccagaggcgcacccgggcaccctccggcgtctgctcggtgaagctcccgcctccgcagagggcgacgggcccccccgaccctcgctcggtctggtgccgcagtcccctctcccctggcctcattgttctccgggtttaccccgtgcccctctccctctctctcctgcaccccaggaactggtgcgcctacatcgtgaacaagaatgtgagctgctccgtgctggagggaagtgagagttttattcaggctcagtacaactgtgcctggaaccagatgccctgtccgtcggcgctggtgtaagtcctggagccggggagcgggcggggcgcgcccgggccggggcggtgggggtggggtggggttgctgcgctgggctccagtccctccggtaaatcccttccagatccggtgaaaagcccgcagcggaaaagcgctccgagcgctcgcggggcaccggccacgctgggctatttagggagtgggtgctgcccgagtgagtggggaggatgcgcgcgcctcgggagtgtggggtcgcgggggcgtaggagaggatgaacaaagctcccactcccacttctgttttctccctttcaatgtttgtttgtaacataaggcagctgaatctaattggatccatattgtgtgttctggggcacacagaagattccaaaatgtatactgctaaagactattccgtataggattcgctgagaggtttggctaagtagtgttctaaaacgagtgagttctgtccgtatgtccccataaaac

SEQ ID NO: 25296 - DNA, 625 bp, Homo sapiens
  chr18:31739025-31739650
  hyper
cgggttgctgtttctacttcagcggcggcggctggagcagcgggtacaggtgaggttgccctggcggtgtccatagcaacgctggagggggtggcagggagaaaggcgccctccaccctgtcagcctcctcctcgcctcccccgacctgcaggcgcgctaagcgctccgggcgccgcgctccgcgagggggagcagtgctcccaacccgcgaccctccgcctcagacatcacagttgccgcggcaacggccggaggaggaaggccaaggcttttctcccgctgacgtcccccgccaccagtacccagagtgctggggcctggatgagatctgcgtccgcttcacccgagcatgagcttgggtctctcggaggagcaggagacgcgggctcgaagccgcgggcctgaccctgatccgtggatgccgccgccgccttctcctcccctgggtggtgggggacagggcctgggaggcacggtcacgccgagtttgagcacgtgaccttccaagagcttgagagtcccctagagagcaggccccaccccaatccatcccgcctcgccggaggggtccctctggctttagtccttctcttctaattccctgtatgtcccgacccgaccaac

SEQ ID NO: 25297 - DNA, 985 bp, Homo sapiens
  chr18:44773396-44774381
  binary
cgggagacagaaggcctcggtggtgcgggtgctgggccagagggggcggcgggggcggcggcggcggcggcggcggggccgggtggtggcgctcggaacccggctcgtcgggctgcgggggcagcagcagaagcggcgacggcggctgcggggggtggtggtggtggtggtggtggtgagggtggtgatggtggtggggatgcgtctgggccgagtggggcgcgcccgccgacgccccgtgcagcttggccaggctctccgcgtcgtccttgccgcccactggccggaaggcgctggaatggtggtagctgccaccgcccgctttgcgcccctccagaaggtgcggatggtggggcgccggaacccgggagcccgcggggccagacccggcggccgcggcccctgccccggcagctgccacagagtccgcgggcggcgtggagcccgcgctgcagtccccgccgctgccgcccgggggcgactcgaagagcgcgtcgcgagagccggcgcccccggcaggaggaggtgggccggagcccgggccgttggccactacctgcgggggctgccccggcgggggcgcggcctcggcgctcccagcagcaccgcctggctcagccaggtccaggaaggcctggcgcagcagggccgggctttcgcctagcgcgcagcctagcgccgagggcggctgaggcgggggctgcaggtaggtgggcaccgggagcccgccaggggtccgcggcggccagaacatgcagaagggcggatagaaggcgtccttgcggcccgcgggccagaagaggccggacaagccggccttgggcgccgcgcccgcgccgcctgcgcccgcgccccccagggcctcagcggcggcacccgcatcctctttcttatggcacaagctgaaggcggcggccgcggcagggaaggtgtaggggtgcgggaagagcccgccgcagcccgggaacttctgcaggacgccccc

SEQ ID NO: 25298 - DNA, 382 bp, Homo sapiens
  chr18:46142413-46142795
  hypo
cgggcatgtttgggagagccccgcagagccggccagaggctgctgctgcaggcagagcctggcactcaatcctcctggaaacggctccgtgtagagttcctgcaaaacccggttctccgactgcacctgttaggtgtgccagggagcccttgataagatctgacgtcttccaggaataatgggcgtggccttgtgtattgacttctcctgcaggtggctccttttcagccctctctggacatcggcggttttattcccatccagcggaggccagcttcccggggccaggcacggagcctgcttggggccagctctccggaacctgtgcccagctggggaataagcacatgctcagcacttgaagaattcactgctcactggc

SEQ ID NO: 25299 - DNA, 950 bp, Homo sapiens
  chr18:53255053-53256003
  binary
cggtccctccgagggggcatcaaggggaggggcgggggggctggcggcgagggggagggaagcggcgggaggggaaggggtgtctcttctgggagcgccgggcgccgggagcccgcggcgcgggaggcgcggagccgcgtgcggggccgccgagcccgaaccccgcgccgccgggcgcctccgccccgccgagccccgcaggcgccggtacctaccgcccgcgcgcgagaaggggctctccgtgcaccgccggcgccgaggcggcgttcatgtctaaccgccgccgccaccgccgccgcctgctcctgcgcccgctcccgcgcctgctgcctccccgccgccgccgccgccgccgccactacagatccgcagacacacagccaagatccctgactcttaacaccaactctcttctccggggaggggaggggacggagggaaggggggagggggaaacacgccgaggcgcacggaattgcaagttcagcaaagaaatgggtgggggggctccggcggggagacgcgacttgctccgggtcgggcaggctaggatgcatccccctcgcacccaccccgaggggaaaaaaaaaaaatctcaacacctcccccgcctcgccaaaaaatacaaacgaaaattcatcgagcacctcatttttcctcagatcgtcagttacaatctgaagcctgaacagttcagtttttgcccgttgcatccctcggaggcactttgaaatttattcgagtttacatcccctcacttctttctttctcttactctcgttccctctcactcacacatccacacacggcaaagcaagtttatactaggctgcaaatacacgtgatgcaaaaagactttgccaagaggaacaatatttttctttttcgtctataaatcaagccacattttcctggggagattttcgtttcggtagttttgcgttgggggc

SEQ ID NO: 25300 - DNA, 418 bp, Homo sapiens
  chr18:53256957-53257375
  binary
cgtggagtcacattgataataataggtttccctgaaagatacattgtaatccattcacatccgggaactgcgggcttataaagagaaggagctgcggccgcggctgctcctccagacaatgactgggaaggggcggggcgggagcaggcgaccatagagtggtaaacagagcgcctagagaggcggccaagatggcggtgctggtcgaccacgcctcctccgggagcggaggcgggtggctgttctcgggtaggcgtcgcgcgtggggcggcactgtgggagttcccgaggccgaggtcgttcgcaggccccatttccctgcgctcttattcgtgttgccgcttcttggccgtccttgctctttgacacaaaagtgtagtttcggcacaaatttacaaattaaactccacagacttcc

SEQ ID NO: 25301 - DNA, 1113 bp, Homo sapiens
  chr18:53446783-53447896
  hyper
cgacttaacgtttcaggaatatgaattctatgttcagaaaatttccccacactcttcttcgctggcacattcactgatgtagaaaatgccaggagccccgggggtgtgatgtttccggtggataatgtctcccgttccctgccccggggcccagacagttggtgcttaagcgtctacaatgtagagtttcctgcattttcctcgggccgccatttgtctacttgtcccatccaggacatctccctaaataatctctaagtggaaaaatcacggtcctctaggagatttatccgggaacgaacgtgcgtggggcagttcaaattcctgagctcagatttcgtttcccgcggtcagatggtgcggtcggtggggcccgagggatgcgcacagctgtgcctgagaggtgctgctctcccgccaccgaagtcgctgggaaattctgctgcactgagacattttaatgtcggatgttctaatcctgcgggcaaaaaaaaaaaaaaagtttgaaccaggtactgggcttttgtcacggtgaaccccacccgcgccccgcgccgtcccttcattcactcaggcgaggtggcttggatttgcacctcgttgaagaagcctcccatgcgacatctccgccagcaccccgcgcggacttggctgggcggcggcggggagtcagcttgtcaccgcacggcggccgggaccgcagcccctgggtgcgcagtgcgcctctcgctgcgccctcctagagcgcgggtcccgtgcctgtgcccggcgcgacgcgatctccctgctagtcgggctccgcgtgctccccgcgcttcccgcagcctccgcgcagcccgcagcgccctccagccccgcctcgcggccgcgggaacccggcgcctgcagccccgcccggaaccgaccgccaggcgctgttgccgccggccacgcaacgcggggcctctgcctggcaccagccccaggtgccttgtctcgggtcgtgctgtcgcgcgacactggggacccaacaggccgccggctactcagctggccccgcagcttccctgcggctcagcggcctcccacccaggagaaaaccacatttgatgagagttttgaatcaagccgagc

SEQ ID NO: 25302 - DNA, 116 bp, Homo sapiens; identical to SEQ ID NO: 24117
  chr18:54483280-54483396
  hypo

SEQ ID NO: 25303 - DNA, 264 bp, Homo sapiens
  chr18:55850838-55851102
  hypo
cgagttgattgagtattcacttcgaagctccatgctgcacgcatgggcctgtaaatagctttttcgtgcacttgtgggtgtcatttcagatcgcttcatcggatttcagttacccaagtttttacttggttcaccgtaagtttgcaaaaaagactttttgttatcctgaacattgcaggtggaaacatgattaattttgaattatttttgtttaacttctaccctctttcctatttacagcctattttgtttattttaacttcc

SEQ ID NO: 25304 - DNA, 98 bp, Homo sapiens; identical to SEQ ID NO: 8163
  chr18:60110139-60110237
  hypo

SEQ ID NO: 25305 - DNA, 73 bp, Homo sapiens; identical to SEQ ID NO: 8164
  chr18:72632559-72632632
  hypo

SEQ ID NO: 25306 - DNA, 418 bp, Homo sapiens; identical to SEQ ID NO: 24120
  chr18:74113780-74114198
  hypo

SEQ ID NO: 25307 - DNA, 297 bp, Homo sapiens; identical to SEQ ID NO: 8167
  chr18:74569886-74570183
  hypo

SEQ ID NO: 25308 - DNA, 241 bp, Homo sapiens; identical to SEQ ID NO: 8168
  chr18:75873544-75873785
  hypo

SEQ ID NO: 25309 - DNA, 1028 bp, Homo sapiens
  chr18:76685353-76686381
  hypo
cgcaagagggcgtgaagccacgcggtcgcacacctggtaccgcgcacagtgagaaaggagggcaagtgcgctgagacccaggagggagggcagccctcccctgcgctgctgaggctcgtttctttcaatgtgtccctggctctgtgctgtatcgtgcgtttcagtgtgcatgaaatatcttgtgcaatcatttacgtgaaattagagctagtaggaaaatgtatcgtcaggcgtggaagagcgcactgcaccttctttttacttgcgcgcacctgaggattgtctaaaatccaggcctcacgggactcccagagcccgtgctcgtcacagctgctggctacagaaacacagcctgcaaagtcggcctcaccgccagccagacgagcccagccagtttccacgagcaggggagggcacacccggaggccaccgtggaaagcagcctggctgccctcgggaagccacacgcggagccgccgcggcccagcactcccacccctcgatgtgtgcccaggtcgaaggaaggcttgccacccgaaggcctgcacgggaaagctcacagcagcgttctccaaacagccaaaacgcggaagcaaccccgatgtgcgtgggctggtgaatgcaggcccagcgcggagtgcgcacagcccggaacggcattcagccaagaaaagacccacagccgggaacagcatattcagccaagaaaagaaagggcggcctggggcgctctgcaccgcgggtgagccgtgagaacacggcgctccgggagagaagccagcacgagacgctgcctcgggcgcgactccatttacttgaagtccagagcccgtaaatccgcgagacagacatggaggagcggcttaccaggtctggaagcagggaggggagtgagggactgctgaggggtgcgggtttcatgtggggccatgagaaggttctagaattagatggtggcgatggttgctccacgctgccatgggggcagctgagggaaaggaggtgggatcggggctcggccagctctc

SEQ ID NO: 25310 - DNA, 428 bp, Homo sapiens
  chr18:77153122-77153550
  hyper
cgctgtgggccagaatgcaaaactgcaggaacagaacattcgcaggaacagaacacagtcgtattaagtgattttcccgagcaggaagtggcatctggcctgcggttcagtagggggaggaaagggtgggcgcacctgcccctggctggcgcacctgccaggtagccccacgcggcaccgcgtgtgccgagcgcccctgaggatggaaagccccacgcggggcaggtggcacccaccctccgaagacgggacgggatggagcgttgagcttcggggcagctccggcccggcccgcgctggagacgcccgcatctgccaggatggcgtctcatagccctggtgctcacacatgacgccaggaagccccagcaacagtgaccgcccaggctctagaaaatattggacggggtggatgaacacccaagtgc

SEQ ID NO: 25311 - DNA, 738 bp, Homo sapiens; identical to SEQ ID NO: 23538
  chr18:77542640-77543378
  hypo

SEQ ID NO: 25312 - DNA, 113 bp, Homo sapiens; identical to SEQ ID NO: 8176
  chr18:77616298-77616411
  hypo

SEQ ID NO: 25313 - DNA, 217 bp, Homo sapiens
  chr18:8612051-8612268
  hypo
cgtttgttgagcacctactgtgtgttgggtgttatgctacccagtggggattcagtggtaaacaggacatcgactctgtccagaagtggatcggagcttctgggagctgcgtgaccgcttgtcagggcagtgacagatgtgtatgggtatttgggagcacagtgaaagcgcctccagtcgaggctagtgatgaggcctggtcagagaaggcttcctc

SEQ ID NO: 25314 - DNA, 489 bp, Homo sapiens; identical to SEQ ID NO: 8178
  chr18:8625474-8625963
  hypo

SEQ ID NO: 25315 - DNA, 224 bp, Homo sapiens
  chr18:9912782-9913006
  hypo
cgcacatgaaaacttggatttggtgcctacttctagactgctgtttcgtctcgtttattttctagacaaactgtgctgctccatggcagtagcatcaatatgtcttttgtttcgtggcgctacctagggatttaaattcaaaccgtatcacaaaatacaataaaggtttatttacagcacattggtttcatttgacgttcctgtaccggactaccctggcaatc

SEQ ID NO: 25316 - DNA, 1173 bp, Homo sapiens
  chr19:1004547-1005720
  hypo
cgcacgggccccgtgtgggtgacaggcagctcccaggtacacatgtctcggcactttaaggtgtggagccttcgccgggacccacggggcgccccggcctgggccacggtgggcagctggcgggacggccagctggacttggaaccgggaggtgcctctgcacggcccccgcccccacagggtgcccaggtctggcccaagctgcgtgtggtaacgctgttggaacacccatttgtgtttgcccgtgatccagacgaagacgggcagtgcccagcggggcagctgtgcctggaccctggcaccaacgactcggccaccctggacgcactgttcgccgcgctggccaacggctcagcgccccgtgccctgcgcaagtgctgctacggctactgcattgacctgctggagcggctggcggaggacacgcccttcgacttcgagctgtacctcgtgggtgacggcaagtacggcgccctgcgggacggccgctggaccggcctggtcggggacctgctggccggccgggcccacatggcggtcaccagcttcagtatcaactccgcccgctcacaggtggtggacttcaccagccccttcttctccaccagcctgggcatcatggtgcgggcacgggacacggcctcacccatcggtgcctttatgtggcccctgcactggtccacgtggctgggcgtctttgcggccctgcacctcaccgcgctcttcctcaccgtgtacgagtggcgtagcccctacggcctcacgccacgtggccgcaaccgcagcaccgtcttctcctactcctcagccctcaacctgtgctacgccatcctcttcagacgcaccgtgtccagcaagacgcccaagtgccccacgggccgcctgctcatgaacctctgggccatcttctgcctgctggtgctgtccagctacacggccaacctggctgccgtcatggtcggggacaagaccttcgaggagctgtcggggatccacgaccccaaggtgggcggcctcggggggctgcgggtggccttggggggctagcggtggccccgggctgggctgtgtggggcaggggtggtcagctggacgtggaggacgtccactaggccaactctggtcccaagagacatttattcaattaatttatttatttaaagaaaaatagcc

SEQ ID NO: 25317 - DNA, 362 bp, Homo sapiens
  chr19:10197461-10197823
  binary
cgtaaagggatgaaaggcggggggggggcggcggaggccaaaaccaagggtcaagttcgggccgggagaacggtgcctagagatgggggagggatgatcccgtttccccttcccccaccggaacccccctgtctccatcccagctggagaagagcgtccggcgcctccgggagaagtttcatgggaaggtatcctccaagaaggcgggggctctgatgaggaaattcggcagcgaccacacgggagtggggcgctccatcgtgtacggtgaggctgcaggggtcccgggcctggtgcggggaccgcgcgtgggagcgccgagggggcgtggtctagggagaggcgttgagatcacctccccc

SEQ ID NO: 25318 - DNA, 330 bp, Homo sapiens
  chr19:1030023-1030353
  hypo
cgtttatctcccgctcccgctacacgacctgcccccatgcttatggccccctatacactttgccgtctgcctcagtgctgtctccgcggtcactagtggctggatagggacactcgaggtccccactggtgcacacccactgcccaggagcacacagcccattccccacggcggtgtctcagagcaccgaaggccaagaaagctggaatggccgggtgcagaaaggtggcagggaatcggtggcaaggagccaggtgcgtgactagaggcggtcagcctcgggggcagctccttcgggagttgctaagaagcaggatgggggccgggcgc

SEQ ID NO: 25319 - DNA, 865 bp, Homo sapiens; identical to SEQ ID NO: 24127
  chr19:10397603-10398468
  hyper

SEQ ID NO: 25320 - DNA, 1137 bp, Homo sapiens; identical to SEQ ID NO: 24128
  chr19:10624638-10625775
  binary

SEQ ID NO: 25321 - DNA, 175 bp, Homo sapiens
  chr19:11008216-11008391
  hypo
cgactgcagtgtggcaggccagcgagtagccccaggctgggtccaggggtggccaaagcgtaacactcagtccgggtttgtgttctttacgttccccgttggagactccacctggagatcccagtccctttccttttactgcagggtaaagaaatgctagctctgggccgggcac

SEQ ID NO: 25322 - DNA, 916 bp, Homo sapiens
  chr19:11529251-11530167
  binary
cgcccactgcacctggcggcctgtgctcggctctccagctccgccctcaactggtcgcttccggccccgcgccacccaccaaaccccctcctcacctggctgcccccggggccctccgccgggctcctgcgctgactgcgctgccgccgcagggagacactgtacaccgcgccgtcctcggtctcttcaccccagtcctgcagcggtgcctggacgcacaggcggactcagggcaccaaaggggcacaggtcctggggcctcagcctccttggccgctcggactcgggccgagtcctcctgctgcatccccacgccccttcccggccagaagctgcgagactagggctggggtcccaggctagtcccctcctcgctgcgggtcccctcctcccaggtcctgaggacatggggtggcatttggggatgtcccagggcccagtctaatagaacctgtctctagctctttctgccgactgcgctcagagactcgcgcccccatccctaagaggaaccagtcgcttcactgggtcaagggccgcgagtccccaggaggggactccagggcaagttcagattgggagcagataccgtccgacgggcgggcgcttggagtttctggacctgcgggtcaccagggatgcggggtccggggatcccttgtccccttaccagggccagctctttgcctgctgtgcgctccatggccggcgcccgtccctctcagtggcgccgctgagtgaggcggaagggccggcgggtggcgggtggcgggcggcgggcagtggccgggcgctgaggccagaggggcggagcggccgagctgctggggcggggcggggcagggcaggccggacccagcctctgggtgcctccagccggacccagcgccagcccaggagaggtcctggctcttcc

SEQ ID NO: 25323 - DNA, 441 bp, Homo sapiens
  chr19:1166870-1167311
  hypo
cggcctcaggccacaaggtctccccacctggctccttggggagtgccaagcgttgccagcagccgggctatgctgatcccagacaagtggctcgaccggtcaccactgtccttgagcttaagtccagccttggtgacaaaaatgtcacaaggacctgcatccgagccctgagggcatcaggtcctggaggaggaggaagagtcccttctggcttcgggctgggcttgaggacggcagctccaagaccgcttagagcgagacttcagcgctgactgctggagctacgcaccctgtcctgacaatggccgcacagttaggcgctgctccacgcctggaggagggaactgagggcccgaaatcacagaagcaggaactccaggttcgccagtgcggcctgatccaccttccctcaaacgtagctgctgacaacgacacccacgc

SEQ ID NO: 25324 - DNA, 526 bp, Homo sapiens
  chr19:13209965-13210491
  hyper
cgatgatcacccttccggacccccgagaccttgcccctgacgtcttcactggtccttcttcgggggagttcgctcccgaacatgcgcagcacgtccactgccctttccttgacggccctgggccgagtccctggtgccctccggctcagaggtgctgccgcgtgcggtcaccgcacctctgggctcaaagcggtttgctccatcttgatgggccgggccgctccaccggggctgccgtcggggtcggccgggggcgcgggctgcgagcgcgctgccgcctcggccctgcgtccggatccccggcgggcgccgtcgtctgggacccggtgcaccggccgtttgcgaggcccgggaggggtggggcctgcggccagagctgcggcttggtcgcgcagcagccgcaccaggaagccgatgtacttcatggctaggcggagcacctcgttcttgctcagcttccggtcgggcgggtgcgtcggcagcagcttcctcagctcggcgaaggcgccgttaacgttctgctgcc

SEQ ID NO: 25325 - DNA, 519 bp, Homo sapiens
  chr19:13213427-13213946
  binary
cgtcaggccaggctctgctgtctcgcgagggtccggcctcaatgctccaggccccggcgttgggccgcgcctcctcgtgggcctcggaaggccaggatagccgaggtctccgcgtaggtcccccccagggaaagtgagcggctcccgggccggcccgccttctccccgcccccggcggcccggtttcctccctctcacccctggcggcgcagcggccggaggatgctggcccagtgcagataagggccaggctgcctggccgcgcctgataaggagcctggctgaccccggaggaaaccagcgggcggggacctagcagcgcgggcctcccggccccgcccccagccggcgctggcaggactcggtccgccacccctcagggcttcgccttccgctcccccagccactgtagggaccccgggcctctggggacccgggccccagggcagccggggagggaggtgcctggatgcacgcagggggtaaactgaggcagggaagctgcctcctcttatgtcc

SEQ ID NO: 25326 - DNA, 303 bp, Homo sapiens; identical to SEQ ID NO: 8188
  chr19:1393952-1394255
  hypo

SEQ ID NO: 25327 - DNA, 687 bp, Homo sapiens
  chr19:13983612-13984299
  hyper
cgagagagggcgccccactccagctccagacagaggggtgggaacgtgaccccgacccggggcgggtgagagggcgggctctggggaaagggctctagaaggtgccgggaggcgggaggggggcttcgggagggcgagttagccgggatcgggcttgaggggccctacgaaattcggtttgggggcgtgcccggtcggggcggaccttagtggggggttgggcttcgtgggggcaggacgcagtcccggggcgtctatagagcaggcttttgtggagggctctaagggggcgggccctaagggagctgggctctttgaggactggcttaggggtttggcggtgggctccgtgggagtctatatgggcgggttttagagggagtgtgttctggggaacaggtcaaaagcgacggggctctaaggggcagggcctgggctggggccttggctggtggctccagactgtgggtggggctctcgggggcggggctctcgggggcgcgtcctcgggggctcggccgggttccgttgccaccaccgtgaggggtgtggtgggggggtggttcacgcagctcggcacacttgggggtccctcatctaccttggggttatgccaggcggttattttgggcctcagtattcccctcggtgaaatgccaggggccaggaaattacttatttttttgc

SEQ ID NO: 25328 - DNA, 871 bp, Homo sapiens
  chr19:14181154-14182025
  hypo
cgcgtccgccgattcctcctccttggtcgccgcgtccttggctggcgtcagaaaaatggctacaaacttcctagcacatgagaagatctggtttgacaagttcaaatatgacgacgcagaaaggagattctatcagcagatgaacaggcctgtggcaggtgcctcccgccaggagaacggcgccagcgtgatcctccatgacattgtgagagccagagagaacatccagaaatccctggctggaagctcaggccccggggcctccagtggccccagcggagaccacagcgagctcgttgtccggatcgccagtctggaagtggagaaccagagcctgcgtggcgtggtacaggagctgcagcaggccatctccaagctggaggcccagctgaacgtgctggagaagagctcgcctggccaccgggccacggccccgcagacccagcacgtgtctcctatgcgccaagtggagtccccggccaagaagccagcctcaccagcagaggatgacgaggatgatgacatcgacctgtttggcagcgacaatgaggaggaggacaaggaggcggcacagctgcgggaggagcggctacggcagtacgcggagaaggccaagaagcctgcattagtggccaagtcctccatcctgctggatgtcaagccttgggacgatgagacggacatggcccagctggaggcctgtgtgcgctctatcgagctggacgggctggtctgggggacctccaagctgatgcccgtgggctacggtatccggaagctacagattcagtgtgtggtggaggacgacaaggtggggacttacttgctggaggaggagatcactaaatttgaggagcacgtgcagagtgtc

SEQ ID NO: 25329 - DNA, 743 bp, Homo sapiens
  chr19:14584140-14584883
  hyper
cgagagggagcgggaaggagcgtggctcgaggggccggtgcgcccctcaccagcattgggctccagcagatgcacgacaccaccatgataccgacaagctggcccaccatctccacgtcgtgggcgcgagctctgcgtgccgagccgctgctccgagagccgccaaagaaggtggaggccgaagcgatggacgaggcggacgaggcggaggccgagcggggtccgtgcgccccccagcgacgccggctgtcggggcctgaggccgggggaggccgtcgggagcggcgtcgccagcgggcgcgtagcagggccaggccgctgagcgtgttgcacaccagcgcggcgaggagcgcgaccaggccgaggctggcgaagaggccagcaagcagtgcctggcgccagccgcccgggggacccaggccgatgaagcaccacgtgcccgggtactgcagctcatagcggcccacgcgcgccagcggcagcagcgccacggccaaggccaccgcggccaccgcggccagcgccaggcgcgcgcgggcgaccgagacccgcgcggcgtggagcagcggccgcgtgacgcccacgcagcgctccacggccatgccacagcccagcagcagcgggcacaggccgaagaagaccatgcagccgcccaggaagtggcaggccccgccggccggagcgcgccccgcagtgtacagacgcagcaccagcgcgcccgggatcacgtggcccgccaggtc

SEQ ID NO: 25330 - DNA, 422 bp, Homo sapiens
  chr19:14663747-14664169
  hypo
cgggcgagatcagcgtcgctctgggtgggccagtgctcctcggaggccctgagggcacaaccgcagggatgggtgtaggctgtgggtaccactgagaatggggggcaggcccagggctgagacccaggttctccaacttcccactgtgtttgtcttgtgccatattcatcctctatgaatggctgtggctgctcgcccaagccaggagctcgtgcgtccgatgaccatcttccaaggctggattgctacctgctcgctcggggctctgctggatgggaacagcagctccagcttctccgggtcccgggctaccgctgcctctgcacctggccctggcctcggatccgagagcccagagacattggcattgagaccctggcacctctcgtcttgccagcacaggtagaagacaggagcagagc

SEQ ID NO: 25331 - DNA, 376 bp, Homo sapiens
  chr19:14664452-14664828
  hypo
cgagagggctgagccgctgagccggagtccagatgaatgtgccggagtctctgcatttgtgatgggggcgaggtgatgggggcgaggtggccggcgtggctctgggcatgatcgggccaggcctccgacctctatgctgggcattggctggacagggagctcaggcgatgagtgcagcagcgcttgtgcccggcgcggggatggtgagtgcctggctggccagctgcaggacctgtcaggccctttgtgtctttacctggggccctggttgcactgaccagggctcgcacccccagccaggcctcttgtgccccagactcgggagatgcttcctaccaggaagtgcagtcccctgcggggtccgagagagcctgcc

SEQ ID NO: 25332 - DNA, 731 bp, Homo sapiens; identical to SEQ ID NO: 24132
  chr19:15288179-15288910
  binary

SEQ ID NO: 25333 - DNA, 159 bp, Homo sapiens
  chr19:15364865-15365024
  hypo
cgtctctgggctctagcatcctggacacaggaccgagctagtgccaggcacaggtgggaagagtttggtaagacacgtagaacacaagtcacctaacctgtttcggagtcttcgctgtcagaggagctggactcactggagctctccgactctgaggac

SEQ ID NO: 25334 - DNA, 247 bp, Homo sapiens; identical to SEQ ID NO: 8197
  chr19:15512036-15512283
  hypo

SEQ ID NO: 25335 - DNA, 99 bp, Homo sapiens; identical to SEQ ID NO: 8198
  chr19:15531296-15531395
  hypo

SEQ ID NO: 25336 - DNA, 205 bp, Homo sapiens
  chr19:1565869-1566074
  hypo
cgctgattcctgccagctccccatgtggccatagcctcgctcaaaggcccttgggtgccaggacaagcgcgttcacaaagaacacagccacagcctccaccacctggaggctcaggctcgtgcctttggtcacttggtccccaggcctcggcttggacgcctgtctccacaggctcccagacactccgcacagggcagctgtccc

SEQ ID NO: 25337 - DNA, 477 bp, Homo sapiens; identical to SEQ ID NO: 24133
  chr19:15695298-15695775
  binary

SEQ ID NO: 25338 - DNA, 1472 bp, Homo sapiens; identical to SEQ ID NO: 24134
  chr19:16186802-16188274
  binary

SEQ ID NO: 25339 - DNA, 343 bp, Homo sapiens
  chr19:16472546-16472889
  hypo
cggaagggagtggggtggcccggaggcggaggactcaacttacagaggtgaagtctgcaaagcccgaggcagaggccttagaaggtttagctgcagaggaggggacaaatgggtcttttccactaaacgggtccccaaacccctttttactttggaacgggtcgccgctgtcagccccgagtggctggaatggatcgggggcctcgggaaagtctgcggaaccaagctggcttacaggtgtacttttacctggaaagtttaggagaaaaaaaaaaggagaaagaaagaaatatgagttactcacccggacagagcagaatgctggtgggcacaagcccggggc

SEQ ID NO: 25340 - DNA, 120 bp, Homo sapiens
  chr19:16638602-16638722
  hypo
cgtgccttgcagcgttaaactcccctgcactcgcaggacaatggtgatctatactacagagaagcccaaaccatcaaagctcggggaagggacgtgaagacctgtcacttgacctgtccc

SEQ ID NO: 25341 - DNA, 268 bp, Homo sapiens; identical to SEQ ID NO: 8207
  chr19:16681297-16681565
  hypo

SEQ ID NO: 25342 - DNA, 723 bp, Homo sapiens
  chr19:17007056-17007779
  hyper
cgtcctgctgtaaaggccccggggccacagaagccaggtcatccccgtaggtggaggacgacgaggccggcagccgctgctctggaaggaagggggcctcggtcgggagggcgtggcggggaggggacccaagggccgaggggaggagatccgtggcccagagcagcagcgatggtgtccccgaggctaggcggggggtagggtcctcaccgagggcgcagcagctgggaggcgcgggctccaggggcgcggcctggcggcaggcggcctcccgcaggcggcaggcgctggcgtagaccaccccgtcggagccgcacaccgggttcccctgggcgccgcagtcgtggtcgcagccgcatcgcgcgatcgccgccccctcctcaggggccacggcagggcccgactcgccggggaaccagcctgggggacgaggcaggctcgacagaccccccaccctgaaccttgcccgcgcccccacagaacctgggggtggggaagatgtccctgggtcccgggcccactaccccctcggtgggtcttggggcgcgacagttaatgggaggtcctgagccctggccttatggaatttcacgcaggtatttgcctaatacttacaaaaacagaaacagacttttaaaaagcggttgtaggagagaaaggagacagggcgtcctgtctgggccgccctgcaacaacagccccgtcccctgccgcgcctcctcc

SEQ ID NO: 25343 - DNA, 706 bp, Homo sapiens
  chr19:17008145-17008851
  hyper
cgccgctcgaccccgccctcaccacactgaccaccctcaacccattgcgcccagtccccaccacagtgaccacaccctcactggctcggccctgcccccagtatactgaccattccccagccacttcccttccgcacttaccactcccccagccacgcccctccccgctgaccgctcctccagccccgcctcccccgtacaggcagagcgcccgcccacctctatgctgcgttctcctgactttacgttggcccctcctctgccaagcccccaggggagccctccctggcgtccgagggtgggagtcggggtgtggcaggccgcggtggggggcggcagtggctccgcgcactcacccgggccccgggcaggggcgcgctccacttcgttgcacgcgggtccggcgcacagttcccgggcgagtgggctgtgggtgctgacgttgtagaagcgagtggcctcgaaggctacgggacgagggtggcgggtgaccaagtgcaggcgcgacgggtcagggaccgggccgggccgggggtgcgggcgcgcgggcctaccgggttcgtagtagtcgtacacggagactggcagcgccgacgtcctgcccaccacgcactcccggagagcacggaaccgcacgcacgtcaggcaccggctggggatctgtggggcagcggcgggcgcaggctcgacccgggccaggaggccc

SEQ ID NO: 25344 - DNA, 369 bp, Homo sapiens
  chr19:17264714-17265083
  hypo
cgcagagtagctattacttggcctccaaaaacaactattttcctcccaattttgacctgtaggaactaccatgtgttttattatttgttacttggggtcagcgaggaagagcgccaagaatttcagctcaagcagcctgaagattatttctacctcaaccaggtaaacagcctcaagcccgagccacaaacgccacctctgttcccggcctcaagctgtttatgtatagccgggaagtcagaggcagcctgccctggcccccgaacccgctcccagaaggcagcattaaaagaacccattcattcccctggtcctggggccctgccccaccagctccagccaaaatcactctggcacgccacccttgcc

SEQ ID NO: 25345 - DNA, 618 bp, Homo sapiens
  chr19:17958343-17958961
  hyper
cggcatcccctgtttataatcctcaacgttctgcatcctggtatggtcgggtaccctgtgtctggaccgggaaggcctggagggtaggggctgggaactccgccccccaatccctccttcccaatccctcctccccacccccaaccccgcagcccccgtcgcgcatgcgcaatgactcctccaggtccgcaaggcaggcatctcccggccttagtcaaagccgaagcccagagaagcgagcgatcggaggatgcgagtctcggctcacgtctgcctcgcagctttcctccgaggcctggaaggcgagctagcctttgccctggcagcaccctgccccagcccagccatcccccgccaccaccatcctcccccagtgtctgggccgagccctgcggcatcgccagctcttacctagcgggcagggaccctggactttcgaagggcgggcagagccgggaggcagcgagaggaaagtcccactcggctccttcctgtgtgggccccttggtttcctgagccactgtcatttaccgaaagtcagggccctgcgggagctgggggcggggaggcgggcaaggaggggcagaaagttccggaagcctctgcatcagccgcccc

SEQ ID NO: 25346 - DNA, 608 bp, Homo sapiens; identical to SEQ ID NO: 24137
  chr19:1807818-1808426
  hypo

SEQ ID NO: 25347 - DNA, 368 bp, Homo sapiens
  chr19:18103606-18103974
  hypo
cggcatagttttctgaatgaaacaccgcctccggtggtggtgagaggacaggtgtgcccctgaggggctggcacagaaccctcagaggctgggcacctccccagagcaacggcagcccctcggccatctgggaaccccgcgcggggccctagggtggcatccccgggaggtgggcagggttgggtacatgccgaacaactgtgctgaggttaaaattgccttgtgatttttctcctgctctgcccggtcctgccagggctcagaagtaagtgttctcccaggggcttggtggggctgggaaatcgggggtgcatggtggtcacagacagggggtacacccggggcatgccaaccccagcctcagaggc

SEQ ID NO: 25348 - DNA, 215 bp, Homo sapiens; identical to SEQ ID NO: 24141
  chr19:18241264-18241479
  hypo

SEQ ID NO: 25349 - DNA, 617 bp, Homo sapiens; identical to SEQ ID NO: 24142
  chr19:1856948-1857565
  hyper

SEQ ID NO: 25350 - DNA, 237 bp, Homo sapiens
  chr19:18807947-18808184
  hypo
cgagggccagggatgcccgagagccaatgtttattatttgccaactggaaacgaagcatggccggggcctcctccttggggttcttgcacggagggattcagaagcacttggcaccggggggagcagcctcatcggtgtccagccagggccacacagtcagcctcagcccccacctcgcttccttctgggcgagcttagacctgggaggcctctttttttttggagtgccgtggtgc

SEQ ID NO: 25351 - DNA, 531 bp, Homo sapiens
  chr19:19391401-19391932
  hypo
cgagtgacagggcaggaatttgcagagccagagacaagagagctgagacggcatgtgggcagcatgcatgggcgcacgcacaaacgggctctcagaaggcagctccgttgctaacagacaccaggtgtaagcgcgcacagattcagagtctggcgtaagactcagctgtgcgactcccttagctccttcaggggaggcagccaaccatcctcagagcagctgacatttaatttggcatcagctgtggaacttggcaggctccagtaacactgacacatagaaagatgctgcaacagccccatccgggtggcagaaaccaccacccctcgggcggtgcggtgcttcccgggggagaaggtgagcaaaggggtgcagcgggccctctgggaagggaaaagatttgggtccttccagctcatcaacactcgggctttgccgctaagaatggcccacatttgcactcttagtccttccttggtttacagggcactgagggatgtgggggagccctgttggggagacgcaggagcc

SEQ ID NO: 25352 - DNA, 571 bp, Homo sapiens
  chr19:19729161-19729732
  binary
cgttccgtttgaaccccatacatcccttcgtcctcgggacccccctccagccctcctcaagcgcccctcgtcagtctggcctccacgccccgtcccctcagcccgccaacctcactgccacgaccctgcgtggcccctgccgagcccgcgggcagcacctggcctgtgcctcgtccaggctctggtcggtgatggccatgatctgctgcaggacgtcgctcgtgtcgaggcgccgcggggcggggggcgatggcgcggggcgcggcggggcggccatgagcggcagggccgggcgggcgctgtgagggtgccgtcgagcctggagcactaccactggcgccgcagccaaccgccgctgcctgagcgccgcgcccgctctcgctcgcgcctaagccacgcccaccgccgctatcgccagccaacccgtgtattgcaccgcctacagacacgccccttcatctccgtcagccaaccggcgccacgcaccgcccccgggactcgccccgaacttccccctctccgggcttggactgggtttggggttgccgaggcaacggcacttctcataagc

SEQ ID NO: 25353 - DNA, 1111 bp, Homo sapiens; identical to SEQ ID NO: 22826
  chr19:1978023-1979134
  binary

SEQ ID NO: 25354 - DNA, 597 bp, Homo sapiens
  chr19:2302466-2303063
  hyper
cgggtgacgtcacctcctcggctctgcgccccgccgtccacaggcgcgaagccggagctggggttggcgaccgagaaccttcctgcctcccctccccagcaaggggcacgtcccaccaggcccggactgcccgtctgcccctgcagggcccctcgctctggtggcgggctcggtgagctctgctgcccggtctcgggagtctgggggagcgcggcgtcgacccctgtggagggaggactcgtgtttcaaggacagagcctcattaccatgcacgaccagccgcagctgaggccgcagaggcctttggcaggggggccgggccggcggcagggacggcgttggcggtggtggacgggagtgggggtctgtcctgaacaggtgggggtggtccctgtgctggcccccgccatgcgatcgcaccccaggactctcctcctcttcctaagccccagcatgtgcctggtgccgcgcgggtgctggaggcacagcggcttccacgcagacgcccgcagcaccacagcctgtgcacggcgcatccacgccctgttacaaatgttccattcaacgccttctagcacattcacagatcgtccgccc

SEQ ID NO: 25355 - DNA, 558 bp, Homo sapiens
  chr19:23598378-23598936
  hyper
cggccacagctcctcctacgcacacacgagtcgggattctgccctgatgacccgcctggcatccctgaacaatctgggaaacactcggggctgcgtgcagagctgcccagggagctccagatagggcgccgcagggactgggcgggacgcgcgggtcattgctgcgggcccagccaccatcttgcggccagagggacctgggacggagctgcgccagcagggactcaggtcggcaacccaggagcggtgaggaggccagtcccgtcggtttctcagccagctctcccctctcgggatgctcaacccctcacactcaccctttcccaccttctggaatgtcctggcatcttagctgtctgtgcacgtcccaggacctgcagatcacagggcaacagcctgtcaccggctggggcgagaggggggcagaggtggaggacgttgaatagcagaaagcgatcccaagctctggctgcagcgagagacaaaagccccgccaaatgccggatgccacgccctcctctccaactgtgccactgattcgataaagcaccagcactc

SEQ ID NO: 25356 - DNA, 972 bp, Homo sapiens
  chr19:30718122-30719094
  binary
cggagtgaactccggcagggctttctttggggacaggtggaaagttaagtcccccccttttcacttctgtattgtgagtggttcctactgtgtgcctgttggagaacatgtccaccgttcccgagttaggtggaggattggaatgttggggggcggggagcgttggagttgaggacgcagtggccaggggctgggggccgagaaagagcagggcggggtctcagccccgcgtgcgggtggcagcggcggccgggttttgtttgccagatattgttatgtctaacgggtgcctcgccggagacgtgatttgtcagccgccttcgttttcactttagcagaaaatacggcagctgcgaggtgtcccggcctgcggggctcgggcacccggtgcgtcctgggggctgggtcgtgtgcgcgggtgggagccggcggccggcggggccggggcgaggggcgagcgggaggggcggagtgagcgagcgcgcggtacggccctccggttcctcctgcgccttctcccggcagccgccgccgccgccgccgccgctgtgcaatttagcagaaatccgacaggggccgcgtttgctgagcgcatccggcggccgggcagcccgagcgggccgccgggcctggtcggccggtgtagaggcgcggagggggccggcggaggggaccggcggggatgggcgcgggaagcacgcctgaccagagcacgcgccgttccccaaccctggtgtccccggcgagttgggcagccccgcgcgccctgaccttgacgccccagtctccagccagggcttaggtgaacttggggtggggtgtgcgtgcgtgcgtgtgtatgtgcgtgcgtgtgtgtgtgtggaaggggtggtgagactgggaacgcgctgttttctttcccagtttgatactagcaactggatttttactttaagaccggctttgctctctgctggggttgggagggggggc

SEQ ID NO: 25357 - DNA, 114 bp, Homo sapiens; identical to SEQ ID NO: 24151
  chr19:32835126-32835240
  hypo

SEQ ID NO: 25358 - DNA, 38 bp, Homo sapiens; identical to SEQ ID NO: 8230
  chr19:32849484-32849522
  hypo

SEQ ID NO: 25359 - DNA, 158 bp, Homo sapiens; identical to SEQ ID NO: 7101
  chr19:32850587-32850745
  hypo

SEQ ID NO: 25360 - DNA, 564 bp, Homo sapiens
  chr19:36221446-36222010
  hypo
cgcattgactccctgggtactctgtctgatctctcggactgcgagggacggctcttccccattggctaccagtgagcggtcggggtgatccatggggccaggggactccatagctggatcccatttcccaagcatcctaaccgtcttatcccacatgccaggtgctcccgtctgtactggagcacagtggatgctcggaggcgctgctggtatcggtgccgaattctggagtatcggccatgggggccgagggaagagccagctcacctggaggctgcagaggagaaccagaccattgtgcacagccccgccccttcctcaggtgtggctttggctctgtcttcttcctgaataccgctctccctaaacaaacctacagatctctgttccccgctcccttttggaaagtccaggaggcttgcttttgcttcagttgctgtaatgtaacggcagctcgcttactgccatgccttgtgtgccaggggctgtgcccggcttttcatgggaagtgaggtggggagagcggcacgctgcctacttgaggtggggtactggcttttggac

SEQ ID NO: 25361 - DNA, 226 bp, Homo sapiens
  chr19:36222366-36222592
  hypo
cgtctggaaaccagggagttttgggtggaggagggagatcagtttgcagaggttgggtggagccaggtaatggagagcctccgggccggggcgggcgggagcgtctgatgtggcttggatgcaccaggcaagtaagaaagtggtaggactggccgtgctggagggagggcagttccccatggcgtgcaaagcctgcagcagaggcagagaggagatggcaaggagc

SEQ ID NO: 25362 - DNA, 298 bp, Homo sapiens
  chr19:38481053-38481351
  hypo
cggggtcgtggggtgaatacctgtggaactttggcggaagccaggtccgatgggatctggagtaccagctttgacttcagagcgctctcttctggctgggcatggagacaaggaatagatacagcaatagccacataactgcaggtggacgatgagtacagctcttgctcagctagtcagcccacagcgagaaccccgccccagtctgggctaacgtgtcctctgctgccagcagcccagtagggttctttgctggagtctggtttttccttgacttgtagctggcaagtgcttacac

SEQ ID NO: 25363 - DNA, 1130 bp, Homo sapiens
  chr19:38701113-38702243
  hyper
cgccccccacccgtcgcccacatctcagtctctctcccagtgcccgtgtctagataccctcctgccctcccttagcgcctctctttccaccttatcgccaccgctgatttgccccacatccaggacacggagccccctggagatgtctgggtctgggatgacacctcctgacacccccgttccccaccccagcctcaggaggggccaacccaccgtcctcttcccagcccttcccttcccccggcccggctcccgcctccctcccggctgcgcccgctgcagctgcagcagcccgttgccagggcaaccacagctggctgggcgggagcccctccaccccatcccccttctcctcctttctggcaaagcagggcggagctgggacaaagccggggagaggcagggtgcaggcaggggaagaaggaggtggatggaggtaggggctggctggtcgcctcacccccaacaaggcccgtcgacccccggtcctccttcttggtgatgccccaaaccagacgggagaacgaggcagtcgtgggcagaggggtcaggcccagtttaatacacagaacaagttaattcacagcagaggcaggcaatagaggagactcggtgacaagtgagggggcactcctggattaggggacatccccccaaaacccaccacctcccccacctgcagtctcagtttcccttttttaaaacccgaacaacaaacacacacaaccacaagaaacaaccacgccccctcactcccccaaaatggccagcgaggggggcgggggccgccaggcctggcggggcgggaggagggagagaaaaggagtccgtggcggagtctgtgcttctcattccagcaggcgctgggcgggggcccacccggccccaccaccgccacccaccagccacggcaggcacggggcgggcacaggctggggcggtcggggaggggcaggaacagagttcaaaaccaaggttcacatcatgcagtatccaccgtgggcaccaggaggggcgggtggacaccacgcccaccgccctgggcacaagaggggaaggcgcccaccttgggtggggcgcgggacggctgcagctccagaaattggggttggggcgcccggcggggggcc

SEQ ID NO: 25364 - DNA, 324 bp, Homo sapiens; identical to SEQ ID NO: 8236
  chr19:38781936-38782260
  hypo

SEQ ID NO: 25365 - DNA, 384 bp, Homo sapiens; identical to SEQ ID NO: 24159
  chr19:38873767-38874151
  hypo

SEQ ID NO: 25366 - DNA, 203 bp, Homo sapiens; identical to SEQ ID NO: 8238
  chr19:39212200-39212403
  hypo

SEQ ID NO: 25367 - DNA, 138 bp, Homo sapiens; identical to SEQ ID NO: 8239
  chr19:39642872-39643010
  hypo

SEQ ID NO: 25368 - DNA, 564 bp, Homo sapiens
  chr19:39646164-39646728
  hypo
cggaggcctcgaggggaacagacagtgttcacaggagaaacagttacacctgcgagctctgcctcgggccagcctttgcactggaggtgggatttgaaggggagggaggggtgctgtggagcatctttttcttctgttcctgaacgggggttctgatcacatcagcctcatgcttggagcagctggttaagggcacagacaccgggacagacatccagcctgggagtcccagcgcctgacctcccctcgggcatcaagtcactccgcctctccgcgcctcagtttcctccatgatgaaaggggcctgctgaaggacctgtctcatttagggcagcagtgaggcaaagccccggagcccatgcctgtgccaagagcagggcctggcccagaatatggccttgtcacgttgagctgccttttttcagcagggttagtttcatcctggtgaggcggcgccagcatggcgttccaccttcttggcctcctctccctcctccctttcctgccatccacacctcccggccctattctcacacctcaggatggcgatatgggggcttcacc

SEQ ID NO: 25369 - DNA, 184 bp, Homo sapiens
  chr19:39650806-39650990
  hypo
cgtcaaggtcagacttccagggagtgagtgtacgaggcccagggacttgtgtctgtctcggccccatccccgtgccctgcgcctcctcagggaccaggctcattactttggtaatggcatcacccatttgttccacagatatgtctcgagcacctactgtgttccagccactgctctagatgcc

SEQ ID NO: 25370 - DNA, 481 bp, Homo sapiens
  chr19:403382-403863
  hypo
cgagacaccacgcaggcgcagaatccctggatgacgcccacttggaagtggaggggggagggcatgggcagctgcagctcccagacaccagcacacacaaacgcacacacaagtgcacaccagcagcgacacaggcacacacaagcgcacacagggtcacacatgcatacacggctcacgtgcttacacgtgcacacgccagcacacaggcagctatactcgagtgcctgcaggcgctcacctggcactgtcacatacgcccaacagatgagcacggtaacggcacacgcagtcacactgcacacacatgcggaagcacatggcgacgtgtgtgcacctacctggcacgcacacgcacacacccgtgcagcctagcgatgagtggctggggctgaagaggctacaaggcgcccgtagccctgtcaacccgtcccaggccctgactggggctcaccaggccgcggtcaggaggccgggctac

SEQ ID NO: 25371 - DNA, 765 bp, Homo sapiens
  chr19:4042909-4043674
  hypo
cgcgccaggggctatgggtcaccttccccgcaagaggggcctctggacctgggtactcctcggacactcacccccaccccggtgctctgggtcaccatccacacccagcctctctgccacgcgacagacggaccccagagagatgggcctggcttccaaggccgggcaggaagagcaggaagggtcggggacctggggcttctctccttgggacccaggatccggtcaccctgggcccaaaggtgtggtgtggacgaggtgctcaacccacccagtctcttcagggccaaaaggggaaaagggggaccccccccaagccccccatccccgctccccagcctcccccgaacaaaacacagagaacatcaaatgaggcgactgaggcggcagcggtcgtaacaggctgcgtttagtggttctttttttttttttatgtacaagaaaaatgaatttttttgttttttcatcttttgtgtttttgtttgttttttattacttttaaagcttctccctccccactcccaaaaagtgcatttttatcagttttttttttttttaaatctcccacactttataaagactctcaatacagtctctggaatgtctatctgtctgtgctctgtaccctgagggcgccgccccgccccccattcaccaggcctggcccctccaaagtccaaggcacctcgattctgggcctggggtggggtggggggcgggacctgggcatcggatcctggtccacagcctccaggcagccccggc

SEQ ID NO: 25372 - DNA, 1004 bp, Homo sapiens
  chr19:407139-408143
  hypo
cgagcagcgtgtcccgcttgaggctgctgcccttgttcaccaccttgatcctgagggccagtttccggacgctggcgggccccaggccgtcgaagaagaaatcctcgttgaagacggggcggcggctgttcttcacgatggtgctgcgctgcttctgcagcttgcccggcaccaggcacaggcccacgcagcagttgatgctgcgggcgtcgcacaggcggtcgtagaggccctcggcggccagcaggtgcacccgcaggcgggcctggccggcctcgtactcggccagcagccgcacgctgccccgagggcccacgtggaccgtgtgctccccacgcgcctggcccgactcggggccaggttccgggggtgcccggcgggtcaggcggcgccggctcccggggctggcgtccggggtgctgtcgtccgcagacagggagccgtggcggcccacggagtgccggagctggctcaccttggcctggctgtcctgggcgaaacctttgagcagagacacggagcgggacagcagaggggacccgaagggggaggactcggccgaggaccctgtgtcgctctccccgccactgaagtagcggccggggctcatgagggccccgccagcctccctggggcccccatcacccccgttggccttggcagctgcccggcggcgcccggcccctggggagcccacctgggccagagccccgtgctcactgtggaacagagactccttgcgcctcgtgtgggggctctcagccagcatggcgaagccgtaggacgtctgggccttgggcaccgagggcagggacatggcaccctgggcctgggggtcggcgtcagtggcctcctcggacagccagtcctcggcactctcgatctggatcacgtgccgggtggctgccttcagcaggctcttgctctcggctgccagcttggcaggcagccgggggctccgtggggtctggcggggggccgcagaggccaggttctgttccgac

SEQ ID NO: 25373 - DNA, 411 bp, Homo sapiens
  chr19:40829094-40829505
  hypo
cgagttgctgcaccctgcagagcaggacactggcaggcaggaaacgcagctgggaggctctgcaatagttcaccaacaggcgccgcacaccccagcaccatgcggggatgatcttaactctacagccatccttggaggtgggtctatacagatgaggaggctgaagtacaaaggacttaagtgacatggccaaagccacgcagtcaggcccctgtgggcttcagggtgtactctgagctacacaccaggcctggggcctgtgggactgcgggccgcggcaggaagtacaggctgcatcatgggcacagtgaagagcctctgcagggcttccagtgaggggacgggccctgtcctgtgggccgcacacactgctgctgtggggataggggctggggtccatggtaactgtgc

SEQ ID NO: 25374 - DNA, 254 bp, Homo sapiens
  chr19:40829764-40830018
  hypo
cgccagtgcaaagccaggaactgaggctggaaaggcaggttagacggccctgggccgagtgaggttgagatgtgttaaagagtcaggagcaccgctcagggaagacaacagctcgcacgcccagaatcgctcccccatccccactcactttactccctgtcgtggtgtctgccttggtctcggcgccgaggcggtcaaacacagacgtcctatggagacctgggagggaagtgaagccatcagggagaggcccc

SEQ ID NO: 25375 - DNA, 571 bp, Homo sapiens; identical to SEQ ID NO: 8246
  chr19:4094519-4095090
  hypo

SEQ ID NO: 25376 - DNA, 125 bp, Homo sapiens; identical to SEQ ID NO: 24165
  chr19:41881461-41881586
  hypo

SEQ ID NO: 25377 - DNA, 545 bp, Homo sapiens
  chr19:42348874-42349419
  hypo
cgtgcggagggagaggcagcggtggcgcgaggctcaactcgaagcgctattggtgggactgatagtcttgtgcgccaagaagctggcagaagggaaggggcgggacatcagttcaggatctcaaaccgcattggtcgtctgcctcggctgagagaggcgatgcttgaagttcattggtctttgtgagacagggtaagaaaagcagcgcgagcttggcggttcctctggccactttctcacagtgtctttgggcgtcttcttgactgaatctgactccattggaggctgtggtaaccgtgaactagctgcacgaacacggtccctcctgcctttccgtcctcctccctcttagccggactccctaacccaggcatcccctctcctccccctcgcgcccctcccgccctcgcgccccctctccccttccctgcctcgcgggccccttggcgcgttcccggttccccactcgctccctggggcacgggaaggggggagggggacatgcatgaaattaattgttggtagtggccacaggagcaggaagc

SEQ ID NO: 25378 - DNA, 501 bp, Homo sapiens; identical to SEQ ID NO: 23159
  chr19:44711530-44712031
  hyper

SEQ ID NO: 25379 - DNA, 410 bp, Homo sapiens
  chr19:45570303-45570713
  hypo
cgggaagttagcaagcgggtgtctagtgagggagaggtgacgtgggccaggcagggctcatgatggcaggactgcccttaggctgagtgtatctagagcgccatctctgtagccggagggaggccggaatgccgctctgggacattttggagggagagtagcaggagaggagagtcgagcctgtcaccctgggccttgcaggaaggaggactgtggatccggacccagggtggggtgcggttggggtccctggagcctcacagtcctcctcccgccctgctgcatccccaggagccgctcccactcaggggaccgctacaggcggggcggccggggcctcaggcaccacagcagtagccgcagccgcagcagctggtccctcagcccgtcccgcagtcgcagcctgactc

SEQ ID NO: 25380 - DNA, 1170 bp, Homo sapiens
  chr19:45574458-45575628
  hypo
cgcagatgtggacatagggtgtcggcccagcatgtcccacatgggcccctttgcccagggcctctggcgacaggtccgggcctctccccgccctcgcctcagcccctgccctggcctcgcccgcactaggaactgggagcgcagctttctgtgccagtcctgctgcgccccaggcactgggggctggccgttccctcaccccctcactccaaaccggtctgtccagccgtccaccccacggaggggaagcctcctgccccacctcatgcaccccaagaaagccagagtccagacgggtgtaaataaaagggaaaatttacttggagaaggcgggcaaaaacgaggaggtcaatgggtgttggcagcggtaccagggacagtgaggggggctttcctgggctcaggcctcgccggccgcctcagggtgcttctgccgcaggtgtttgtccagggtggctcgcaggccgaagggcacatggcagtgggggcactcgaagcgggtgctgccaggcgtcatgccgtgcatgcggcggtggcggttgagcttactgctctgggcgcaggcgtagttgcagaactcacaggtgtaggggcgctccccggtgtgtgagcgccggtgcaccgtcaggttgctgctgttggtaaaatgcttcccgcagaactcacagctgcccccgggcccgcggctcttgccccctgacttgggcatctttttgggtgatgccttctggctgtttgcagggtcagttctttgttccgtggtgatggctccccaagtgtctccaccagggccggcttgagccccactgccaggagccccgggttcctggacacctgctgtggcggcggctccagccccctcaccaccgctgcatggaagggtgctggtgggggcagcagcatggacagccggctccggaggggctgcagaggcctgctcctggctggtgtcggccatgagggggctctggggcggcacctgccggtgggtcttcttgtggcggttgagcttgctgctctgggcgcaggcgtagggacactggtcgcaagcatagggccgctcgcctgtgtgtgagcgcatgtgcactttgaggttgctgaaggagctgagggtcttcttgcacacaggacaggtggggctccgccgggtgaggccgctgccacttgcac

SEQ ID NO: 25381 - DNA, 580 bp, Homo sapiens
  chr19:45626547-45627127
  hypo
cgcccagcactggcacctgtgaagggcctctggaggctgggtcttcctgcaggcaccaggaagaaacctacgagcgcatccttgctgagggcaggacccgctctccacatcctggaaacccaacagagaaagacagtctctctggcagcctccctgtcttgaagttcgagaaggctgcatttctaggctcccacaacctgtctgtccggtttgaagccggggcctgagggcttcagggtactgatgcaggacagacagctctggttcaaacctccctctgtccgctcccacaggtgtggcctcagaagaccattccctctgtagcgtggtagaggctggaaattctactctgcaggattatgatgcggattaaatgcagtaatcgagtgtttggcagagtgcctggtagggaaggggttcagtaaagagctgctcgcaccattctgtgcagggaatgctttagggcatgttttagaattttagaacgtgtttcactacatgagtagcttcttgcagctttgaggccctggcatccctctcccctgcctgcaggcttccttgttcactgggccaagtcccc

SEQ ID NO: 25382 - DNA, 772 bp, Homo sapiens
  chr19:45655296-45656068
  hyper
cggcttgccctgaggcacggcccgacgggggcgccctggaggcgctgttggcccggtgggcagcgtggggggtatcgcgggtaggggacttgggcgggctgggcggcttgagcgcgctgacggctcggatgagacccatgcgccggcggatggagtggtccaggttgaccgtgcagcgcagcaggctctgcgcctcggccacggtgaaggggaagtcggcgcccaggaagcgctcgaagagctcggggtcgccgtccaggtcgagcacgttctgcaacgccttggtcatggtgtgcagctcgcggctgttgtcgcggaaaacgtcccagaggcgcgcgcggccctcgggcgcgcccccggtctgctgccggtcctccaggcactgcagcgcccagctcaggcggcacggccactggttggcgagcaccacccacgccaccgcctggcgcggcgtggggcccccaaagtccccctgctgctgctgctgctgcagcaggcgcacggtgatgggcacggtgttgacgatgcgccgcatggacaccacgttgtcgggcacgtactcgtagaggcagtcgcgctcgtcgtgaaggcagaagagcgcctcctggattcgccgcgccgcctcgtcgtcgatgcggccctgcccgcgctccgtccccgcctgcgcctgcaccgccagcagctgcgcgctctcgcccccggcgtcccccggcagccacggcttgcgcgtcatctcgcggtacaacaggtcgtcgcggctctgcaccgcatc

SEQ ID NO: 25383 - DNA, 451 bp, Homo sapiens
  chr19:46180187-46180638
  hyper
cggtctggcccctccctaggccctcgctgcctgccgcacggcccagatcgtgacccagtactgcgtgggtgccaactacacgtggctgctggtggagggcgtctacctgcacagtctcctggtgctcgtgggaggctccgaggagggccacttccgctactacctgctcctcggctggggtgagctccgatcccgtcccccgcccaacccagcgcgcctctcctcggctcccccaactgccctgctggttggcctctgcgggtctcctcccgtctctaggcttctgccttccccaccccgacagaggaattccgcgggtcttgggcctggcggggcccgtgagcgcgctgacagctgcggcggggtgggggggcggggtcggggtctgcacaggggcccccgcgcttttcgtcattccctgggtgatcgtcaggtacctgtacgagaacac

SEQ ID NO: 25384 - DNA, 412 bp, Homo sapiens
  chr19:46321120-46321532
  hypo
cgggctccctccggggtcagacgggggaaggggagggcaagcaggctagaagctgctgtctgcagcctggaggcggggtggccggggatgggttacctgcttcatgatgaggcgggacaggatgttcatgacgaagccccccaggcgggggtacatggtcagggactggatgacggtcctcatgagcagcatgggcagggggctctgctccatcagctgctgcatcaccacggccagcacctctgacgtgtacacgttccgctccgcaaagcacaggttggtggctgcgaggaggcggagagtgggcctgtcctctctgcccagctgccccctgggaggtgggagtcccggcctctgctgtctgcccatgtgaggggaagacttctaaagccctgacttctaaagcccctgc

SEQ ID NO: 25385 - DNA, 602 bp, Homo sapiens
  chr19:46379840-46380442
  hyper
cgcctctacctgccacctcgcaggccaggccctctattcctgtcgctgcgccccgccttgccggctgcgtgtcacccccgccccctgccgcgctggctccccgtccgtcccaccagccttgctgtcctgggcaggccggggaattcctcccggttcctggaaaaaacaactggggccgagagaaaggccctcagtctccccaggcacccgcccccctccctcgggcctgggggtctctcccggagtcggccagcccgaggcaggaagccctgcggtttctggcttctcccaggcggcctccggatctggcccccgccccccggccaacagcccaaatattattccgcgggaggagtcggtggtggcgggaggaggcccaggctgaaagaggctttcagggcggccaggcctggggcttcctgtccccaggctcgggcctcaggccgccccagtggggacctcaggtggccggaggggcggggtgttgttgtagggtcctcgggggagggtggggccatccgtcggggtgtctggtggccaccagctctgctggcgtgggcaggtgtgacccccaccccagggacagccggctgatgtccagc

SEQ ID NO: 25386 - DNA, 990 bp, Homo sapiens
  chr19:46907118-46908108
  hyper
cgtgaggattggaggagccacgtggaaaatgctgctgcccggagcccaggtggctgcgctggccagggagaagcccctggttggcggcggtggccgtcactgctgctgctgcttctgcagccaccacggcccaagcatcccccagatggcgtccccttcctctggcttcctctcccgtagcaacagcagtccctgcagaggactctggagtggtggttgcggggtcctaccccgcagggggcaggtgggcgtggcggggagaggcagtagagtcgctcagggtcagctctgacctgtccccgcggtgttcccggccccagcagctgctcagttatttgtcgagtgctgacggtcggtcggaagaaaccacccggactgaggaaggctgaccccagatgcgcctagttgggaatgtgctggaaagatacgccccctggagggagtgcgcccaggaagtggggaggagcgtttgagatcgaaggagtggccgcgtaaaggccctgaggtctcgcaaggaagggtcccggggcgtcccaggccctgttctaggtgcaagaaacaggaacctcctggagcgagcatgcggtggggaggcagggggtacgcctcctacatgaggaggagatccacgcattaggaagtgaggcctgctggggacaaaagtctggcaggcagggccccaggagggccggggcaggagagggtttgcagtcatcgtaaacggggcggcatggaaagccctcactgagaaggtgccaaagaccccaaggaggtgaggggttgcggccggcagatgcctggggaaagcgcatgaccggaagcgcaggaagagccaggttaaaagccccaagccagagtgtgataatatggggctgttaatgtgtgactactgcccctcccgtgccaggctcggtgctggcgtaggggaggcagtggggccaaagaaggccacctgcctccatggtggtcgctgtcgggttggatttccac

SEQ ID NO: 25387 - DNA, 575 bp, Homo sapiens
  chr19:46916506-46917081
  hyper
cgtgagccgggggcgaggtcagtcccaaggctcaaggcccactccaagctggaaacgtggtgtcccagctccaagttggggcgcgcgggctgccagcgactcttcctgccccaggccccagggacgcggctggaacttgggacaggacttcgcagacaaagacggtccagtcgaagctattcaatatggccgaggcgctgggaggccccagcccgggcctccagtagggtcccccgcccccaggcaggccgccacccagctccaggctgaccttgacgcgccgcagcctgccagcccgcgcgcttagagctctgcaccgtggagcgcgcgggcaggaagttcctcctcgccctccgccagaatgaggcccaccttcccccgtctcatcttacactcccagactctggaagactgacaggggggctgtccactcccttcggggcggcctccttcccctcccccacaggggtgtggccgcgccccgggcctagctgggcccattgcttcccagcgaagcggcagtggcccacgtcagcacctttcctgaaaggcagcggttcccaaacctgccatcc

SEQ ID NO: 25388 - DNA, 247 bp, Homo sapiens; identical to SEQ ID NO: 23160
  chr19:46929939-46930186
  hyper

SEQ ID NO: 25389 - DNA, 784 bp, Homo sapiens
  chr19:46992624-46993408
  hyper
cggccctcctcgggccccctgcttgccggacttttgtcccccagcaggtctcaccccctaatgcatggatttcgtcctcatctagggagcgtaaccccagcctccccaccgcatgctccctgcgggagggtcctgtttcctgcaccaagaacagggcctgggacgcgccagccctggataaatctcatggactgcgcggatggcgctgagggctcctcccagacagtcgccttctctcccaggagggggcaaccgcgctccgctccacccgtcgccagaggctccacgcgcgggacagacccggctgctgcagcctgtgctggtctctgtgcaccgggacccttccctgcaggatctcaaggcctttacgcggctgctccttcgaccccaaacactcctccccatccccgccggagcactccctccaggaatgagggaatgaaaacaatgtttctttccagcacattccccaccaggcctatctgggatctgactcacccagtccgcgtggttcattccgaccgtcagtcattcaacaaataacagccgccgccgcgtgccaggcacggtgttggggctggggacacgaaggggaaaggccaagccacactttttccctacggagctggccctaagccgctctgccgcgcctctccccgccacgcccacctgcccccatgccgcataggtccccacagccaccgctcagggccctctgcaggggctgctgctgctgcaagcccacggggcgctggggggagtttgaaagcaggaggaaagggac

SEQ ID NO: 25390 - DNA, 112 bp, Homo sapiens; identical to SEQ ID NO: 8263
  chr19:47646754-47646866
  hypo

SEQ ID NO: 25391 - DNA, 83 bp, Homo sapiens; identical to SEQ ID NO: 8264
  chr19:47676020-47676103
  binary

SEQ ID NO: 25392 - DNA, 637 bp, Homo sapiens
  chr19:47742612-47743249
  binary
cgtctcgtctccaagatcttgtctgccattctgggcaagcagatttcgcagcctggggagagggagttgggaaggacttaacttttcaccgcagggcctgagtcctggctttccgcggtggggaaggggtctcccgggtcccctcggtgtggccggccctgcaggccgggaggctggaccggggccgggtgggggctgggcgggggcgcgggcgtccgcagggtccgagcggccggcgcgcgtgtgaaggttaccgcttcccggcggggcgggggccgcgcgctgttgctggggtctgcggggcctgcctgcgcccgcgccccccctccttcccggccagccagtgagcggtacccgccgccgttgccaggggaaactcgccgccccgttacccagcaacaagcctggcccaaccaggcgcgaggaccccccaggccccgcccgccgctgcccaccgcgtgcccaatgccaggcgggcagagccggcccagctcccggagacggcgagcgcgctcattggccaccgccgcgtccgcccggatctgggggagccctcggcgcggggggcggggaaccgggccccggggagctgccgggcgcgcggcctgcaaacctgcgaccggctggggtgataccc

SEQ ID NO: 25393 - DNA, 205 bp, Homo sapiens; identical to SEQ ID NO: 8265
  chr19:47881084-47881289
  hypo

SEQ ID NO: 25394 - DNA, 64 bp, Homo sapiens; identical to SEQ ID NO: 8266
  chr19:47881711-47881775
  hypo

SEQ ID NO: 25395 - DNA, 746 bp, Homo sapiens
  chr19:48003362-48004108
  hypo
cgctctcattttaagtaatttgttctctggcaactacatctcgggctctgttctctctaattcctccccaggatgtagggaagccaggttgggctaatttccgctcctttttcggcagcaactcctacctggctggtctcagaatcctccccgccccccacaccgctcccttctgcatgttaattctgacaacagaacagattttcctctctccccggcaggcggtgggtctgcaatggaactcccactcccaaatgctccgggattgggaaggggtgatcagctgcaccgacaccaccgacacggtagataggggggcggagacttgagcagggcgcgaatgccaactggaaggaagagagccagttctaaagtcaacgctcactctgcctcaggcacgcccctgccagcctatcacatgtcggccactggaaaaaccagagccgccaggaaacctgaggaatcaatgcagggtgctaggatggcgctccggacagccagcccgtgtggcccgcagaggccctcaccttgggggtcggctttcttgaatgcgttgccagcgtccacaaagcaggtggctgcgtcgtgcttgctctggagctgcaggtgcagctgtgcagcctggcagaacgcgtttccagcagctggaacagaagagaagggcagtcctggcctcagtggggctccacactttatgaagccacagagacactgccctgggaggtgggtcgggctctcgagaatgc

SEQ ID NO: 25396 - DNA, 202 bp, Homo sapiens; identical to SEQ ID NO: 8268
  chr19:48012665-48012867
  hypo

SEQ ID NO: 25397 - DNA, 476 bp, Homo sapiens; identical to SEQ ID NO: 24179
  chr19:48150921-48151397
  hypo

SEQ ID NO: 25398 - DNA, 499 bp, Homo sapiens
  chr19:49127280-49127779
  hyper
cgcgtgttagagtctctgtctttgcagctaaagacctcctccctcacgccccttttcttttgtgaattcaatggatgagacaggcccactctcccttaacaaagatggcgacaacggcgctgtctatggggccgcgacgtcgtctccgctgcgcgtcggccctcacccacgatggcggccagtctcccgaagcgcgaggccccgcccagctctcggcctctcccgcggccggtccctgcaccaagctcgcgagctgactggctccaccccccgcgccctcgtattggtgcggcccaggccggctgcacggccattggctgagcggatgcacaccctccccccacccctaggtctgatgggggctgttggtgctgacttgcgggaccgcctggaggaggacccggcgtgtgaggagggtgcgggggtcggggcagggaccggagtctaggggactgagggaccaagaggaacagagactcaggcccgggactggggcacc

SEQ ID NO: 25399 - DNA, 550 bp, Homo sapiens; identical to SEQ ID NO: 8271
  chr19:49467064-49467614
  binary

SEQ ID NO: 25400 - DNA, 224 bp, Homo sapiens; identical to SEQ ID NO: 8272
  chr19:49600463-49600687
  hypo

SEQ ID NO: 25401 - DNA, 314 bp, Homo sapiens
  chr19:50016242-50016556
  hyper
cggactcctgggtccgagggtagagcggttgggggcccggactcctgggtccgagggtagagcggttgggggcccggactcctgggtccgagggaagagcggttgggggcctggactccggggtctgagggaggaggggctggggcctgaggggggcggaaggggcgtggcggagctcggggccgggactctcagcctatcaagtgtctgtaattaattaaccaactgagatccagttcaggggtgaaagttcttcaggtacgaggagggcattgttgtcagtctggaccgagcccgcagagcccctcctcggc

SEQ ID NO: 25402 - DNA, 648 bp, Homo sapiens
  chr19:5023047-5023695
  hypo
cgcgggtgggactgagtgaaggaccctgagctgggagatgaccctggatgatctggggagcccgatgtcctcaccgggtcctcatgagaggaggcaggagggtgagagtcagagagaggctggaagaggctgtgctgtggctgcggaggtggaggaagggccttgagctgagggaacctggcacgcgctggtgctctctggagtaggacgaagcagagaacgttctcgtgccaaggttttctctttcctgcctgagggccctttatgtagatcagaccagagacaagtgaatcccggtcttgccaggggaggcatttggagctgctcgtgggacgtggtgatgcggtgccaggccacatgcccggggctggggccgagtggcgttctcgtgctgcctctgtggccaggtttcacttgggaacctggctgcatcgcgggttcctcctgggccttctggtggcttggggctcctctgtcctcggtccctgctgggaaccgtgctttggcagcaggaaccagcgagatggcagcacaggggctggaggccggctgggactcactggggccgcatggggcttcacctgatgcccagccctcctgggacagggaccagtgggagcaggaggtgggacaagaggacgagggctc

SEQ ID NO: 25403 - DNA, 253 bp, Homo sapiens; identical to SEQ ID NO: 8275
  chr19:50306223-50306476
  hypo

SEQ ID NO: 25404 - DNA, 181 bp, Homo sapiens; identical to SEQ ID NO: 24184
  chr19:50320022-50320203
  hypo

SEQ ID NO: 25405 - DNA, 441 bp, Homo sapiens
  chr19:50364788-50365229
  hypo
cggcaggcccaggggtcaggggaggaggggggtcagggggtgcagcccggggggtgtccgggctgagcgggctcacccggttgttgtggcgcgcctgctccagagtggcggtgaagaggaagcagcggcaggggacgcccgcggctcgggcacactggacgtacctgtgggggaaggagctggatgtgcaggccccgcccaccccgccgcaggccacctacggccccgcggtcacgctacctggcgcggctcgcggcgtctgggtttgtgttgtcgatggcgacccgtttcccttgcttcagggctgtctcacacgtggtcacacagcgctgccaggagcctagcgtgtcctggggacacgagaggtcacaaacagatcggcagacccagggggagagaagaccccgagcggggacggggaggcaatgatggaggaaagcc

SEQ ID NO: 25406 - DNA, 419 bp, Homo sapiens
  chr19:5037576-5037995
  hypo
cggcgctaagctggactgtcctttccttgggaccggcctcatcttggtttaactctaaattagtgtttctcttcgcttggcactgtggacttggggccgcatcgttctctggggtggcgccatcctgggcattgcagggtgctgagcagcttccctggcctccatctacctcatgccaggagcaccctcagtcgtgaaagccacagacatccccagacatggccaggtgtcccctgggggacaagaccccccctcagttgagagccacctgctcgctgcggctgctgctgctgttactgcttttgctaaagaaacctgtgcatgccggccacggaggcagcaccttcctgtcgttaacaggcacctggaggataagtgttttcattgccaagcaaaacagtttcttcactgatgtgatc

SEQ ID NO: 25407 - DNA, 305 bp, Homo sapiens
  chr19:5038238-5038543
  hypo
cggagcggctgggagggcctgcacagaagggtgcctggcacccagaaggcccgtggtgcccaccggcagtctagaatctggtcttgtcggcccataggctcacccccaccagaggagggaacatgaggctggggacaaggccaggagcccagggtgaggcgtgtactccggatagccctggtccctcagctcctggatgtctccagaaagagccggcgctaacctggactgtcctttccttgggaccagccttgtctcggtttaactctaaattagtgaaggcaccgggttccggctgcagtgcc

SEQ ID NO: 25408 - DNA, 694 bp, Homo sapiens
  chr19:50832540-50833234
  hyper
cgagtcggggccgccaatgagacggagcgattggctctttctaagagagcagggaggaggggcggggcggggcgtcaagggaggcgggaccggttactactaattgtgttcggcagcactggtagccaggggaaggcggggctagatacgatagagagagaccttactgaactgaaaaaagtgcgggcggggtagagggaggaggggacacatccaagctatttaaagacgcccgactggcctggaggggcggggccaccatgagagaggccgtcctgattgggctgagaaaggggcggagagaaacaaaacagatcgcacgccctcacctaaaacaccgctaggcaggacctggtggggaggagcattgcttggaagagacagggccgcagaaagtagaaacggtccagatgagactgcatggggcgggaactagagatggaggactttcccgcgcaagggggacaggctggactgaaagaggacacgggaagaacaaagacttagactcggtgagaaggtgttgaaacttgagagagtcctggaaacccgagagggtctggataggcctaagggagggagcggggctgaggctccaaggcgggcctggttagtcggggctgggcccggagaatgagtgtccggatggatgagtggtactgaggaaggtgagtggggtcgacaaatagaaaac

SEQ ID NO: 25409 - DNA, 603 bp, Homo sapiens
  chr19:50833813-50834416
  binary
cgaggcgagaacttctaacgaacgctacaccgcggcggactgcagattggaggaccgagggtagatgaggactggtgaggagggggcacgcaaggaggcagagaggacgggagaggggagaggccaaagcgccaggaagcaccgtcaagactgaggcaatataggcaggaccgataaaaaatggggtgggctaggagtctcagaggtcgggttctggggaagaatggagtgaggggcggggccagaaaaaggggaccgcctcggagcgggccgtccccgccccctgggcggtcgtaggctccgagaggcagagcgcaggctcagggggctggggcggggccagcggctgcggctggggctgcggagggaggaggcggcgcctgcgggagcgaagggggcgggtcagggggctgcgggcgccctcgggcagcacagtttctggcccgccgcttcctgctgcaggtgcggcggctgattcgtatcgcctcccaaccccatcccacccccgctcccgtttctgggtttcttggcgtctctttttctcccttcttgagtatttgtgccgccgtctctgttcccacccctctgagtctccgacccctc

SEQ ID NO: 25410 - DNA, 119 bp, Homo sapiens; identical to SEQ ID NO: 7128
  chr19:52715152-52715271
  binary

SEQ ID NO: 25411 - DNA, 105 bp, Homo sapiens
  chr19:52780335-52780440
  hypo
cgtgtgtggttgtggcacaggaagaaagtatgttgattctaaaccctaaacagcatatttttgacattcaggattgacttctaaagagtcatgttggccgggcgc

SEQ ID NO: 25412 - DNA, 837 bp, Homo sapiens; identical to SEQ ID NO: 24189
  chr19:549193-550030
  hypo

SEQ ID NO: 25413 - DNA, 156 bp, Homo sapiens
  chr19:56602205-56602361
  hypo
cgcttatgctcaggcctccctccagacgcactgtatgagaaagtgccgggccgggcctgtgcttcagcaagccccccaggtgattctgatgccagctccagtgtgagaatcactattccaaggcagagagtattcgaatatggctcttgaacctgc

SEQ ID NO: 25414 - DNA, 846 bp, Homo sapiens; identical to SEQ ID NO: 24194
  chr19:58219927-58220773
  hyper

SEQ ID NO: 25415 - DNA, 881 bp, Homo sapiens; identical to SEQ ID NO: 22852
  chr19:58238341-58239222
  binary

SEQ ID NO: 25416 - DNA, 102 bp, Homo sapiens
  chr19:58874823-58874925
  hypo
cgagactccgtctcaaaaaaaaaaaaaaaaaattgagtcgggatctcagaagctaagcagggtcgggcctggttagtacttgggagaccgtctgggaacacc

SEQ ID NO: 25417 - DNA, 134 bp, Homo sapiens
  chr19:58964127-58964261
  hypo
cgtgcggagttacagcttgagggtaaagaaaaccggctggggtgcctgaggctatcaggggaggagttcggcaggtggctgaataggagagggtggcagcaatgtgggaaagaaattgcgggagcgctgagatc

SEQ ID NO: 25418 - DNA, 425 bp, Homo sapiens
  chr19:5897319-5897744
  hypo
cggccggcagacggagactcatccacgtggtggacacaagaacaggcctgagacctcagttctgcggctgcttccagcctcacaccgccagctcagcggcgccccccacgggccctggcaccagggccccagctccaggttcccatcaatggctctattctcctgtggggcccggggctcctgggcctaatcccccttggcagtggctctgcttccctgcctggctgccaacgcctcctccttgccactctcgaccccctcctgctggcagctcgggcctgggctcgtcctgcacacctggctgtctggctgccgcccccgccacccagcctcgccactccggtcagcttttccatctctgccatttcccaggccgcctggcccctgacattggcttctatgcatgaggagcttgggccggggcc

SEQ ID NO: 25419 - DNA, 553 bp, Homo sapiens
  chr19:59049750-59050303
  hyper
cgtcttcagggtggtgggctggagggggcgggccggctagcgaggcgtggccctatgaaggggcaggctgggcgtggaggcggtgactatgccgcggatggggtgggcccagatctggggggccgcgcgcccgggctggaacaaaggcagaggcggggacaaagccccgcggcccccagtccccatcaggaacaaaggccacacccggcccagcggtcgacgcgcccgtgctgcagccacgtgcggacacctgggagcggggcccggggaggcagtgccccgttaccctcacgccccgcccggctagccacctttacctgtgcgcgccttgggagtggcgaatgggtttcatggttgttcgcgccagtcctcgcggcctccaaacatcctccggaagctgccacctaccccgcccccagccgttgtcacctggaccggagacctcacgaccccaggggcaccgcacagggggctgaggcccacccccccggggccagcctcaatgcacccacccaccacgttttcaacgcgctgatagtccctaggcgggttc

SEQ ID NO: 25420 - DNA, 1275 bp, Homo sapiens
  chr19:5915018-5916293
  hypo
cggcgtcgtgacggtggacgacctccgcggggtgtacagtggccgtgcccaccccaaggtgcgcagtggggagtggaccgaggacgaggtgctgcgccgcttcctggacaacttcgactcctctgagaaggacgggcaggtgggtggctgcgcggggggccccctccccaggcagttcctcggccgtgccccctcacggccctctgttcccaggtcacactggcggaattccaggactactacagcggcgtgagtgcctccatgaacacggatgaggagttcgtggccatgatgaccagtgcctggcagctgtgagcagctccggctcagccctgctgccctggcctgtcactccccacccctgccggagacctcccttccctgggccccttctctcctgggcagccacaccacagagcggggaggggcaggtgggggaatggaggctgcaggactggctagaccaggtccctgccggtccaccaggcggaggtgggacaaaggtcctaacaggagtcactggctcaggaccccagggagaaacgctctccccacccacgccatgctgaccagagatcttgcagcccctgtggatgcccccgccgaggtcccccgatccccgcacccggactgctgctccctgcccctcccttgcgggtcccccaggaagccaggtgaccccaggtgggaggctgtgtgtggaggccatcctggaaggaagtttagacctgcccaggtgtggagcgaggggcacaggggcatcctaacctcagaaactgaaataaagcctttgaaaaaaaaatctgtaaaacatcaacccccaatcagaagatggcaaatggggaataaaaatagcaggtaacatgtccagcgggcccagtatctacattctggtgagcggcccgaggctgggagctctgggcgggggcagaccggcggggccttgcagcaggggtgggggtaaagtgcgggtggtggtggagagaacagggctgtggctggaccccagcactggtgacacgctgggtgggagcatgaggccccaggctgctggaggtcctcgcccggggaggtggaggccgttcctggtcaggggcttcctgaggcccctggggcatgcagaggccagggttttagttaaaagtttaatgtagttcccaaatacatttcatatgacaatcttacataaatgttccaaaacacatgggcgttatctcgttgtactcgtcactagctggctaaggcttaaagcagagacgtgtgactgggtctctc

SEQ ID NO: 25421 - DNA, 634 bp, Homo sapiens; identical to SEQ ID NO: 24199
  chr19:7267319-7267953
  hypo

SEQ ID NO: 25422 - DNA, 271 bp, Homo sapiens; identical to SEQ ID NO: 8295
  chr19:7685308-7685579
  hypo

SEQ ID NO: 25423 - DNA, 1431 bp, Homo sapiens; identical to SEQ ID NO: 24205
  chr19:883424-884855
  hypo

SEQ ID NO: 25424 - DNA, 295 bp, Homo sapiens
  chr19:957156-957451
  hypo
cggagcctctttcccctctggaagacgttccggggcctggtgatcttcttcctccccagccaccaccctggcaggcagaggcggtcggtggctcatttcatagctggaggctgagactccaggctccaggtgcggggaagccagcaggagacaggaggaccgggatgggaagcagggcggggctctgggccaagtccccagcagcccccaggctctggtcccgcactcgccgctgtgtctcagtttcctcacctgcaaagcagagccagttctcggaacaaatgcgctcccgtcc

SEQ ID NO: 25425 - DNA, 146 bp, Homo sapiens
  chr19:9937371-9937517
  hypo
cggccggggaaatcaggaccaaaccagtaaggagcagctctttaggcataagcacgcgcattaaagacaaaaagtatccttaacatgataaggataaccagctcattagcgctcatgcatatggacggcatatcatgaatggaggc

SEQ ID NO: 25426 - DNA, 213 bp, Homo sapiens; identical to SEQ ID NO: 8299
  chr2:10587836-10588049
  binary

SEQ ID NO: 25427 - DNA, 619 bp, Homo sapiens
  chr2:10588876-10589495
  binary
cgttcagtacctcgtgcccgagagcggaaaagggaaatcgcgagcggaggaccgatgtgctggccacgtgggccccgccgggccgactccggaccctgctgccgcccattcctccggtgcaagggacctggaagtgatcccggtgccgctctgctcccaccagctagggagcagaggcgcgggagggaaggggcgtcccgggggtcgccagcacgctgcgggcagggctggcagccgcctccacgcccccgcgctggaagcctcgtctttgtaacatcgaggtatcctgtaactagatgggtcctggcctgcggaggtagtttcccctgtgaagccagggactcagccaggagcgtgaggggacccggatcctgagtctccaagccgcccactaccctctgctttaccggatggaactcatcagtaactaggtatctttaagggcggctccctggcgcgctctgagagttacggaagtcccaaaatgctttgaccgaaaacgtctaaacagtgaatacataaagcaaaaagccgcgtgggaaattcgagtccctaggagcgcccaggggacgcctctggaggtggactgccactcactccaggccacgctggaatgccc

SEQ ID NO: 25428 - DNA, 212 bp, Homo sapiens; identical to SEQ ID NO: 24220
  chr2:10600656-10600868
  hypo

SEQ ID NO: 25429 - DNA, 72 bp, Homo sapiens
  chr2:109335080-109335152
  hypo
cgtgaaccacagcgcccggcggaatgcgtggattttggcataagacggtggttctggaaccaatcccccgcc

SEQ ID NO: 25430 - DNA, 1446 bp, Homo sapiens; identical to SEQ ID NO: 23182
  chr2:118981062-118982508
  hyper

SEQ ID NO: 25431 - DNA, 938 bp, Homo sapiens
  chr2:127863367-127864305
  binary
cggcggccgcgcagcgggtgggagagggggcaggcctggccgcggggcactggggggccaccctggcagaaacacagattctgcaatctcagatttcagagttggagtcgtcaggggaagtggcgtcagcagctggcgtgatccaattcaataaaccagaggtggcttgggatagacaactgaccgggtgcagacccccgcccctcaatctctgcatttcctgcacgctctgggcaccctgggaggccccggctccatcccccattccagctctccgcgaggaggggtcgggtttcctgtggcgccttccacgcgcctcctccaggccagctccccacccggccgtgggctcccaaagccagtgccgccacccgctccccggccgccggaaacgctaagcccctgctggggcgagggcacctccttgcggggtgcgtagccctgggctcccggtggggccgggctgggcgggagcttccaggccgcaggcacctctcgggaaaggaaacccaatccctccttcggcccacggagaacgaaagtggagaagcagtgggaaggaaggaactgtgggtgccggttcgagaagcagccttgggagtccgggggaatagtgtccccaggggcagagggacatactccctctcgccccgagcgccggcccagcctaggttgcctgcatgggcctggagagctgagggtcaccacctggcctcccagcctcccggcccttggcctccaaagcggggtagcctggagcgcgcgcctgagaagagcctggagcagggccggccactgctgtgcagccgagccacgaaggtgcaaagcggggccctgtcctgccccggccgggtgtggggagacagaggacgcaaacctaagagggcacccagagcgccggggaacgcagcctggggacctcgaagcccctcgaaagc

SEQ ID NO: 25432 - DNA, 1788 bp, Homo sapiens
  chr2:145273332-145275120
  binary
cgcacacacacgcgtacacacacacaaaacctagagagagagagagagagagagaaaagcatcatttgtctctaatcaaaattctctcgtctttgtgttttgctccttccagcacctcacactgcgcccccagccgccccctccccgcgccgcgcagctctggggcaggccgggggcgcgcacaattgtcttctctagaggaaagttgctccaagtgggcccgggcggtccccgcgaggcgcgggctggggctgcggaggccgggaggccgggtgggcgctgcgtcccagcgcctgcctcgggagcgtctacgcggccccgcgccgggtgatcgggctgagagcgaggggagcgagaagtttcctttccgagtctgggctggcgctcgttcgcttgtttgttttcgggggttggtttctttctttttaaactcagttatcctccgtcagctcccccacccccccccggcaccctcgctagtccccagccctctcccctcccccaggcgccttccgcgctcttgccaatcacttttctcttttattcccacgattttgtttggggtaatacctagggggtctctctctcactctcttcctctctctctgtttctctctgtccccccgcgtcccttctctggctgtctccaaaacggacctaccaaactctcacccccccctttaatatcccacctctgatctgcgtgtgcccctcgaacccccatctcctttctccttcctccttcctgactcagcctggataacgggctcctccagaccatgtagaaactgccgggaaaagtctcgctgcgccctgcgactccttcagtccccggcctgggggcagagcctgctggagaggagtcatccgtccccgagccatcatcgaccccaccggaccccgcgcggggccggccgactccctcccaccccggggtctgggcgcgatgggccgggccccgctgcccgcggaccgttacttggcgcaccgagaagcggccgggcgactccggcaagaaactttaagcctcgctgaggcgcagacccggttcccctctcctgccttcgcagtctctctgccacccccgcccccgccccgggatcctgcgcgatccagcgcctgggcccccgccctgccccaggcggacgctcccgaagcccggccggagacccggcgggccgggcgcgagcggagcgggaggcggaggcggagggagggcggaggcaggggctcgaggggggcagcggggctgggggcgcggggccccggccggacccccgcgctcggacccccgggtgcctgacgctcactttgcccggcacttccccaacaccccccggtccagccgccgcgcgcgccgggctccggcgccggccgcggagggaggctcgccctagagccctgggcgccgccgccgccgccgcctcggttccttttccctttccccctccttctccctgggtctcgagccgcgtagtggcccggaaaagtttggttcgggctgcttcttaccgtttttcctcctgggattggcttgtttgcgcctcttgcaccgggggccatccgccatgatcggctgcttcattgataagagcggatcagatggcagttcgcatggactcggcgccctgcttcggcagcacgcaggctcgatctagcaaccaaacacagcgacaatgtgggcatcgcccgcgcccattgaaacgcgcgcgggccgcccaggggagccgggccagggccccggcgagcacccatccgcgccccccaacgccaaagcgaaacttcggc

SEQ ID NO: 25433 - DNA, 1051 bp, Homo sapiens
  chr2:145281217-145282268
  binary
cgaccttgtgttgtgactcaggaggtgggcaacttcttttggagttgcaagcaaagggtgataaaggggacccctggactgggtgtgtgtggaggaggtggggggcggcaggggtccaagccaagccaaacggttttctcacgtgcagactcgcaatccaatccattcggagttgagcctaggataggaggggaaagtctattaaaaaaaaaaaaaatcaggagcatctctctgagaagccctttcaaacaaaaccaaaacaggaccagagaagctcagaccgtccctaacatccctgctgcgagacccgcaggctgtggaatctcgcacgtcacctggccccagcagggcggccagctgaggggttgattttattttatttttttgaagtaaaggctgaatctcggcttcagggcttttgccaacgtctccactgacaggaaccagcaaacttcaggacccaaatgagcatcttaatttattgatgctaaacaggtctggttgttgtccccaattttccgcgcgctctgccactcccccccccacacaccccgccccaacccccgccgccagcttcggtccctgcatttgatctccaggaagggccccgctgcacaggcggaggagcgcgtcgcgggggggggcggtgttcggccccctcccaccagaccgccctcccccagacctgtccccgcccgggatcctgcgacccccgcccgccgcccggtcagctgacctggctcgctcgcctgctccccgcccgccgccctgtttccggtccccggggtccgcgagccgcgctccgagcgggcgcagccgcggccgggaggtgatgccgggggctgattaccatgagaaaggctgtgcctggaaaagcctcctccacgcgactgtcaatctcactaaggcttggggggcggggagcggggggggggacggaaaggggccctgtaggagtcaccagaaaacttggagtaagttggatgcgacgcaggcccgaggaggtggctttcgcctcaacttggaaggctggggcgttgagggcgcggac

SEQ ID NO: 25434 - DNA, 1989 bp, Homo sapiens
  chr2:157176355-157178344
  hyper
cgctcccagccgcgggaagataagcgtacaggcggccccaaggcccctacaggcgcagccctgatctggccacttgactagacgctcgctccagcgctcgcaggcctagggctcattacatgcgttgcgaggagacctgaaagcagggcgggaacgcacaatctatcttcagagctttgggtcgtgagcacacgtgtggagcatggttgtggcatgggcgtctgggcccctctcctagacctccacgaggtgcggacgcgcctctgccccgcccttttgtgcgccctcaccactagaaaaagagttttccccagtgtcgcgtgggaggtcgccccagtccagctcagcgttccaagagaccagagactgaccggaaatcgttgggtgcagggagaagcaggagacgcgctccgcctcctgtgctcgtgccctagcgcaacagacgcgacctagaggcgacggcagcctgttgcagccttcgccctgagggtggggggcgggggggtgtagaacagctgaggaagacgcagggagcagctggggaggaaagggagggacaccgaggaaacaaagttcacccaagtgaatgcgtcctaattgctccaaggctctctccgcaaagtctacgactgcaagccgcaaagtcaaactacgtctccaaaacgcagtgggcagagcaggagggcttgtgtctccattttcgccgcagggcggatcgcggacacaagtcctctccagtaattccgaagcctcgaaataagactatgctgggaggaggggttggggggtgactaataagaaggcgtgggggtgggggtggggagtacgcggcaagaaccctgctttctggaattctcccgccactgtctgcagggcccagagcgcacttcgcggctagggaacaaaattgccgctctcttcgagcgcccccagcgtggggtggggccctgctttcccgcgtcaggaccgccccaccaggcgccctccgacggaagctggacttttcctaaggaaaggcaaagtcaaagtcggaggaaagatctttcttgcggccccagctgtcgctcctaatggtctcggggaacatactaaaggaaaatgactttaaatcacagtcttgccatcctaaatagttatgtgcaatattttggtttctagcaaaatttaaaagtaaaatggggatttccatatgttcattttattattaaaaacgaattactaaaaagtgatgacctgtttggaattcatatcttgctttacgagcagtcagccagtatcgactgaacacaataaatgcaggggtgcgaaacgtgattgctcgggttcgagttctgtcggatgcaccgatctaagcagaacctttcccgaagacttggaattgggtgcgcttttttttttaagttgtggctgagccctatggggaagaagggttaactgggcgtcggctgagaccccaaaccctcttcctcctccatgagactccaaaattgagtcagtcccagcccatagttgcctgggaagcttggaatcctgagaaattccggggtgcggccactatgcaagcattcctattctgacagcggggacaaatggagaggggaccttacaacctcctttggagaagaatatatgagaaactcacttccagacctctattcaatagtgaaaataatactgagaaaaagttttaaaatctccaagaatagatactctcctttccccttccaccttgagggaaacggtctccatttttgacctggatttgagagcatcggggcttgagacaagcgcgtcttccacagagagaggcgaggcccaggcagggagccccccagcctttactctcggcacctcggcgctgccgcgcggcggatacaaaaggaaacggacgagcgtgcgacgcgaggcggggaactggtggctcgaagacgcgcaacacgcgcgatgcctagaagtgctctggtgtcactcccctgtataggacctggc

SEQ ID NO: 25435 - DNA, 709 bp, Homo sapiens
  chr2:162283380-162284089
  hyper
cgtgggaggataaaactaacttgccttccctggacaattccgccactagacggcgttccgtggagttttgtctgccacataaaaaagcgaggactgaatttcctttgtgtttctttcccctcctcacatctaagaactaagtaagaggacaaaagtacaagacacggtgcatgtgtggcgagtgaagtggagcagtgcattcgtgtcatcacccacccgaccccggctgcgctcctccgaccccgccgcctactcccgccgaggaggaggagcacgtgcggtcggtggggcgcagggccggggagccaggggggtgccggggctcgaggccgcggggccgcgggggccgcgctctgctctccgcccaggctgggccactggagcgcgggagccctggagcccggcgctgcccggcgctacccgccgccctcgggacagtcaccgtgagcaaaagagtcggtgtcatgtgcgtaaacgaagctcttaggagccgaggatagatttcacaggaacgtagtgccttgttctgaaagacgcgctttggttgatattaggaagtatttttaaaaaattggggaggtcgtttcccttgcagctccgccaccatctgctgcgtggactgagtcagcgtgaggtaaatttgcagcttcgcgctcctctcggaggcattgtgctgtcttgtccctttaaaacatgatcatttctcctc

SEQ ID NO: 25436 - DNA, 140 bp, Homo sapiens; identical to SEQ ID NO: 24229
  chr2:170551744-170551884
  hypo

SEQ ID NO: 25437 - DNA, 1763 bp, Homo sapiens
  chr2:172964685-172966448
  hyper
cgctcctgggggagcgcggtgggggtaagataagggatgggggctccgagggctgggaactgcaggaaggaaagaagcggcggggccgcccgggtcaaggggccacgtgggggagggcgggcaggcgggaccgggaggtcaataactgcagcgtccgagctgagcccaggggagcgggcgaggagaaagaagcctcagagcgcccgggaagcctcgcgcgcctgggaggcttccatctcccgggacccagctctcagcccggggcgaggaaggcgccagacaggctcacccggaggggagggaaggcaagtccgaggcggggctcgaaacagccgagacccggggctcaggtcagaaatgcggccttttagggaggcctttgccaagctgctgtccggttcccccgagagaggggcccgtttggtggccccgggagtgagcagggcctgagacgggccactgcaggtcgcagcctgcaggagaggtgggtggcggcagcgggccgggaggagggaaccccggctcggggtaagcaatgaggataagtggtctctgctctcagtctctggcgagttctccctggggttagaaaatcgtccccgcgctcaccggggcgcccccgccgccgtgatggtggtggtggtgatgcggctgcggggtctgagtggggtgcagcagcggcgccgtggcctgcaggtgtgaggcggatcccgaggtctggtggtaccaggggtagttgcccagaaaagccgaggccgcgctgctcgggctggagcccgagctgccggcgccgctgccgccactgcccggaccaccgccgcccgccatccgctgcggcacaccaaagtcccaggaggccggcgctgagactggcggcgaagcacaaggtggagaagcgctggccccagggtgctgctccgaggggatctcaccacttttccacatcttcttgaacttggaccggcggttctggaaccagattttgacctttgaggaaaaagacctgagcattagtggaggaacctagtcttggggcagtaggggttcgaagaggagaaaaaagaaggcagagaaaaaccgctggctagcggtgggcagcgagcgccctggggagataagaggatcacgggcggcggccttcgaggctctgccggttcctgctccctggggaggtaattgccaaaaggccaggactgctggtgtacgtgcactgtgatgatggtgacagcgggagggtgaggagggccagttatttcacccgcttaatcagtagcgagaggtacgggatttctgtccacccggtccctttccttccctcccacggcggccccttgggggtttccagctttgggcctagaagcttacttagggccgctcgaggcgcaggcctggaaatccttaaaagtacttaaaatgaactttaaaaagcattgtcctaaacccgcctgcttcccagccatctcaggcccgcgctctcctcgcccctgcagggcgcgagccccacctgagtctgggtgaggcccagagaggccgccagctcggctcgctccggcaaggccaagtattgagtcttttggaaacgccgctgaagagccgccagctggaaactggagtagatggtgcggggtttccggactttctttggcttcccgttcactatccgaatttcaggctcaaggtcctccttctctgcaacgataaagaatcgtaagaacagcgcaacccaggggtcctggagttcccgccctcctagagggcccggc

SEQ ID NO: 25438 - DNA, 820 bp, Homo sapiens; identical to SEQ ID NO: 23189
  chr2:173099596-173100416
  hyper

SEQ ID NO: 25439 - DNA, 1355 bp, Homo sapiens
  chr2:175190730-175192085
  hyper
cgtccgacttgtccgggaatggagcagagaaagaggaaccagaagaaagagaaactcgcgacaacagagttgccgaaagagaagtgttggcgcctcaaacttgaggatcagcttcttgggccccactccagggtgtcgcgggggtcgggttctttccgccgccccccgaaagattctcagctaaccctttccccgccgagaccaagaggccctcactctgacaccactccgggagccaagctactgtaaggagctgataccacccctcgccggcgcgaaccgcccatctccccagacccgcccaccccctgctgcgaatccctgacgttctagcccggcgaaggtcctcttaaattaggaaacaatagctatttaagaagaagcgcaaataacccgcgctctgcgcgcccaatcgtgggattcttgggagttccccgcgggcaaggaagtctgctgctccccgcagctgcggaggagaggagggagcctgcgtgctggggcagggtgtcgcgaacttggggcaacccacctccagagccccgcccccgctttcccgcctgccggggacctgccgaacgcggaaccaccctccttcctgaggcaaatttgggaggggagaggtccagaagctgtagagtcggggcgccaagcgccagattctgccgctcggaagttgggggcagtccccagtcccgcctcaggcccccgcgctcacagggcgctccgccgagggcgcgggccaggcgcgcggtgtcacctccacgaagtcatttacttgccctgaaggagctggccctcgaccccttggaggatggagattcctcccattccctcctccgcctcccccaggtcggcgaagagacgtggaattgagctggaccgatgattccgcgagctctgtaattatgcacacactgaaatcttcaccgttgacttaagttacttggcgctgcgagggctggggccctgcatattgattaaatgcagcctctatttacctaaacaataaatgtagagattagcaacgttcacttgatcacaataatgggattgacaattaaggggcaatgcatcccagatgtagcggaacctatgggctgcgtgcagcaggcagagggcttctcagagaggggcgctgggcagttgcggcggcggaggtagtgcagagcaggaagcagcgcggaagcacagcgggaggcggagggggacgcccagcctcgtcaaggtcttcggccaccccgcccgggaggctcgaaactggctttggggtacctgaatgcctcgactcccagggagacatcgggagctcggagccactctccctgtggcgatggcacctgcctcaaggccgtctc

SEQ ID NO: 25440 - DNA, 914 bp, Homo sapiens
  chr2:175547140-175548054
  hyper
cgagacctacggagatagtgggtcccgagccccacggggcggccccgggtccgcggagtccagcggtgagctcagcccgaggcgcgggacccaggctgtccacggccccttcctccccgggccatcagcgggcagcagaacgcgcgggccgctggcctggaattgcgcccctcccgaggccgcgcgcccgcgcccaccgctcgcaggggacgcggcctcgacgtccccagccgccccacccgcgtcaccggtgccaggcggcacttccgtgccccgccgtcgagcccagcccctcccggcgtctcccccggcccccgggagcccggaacccgggtcgcgccagaggcgacgcgtcccttaccgcgcagcggctccggacgactccgcagccccgcgccgcgctgggcattttttctgggaaacttctcccggggtccgcagggctgagccgggcgggcaggaaaagcgctcagcgccgggaggctgcgaccatccgggaacttcgccgagatgtgggccctcccctccggcgccgccgcccccccgccgccccgccacatgtggacgcgccgcgaggccccgccggcccgcgccctgccctccgcgcgcccgcctgccccgccagcaatggggctctgcgcctgcagcttcggcccgcagaggatcgcggcggggcgggatggtcggggctggagtccgcagtttcctcagtcccgctcccctgcgcggcgaggggaccgaggcaagaggacaggagtttgcagaggggcgggaactggaaggggagtctagcccagggcctttccccccaactcttgaatcttctccaccttcttgcggctgctggcggggggatcgggtgggggtgttccctctgttcgagccggaaggaacgccttttcccacgctttccc

SEQ ID NO: 25441 - DNA, 953 bp, Homo sapiens
  chr2:177001081-177002034
  hyper
cgggggagagagaaagcagaagaggaaaaaacatggcgcttgcgagctgtatgtgcaaaatccgcaaggaattgcagtaaattcctttttgtttgaagaaaatttacaacttggtaatagacctttttatgacctatttgcggtcgtcattggctgcggctggtcatgtgcaggcgccgctcgccttcacggcctttttcctgatttccccggcgaatttccccccgcattctgctttcccagagcctcaccccctctttttctaacctttgtctctgcagaggtgggctccagtcaccggctgcgggattgcggagtccgccgcggcctcggctcccgcccggcgcccggcctggccccaccgccgctcactcggtccgcatcgccgccacctccggagctggtggggagcccggcgagggagggcctggaaggggccctgggcgccgagtcccccgccggcgccgacaccgcctgccaggagcagccggcctgctcgaggtgactgcagccgcgcggttctggcgcggcttcttcaccaacatgagcgggtctctgcgtccgagagtgagcgcagccgggcagcgcctagtggattacagcagacgcccggaccgaccgccgcctgtagctcggcagccttcgggtaagaatcgccccctccccgctccccagcatgccaccaagaagcctggggcgccgacccccttgggcagctcagtccggctgctcccctacatttcccggggaagtggggggtcgctgtctaagccccttcccccaatcacttcgttcctagggcgtcccctggggcctggggtggagtccggctgggttcagaagtctaagggggcagtattatttcaaaaattctgagatacgggtagccacagacaggatcccactgcctagatggagagcccctcaatcctaccctaggaaagtgtatagac

SEQ ID NO: 25442 - DNA, 1776 bp, Homo sapiens; identical to SEQ ID NO: 22868
  chr2:182321353-182323129
  binary

SEQ ID NO: 25443 - DNA, 376 bp, Homo sapiens; identical to SEQ ID NO: 23192
  chr2:182818959-182819335
  hyper

SEQ ID NO: 25444 - DNA, 1318 bp, Homo sapiens
  chr2:19557652-19558970
  hyper
cgcggtcggctgcggctgtggccattcactccctctcccttccttcttcgtcaacctgggcgtcagccagagctaggagcgcgtctcaggaaagtttgtgcccgctgaagttgctctggtttcttaaagggggcccacagattgactttcaaagtccgtgggcacctcgcccgtgattccgcagagccgggcgggctggccgcagtagcggaggcccgccccccttaatccccagcggtcagaggccgaggaccccgcgcaggaagtcctgaggcagcacccccaaccaccctgctctcactttcacaaaagtcctacagcattcgtttggcaagagcttccttcaggggcattgagagagaggaggcacccgccgagcagtgacaaggaacctgggagtcctgcccgcattcgctttgctgagcccaggcgcccaggactgcaattaccttgttccgcagaggtcctggggctgagcacgtctctggggctttagctgaaggggactggggaagccggaggccctggagcccacaggcgcccctggagctctagtgtcccgactcctctcctgccgcggggactccaagcgccggacacgcgggagcgagcgctcagcagccccggatcctgcacgccggggacggtgagcctcgctcgcggctccctcgctgggtctgaaccaggagcagctgagaacgtgccggggagaggccgagctccgactcactcatcccttagcaccgagccgcctacttattttaatccaccaccctccctcctccaccacccccacccccgccccttgcctcaggattcctcccctccctcccctgccccccaaccctgccctgcgcctgcgcaatgaaagacaaagtttttgctgacccgggcagcagactttggcagctgctctcgcttggacccggcctctcccaacctgcgtcccctcctcttcagtcccgcgcgacccctgctgcctttttaggtccagagcggcacgcctggcgcactggaggaaacggtccctagcagatgagagcgggctggcaccgcacgtttcgaggtcctatacttgggctcctaggacacagcccgtgctctttgggaggagggagggaggggcagtagctctgtgcaccgggatccccacaccgcggcttgggtttcaacgcactttggcgcctgacagagtcgcatctcctcccagaatctctttccagaggcggcagaccccgagtgtggagcagctcctggctatccaagcgtgctcggggccagggtgttaacccaggcagcgctggttaattcctggtgc

SEQ ID NO: 25445 - DNA, 205 bp, Homo sapiens
  chr2:203129143-203129348
  hypo
cggccaggaatgctcacaaatatagtgacagtaatggtgtcattctgaggccttcgcctcaaggcagggcttgaaaggggataaagtctaatggcactagctggcatttcaaattctagatgcctgaggcagactggcaccgaaacagctcctcgtttctctcaaagtgaacatataattcatagagggttaacaaaataatatc

SEQ ID NO: 25446 - DNA, 235 bp, Homo sapiens; identical to SEQ ID NO: 8314
  chr2:20574714-20574949
  hypo

SEQ ID NO: 25447 - DNA, 68 bp, Homo sapiens; identical to SEQ ID NO: 8315
  chr2:216179503-216179571
  hypo

SEQ ID NO: 25448 - DNA, 1020 bp, Homo sapiens
  chr2:219735657-219736677
  binary
cgctgcgggctgagtggggctggtcctcctcccttccaccccaagcccttttttgggttacacccctgacctgctattctctgctttccagggctgtgggcagccccttggttatggaccctaccagcatctgcaggaaggcacggcggctggccgggcggcaggccgagttgtgccaggctgagccggaagtggtggcagagctagctcggggcgcccggctcggggtgcgagagtgccagttccagttccgcttccgccgctggaattgctccagccacagcaaggcctttggacgcatcctgcaacagggtcagtgtggggagggggcggaagtggggctgctttctccctgctgtgggacccgaggagaggagaactggttcgctgaagttgcctgagccccacttccccctcacatgtgtctgggcaccctgcaaggaccctgcctcccaggcccctggggcagccctcccgccgcaggtttcaggtcccaggccccagctgaccgccccagcccgcgctgattgcacctgtctgcattcacagacattcgggagacggccttcgtgttcgccatcactgcggccggcgccagccacgccgtcacgcaggcctgttctatgggcgagctgctgcagtgcggctgccaggcgccccgcgggcgggcccctccccggccctccggcctgcccggcacccccggaccccctggccccgcgggctccccggaaggcagcgccgcctgggagtggggaggctgcggcgacgacgtggacttcggggacgagaagtcgaggctctttatggacgcgcggcacaagcggggacgcggagacatccgcgcgttggtgcaactgcacaacaacgaggcgggcaggctggtgcgtacgggcaggatggagtgagtgtgtgcggaaatgtgagtgtgcgcgcaggagtgtgcttgaggaagtgttggcaggagtgagggtgtgtaggtggaggggggcgttaatgtgtgggggagtgcgcacgggc

SEQ ID NO: 25449 - DNA, 208 bp, Homo sapiens; identical to SEQ ID NO: 8317
  chr2:219762346-219762554
  hyper

SEQ ID NO: 25450 - DNA, 169 bp, Homo sapiens; identical to SEQ ID NO: 8318
  chr2:219763161-219763330
  hyper

SEQ ID NO: 25451 - DNA, 1192 bp, Homo sapiens
  chr2:220348591-220349783
  binary
cggagccccggggccggcaccgccgagcgggggcgcccctcgagatccccgtggccaggcttggggcccgtaggctacaggagtctccttccctgtctgccctcagcgaggcccagccatccagccctgcacggcccagcgcccccaaacccagtacccctaagtctgcagaaccttctgccaccacacctagtgatgctccgcagccccccgcaccccagcctgcccaagacaaggctccagagcccaggccagaaccagtccgagcctccaagcctgcaccacccccccaggccctgcaaaccctagcgctgcccctcacaccctatgctcagatcattcagtccctccagctgtcaggccacgcccagggcccctcgcagggccctgccgcgccgccttcagagcccaagccccacgctgctgtctttgccagggtggcctccccacctccgggagcccccgagaagcgcgtgccctcagccgggggtcccccggtgctagccgagaaagcccgagttcccacggtgccccccaggccaggcagcagtctcagtagcagcatcgaaaacttggagtcggaggccgtgttcgaggccaagttcaagcgcagccgcgagtcgcccctgtcgctggggctgcggctgctgagccgttcgcgctcggaggagcgcggccccttccgtggggccgaggaggaggatggcatataccggcccagcccggcggggaccccgctggagctggtgcgacggcctgagcgctcacgctcggtgcaggacctcagggctgtcggagagcctggcctcgtccgccgcctctcgctgtcactgtcccagcggctgcggcggacccctcccgcgcagcgccacccggcctgggaggcccgcggcggggacggagagagctcggagggcgggagctcggcgcggggctccccggtgctggcgatgcgcaggcggctgagcttcaccctggagcggctgtccagccgattgcagcgcagtggcagcagcgaggactcggggggcgcgtcgggccgcagcacgccgctgttcggacggcttcgcagggccacgtccgagggcgagagtctgcggcgccttggccttccgcacaaccagttggccgcccaggccggcgccaccacgccttccgccgagtccctgggctccgaggccagcgccacgtc

SEQ ID NO: 25452 - DNA, 153 bp, Homo sapiens; identical to SEQ ID NO: 24245
  chr2:223753488-223753641
  hypo

SEQ ID NO: 25453 - DNA, 131 bp, Homo sapiens; identical to SEQ ID NO: 8321
  chr2:231676894-231677025
  hypo

SEQ ID NO: 25454 - DNA, 1198 bp, Homo sapiens
  chr2:233740556-233741754
  hyper
cgctaccggcaacttgcttaacctagaggtggggggtgacgtccctgtcggccccgtcacctggggccccagcacctctccttggctttgcagacgatgttccacaggagcccgtgcccacgctgtggaacgagccggccgagctgccgtcgggagaaggccccgtggagagcaccagccccggccgggagcccgtggacaccggtcccccagcccccaccgtcgcgccaggacccgaggacagcaccgcgcaggagcggctggaccagggcggcggtacgggcggggcgggggagggaggggagagggagaaattaggaggggcggggggcggggggcgcggggagaagggccggccaggcgggggctagcaggtgacatggtcctccgtcctccgcagggtcgctggggcccggcgctatcgcggccatcgtgatcgccgccctgctggccacctgcgtggtgctggcgctcgtggtcgtcgcgctgagaaagttttctgcctcctgaagcgaataaaggggccgcgcccggccgcggcgcgactcggctgcactcctcacgcgcctgtatgtccgcgcgtgcgtgtccgcgcatgcaggtgtgccagagcgtgagcgcgcgcaggcgagcgctcagggcgggggtgcgcgcggggccgagggtgggtgccgtgcacgcgcgcgggtccggaggcgcgcccgaattccccgcaggggcgccggggcgtgcgtgagcgcacagcatgtccgagcccgcctgcgtgtggcgtgcacctgagcgcgcgcagggccgcgcggctcggcgtccccgtgcaccacggctggagtgcctcaggagcgcgccgcatgtgcgtgcccggtgcgcgtgcgccggggccgccagggcatcggagcgggtgtgcggccagcggtcttagcccgtccgggggcaccgtcacggtcagggccacgccacgggcggccccttctcccggcgccgcctcctctgcctgggcgcgggccgaggccctcgccgcgctccccggggcctgcctcccatcccgctccgctggggttcagagcgttccgtgaggaggtaagcgctagggcaggagaggccgacagagaccccggggcccgccgctccttgaggccggggttggggagggcaggggccgtcggctctcccagccagaggccgcgtggttttgggggac

SEQ ID NO: 25455 - DNA, 198 bp, Homo sapiens
  chr2:233986790-233986988
  hypo
cgtttgtttggatgttctgtcctcaggcatccgaaggcgtctccatgaggttcttcaccaagctggaccagctcatcgagttttacaagaaggaaaacatggggctggtgacccatctgcaataccctgtgccgctggaggaagaggacacaggcgacgaccctgaggaggacacaggtagggagggagggacaggac

SEQ ID NO: 25456 - DNA, 216 bp, Homo sapiens; identical to SEQ ID NO: 8324
  chr2:236452983-236453199
  hypo

SEQ ID NO: 25457 - DNA, 471 bp, Homo sapiens
  chr2:240226690-240227161
  hypo
cgcgctttcttccagccggcctggggcatgtcaggaggcagggcctgtactgcaggctctgtgttcttagacagcctttgcagggggcagaggtgcccactgccacatgggcacacacaggaggctcaccacgtttcttcaaatgcagatgacaaagcagcttgagtaacacaaatacggccacactcatctgaggattgctgctgtgttttctaactgcatggccatgaccaagcagtcggttttcatccaggttggtagtcaggtttctgaaagcgatggcagtcgcctcagggctgacacggggagtctgcttggcacaccttcaccctcgttacattttctggacaatggtagggaacattccttactccgctggcctgtcagcttggctaagcctggtgcaagtggctcgctgtgggtccgcggctccattacgggggagtctgggtcatctgtgagcccaacagc

SEQ ID NO: 25458 - DNA, 339 bp, Homo sapiens; identical to SEQ ID NO: 8327
  chr2:240700344-240700683
  hypo

SEQ ID NO: 25459 - DNA, 138 bp, Homo sapiens
  chr2:240874089-240874227
  hyper
cggtagagggcgctggacctcattcgtcctgtcagctgcgattgtctgtcctttgacaggtctcagcgcagcgttctcactgtgacctccgtgcagcatcaatcacttcgttcctttctctggctctctctgtccacc

SEQ ID NO: 25460 - DNA, 100 bp, Homo sapiens; identical to SEQ ID NO: 8328
  chr2:240928864-240928964
  hypo

SEQ ID NO: 25461 - DNA, 540 bp, Homo sapiens
  chr2:241771598-241772138
  hyper
cgttgggtggaaccccagggtgtggaactgcaacagccccgcagtctggaaagaagccgccagcagcccgcgcggccccgcggttccacggggcctcgtccccgcccctgccccgctgtaggccccgcctgctataggccccgccccgctgtaggccccgcctgctataggccccgctccgctgtaggccccgcctgctataggccccgccccgctgtaggccccgcctgctataggccccgcctgctgtaggccccgcctgctataggccccgctccgctgtaggccccaccccgcaggaaacctcgccccgctggtggcgcgccctggttgccgtggcaacctcctccctccgccgccgggttgccggcttcgctagcctctcagcagcgccgttgccatagcaacggcgggtgggtcccgcggggcgagctgagctagggtgagcatcctgtggggtagactatggcggctgggcgcgtgcggcctgtgcggggcctccccggctgcggtgagagcggctcgaggggtcccgtgccc

SEQ ID NO: 25462 - DNA, 131 bp, Homo sapiens; identical to SEQ ID NO: 6539
  chr2:242277184-242277315
  hypo

SEQ ID NO: 25463 - DNA, 567 bp, Homo sapiens; identical to SEQ ID NO: 8331
  chr2:242616820-242617387
  hypo

SEQ ID NO: 25464 - DNA, 691 bp, Homo sapiens
  chr2:242617764-242618455
  hypo
cggaaacggcagcagctttgctgacacaactgtgccagccaccacggtgtcatcctgagccacttctccacgcttcctagtgtgcaattctgggattctcaccttccagttcaaagtcgtgtctttcatgagctggtggaaacaccggagcgcccgctcctggaaagccccgttctcatagcgctcatggccaaacgctccccgcttggcagcatccgccagctgtaactggaggaacaggaccaggtcgggtttgggaaggcccacgtctggctgtttacaccaatctagggaaaaattctgccaagaaagaacccaacagttaaagcttagtgtagtctaggtttttgtttcgaaagtcgtaaaaacaggaaaaaatgaggggacatttggtgaggtaccaagatgtgagactgtttatattgtggctcgtttaatttttagaacctcaaacgtgtcggtttctccagtgtcacctttgtttttcctttgtaaacagacaagtggacagaaaagtaggtagatagaacggctgccagtccccgccacccacagcccaggccccatggaggccctcccagcacagctacaggcctgctggccaggagcaaacagtctatgtacagaacccctggagacccccggcctagaacgcctgcagcacagagcagctgggtccggacacaggcac

SEQ ID NO: 25465 - DNA, 540 bp, Homo sapiens
  chr2:25354461-25355001
  hyper
cggagtccgttttcctcgggagaagtccgccaggaagttgggagcgcagaggaagcccaggctggaagggggcgtgaccctgccctgcctgcgcgcggtgcacagaggaggagggtgccagccttggatctcgggtgtcccgccccaccgctctcagggcccacagtactggagatgttcaacacgctgctgaggcagctgcggctcagcatcgactacgcgctgaccgggagctacgacggggcggtcagcctcggcaccaagatcatcaaggagcacgaggagcgcatgttccaggaggccgtcatcaagaccgtgggtgcggcgcggggccgggccggggcggggcggggccgaggcgcggagtggggaggggaggggagggacgggacggggcccaggggctcaagactgaggcgcagggcggggtggggccaaggggaggaaagagggaccctggaaaggggcggggcaccgggggcggcccggggatgggggttggagagggagggaccgcactggggcgaagggcatccaacc

SEQ ID NO: 25466 - DNA, 570 bp, Homo sapiens
  chr2:25438799-25439369
  binary
cgacccgaaatacgcccgaggcatttatcctaaaaaacgacaaggtccgggcgcccagcagaacggcccggctcgaccgcgcgcagcttgcaggcaggggggtgtgcaggtcaccgcgccaccccggcgagcagagccgcggagggcgccacgtcggtgcgctggccccgcccgagcggggcgggaccttcctgtacccccggaagcccccgcgggcagctggggaggaaaccgcggccacgcgctcggggggcccggctcgggaagggcagtgcgcgcgcatgcgttggggcggggcgcctgggacctgcgggccccaggcccagcgcgccgccagccggagtgcccggcgcccgtcgaaaggcccctgcgccggttcaggacccgcacccagctacgctgcggagccccagctcgcagcaccctcccacccaccgctcctggctgcttttctcctgagtctgcggggcggggtcgtttttgttttttacaaaaatgtatgtaaaggtatttcgatgagtgaaggaacacgctataatgctcactcaatgcagcatcggtgataattgc

SEQ ID NO: 25467 - DNA, 517 bp, Homo sapiens
  chr2:26401695-26402212
  hyper
cgcggccccagccccatcttttcgcggggctgcttctgtccgcccgcacgggggaggggaggaggaggcggaggcggaggcagaggcccctaggagggcgaaggccggcgggttaacgaggaggcgctgagtgcacggctgggctccacgctgatttctcctaatgaattaataatggcgctcgggcgggcgggggtggccggctgcggaccgcggagagagccgaggggaaggccgtggagggaggaggacggcgactcgcgccgggtggggctgaaggcactgcggggtgactcggtctccaggctgcggcgctctgctccgggagtcagggagacctggcctggccccgtactgtcccccgtcccagcccccgcccctggccctgcgggaggggccaggcgtcttccctgagcatggtgccacttccccagtgttggccttgtttcctgctcagcatttggcagatgcgcctctggcccaactaggatgtttccattttacagacgggaaatcc

SEQ ID NO: 25468 - DNA, 732 bp, Homo sapiens
  chr2:26407466-26408198
  hyper
cgagcacacggtgcgcgccatcatcgagcgcgtgaggctgccggtgaacgtgctggtgcccagccggccgccgcgcaacccctacgacctgcacccggtgcgggagggtcattgctacaagctggttagcatcatctccaagacggtggtgctggggctggcgctgcgccgcgagggcccggcgccgctgcacttcctgctgctcacggacacgccgcgcttcgcgctgccgcagggcctgctggccggggacccgcgcgtcgagcgcctggtgcgcgacagcgcctcctactgccgcgagcgcttcgaccccgacgagtactccacggccgtgcgcgaggcgccagcggagctcgccgaagactgcgccagcccgcgccgcgcgcgcctctgcctgcccgcgccgcgcgcccccgggctcgcccgcgcccccggcccgctagcgccggctcccgccggcgagggcgaccaggagtacgtgagccccgactgggcagccgcgcccgagcccgccgcgccgcccgccgagatcccctacgaggagttgtgggcgcaccaggggcccgagggcctcgtccggccgcccccagggctcgatctcatctccttcggggccgcgggaccgccgcgtcgggagccggaagcgccgccgcctccagtccctcccaaatccgaggcggtgagtgagcgcgctgggggccgagtcccgggtccagccagggcccaaagccc

SEQ ID NO: 25469 - DNA, 116 bp, Homo sapiens; identical to SEQ ID NO: 8336
  chr2:26524687-26524803
  hypo

SEQ ID NO: 25470 - DNA, 139 bp, Homo sapiens
  chr2:27433190-27433329
  hypo
cgctatggtctcgcatctctccagaaagagggcggccaaaagcaagagctagctgttgtttcactacaactataacatgccaaggcacaaacagcagattgtgggacccccccccctttttttttggagacggagtctc

SEQ ID NO: 25471 - DNA, 278 bp, Homo sapiens
  chr2:27473102-27473380
  hyper
cggaggggaaaagggtcttcccgtcctgaccccagtcctgagactccctgcaaagacttccggctgcctctgccgctgcggtggcgtatgccccagttgggggcgctgctccccagccagccgggctctaggaagcgggagggccaaatgcctcctttaagccggctgcaccggggccctgaccgggcgggagggctgctggagggtggtgcttatcacccgggcttcctcttgaccctgccggctgggccctgggccttggccttcgcctcttaaac

SEQ ID NO: 25472 - DNA, 353 bp, Homo sapiens
  chr2:27938267-27938620
  binary
cgtgctggactctttcaccctgcacgggggagaagccctcctcccgggagcctgtttggggggcaggcctggccgagtggctccgtgaagacgcaggcgcggccggagggcgcggggctcgggcaggatcgcgccgccgggccgggagggggctgcgggcgcgcggcggatgtcacggcttacctcagagcccaaattagaaggctgaaaaaatcacagcaggaaataatgtgctgcctaaaatagaagcatcaactgggagagaggccggggagtaggtggcatctgaggctcccgccgcgtcctccccagcggctgcctgacgctgcatcggaggcgcgtgggtggcgccc

SEQ ID NO: 25473 - DNA, 840 bp, Homo sapiens
  chr2:29337909-29338749
  binary
cgtgggtgtagcacggattaggccttttacagcaagcgctgccagcagggaactggtggatgtactcttgaccacgctcggctggactctggggagcccaagacgggtaagactaggtccccggccccagcagctggtgggggcgccgcaggttagagacgtgaggccgcgaggctgagggctgtgaaggcggtgggcacgcacggcgtgccggggccgcctggcttcgcggcgggggaggtaacactgcgacaccccgcagacgctgtcagccggggtcgcggccccgcgtgcgcccgatcatctgactgctggggagtgcgggggcgcgggagccaggcgagccagcgcaggcgcgcgctgcctcctccgtccccaccgagtccccagcgcgtgcgcggggccgtggccgaggcctgcgcgccgcccggccgcctgcactgcgcgcgcgcccaccccgcgtgggaggcagcgggaggggcccggagaggtgtggagcggcgcggcgggaggctccgtgggcggccacgggagacagcgccggcgggagcgcgcctctcggcctttcctccgcgcccccgcgtccccagccggccgctccgagaggacccggaggaggcaggtgggccgggggcgcgcggggcccccccgggccgcgggctggccggcggcggggttggggccggggtgggcggccctgggggcccgcggggaggtcagtggccccgggagggtcgcgcagaggcgctgggggctgtggaagccccgcggccgcctcccgtgggcaccggtgtcgctggccgcggggaggccttctcggggcggagcggcccacccggc

SEQ ID NO: 25474 - DNA, 1380 bp, Homo sapiens
  chr2:30453530-30454910
  binary
cgttcggctaaagctctttgtttctgctgtcatgagcgactcctcggagaagacgtgggagtcaaggatggggggcggcgtgcacaccgcccgcccacaccttctgcccccgctgcagaccgggcgtatgtgtgtctccaatggaaaaatcctacccaggacgacaccacatccttgctcccacaaataaaaccttccacggaactcagggctgcagaccagcccttcgcaagccaacgcgccccgtgggcactcggtcccccggctccgcgtctctgccaccttcccaccgcttcttctttaaccatgctcttgtttcccctcgctgatcgcaaggctgcgggcgaggattccagagagaggcctagtatggggaacaaacgcttcagaggggtccgaggtgggctggggacagccagtggatgggaaggagggcgctggcgccgggcggctggggtggaggagtggcgggtgccctaccccggcgcagagcagccgccgagctgtcatgtcccgagcggcccccgcgccctccttgcgcccacctccgccgcgctggagttcggggtgtgcgtggagggggctgtgagcgggaagcggcgcggacgcggagtccgggccggtgcgagtgagcgcgtgtgcgcgtgggagagcggcgggagggggccgggctcgcagccgcagcgaaccacggccccgggagcagagccgagcgcgcccccgagccgccgcccgccggagctgcgagcgctgaagccattcatgattttggtgacgttattccaggagtgggcgagggagggcggggcctctcggggccaagccccgcccccgcccctataaatacggcttcccgggctctttgtggggctgagtgctcagtggagagcggggagttgtgtccaccttgccgacgtcgctagccgtggggctgtcctgggaaggcggacggcgagcgcccggtgtccgcactcggccgcctgccgtgcccgtctgcgcccgtgtcatcctcactcgggacgcagggaccgtttttaaatcacaggggcgtgtgtcagcctgccctaggacttcatgtctatatatttccccattcactggtgagtaccctgcgcctgcggcgggcgtctgtctcgcggcggtggctgcgggcccgggcgcctgcttcgtgccggctccgggtgcgagggcagccggcggcgcgggcgctcagcgctaacccgccgcccgagcccgtgcaggagtcaacgtcaaggttgcaaaggtgggggtggggggagggggtgctgagaacatccagacaaaggacgtgaactcggagccctcacctaagtgacggccggagggtttgtattggttggcgggggagccaggggtcac

SEQ ID NO: 25475 - DNA, 851 bp, Homo sapiens
  chr2:30454942-30455793
  hyper
cggagagctgcaggaggcgcgcgccccacttggcgcaggggggctcctgctcttcccgggcccctcctctttttctttttgtttgcatgcaagtctcaacgtcgaggccggcagcagcggggctgagctggtgcggccgcagggtttgcagagctccgggggggtggggggcgggaaacgctctccccacacgtaaccccactaaagccacaagcagcagggcacgcgctgcagcctctcaacccctgccctctccaccgcccctaaaaaccgacgcacattggtgggggccgggactgggaggagccgccttcgccgtgctgaaggggaaggagcccgggccgggcgcggggcgtcggaggtttgccccggactggggatcggagccgggagggatgcagagagaggcaggcccctgactgctgggacttccttgctggcagtttcttccttcctgctctgggttagaggagaagcggccgggggcgagcgccggcagccccggagcgcgctctcaggtgcggacgtggggagctcggccccgagtctccggcaggcgctgagcgaagggaaaaccggcgcaagccgcggcggggtccggcctggcccaagaagcggaaagttcatgcttctcgcttcaacttttcgggccggcgccacagccccgagcgaggaagagccgcccctacgtcagactcttcaccctgcgtgcgctcttctggctcctttctttggaggtcgccagcagcctttccaagacccgggaggaaactgcctttgcagggcccagctcccgaacctaaacttgccgcaaagccccgcatcttctgttagtctccctgcccccatcc

SEQ ID NO: 25476 - DNA, 349 bp, Homo sapiens
  chr2:314855-315204
  hypo
cgggccccgccgcagggctgtgaggccgccgtgggactggttccaccgacactggaggccaggcgtgggccctccgtaaagtcccccgtgtgggattacgggacaggcggcggaaccccagtttaaccctgggtgtgtttgggcacgcagccatgccgactagaaggacctgagatggattcggttcgcggggaacggaggtgccctagctcccgttcacgaccgcatcttaaaaagcaaagtgagccagtttttcgcaaagatgatttcactggatttccgcgtttagcgtcacgatatgggggcctccgagcgcctctctgggcttccacacaatgggccacatcac

SEQ ID NO: 25477 - DNA, 284 bp, Homo sapiens; identical to SEQ ID NO: 8344
  chr2:37035304-37035588
  hypo

SEQ ID NO: 25478 - DNA, 125 bp, Homo sapiens; identical to SEQ ID NO: 8345
  chr2:37287740-37287865
  hypo

SEQ ID NO: 25479 - DNA, 745 bp, Homo sapiens; identical to SEQ ID NO: 24266
  chr2:43019535-43020280
  hyper

SEQ ID NO: 25480 - DNA, 178 bp, Homo sapiens
  chr2:44497628-44497806
  hypo
cgcagcaaagaaagaatgaagcaacaaaagaacgaaagcagctctctcggctttcggctcggaggaggccaaggtgcaactttcttcggtcgtctcgaatccgggttcatccgacaccagccgcctccaccatgccgccgaagttccaccccaatgagatcaaagtcgtatacttcac

SEQ ID NO: 25481 - DNA, 402 bp, Homo sapiens
  chr2:45028955-45029357
  hyper
cggtgcggccgcttgggcgtgatcccttggctggggctgcagggggcccgtcctccaggggcgcagagggaaggaccagcgtttccaagccgggctctggccgccggcgcgagagcgaggccaaggtctgggggcagttcagggggaccccgaagtcgggacggcccagaaacgctttgcccacagccaccgccctttcctttgtgagtttccccaaagccgtcggtgcgacccggcgccgactctcctcctcttctccctgcgagggcccgcgccgcccgggcccagtcctgggggatagatccctcggggcccaacggctgggccaccgccggtctccggccactgctgcgaggacaggcgctgcctaactaatttctcctctaagggggctgtgcgtgc

SEQ ID NO: 25482 - DNA, 655 bp, Homo sapiens
  chr2:45176608-45177263
  hyper
cggggagacggttcagtgaggcagcgggaaggcccttgcctgggcttgccgagggggctgtgatggtggagtggcccccaggttcttctgcaaggagaataggacagcctggtacattctcgacccagcgcatcacccgggaccccggagctcgaagtccattcccaggcctgtggcgcactggatgcactcggcgtcttggagcagtctcttctccctctcttcttcctctgcctccgtggccctgtcagtcccgcctaagcctttgtgtggccgtcacctggagcaccggctgtgcctcagggactttcccgggccttccccttgtcctctctgtcccccagcgctggagctgagatgcccggcccgcgggacgctcgaccccctggtacgcgcgctgaggcccccacggcttcccaccgctccggccctttccggccccagctgagctgaagctccctggccccagtgtgcgggccccggtggccgtctggcccgagggagggcgggggcaggcgagagggagccatggaggaggggagcagtactagcccggctccaatttctccggtcagctgagcacaactttccattcgagtgtattcatgcagcggctgattgagctccactgtgccgggcggggctcggcgggagc

SEQ ID NO: 25483 - DNA, 1430 bp, Homo sapiens
  chr2:56149749-56151179
  hyper
cggtagccaacgaacgaggcagcaaagacgtaaaaactgctgtagaattgcatttcacgttactccatcctgctacgctgtttacatacaaaagacattcagcgtgcattttatactgcacctacaaagcaggctgcagaaagagggggtcgaaaggaaaaaacagtaatccatttcaaaggggacggtgcatttcctgccccccagtcccacaccccgggggatggaggtggggctgcaaaactctgttctctagaacgttaaggctttcccagtatactcaccttgagctagcagagttccttgcacagcacagcaaaaatacctgtgagccaatatgaattgccttggcctcaagctttttattttttaaacaaaataacaaaacaaaactcggagagcaatcttccagttctagtagaatactagaccttctcacatgtctcagagcttctcacatcccccagcacaaactctcaaagtggcatttccacgcctttctctgcgcacagctttgtttaaaagtcccaggttgtgtggaggggcagcccaaagcgactgattctcttttgtcttatcagtctgggtccccgacacgctaccttcggtttcaggctgcctaggaccggaaccagggatcgcaccgcagcccaaggtaccagtttcgggcgggcggcctggcccggcagggagatgaggtcccctttcttaacagcaagctaacgcggcggtcccctggagctgctcagcgtcccagcttctaaccagctcctatggaatccaggtgcggcttaaatctcgcacactggtcccctaaactttcaaaaccacgtttatgggcaaagccctgccggctggttgtcggcgcgcacacacatgcccatcccaacagatgtcacccgagtactcgcacttgctgacagatcgcattccgaggctgcacacctccacctccctctctgcccgagacaccctgcacagtccagggcagttctcgggtactcaacacccctcagctcaccccacctcactctcccgcgcgcggcccagtgagtactgggctcgctcggggcgaccccccgttgggggctcctacctgtgcggccgcgctgcgctccgggcccgggcagcgaggggagtgcgcaggggagggcagccccgtgggtctgatctggcgaagtccggcagcggccgcggcggcaggaggaggaggagaaagggagggaaagggggagggcgaaggggggcggaggagagagctgagggaggcgcgagcgctgagcccagcgttgcgagcccggcggtagagcgcgcagcgcagcgaggtccgcgccccctgctccaggggccctctttgccgcccccgcttgccctcccttgccagctcctcgtttcccagactcgcggggaccccacgccagagaggacac

SEQ ID NO: 25484 - DNA, 434 bp, Homo sapiens
  chr2:5866036-5866470
  hyper
cgaaagggagtatcaagttagcgaaactgcaagggaaactgggggcagcagagcgacgtgccagcgtccgtgttgggcgggtgtcggggggacccggacaccccgccctccttcctgcagagctctgcgggccctgtggcatccatggagaccctggctccggtttcacaggaagggaaggtgtgtgtcacagtccctaatggatcagctaccaatcattagccaagtccttctcttacttttctcctcggagagaaccaagcttagacaatagcatggctttcgaggtgggaaggacctcatgaaggagacggaaaagagtgactgcagatcttacatgtaggatctggcggagctcagcttaaagccgttgccacccagccatgggcattttctccacattttgcaggcatcctacaactgaaaactgggtc

SEQ ID NO: 25485 - DNA, 670 bp, Homo sapiens; identical to SEQ ID NO: 24273
  chr2:63280967-63281637
  hyper

SEQ ID NO: 25486 - DNA, 125 bp, Homo sapiens
  chr2:64835519-64835644
  hypo
cgaagtgagctgttaaaagtcaccatctaaggagctgtgctggggatagaacacgggtggctacgccgggcatggtggtgcgcacctgcagtcctggctgctggagaagctgaggcggaaggatc

SEQ ID NO: 25487 - DNA, 126 bp, Homo sapiens; identical to SEQ ID NO: 24274
  chr2:67626117-67626243
  hypo

SEQ ID NO: 25488 - DNA, 224 bp, Homo sapiens; identical to SEQ ID NO: 8351
  chr2:70224820-70225044
  hypo

SEQ ID NO: 25489 - DNA, 1235 bp, Homo sapiens
  chr2:74729488-74730723
  hyper
cggattgccggcccggacattccactgaattctgtgaatgtgtagcagggttggaggaccctcggaataacccccttggggaggtggacaaggacaatctcagcgaagagcttgctcccctcctccccacccttaggaaacgtccgtgaaccggagtgagagggcagtgggagttcagggagcaaagtccaggcggaggagcgtgaggcggggcttccgtccgtcccgcacacttctgggattgttttctctttcagaaagcgctactgcggagtgaaccggtccttatatcttagtttcgtgactttgggggcggcaggcctgtgagttgttttccgccctggacgctgttttgcaaagatctctgcgcgcccaccgccaccctcccgggcgtgcgggccgggaagcagccagcggtgggaaactccgacgccctcctcgacacttttctccccccaactccccaagactcacttctagggaagtcctttttcccatcaagccctgggaaagactggccaggctgagagagggacccgtcctcctctgtgccaaaggcgggagcaaatcctggtgctgtcgcctttggatgtgagtcctggaaatggcgggggtgaggaaggtgggcaggggcaaggtttggccctcaggcgagaaccgacgccttgtcccggaagcgcagcacggccgagtgcgtccgggggtgcagacggcgccctggggtggtcctgccgccacctctcctttgactcaggagcgccgcgccgcgtccgggcgcgttctcagtcgcgcgaagccagagaggaccctgggcgtgattctccctccctggcacagacggagacccgagtgaccccggggtccgggtgggcgtggggaatggacccatagacccgggacgagcggcgcggagcccgcagctggccagcttcagccaccttgggagacgcagtgcagctgccgctgctgacagacaagaccaaggctcggctgggccccaccccagatccggcctgagcgccttccgcgctgctcggcctcaaggcgtgagtcaccaagggcaagtcccgtgacttggtcctcagggtctccggcctcggcacattaatcttcagacccggctttttcgacgccgagctgccgcccagccccaatggcagggccttccagggagtcccagtcagactgctccccagctcccgcagctgctcggtccctgcaaagcccccgggagc

SEQ ID NO: 25490 - DNA, 955 bp, Homo sapiens; identical to SEQ ID NO: 24283
  chr2:74742812-74743767
  hyper

SEQ ID NO: 25491 - DNA, 788 bp, Homo sapiens; identical to SEQ ID NO: 22878
  chr2:74781700-74782488
  binary

SEQ ID NO: 25492 - DNA, 111 bp, Homo sapiens
  chr2:85280296-85280407
  hypo
cggagcgccagtccatggaaagcgagcgtgcagaccgcagcctgtttgtccaagagctccttctgtccactttagtgcgtgaagagagctcatcctcagatgaggatgatc

SEQ ID NO: 25493 - DNA, 174 bp, Homo sapiens; identical to SEQ ID NO: 8358
  chr2:8713195-8713369
  hypo

SEQ ID NO: 25494 - DNA, 203 bp, Homo sapiens
  chr2:88990204-88990407
  hypo
cggcctcagagggcaaagcatagttaagaaaatctaggtgataaccggcagttaacagtggcccataccagtgacttgcgctcacggaagagttctgaaggcctggaatgcgtttgaagatgagttcatgagcagacagaaaggattccactaacagccgagaaacacaaaggtcatgtgtttttagggacctccaagtggtc

SEQ ID NO: 25495 - DNA, 266 bp, Homo sapiens; identical to SEQ ID NO: 23575
  chr2:95941644-95941910
  hypo

SEQ ID NO: 25496 - DNA, 486 bp, Homo sapiens; identical to SEQ ID NO: 24290
  chr2:96990889-96991375
  hyper

SEQ ID NO: 25497 - DNA, 608 bp, Homo sapiens
  chr2:97193030-97193638
  hyper
cgggagggacacgacggtccggcagcagagcctgcggggctggaggaggcgccctcctctcagctgctcttcctgcccctttcggtggcgaagatggatggggcccggggctttcggcggggcccgaggggccggcgaggctgcggccctggagccccctgcctggcagccatttgggccccagggaaatatcggcgctttggctaaccgaattattctttcggtttgagccagctcccctttttgagtcagatccggcggcagggccagaaaagcgctttctgaaaccccagcgcggtcctcggtgggggtggaatggggtggggtggggggcgcggccgcgccgctgggcgccctccccgccctcccccctccccacccccagtcctccctccgctgcccgccccccaagcccggtgtcgccccctccgccccctgccgcatccccggagccagtgcccacaggggccaggcagcccgcaggggtcgctcacggctggtgtaggggcttggtccaccacgctagtacttcgggcaccaaaatagaaaaagaataacgcttggaaagaatctgatgtttccgaaggagcatcgaaaatcgccgttac

SEQ ID NO: 25498 - DNA, 701 bp, Homo sapiens
  chr2:97427378-97428079
  hypo
cgcatcgtgcagaactgtggcaccgagaaggagaggcgctatgcccgcaagattgagcccatccggcgcaagggcaactaccttctctgctcgttgctcctagggaacgtgctggtcaacacctccctcacaatccttctagacaacctcatcgggtccggcctcatggcggtggcctcctccaccattggcattgtcatctttggggagatcctacctcaggccctgtgctcccgacatgggctggctgtgggtgccaacaccatccttctcaccaaattctttatgctactcaccttccccctcagttttcccattagcaagctcctggacttttttctgggccaggagattcgcactgtttacaaccgggagaagctgatggagatgttgaaggtgacggagccctataatgacctcgtgaaagaggagctcaatatgatccagggtgccctggaactacggaccaaaactgtagaggatatcatgacccagctccaggactgcttcatgatccgcagcgatgccatcctggacttcaacaccatgtcggagataatggaaagcggctatactcgcatcccggtgttcgaagacgagcagtccaatattgtagatattctctacgtcaaagacttggcctttgtggaccccgatgactgcacccccctcaagactatcactcgcttctataaccaccc

SEQ ID NO: 25499 - DNA, 278 bp, Homo sapiens
  chr2:97435378-97435656
  hypo
cgactccttgatggagacgaagagaaccaagggggcacgctattcgggagcctccttggagggtcagatggggtgaagaccatgcacagactgtgggatgggaccttaggctgtggggtgcccagcgagagcagcctcggacaagtggtgcccgaaggcagctttgcaccggttctccgtcagccctgcctggtaatagcctcaatatggtgatttgatctcaagaagctgcctgggggcaggtgtatctgagagtgacaggagctggttaatactcc

SEQ ID NO: 25500 - DNA, 185 bp, Homo sapiens; identical to SEQ ID NO: 8363
  chr2:97437985-97438170
  hypo

SEQ ID NO: 25501 - DNA, 163 bp, Homo sapiens; identical to SEQ ID NO: 8364
  chr2:99097200-99097363
  hypo

SEQ ID NO: 25502 - DNA, 662 bp, Homo sapiens; identical to SEQ ID NO: 24291
  chr2:99438949-99439611
  hyper

SEQ ID NO: 25503 - DNA, 836 bp, Homo sapiens
  chr20:1783711-1784547
  binary
cggttcctaatcctctgcttttaccacttaatttatcctgcctccaagggctgctgggaaaaaggcggatttcaaaggagaagcagctaaggaaaagctctggaaagggccaacggagcggatattcccggagcccctctgcgagccacgcgcccctctgggaagcccgcttccccctgcagacaggcgctgtgacacgcttgcgccccggtcgaacaggcgaagaggccgaggcccagagcggcgcagggcgagcctggaggctgcgccccagacctggaccagccacggacgccgctcccgccgctccctccgctccgctgcgctccgcacgctggcgccggctccccgaggccccgggcgccccggccgcacgcctgggtaaaaggtcccgaggagtccgcagaagcgcgcccacgcccgagacggccgtttccgccggcctgggaaaggggcggagaagggggtcgcccgggccgcagcgtgccggtccccgccggccgagccgtgtttggggccagtccccgcaccccgcttcttccccacctggggagcggggcgccgcggtaggggcactggagcgcacgatgcaccccgccaacgagtcctttctgcagacggggttcctgttttcatgcaaatgcctttgttagcgcaccgggaaccagggggacggaactgcagctgacgcgggctgcgcgccgcttttccgccttcgcttgattcggcctcaacgacttaaacgcgccgggaacaaaaacgccggcgccgcggaaaccctcaggagcggcacgagaagcgcggctccgctggggtccgcgagaagcggtgcgggc

SEQ ID NO: 25504 - DNA, 197 bp, Homo sapiens
  chr20:18489643-18489840
  hypo
cgtgagccaccgcgcccggccgccagtgccttttaataaagaacgttttgagagagagacggttatttaatgaaatctgctgacatacttgctgagagttgtgatagaacttgctttcattccgactttagttatccctttgcttcccatgaagctccagagtgcttcctgtgcacacagtgcttcaggttcttgcc

SEQ ID NO: 25505 - DNA, 2331 bp, Homo sapiens
  chr20:21080357-21082688
  hyper
cgttgtcgtctgctgatgtttaaaagataagaagacatttgtcagggcgggtgcttgaggctctcagaggactccgggagacactgccaaaacgtttccaaactgaatagtcattgggctgccagataattcagaaactatctgtatgagctgtttatcaaattattaaccgcacagatgttgtttggctgaagagcagctgaatcccctctctggcagccgcggagacaaaggtctccaggaataattggagatgtgcatggaatattaaattaatttactgctcttaattcttatgcaaattctgacctccgatggcgcctatcaattaccccgcccgcagtgaaagcgaaagcgacagtttcttctcttcgcttttttttcttttttaagaactcgaaaaaggaaatatttgcaataagcaggcggtagtagcacttcgtagctggaattatttaattgaatcttcaagtttttagggatgcccgtagaggataaaaccccagtgctcagcggagagggtgggaggggtacagggggcggaggaatctgttggtttgactgtacacctgcgggcggcggcaaaatacagccacgagccgggaccagtaatgtcaaataaaacattggcttgtagacggacgcgggccttgggaatcgcgcgagcccagcgttagcccggggtttcaccgaagccggcgattcgaagggagtggcgtttccgcaaactgcatcgctaggggcccggcgtggaagcgcctctgcgcaactttcctccaccgctgcctacaagggaggctctggcttccgtttacttattttttaggagttttaacctttggttcctgcttttacaaccgctaaccccaaaaacattttttttttctttttgttctttgtaaaaccaaaccactatgctgtgcgttcatgttcaactctgttgaaatcccgggtgggccgaaataagatttaattgtctcctgcgtggagaagtgacacccactttttcccctgaattgagcaaacaccagggctttgtctgagcttgtggcttaaacgccgggcggtttctgcacccagttggtgggttgtaagacaggaggtttccaagtctttcatcatgtttctaacaaggaaaaccaaatcgggcccataatgtcatcagccccggcccgacctcgccgggacctcggcagcccgatgatgtcgctagcggccccggcgcagccacgacgcgccgcctttcagctcctcgcagtccccacaaaagccagacaacaatatcaattaatcatgcagcgggcaaacaaggagatttatcccgcgacaaacagccccaccgagagccgctgaatgggcgtgattagcatgtgaaaaggcgagcaaaactccgcggttcaacagctaaagagcaatttgatggggctgggatggggaaattacttgattagcgtccatcggaggagaacacggttacagcccctcggccgggaatccgacaggggaacaaaacgcgctggtaaacgcggcgacgtacagggagcgcgagcgagggagggagcgccggcgagggagggagcgcgggggccgacatcgagaggcaatcggggtgggggcagaaataggggctgacccgctagcccccgccaaaccgcgaccaccctcacctagggctcccgggcggactcaagacttcacccagcgctggaggtcgaccttaatttagagcgctgccccggctctggcccggaaagagagtgacagaggcgcgtgcgggggaaaggcccacccacgctgtccctggagtcccctccagtgtccccagggacgcagtccgcggccgccagctccaggggctcgggccccaggttggagtagccacgctagcggctaggccgttccaccgggtagctccgcccttccttttgctcaggcagctaactttggagccgggcaagacgtgttttcccgctccttcgaatttaaccgcccagtgcctgcctcctggaaaagctgtcacgattgggcttgggcttgggcttggccttggtcaagaaaggtttcctcggctgcgccaccgtggggatggaggtgggagttggaacacagccccctagctgagtgcaggggccagaggctggcgggggcacgcgggggtggttgggggcggagtgcggcgaggggtgagggcgcgaccgccttggggcaggggcggcgatggagtagctccgggctctccacggactcgattggacagccccaggccggctttggatccttggaggcggatacgcaaggccagacctggtggcgtggccagttgggcatcgc

SEQ ID NO: 25506 - DNA, 635 bp, Homo sapiens; identical to SEQ ID NO: 24296
  chr20:21372082-21372717
  hyper

SEQ ID NO: 25507 - DNA, 488 bp, Homo sapiens; identical to SEQ ID NO: 23207
  chr20:22567354-22567842
  hyper

SEQ ID NO: 25508 - DNA, 160 bp, Homo sapiens
  chr20:2668754-2668914
  hyper
cggggatctgacaggaagtggatccaagtgccggcatcacactctggggcctccggggggcgctatggcccaacacacagcgtggccaagcgcgcctcagcctaactcaccacttcctatctgttttatacggtttgcacccgcttaaggcggcggaggc

SEQ ID NO: 25509 - DNA, 1095 bp, Homo sapiens
  chr20:2780877-2781972
  hyper
cgcgcgcgtgtgtgcgcgtgagtgcgagtgtgcgtgcggggtgagtgtgcatgactgtgagtgtgcgtgggtgtgcgtgtgcccgcgtgttagggagggatcgccccacggggcaggagagccgggcagtcggcttgcgggggagcggaccgtcggtcggggaactcaccgttagctgtctccgccggcggctgtgccgggctgctatgcagggccggggtcgagcctgggaccttggtggtcccgggctgcgcgaggcccagcaccgagttcctgggcgcccccagagccgggccgacggccggcgcgaaggcggccagggcgagcaggagcccccacatggcggggattgagtgccaggggcgcgcgggctacggcgggtggcgggtcggtctcttcctgccgagtgcgccgagccccccgccccttcctgccccccgcccctccgcagcctcctgcccgcccacagcccgctgcccgcctcggacctcggagaggaggagagggccgggaggagcgagcggggctgacctccaaggggccgccccaagtctcaggaccgccgactctgcccttcctctccgccgtctggggccaacccgcctcgttggcgcgctgcgcctttatagtctgcaaagccacactgaagagaccagagatcacctggtggccatcaagtcgaccaacaggaggcaaagccccttatctgagcaattcagaatgacacttccctattgtctaaagccacatctggtaccaagcttccgtcccaagaatttataagtaactagaatttctgtacgtttccggaatgagtgcacgttaagacccattgtgcaaactttgctgacatcaaggcaccaaaatatcgacaaatgtaaccatttaccatgacctaagtgactaatgtggtccaaattaccctgcagttccccgcagggagctcagtcctctcttgctgaagcgcctactgcgctctgctgcctcgtcctttccgtctaataaaactttccttttcagacctacacggttgttgataagttcttttaccacccgggagccaaccacttcccggttccggagctctgacacctc

SEQ ID NO: 25510 - DNA, 313 bp, Homo sapiens; identical to SEQ ID NO: 23210
  chr20:291046-291359
  hyper

SEQ ID NO: 25511 - DNA, 909 bp, Homo sapiens
  chr20:30193272-30194181
  binary
cgggcgaggtggtgcgctgtctgtctgagcagagcgtggccatctcgcgctgcgccgggggcgccggggcgcgcctgcctgccctgctggacgagcagcaggtaaacgtgctgctctacgacatgaacggctgttactcacgcctcaaggagctggtgcccaccctgccccagaaccgcaaggtgagcaaggtggagattctccagcacgtcatcgactacatcagggaccttcagttggagctgaactcggaatccgaagttggaacccccgggggccgagggctgccggtccgggctccgctcagcaccctcaacggcgagatcagcgccctgacggccgaggtgagatccagatccgaccactagatcatccttataccgacggggaaacggaggccagagagggcgtgggcgcttgcaccacttccgtcccatccttgcgggtacctggctatgcgggggtgcctaaggagcctggaaaaagcgctcccccgtcgtgcttcctggggaagggggcgttcgctgcgctcggagcggcgtcccttccaacccgccggtctcatttcttctcgttttcacaggcggcatgcgttcctgcggacgatcgcatcttgtgtcgctgaagcgcctcccccagggaccggcggaccccagccatccagggggcaagaggaattacgtgctctgtgggtctcccccaacgcgcctcgccggatctgagggagaacaagaccgatcggcggccactgcgcccttaactgcatccagcctggggctgaggctgaggcactggcgaggagagggcgctcctctctgcacacctactagtcaccagagactttagggggtgggattccactcgtgtgtttctattttttgaaaagcagacattttaaaaaatggtcac

SEQ ID NO: 25512 - DNA, 40 bp, Homo sapiens
  chr20:30297105-30297145
  hypo
cgtctggcctgctcgtgtgtgtgtgtgcgcgcgtgcacgc

SEQ ID NO: 25513 - DNA, 833 bp, Homo sapiens; identical to SEQ ID NO: 22882
  chr20:30639044-30639877
  binary

SEQ ID NO: 25514 - DNA, 675 bp, Homo sapiens
  chr20:3229128-3229803
  binary
cggaggctacaccctttcccccgggccagcttccacatctgcccagtggggcatttccccttgtcccacccagcgactggttgacaggaagcagggtgtctatggactggcggcgggcgccccttttcctcacctccctgcgcggccagcgggggcccggggtgtggtcaggtgggaggcccgcgccacgtgcggcaggaaccgcctggcgagtggaacccgagcttgcacggggacagctgatgcctttctggtcgctcctctagagctccgcgggctccggcaaacccccccgttagaacttgcggttccaacgcgcagcgccaaatctggcccttacttgacccgtcagcgcctccagtcgtccccatgtataaagtaggaccgaggagccacctcgccaagctttcactgcgcggaaacgcgcccatcaggctggaaaggcgtggttcctactacagctcggccgcggcaggctggggccgagaaccggcacccgtgcacggcggactaagacgagggtgagggacacgggtgggccgggagagccccgttcccatagccggcttccttgagcccctccccaagttctgggactccccaagttcccaccccgcaagccagtgtggtttcttcagatgaattttattcttactctccacgggctgctccggc

SEQ ID NO: 25515 - DNA, 287 bp, Homo sapiens
  chr20:32301652-32301939
  hypo
cgcaacccgttttctgagaagtgccttgagggaagagctacgggagatgacaggaaggtgaagatgcttcagcgagagacaagagatcagggagctttgaggaggaagtgatcctcagagaactggtctggattgccaggagggaagtaaaggtggagtgcgagccaaaggcactcctggcgggggtgctgcgtgagcagatgtgtgcaggtggagctatacacatggcatgtgcatggaatggcagcgagttctgtgtgccaagggcacgccagggtggacacaac

SEQ ID NO: 25516 - DNA, 322 bp, Homo sapiens; identical to SEQ ID NO: 8376
  chr20:32307879-32308201
  hyper

SEQ ID NO: 25517 - DNA, 947 bp, Homo sapiens
  chr20:32378478-32379425
  hypo
cgtcacggcccctccctgagcctgagatgacctggcaaagcgagccaaggtgcagagagtgagcagctgttccaggcagaggagaatggcaagtacaaaggcgcagagggaggagccagcgtggcatctctgaggagagcgagtgtggctggcgcagagagtggctggaagaaggcagacgacgagggtggagagagctggggccagatcacacaggtgctggtggggaaagagcctggattttattcccagcgcagggcactgttgcggggtgaaggtctggatgcttctcactgactttcccttgccctccaggcatgaagctccacaaatgcgccctgtgcagcaagtccttcagccgccgtgcccacctcgccgagcatcagcgcgcccacacgggcaactacaagttccgctgtgctggctgcgccaagggcttttcccgccacaaatacctcaaagatcaccgctgtcgtctcggcccccaaaaggacaaggacctgcaaacccggcggcccccccagaggagggcagccccccgcagttgcggcagtggtgggcgcaaggtgctgacccccttgcctgacccgctggggctggaggagctgaaggacacaggggctgggctggtgcccgaggctgtccccggcaagccgcccttcgcagagccggacgcggtgctgtccatcgttgtgggtggtgcggtgggcgcggaaactgagctggtggtacctggacacgctgaggggctgggctccaacctggctctggcggagctgcaggctggggccgagggcccatgtgccatgctcgctgtgcccgtctacatccaggcctccgagtgacggacctgaggtgtctgtttcctgggcaggcctgatgctcctgtttgggtccagggcccctgggggcagaccggtgatccttaccagtggaagcgagccatc

SEQ ID NO: 25518 - DNA, 336 bp, Homo sapiens; identical to SEQ ID NO: 24302
  chr20:36767690-36768026
  hypo

SEQ ID NO: 25519 - DNA, 148 bp, Homo sapiens; identical to SEQ ID NO: 7243
  chr20:37145099-37145247
  hypo

SEQ ID NO: 25520 - DNA, 638 bp, Homo sapiens
  chr20:37274639-37275277
  binary
cgcccccagaagtcctatccccctgccaaaacttgatcctttctggccaggtcgcctctttcctggtcgcccaggtgcgaaaactgaacgacagtagcagcaggcgcccccagctctgcgacgcaggcctcaagacttggctgcggaggatgcacgcagacagggacaaggcgggggacggcctcgaggcggtgagtgcccccgaccccagacaggtggagaagggccgaggcgacaggagggcacctggggcgcggtgcttcccttcctccaggtccccgctaccgggctgccagcaacggcccagtgaggccaccagggggcgttgcggcgccgtcacggggagcgaggaggcgtggctgcgaaacgagggcttagaagcgggttggggaggggaaatggagtgactcggagacttcccctagaaaccgtcaccgccgccccatttttcggcagcccctggccgagggttgggaaaatgggagtcgctctgcggggtgtgaggtgattggggctgggtgggggatagtagaagggaagagccttccaaaaatactgagtattcctaggaggggtcctgaacacggttccttattaaagtcccgattagagaaattgatgagcgttgaggctgcacc

SEQ ID NO: 25521 - DNA, 2195 bp, Homo sapiens
  chr20:37433723-37435918
  binary
cgtcagacgtcagcagaggtacgaccacttccttcctccagcgcttcacctcccttctttccagaaagaggaaatgatgcgagtccacaccgcaggccacagcccccatgtctcggccccagcagctgggggacctggccccacagatctgtccccagcgcaaggccagggccggcccctggacctcctgggaagccttcagactcaggccgcgcaggccttcaagctaggaaccctgagttcctggccctggcattcattctgtgtgaccttgagcaggttaccactcctctctgggcttcaggattcccgtctgtcaaatgggagcagggataccgtccttggcttccctctttccatggtcggggtgggggttaggaaaactattttggaggagggggcagcgttaggaaaactattccgaagcctggccacgtcccaaccggtttcaacttcctgcagctcagaagaggggtccccacccgagagcgccgggaccctgtcccgcgctgcctcccaagccggatggggttgagcgcgcccaccccagtcccaggagctcaggccccgccttgggggaggagccgagaggcggcgcggaggctcgcggccgagcagagccagctctgtcgccgctggagcagctgcggctcggggacccacagacacagccggggtcgggagccgcccggggcagggctcgggagagcgggtgagttccccggcggcgccaccaccctccttgcgctctgcggcttcgcagggcgggggatgaggatggggcggggaggtggtcccagcctgctatcacctagctgggggccggggcgctttggccaagggacgatagcttgagataaatgggagtgtggggactctggaaagacgggtaccgagagcgctaggtccgggagtcgggctggaatgggggcgttctccccggcctcgcaattccttgacgaggccaggggagggggcgcattggcaggttgttggctgcggccgtcgtagaccgatcttggggcggggaggtggggtcctcggtctgttctggactcatggggccgccgtctgccgggggtgcaatgccgggcggcgggagccacagcggacaccaaacaacccccccccgcgcactctcccggccgggcatggtggtgccgccccctcgcgtggcggggcttggtcctggcgggcagcggcagggcgcagagagcgctcctgcccgggcgggaaagatccccaaggcaggcgcctccacctgcagacccgccccgcctcaggatccggctgacagcaccagccagcccggggagaccccgcgagtggtagttccccgggaggggcgcgcccggcctctcccagggccccgtgcgccggcggctgggtcccccgcgccaggagcgctcccctctgggcgactccggctcatcgattccggcccagaggagcgcccccgggcgccgaggatgggcggagacgtgcagccgcccctgagaggtcgcccagaggggtctccccaaggtcacccggagtgcccaggctgagctgcccagaccgccccgggtggagagccgggaggcaggcgctcgctgccctcctccttcccccatgtagactcccttcctccgctcccccaccccggcccggcctccagcttcactggagatgctgatgatgcagctcccagcccttggaggataattgagcctgggagagctttgaatctggccctcctgagaccccagggctgcgccgctgccgcgcgccaggcctgggtcccggtgctcccgggcacctcaggagcggagggagagggatgtggcttcatcagcgcttctaggaaccgaaaaccgagctgcctgcgcgcccatgtgattgcatttcacataaagggcccctgttttcactgtcagaagagccccccagctctccgcggctctggacaccaggtgccgcctctgaatcaccctctgtggaggacccggggcccggaggtacaggcgccctttcccgcagggctctccctggaaagggcctgccgatggcggcctcagtccgcaggggtacttccctgtgtaccctgccatttcctgcggctggtgaagcaccggagaaaaaccgtccatctaggaggcctcctccaaggctggtaataaagcttcttagcccagccagcgactagctgtctactc

SEQ ID NO: 25522 - DNA, 785 bp, Homo sapiens
  chr20:3758188-3758973
  hyper
cgtaaccttcaaaccttccgcctcagtaccccgtgcgcgaggagggaggggcgactgctacgggcacatcgtcgatgtcctccctactcctggcgatcccacgcctcaccccttcctctccagctgctgcggtctccgtcgccgaggtgggtcccaggtaagctcccaggaggggcaggggagcccctcagcggcccgggacagattcccccatggctgagggcatggggaactagcctggatggagacgccgccgtcctcggagctgggcggggacctgattctgggggtgtggacagagccaagggaccgccccccaaggcccagcgccgggagatgcaaggccgggcccaaggtgttggacactgctttgggggacaggctaggtctctgcacgtggcttctgggctctggaaagcggtccattctcctgacccggatctccggagtggtaggaggcggctcagtcccgggcctgcgctcctagagttcctgtcccatctcctcccacgctcacccatcccaaggaaggagggcactcgggccccagcaggctcgtgagagcagcgggctccgccctcccaatggtctatccatcggtgggtgggtccggcgcggcgtcggggctctggcgggtacccgggcgtccccgcgcggcccgggccgccgctcaccgctgcttacgctccgcctgctggagccgccgggagaggtcttcgatccgcacattcttgagctggagcaggtgctccaggcgccttaccttcatctgcaggacctaagcc

SEQ ID NO: 25523 - DNA, 124 bp, Homo sapiens
  chr20:3820920-3821044
  hypo
cgtcccactgcactccagtcgctgcactctcgccaaaaacaaaaacaaataaatatgattgagtattaccataggctctggttcctgccctgagggaaggtgagttaaaaagcagtcagaggcc

SEQ ID NO: 25524 - DNA, 544 bp, Homo sapiens
  chr20:45279829-45280373
  hyper
cgagggggtctggtggagcctgtctacactgggacctcagcggtctcccaacttggaggcttgggagaagaggatcccgcctgtggttgaccgggggcgcacaggcggaggaggcgttaccttgggcgggagggcgaagaccaccggcagcagcgcgagcggcgtgaacagcagcaccagcagccgccgcgcgctccacaccttcttggccgctgctgccagcgccgccatcagcgcgatcgcctggcggtacgggccggcccgggactgccccgcctggccccggcgccggcttaaagcctgggggagggtcggggaggggactgcgctggggaacccgccctctccctgctcctcctggaggaaaagggtggtgcctgcgcccctgggaccgggtgaaagaggcccgggaacgttggagaaagttaggcactagaattagcaaacgggaccccagccgcagggcagtgtggccttgcctcttggcttcccagcaatgtggcctggggcagctggcttatcctctcctcgcctctgtttactc

SEQ ID NO: 25525 - DNA, 314 bp, Homo sapiens
  chr20:46823362-46823676
  hypo
cgtgcaccatcaccgccgtggggcccacaggtaatgggagatgcccccaggtcctggtttgtgcttcgccagagccctcctagagctgcaggcgatgatgggagcttttcaaacaccagcagggcctagatgagctgctccagggacaggagtgttgcgggcgaatgagctggacgagggccagccctgcagggcgcgcagacttgcggctctcttcgcaggcttttggcccaaacagctctttggaaaagagcacaggaatggccccggaaggtgggacctgtttccatggtgcacgcgcaacattggaggac

SEQ ID NO: 25526 - DNA, 224 bp, Homo sapiens; identical to SEQ ID NO: 24313
  chr20:47905365-47905589
  hypo

SEQ ID NO: 25527 - DNA, 672 bp, Homo sapiens
  chr20:48524519-48525191
  hypo
cgggccagaaacggttcagaggtgatgctggagagacggggaaggttcggagcccggaaggatctgagagcacaggatggatgggatcagactggcatagcctctcaggagggactgccaggggcaggaagagagaaggagggcctgtatggaggctgctccaggacctcaccttgatgcttctgaattccttcttccacgggtagaggaagaggttgatgcccaccgtctccagcatgctgaaggcgccgtgcagagcccgcaggctagaggagctgagcgagcgcaaggagctctccaccacctcatagaactggatcagccggaatcgataaaagggatccaccttgtgcaggctgagcagggttgaggctgccacccgcaggcactcatcgctgccaggccgctgcctgctggtggtggtatccactttgctctcatggaactgcacgtacttccgaaataagtcatccttgaatttagtatccattgaactgggcttccccatccgatcgaggggggctaccttatctcctccatggcttctggattagaggcagggacatcactaaaagcatggacatgttgccgcctggaccagcggagtgctctggaaggaggggaacaagaagcatgtcattcctcgatacggtcgcgcttcggcttcaggtc

SEQ ID NO: 25528 - DNA, 415 bp, Homo sapiens
  chr20:48788897-48789312
  hyper
cgggcgggggcgggggctctttgccttccgatccaagctccgccctctgcagctctgctctgtgtatcccagagctgaccctgcggcgcctttcccaggctcgcgtccggtgagttcctattggccaacgggaggccccggtcggggagcgccccgggacaggcccctgtgcctcccgctttgcggagtgacgcaggccctgggctacagcaaccttaccagcccctccagcttagaggtggcagtggctctctgcggctgcgatttctttctcggagcgtcctccccatcccgttcggcctctgcctccaccgtcgtctctgtaacccgttccctgtgggagagtctctgttgcggtgttcaggggtttcggttttctggctgaacagtgattaacgcgagggaaggcgctgac

SEQ ID NO: 25529 - DNA, 155 bp, Homo sapiens
  chr20:49286725-49286880
  hypo
cgctctgagccaaggtagagccaagtcaaccaggcaggcggaggcccagagcatgagttttacctactgccggtttcggccaaaatgccagaaagccaagcagcaatcttgggcatcggacttggctagaaatccctctcctcctgggaagtctc

SEQ ID NO: 25530 - DNA, 745 bp, Homo sapiens
  chr20:50157660-50158405
  hyper
cgtggccagagaggacaccgatggaagcgaaaacttcattatctgcctaacacagtgtttgtgggaaacatcaggccaccaagcctccttgacaggcttcctccacgagccagtcagcacaagcccttcctacacactagatggaggcaagcccagagtgcgtctggaagctactaacaggcctgccactgagccttcaacaagcattggctgggctgggctgggctgtcaaaatcaggaagcctggttgggttttttgttttttccaagacaacctgctaaccagaaatacacagtgaggttgggcgtgtggccgcttccccctcctcctcctcctccctctaacgaatgctcctgttaaacacgtgaagtgacagataagcattgggcccagcccggggaagtccccagcccccagcaactgagggcagttggaggcacagagtgacaaagttcaggcagaaagagcctgtgtccttctgaatccatgctgcagctgcccctcaccctaccccatcccaccacatccattaggactaagcgtagaagatcacttaatatagctcagaccaatcctcttgtgagtggtaagtgatgggttcagcagcagaacccagggaggaaatgggccggccttataataccaaaggttttaaccctctccagcatcagacagacaacctcttcctcagtttcaacacaaagtccccgtcaaccactgctcacaggaggtgatgggagctgc

SEQ ID NO: 25531 - DNA, 295 bp, Homo sapiens; identical to SEQ ID NO: 8391
  chr20:50208595-50208890
  hypo

SEQ ID NO: 25532 - DNA, 520 bp, Homo sapiens
  chr20:50722287-50722807
  hyper
cgagctcccaggtggcgctgtggctgctgcgctgcacaggctgcgcttttagattcggacttaattggtctgggctgggacctgggcactgggatgtttttttaaaaaagccgtctccctccctcaccacccccatcacacacacaggtcattctgatgtgcatccaagctgagaagcacgacctccactcctggttctcaaccctgctgcatacccaaatttaaattttaaatgaggagtgtctccaactgcagggagaaatgcagattccgaaagttctggattcaggtggccgaggccagaaatgtgtgtttttatatagcacgcgcccgctcccgccccgtgactcgggcgcaccggctcttggaccacacaggagtgcttttggggccaacccggcgccggccccgcccagcaggtgacggaggcgtggtcctcggggggttgagctaattagcgttcatgctcagactggctgggacctcgatgagacccgagggagacccctccttgcgccgc

SEQ ID NO: 25533 - DNA, 1480 bp, Homo sapiens
  chr20:55201892-55203372
  hyper
cgcagtccgcgtcttcacgtgggcaaggggcggggacgttggagggaggctgtcttggatgctggagccttcggttcccggctctgctgagcagaaaagttgaagtcaaggaagggttgaggcttcctcacaagggcgcgcgcgtgcctgggtgccggcccagaagccgagaatgtgcgtattggggaagggtctcccgtgccgagaagacagaggatttgttctagctgccttccgtacagagggcgcggaggttgcgctccagttcgaacgcttacccattggaaagagggcagcgccggggtccagggaagctccttgggaatgaatggcctttgccaagcggttccggatcctctgggtcctttgggcccacggcacggtgctgcgcgagccctcagtgcccatcggctcccttcgcctcctgcgtagacgctcccaggcggggaggcatatcggttcctccgggcagctttggctagtgttgctgtgggaaaggagagccagggcctgggatgggggatgagcaccttcttgcccattccgggccccagcgtgcaggaggtaaacttgccagcacagacaagacagcttgttcaagctgcacctcaggccgggtcagagaataaaaccgagggctagaaggcccagaatgtcggacagcccagcggcacccgtcagggagtcccaggcgcccgaaagaggcgccgcacctctggcgagtctaggacccatcttcctggacctgtgctctggagtgcctgcgggcctgggtctaatttctgcttctggcaggtgtccccctcccccgccgctaataccaggagcgctgcttctgcggtaacttattttacccccagaagcctgttttgggaccgaagtgtcagggtcctgtgtgtctttttatgcactgttctccttagtgcaaagccctgcagatatgcttggccgaaaagtctcagtggtttcaacttccagattttgttcccgcgtccggtcggaaaatcacctgggatttggctgctgtctaaggccgggggaaagtttcccttggaggacgcctattattattattttcttttaggcccacctgggtctaaataaatgctaaagttcaaacgaacccgagaaggaacagcgaggcagtggatgccgccattccgtggatgggagagtcatgtctactgcaggtgcggacaccgtactgataggcattgattattgcaaaatcgtattcagtatcaaatagaaatagtcttgtcctctaatccccacagaatgtttaaatccagcccagggagccagttggggcgtcccaacaaatacgccctcgagaattagcgatgttccccttacaatgaaagtcaattgctgcataataactgggccaaagaatttcgttagtttaaattttaaaaattagtattgcactttgctttcaagtttgggtggcaagtaccgaaggggagagggaagcagc

SEQ ID NO: 25534 - DNA, 178 bp, Homo sapiens
  chr20:55532724-55532902
  hyper
cgggtgtttactgggtcatttaaccgggtttctattttttaaagtttccttttctacgactatttgttgaccctaattgtttccatgcccatgagatgcgtccctgaacttcctcctgcggcctgtcggtggggccgggtggctccctctaattgcctgtgttcctgccttttccctc

SEQ ID NO: 25535 - DNA, 46 bp, Homo sapiens; identical to SEQ ID NO: 8395
  chr20:55936567-55936613
  hypo

SEQ ID NO: 25536 - DNA, 982 bp, Homo sapiens
  chr20:57224597-57225579
  binary
cggggcgctacgctaagcacacgggctccccgaatttccctccccagggcctctctgtctttggatggcctgtcagcaagtccctgcagcctccagcccggcccgcgcggcgacccagtcccctgtcgcccgaatcttccaccgctgcgaagcgtccccgggcgagcgccctgctctccgcgctgcgcggaagccagagccggtcctcacagtgaactcgcccagccctgctcgcggctctctcgattttatgtgggtttcgttggatgcattttgttatttgcctcaatggatgtttcacattaatttttagttgcacaacgaacgcgcgggaacattctccgtgagagaaaaagcacgggtggggggcggttaccggtgcttcccccggtcgcctgggggtcccgcacgcgccccgcgggtgccgctgtctggctggggtccctgggtgagccgcgggcaccggcttcgcgtctccccgggcgcgactccgctttgcaagcgctcagcacacgggaaaccctcggaaaacacacacgtgtgtaaagtttgttccacgcagaaacaaaggacgcgtgggggccgcttctggggcctcggtcctttgttggaaccccgcaccgcagcccggcccgcagcctcgccccgcaaggggaagccggccctgcacaggcccggggcccggaaggcgccgccgcacagctctgcgcccccgacccgctccggccgcgcgctgggccaggcccttggcctcaagcctcccgggcggctccgggccggacccgggtctccgtcgcgggacgccagcctgtttgtgggtgccgtgctcgggcccgggcggcccctgcccgacgcggccccacggagcccctgcacgaaccccgccgacctggcccggggcggcaagtcgaggtgcttagggcgccctgggcccggccaaccgtggaaaacccggcccggggcacgggggggcgcgggggtc

SEQ ID NO: 25537 - DNA, 119 bp, Homo sapiens; identical to SEQ ID NO: 8397
  chr20:57240808-57240927
  hypo

SEQ ID NO: 25538 - DNA, 474 bp, Homo sapiens; identical to SEQ ID NO: 22885
  chr20:58514041-58514515
  binary

SEQ ID NO: 25539 - DNA, 268 bp, Homo sapiens
  chr20:6022704-6022972
  hypo
cgggggctgcgctgggcgcgacggtggtaccctgtgcgtaggtggagcggttgaagcaaggtgggtgtgaagccccgagagtggtgctttggtcggactggcacactccgggcagctgggagagtgacagggaggctgagaaggggccgctggatcccgcagctggcgcgcacatagtgtctgctgccctggaggggaggccaaccagttagaagacgtctggcttcagggacacttctgcgcagagctttgaatcctcattgccgac

SEQ ID NO: 25540 - DNA, 205 bp, Homo sapiens; identical to SEQ ID NO: 24321
  chr20:60470129-60470334
  hypo

SEQ ID NO: 25541 - DNA, 868 bp, Homo sapiens
  chr20:60544922-60545790
  hypo
cggaacactcggccccctcatcggggcactcggccccccgtcggagcactcgcccccccgtcggggcactcggccccccgtcggaacactcggccccccgtcggggcactcggcccaccatcggggccattacatgccacgagtcctttggtgtcagatccctagtgcggggccaggtgacccacctgggtggggcccaagcctttcccggttgcttaactgaggtgcccttacactggctcaaatgcacagatattacctgtcagcttagtgtttcacattggcacgcgcctgtgtgacacccatgatgatcaaaacagaacattttcatcaccccagagggccctggcgccccttcccgacagtctcctcaccggagccccacaccctgcttctacccacccatgaacttccatcaggcggaatcagaatgcataggcttctgtgtccggcctcttccagtcagcgtagctcctctgagattcagctacctggtggagcatatcagtagttcgttcctttttattcctggggggcgtttcactgactaaatatgcatctgtttgactctccattcacctgctgaagggcatttgggctgcttccatcttgagcatcaatacggccattgtgaacattcttgtatgacttttccgcggacaaaggaactcattctcaagtagatgcttaggactggaactgctggtcacaggatagatgtgcattcggcttcgtcgctgtgtcacacactgaagagatgcccattcagcttcatcactgcatcatcacacaccgggtagacatgcattcaacactgggtagacgggcattcagcttcatcactgcatcacacaccgggcagacgtgc

SEQ ID NO: 25542 - DNA, 369 bp, Homo sapiens
  chr20:60620137-60620506
  hypo
cgccgacatgaaaacacaggtgagtaggtaaataacctcaggtagggagagacagtctagccacactgcaggaagagaactcgcaaagccatgccgctcaaacggaatcccatcgggatgctccccgctcaggactgtcacagggacaaccgtcccgcacctcctggcccatgcaccctccccaccggccacacaaggtctggaatgttcttccctgcccttcctgggaaagccctgcctgccgtgcctgcccgctcctctctacccttgactcgcttcaggtgcttggtggagacgatggcggtgaaactttcaacagcgcgcctgtttgggtttaagcttcagagaacaggcgcagaatccctgcac

SEQ ID NO: 25543 - DNA, 1383 bp, Homo sapiens
  chr20:60772868-60774251
  hypo
cgtaacacaaagggactgagattcttgttcttgctttagttgaccagcaagtcaagtccctgtcgtcggtcctgtcgcggtaccagggtttcagtggagaagatggagggagtaaaaactgcttcgggcgcagtggcgccgtcctctacatccgggtgagccgagactgccggacctggccctgtccccgttgttctggatcatccagctcctgggggccaccgtgtgacccacggggcccctgtggcttgatgcccacagctaggaaacagcacaatggaaacggaggctggcagacagcgggaaagcagccccacccctcaaagcaaacccagacgggcatttgtaccagggtctcacaccatgtgcatgtctagtgaaaaagtcatgaaacgattctcttttaaaaagagggagcccacggcacggacgcttcctccgtctctgaccccatgagccgacctctgactgagggaggccactggcacccagcgggcctgcgtctccttcgcgagctgaattcactcgtctcttagatgttttttctggtgcttcagttcacactaacgttttagaaacactatttgaaaaagccctttgtgcagtcagaagggtgtgtacgcagccccgtgaaagccctggagcactgggaccttttccttgtgctccggagctgttggcagaggtgagtggggcgggcagctgcccggggcacagtccgctcttgtcttctttccttagcgcttgcttcaggaatgggttaaggcctcctttcctcactgctggtagagctcagctgatgagtgcctgctgttccccaggtccccgtgggcacgctggtgaaggagggaggcagagttgtggccgacctgtcttgcgtgggagatgagtacattgccgcgctgggcggggcaggagggaaaggcaaccgcttcttcctggccaacaacaaccgtgcccctgtgacctgtacccctggacagccaggacagcagcgagttctccacctggagctcaagacggtggcccacgccggaatggtaggtgtccccactgccaacagcatctgcacacactcagctctagaaaatccacttttctcaatggggatttgccagtggcctggaagagaacagctttgcgactcacctttttcccatcagtacactgctgacttggtcgtgagcatgagcccttgtgactcccccagccctgaaatcctccctccaatcccagttagttacagactctgcgctaacaaaggtgctgccgcgggccgtgccaccgtcttccctctttcccccaggtgggattccccaacgccgggaagtcctcactgctccgggccatttcaaacgccagacccgccgtggcttcctaccc

SEQ ID NO: 25544 - DNA, 514 bp, Homo sapiens
  chr20:60983874-60984388
  hypo
cgagtgagggtggagggcaggacgcaggaggcaggaggcagctgtccgtgctggctgcagcgccgggtcctggggatcggctgtgcagtaggggggcccctagccagttcttctttgctggcgctaagctagactttgagggacaaggaggaatgctgaggaaggaacggggtctcttcctgggtctggtgaacccccttgctaggctcccgctgccagtcttctcccctccccagggtgtcgatgggtggccaaaagccaacctggcctgcgggcagtgtgtagggaacacacggcttttgtttcgtgtgattctggagaaattaaagcaacctttaacacacctggacttccctcttgggagttcagtccctctggcctctcaggacaacaggcagacatgtcacaggctgcaggtgggaggcagtgccccctgagtcaggcccgcaccccagtctggcccaggcctcacccagcccagtcgttggcccgtgtcctgccatccctgtgatgc

SEQ ID NO: 25545 - DNA, 64 bp, Homo sapiens
  chr20:61567413-61567477
  hypo
cgccttaaggcgctagcactcaagctttctgctcgtgcatccccttgcacactttctccttgac

SEQ ID NO: 25546 - DNA, 805 bp, Homo sapiens
  chr20:61585229-61586034
  hyper
cgccaattagaggggagggctgccctcagcgggccctgccccttgctctcttcctcttcccccacccacgttcatccaggcctgccgggcagggccagctccccagggattcagggcctcctcactggcggctggtttgagtggctccgccttcactacgtccctcccaggctcgatgtttaaaaaggagcccttgccgcagccttcactacgtccctcccaggctcgatgtttaaaaaggagcccttgccgcagccttcactacgtccctcccaggctcgatgtttaaaaaggagcccttgccacagctcttcaacttcctttgcaggcccttattgggtagcgccaaggattctggaggggcctgtgggtcaaggctgccacacgcacgccttttcctagcccgccctcctgcagccacatcacaaaggctgggccaggcgagaacagagctggagggcggcacccacactctccggtttgctgctcgcctggcccggccccgcacagttcccttttctgaatggaggggccatgtgaccacctgtttgctcagccgtggatgctgcttctgcacaggggccgtttgctctagaaagttcacaggaagcaggctgctgggctcagggagtgcagagtggtgggaggaagctgttcaagctgcccaaagctttccggttcttggcacaccccccgtcccccgcgcccccagcaggatggaggattcccagcctggggtcctagtcaggcctcaggtagccgactgtctgggccatcctctccagcctgacatccttgtctcccc

SEQ ID NO: 25547 - DNA, 247 bp, Homo sapiens
  chr20:61838301-61838548
  hypo
cgtgggagacaactggaaacgcacagttcgggctgcctggaaaacacatgcagcctcctttcagggcctttgatctccctttgtctcccgcacagccaggcacaggttcagcgctcactcgctgccaagtgctggaggcgagctgtgctgctccctcaacattccttagtgccacggctccatgggcactgagttatgagtgtgaaagtttacttctcagggatacagctgcattaaccccgggcac

SEQ ID NO: 25548 - DNA, 615 bp, Homo sapiens
  chr20:61973840-61974455
  hypo
cggagccctgagaggaggtaacgtcgatgcaaccacgttggcaaacccttcgtcagcagctcattgagccgaccacgcacccttccttcccacggcagagcgggagctcctgggtcagcctccctgccaaagtctgttcacagcagccccgagctggcgacgggtaaataagatggtggagccacgcggcggagcccgcagcacagtggccgcgcagcgagcaatgacccgggatcgggagccgacagaagggcacgcctggcgcggccacgcacagaacccagggccaggcaacgcggggcagaggtgttgggtgacctcgggcgggtcgtggccggccgggctgggcaggggattcctgggtgccggctctatgcgaatattcttcagtctgtgaaagaaaatgccttgtcatgccgctgaggattcatacgcacgctgtgtaccttaccccgcgaggcaggcaaatgccaagaaatgccagctcggattagcgcagcgggagcgcctgtctgcagacagggagtgtaaacggcacagtcacgtggaagacacgttggcattatctcctaaaacccagtgcaaacccctgacaatcccactaccaggtgttcc

SEQ ID NO: 25549 - DNA, 612 bp, Homo sapiens
  chr20:62031127-62031739
  hypo
cgggggccaggccaacaacaggaggtacccaagtggacacatggtgaccggcgatcctgcccgggcgagctgatggaccacaggtgccccagcggcaggcccaggccccagcatctttctgggtggctgcaggcctcagaggggagggagagctcggcgccccaagagagagcccagggaccacagcagccccacagcggcccctcctctggccagagccctaggacccagccgcccctgctcctcactcactgtggcccccagccccactgtttcacaacaccccagctcgttcgtgccctgaggagagggaccatccgtccccacacccggtccacagcaccgcacccgactcagccccagcatcgaccagaagtccccggccctcagaccggccgcccagagacagtgggagtgaggaggccacacaccgtccaggttgaatcactgcgttttactgagtgcacaggtccacctggcgtccgaactcgtccccgtggcagcagggatccccagaaccttccacggccatcgcggccgcaggaccccacacccgaagtcccccgcaaacccgcactggcgcattcttacggctctggcatcaacctgtcc

SEQ ID NO: 25550 - DNA, 453 bp, Homo sapiens; identical to SEQ ID NO: 24329
  chr20:62031988-62032441
  hypo

SEQ ID NO: 25551 - DNA, 495 bp, Homo sapiens
  chr20:62153095-62153590
  hypo
cggtgttggagtccgcagagcactcggaacctccccaggcctccagcagcatgaccgcctgtggcctggctcgggacgccccgaggaagcagcccggcggtcagtccagcacagccagcgctgggcccccgtcctgacctgagcggttaccaccagccccaggcctgcggaggcgctagtccaccagagcccctccccgcccctctccccactccgcatccctcgcccccctccccacctcccaccccccaccctgtaaactaggcggctgcagcaagcagaccttcgcatcaacacagcagacaccaaaaaccagtgagagccccgctctctaccgcccggccccagcactcgctagctttcctgacacctggaactgtgcacctggcaccaagcggaaaataaactccaagcagccagtagccccgatggtgtgtgcctgagctgtgtggcccgaggttccatttgagtgtgagaaatggctgaatccctccc

SEQ ID NO: 25552 - DNA, 494 bp, Homo sapiens
  chr20:62185051-62185545
  hyper
cggggccttgctgggcagagcccgcggcgggggaagccgcccctctcctctgtccaggcgctgggtggtccatccgcctggtcaccggccactgcctctctcccaaattcctccgagggattcccgaggagtgcgctcggactggggggttgagcaggaactccctcccagtcacccgaggctcctgcgccccgcccgaagccgggggtgcgtggggagtggtgcgcccgcggaagggctccgggacgggaaccccccttggagcctggctcttggaccagccacccgccgtggcccctcagtcggggacgcgggcccccagaagtctggggctctccaggaagcgaagcggatggaagattactcggctcggggtcccgggtccccacccccgccccgcccccgggccgcagcgtcacaaaggccgctggtccccagggcaacccgcggagtgcggagggaggctgggctctgggaagtccgcgcgcggctcc

SEQ ID NO: 25553 - DNA, 545 bp, Homo sapiens
  chr20:62197207-62197752
  hypo
cgcctgctcctcggccaggtcccctactggctctggggcagcctcccagttccccgctgccccagcctgtgtgcctcggggaggccagcgccgtctctgcgccacaccctgctcgacctgctccatggacaggccctcggggcagacactgtgccgctccacgcactcacggatgaagctctcccagagcttgccgcaggccccgaaggagcagagggccacggcgtcccccactaccaccagctgggactgggcgcgggtcaggacggtgttgagcacgcgggcgtcggtgaagaactcaggggccagtgccccagggctgagcaggctctggcaggtgtgcacagtgctgagcaccacgacccggaactgccgccctgcagggggcacgcagtcaggtcaggctgggtgcgcaagacggtgggaccagccccacccctgccgatgccaggctgaggagtgggccgagccacccggggtatcctggggcagctggcagcacctggccccgctggtcacccacctggcaggatctcaaaactgcc

SEQ ID NO: 25554 - DNA, 286 bp, Homo sapiens
  chr20:62314830-62315116
  hypo
cgtacccaggcacgtgcacatgcatgcagagtacgcacacacgcacgcacgcctgcacaaatccacgcatgttgccaagtctctgtgttccagccgtggtgtctgccccccggtgttctctagttcggcttctccgcatttctgtgaatgattccggcttcttggtgttcccagcagaactccctcaagtctgcggcggggctctgacggcggtggcttggctgacatggccacattgctgagcctgttgggggctttgcgttcctgttctggccgtttttggctc

SEQ ID NO: 25555 - DNA, 154 bp, Homo sapiens; identical to SEQ ID NO: 8418
  chr21:33711064-33711218
  hypo

SEQ ID NO: 25556 - DNA, 53 bp, Homo sapiens; identical to SEQ ID NO: 8419
  chr21:34033597-34033650
  hypo

SEQ ID NO: 25557 - DNA, 1452 bp, Homo sapiens
  chr21:36041402-36042854
  binary
cggtgggaagcagacgcgcaatcggggagaagctccagcagtggaggaagagtccagggagtttcagctgggcagaaggggcgcagaggcttggggccaagcggagtttgccctgcgggtcctgcgcaaggccccagtgccccggctaaacctttgccgcaggatcccggagccggcgtccttcaaggagcacagagggccccgtagcacgccccttgcccagcgccaccgacccttaagcagcgtcaaggaaggagtcccgatcaaggacagggatctgcggccatggccgaggccgcggagccggagggggttgccccgggtccccaggggccgccggaggtccccgcgcctctggctgagagacccggagagccaggagccgcgggcggggaggcagaagggccggaggggagcgagggcgcagaggaggcgccgaggggcgccgccgctgtgaaggaggcaggaggcggcgggccagacaggggcccggaggccgaggcgcggggcacgaggggggcgcacggcgagactgaggccgaggagggagccccggagggtgccgaggtgccccaaggaggggaggagacaagcggcgcgcagcaggtggagggggcgagcccgggacgcggcgcgcagggcgagccccgcggggaggctcagagggagcccgaggactctgcggcccccgagaggcaggaggaggcggagcagaggcctgaggtcccggaaggtagcgcgtccggggaggcgggggacagcgtagacgcggagggcccgctgggggacaacatagaagcggagggcccggcgggcgacagcgtagaggcggagggccgggtgggggacagcgtagacgcggaaggtccggcgggggacagcgtagacgcggagggcccgctgggggacaacatacaagccgagggcccggcgggggacagcgtagacgcggagggccgggtgggggacagcgtagacgcggaaggtccggcgggggacagcgtagacgcggagggccgggtgggggacagcgtagaggcgggggacccggcgggggacggcgtagaagcgggggtcccggcgggggacagcgtagaagccgaaggcccggcgggggacagcatggacgccgagggtccggcaggaagggcgcgccgggtctcgggtgagccgcagcaatcgggggacggcagcctctcgccccaggccgaggcaattgaggtcgcagccggggagagtgcggggcgcagccccggtgagctcgcctgggacgcagcggaggaggcggaggtcccgggggtaaaggggtccgaagaagcggcccccggggacgcaagggcagacgctggcgaggacagggtaggggatgggccacagcaggagccgggggaggacgaagagagacgagagcggagcccggaggggccaagggaggaggaagcagcggggggc

SEQ ID NO: 25558 - DNA, 48 bp, Homo sapiens; identical to SEQ ID NO: 8420
  chr21:37718564-37718612
  hypo

SEQ ID NO: 25559 - DNA, 165 bp, Homo sapiens
  chr21:37775049-37775214
  hypo
cgacaggcaagaagctaccggatgtttcacgacgacagcatgaagtctttcttccgtagactgagtttcactcccgacggatctttgcttctcacgccaggtgtgtttcgtagctttggacttaaaggaatgatggccgagtggggatgtctgctcccgttttac

SEQ ID NO: 25560 - DNA, 130 bp, Homo sapiens; identical to SEQ ID NO: 8422
  chr21:38175745-38175875
  hypo

SEQ ID NO: 25561 - DNA, 192 bp, Homo sapiens
  chr21:38638497-38638689
  hypo
cgtgagccaccgcgcgggccagatttttccctttgtaattaaccatcaaggggatgaccatttgagcttgtgtaaataagagcaggcttccctagttgtcttttgcccaaaagttttagcatccatccaagacctttgtctgaaattctgtcccttttgagattactttgcattaatatgaccaaccactgc

SEQ ID NO: 25562 - DNA, 497 bp, Homo sapiens; identical to SEQ ID NO: 8423
  chr21:40762272-40762769
  hypo

SEQ ID NO: 25563 - DNA, 509 bp, Homo sapiens
  chr21:44338162-44338671
  hypo
cgcatagtacacttaggcggaggtatgcggcataagggttagtggtgttcgtacagtaccaggccttttttgacaagacacaattgaggtagcttaagttagaaggagaccaggctccagggggtaaccttggccaccactcagctatggaggcattgactgttagggtttggtgacgggttttcacctacggcgcgatgggttttatcagtccacttgcgggatatgcacaccgtccctcatactgggttggtaagtgtccaggactgcgggcattcctgaggagtgaaagtgagtctggggttttgggatgcctgtaagtaagggggaatgtctatcccgtcccacagccactgttcactcataaagctcccccgcatacccaacaattggacacattcatggtaagcacaatggttctcctagatctacaaacagattttttcctggcttaggaagggatgcatctgcttatagtttttgtataaaggaatggaaatgccgcgggc

SEQ ID NO: 25564 - DNA, 867 bp, Homo sapiens; identical to SEQ ID NO: 24342
  chr21:45148293-45149160
  hyper

SEQ ID NO: 25565 - DNA, 169 bp, Homo sapiens
  chr21:45374905-45375074
  hypo
cgtgaatgtgcatcacggctctatctgtggcccccaaaggctgggtgccagctgcctgtcggcagggagcgtatcaccgtggcacgtccatgccgtgggggtcactcagcagccacggatgcgccctgggtgctgtcccggggccgtctcagaagcaccgcgctggacc

SEQ ID NO: 25566 - DNA, 53 bp, Homo sapiens; identical to SEQ ID NO: 8426
  chr21:45621745-45621798
  hypo

SEQ ID NO: 25567 - DNA, 203 bp, Homo sapiens
  chr21:45656872-45657075
  hypo
cgccccgcagcatgccggccggtgacatcagggctcggttccggtagcggctgtccacgttttccaaggagctgttctgtgggatgtggtaggtcaccacggttttcgactcactggtttgccaatatacgtaaacatcatttaaatcaaaacggcttccttcagggcaagcgcagctgagctccacgtcgctgcctaccatc

SEQ ID NO: 25568 - DNA, 271 bp, Homo sapiens
  chr21:46206052-46206323
  hypo
cgccactctgggcccctgcagcaggcgtgctgccccgctggcatgagtgcaggtgcgcctgcattaacacatgaaacaagcaggttacacatcagttcatgtatatgatctcctgcttctacagaaataaaaagagctgccccgatacaagtatacagccgcacagtccactaatgaggacagcccagactgtgggactcgccatccatctcataactgccttgggggccacattacacacaaacacagattccagaaaccttcagacacc

SEQ ID NO: 25569 - DNA, 184 bp, Homo sapiens
  chr21:46277475-46277659
  hypo
cgcatgattcactgtttttaactacagttaatagctgtgccaccaccacaggtgacaccgtctcacctccaggggctgggagttgaacacttgctgcatgcctgggccctggcaaggaggccgacggccaggcctctggggctcccgcagcctcacccctctgctgccccggacgctgagatcc

SEQ ID NO: 25570 - DNA, 776 bp, Homo sapiens
  chr21:46352115-46352891
  binary
cggggccaccactgagcacgcgctgtgagtaggcgcttcctggagcttttcctgggggtcctcagaaaaacccctgccgtccccattatagagatggggaaactgaggctcaggaaggccagagcttgcccaaaacctgcggtccgcggcgggcagggattccacgctccgagcctggccgcctccctggggcgcgtgaagggagctttccttccccgggaaaggccggggccagagacccgcactcggaccaggcgggggctgcggggccagagtgggctggggagggctgggagggcgtctggggccggctcctccaggctgggggccgccagctccgggaaggcagtcctggcctgcggatggggccgcgcgtggggcccggcggggcggcctcgggaggcgtccaggctgcgggagcgggaggagcggccgtgcgggcgccagcgccgtgggtggaggtcgccgtccctcctgaggggcagccggtgcatttgggacccgggagcagagcccgcgcctccccagcggcctccccgggggtctcaccgggtctcccgagagcggaggccccggctccgcagaaacccggggcggccgcggggaagcagcgccctcaggcgtcggaggagcccccagaaggacctcgcgcctccccgccgggctccgaccgcctgggttcggtgcgggacggcccaggccgccaggacccccaagcgcagctcagtctgcggggcacgacccagaggccagcagcagaggacggggccggggcc

SEQ ID NO: 25571 - DNA, 308 bp, Homo sapiens
  chr21:46359034-46359342
  hypo
cgatgtgtcagctttgtgttcccatgagaacaatgggctccttgaggacaggcattgcatcgtacctgtggtctcttccctaacgccccccagtacgcccagcatagacagcacagggtgcaagcagtcagatgagcagggctcccgttcccagcacgggacccagcccgttacctcgctgctatgtttcccacgtaaacggagcaatacccaattctaaagaactgttctgaggactaaatggaatagtgtaaaaaataaattgacatgaagtgaaggtcaattaaaatgcactagcttggccaggc

SEQ ID NO: 25572 - DNA, 134 bp, Homo sapiens
  chr21:46934012-46934146
  hypo
cggagggagcaggccctcaggttggggaggcgctgggaggaggattctgatggcggtgtgggcctccccagtgacgctctagcccatggcacaggcccagcccacctccacccatcacatcctgctagatctac

SEQ ID NO: 25573 - DNA, 632 bp, Homo sapiens
  chr21:46935349-46935981
  hypo
cgcggggcacagtgcagggacagcatggccaggcagctgccctgagtgtcgccagcacgctgtggccaccgccagagtgcggcacagggcagggggaatcctagggggcctgctagcaggataagcggaggcccccattgctaaggcaggcggccctcgaggcaggggtcgtggggatgcactgagggccgcctgcaaagttaccacaggggcgcccgagagtcactggttcacattctgaacaccgtcgcttggaagacactgcaaacccagcttgctgacaccaggaggatggacagccagctggggacaagtctcatctgcagcctcagggcctgaggcttgggcggagcacagagtgcagggggaaggggttgtcactgggctcaggaattcagctgcctgcggggccggggcctgggccaggtatgggtcgctctgtctctgctccagggaggctggccccacagcccccaggctgtcttctggggaaagcggcgggctctgggctggctgcaggcctccgaggcccttgtcctgcacgctcagtgcctgtgctgccttctcctccgcggcactcctcaggccctgggccgggggctgccgcgggtggtggccccgctggcagtgcc

SEQ ID NO: 25574 - DNA, 232 bp, Homo sapiens
  chr21:47799620-47799852
  hypo
cgagtctgctgccgaacccctctctagtgaatttttttttctgtgattgtatttttcagctccagatgtcaagggagctctatttcagtctttctctctgctgagggccctgcgtgcattgtgccctcagggctctggcgggcggtggacagcctggccctggccttcacccctgctgtgccaagccacatggtcactgcagccggcccaggacctcttgggcctttccagc

SEQ ID NO: 25575 - DNA, 946 bp, Homo sapiens
  chr22:19711088-19712034
  hyper
cgccatgggctccggtgagtctggagtccggtcgggcccccggctgctccctaggccgacccgggttgagaggagctctggtcgtttggctgcagctgggagagacttgggtcagacttagaggggacttccagccggcgtgcggggtggtcagggtggagaggctggcgggctaccgggacgccgggcatcaggggctggatggagccgggccggcagtctgggtactcagagatgtcgcccaggtgcccgccgaccgctcggcttactgcggcgcttcccttgcagggccgcgcggggcgctgagcttactgctcctgctgctggccccgccgagccgcccggccgcaggttgcccggcgccctgtagctgcgcggggacgctcgtggactgcgggcgccgcgggctgacttgggcctcgctgccgaccgccttccctgtcgacacaaccgagctggtgctgaccggcaacaacctgacggcgctgccgccggggctgctggacgcgctgcccgcgctgcgcaccgcacacctgggcgccaacccctggcgctgcgactgccgccttgtgccgctgcgcgcctggctggccggccgccccgagcgtgcgccctaccgcgacctgcgttgcgtggcgcccccagcgctgcgcggccgcctgctgccctatctggccgaggacgagctgcgcgccgcttgcgctcccggcccgctctgctggggggcgctggcggcgcagcttgcgctgctgggccttgggctgctgcacgcgttgctgctggtgctgctgctgtgccgcctgcggaggctgcgggcccgggcccgcgctcgcgccgcagcccggctgtcgctgaccgacccgctggtggccgagcgagccggaaccgacgagtcctgaggagagaaccggtgcgtcctgaggagagaaccggcgctgggcaacac

SEQ ID NO: 25576 - DNA, 132 bp, Homo sapiens
  chr22:19964975-19965107
  hypo
cgcctccggcgctgggagcctacagcactgcccaggggcccgggctcggcctcctggtacctgtcggccccgggcacctccttgtgcacgtggtaggacaggttccgcatgatgcacacgcagttctccacc

SEQ ID NO: 25577 - DNA, 151 bp, Homo sapiens
  chr22:21153882-21154033
  hypo
cgcacaatgccaggtgccccacacgagcctgctgagaacaatgggctgcctctgagagacaggaataggggcgtacttgtcgctctcctgagagatgtagagccggttggacaggctggccaagaacgcctccacaatcactgggtccacc

SEQ ID NO: 25578 - DNA, 489 bp, Homo sapiens
  chr22:21386510-21386999
  binary
cgagccggacccggaacaggagccgcggctctgcgtcggggcgggtgtggcccaggcagccacctggccacagacagacagtggcggctacatacacccccgcccctgcacccgtggccaggctggggtatccgcgcgccaggcggaatgcaggggcgccctgggcccgcacacctccccatgtccgacacgccgctgctgctagagcctgctccgccgcgcccccgtccccggacacctgcgccttcgcctgttcttgggcctgagcccgtcccagtccccgtccccgcaggatctgctgcaacccacctgctgctgccgcagccgctgcctccgctctgagcactgagcccgcccagttcgccggcgccgagcgcagggcccgcccccatcccaggccccccgcgcggccccacccgctgccacacacccagatatttcaccctgcccactctgcccgacctcgcaaggtcgttaccggagctcacc

SEQ ID NO: 25579 - DNA, 201 bp, Homo sapiens; identical to SEQ ID NO: 8436
  chr22:21977477-21977678
  hypo

SEQ ID NO: 25580 - DNA, 261 bp, Homo sapiens
  chr22:22036124-22036385
  hypo
cgtgttcacacatgggtcctcctcttgggtgaggcggggcaggccccacatggcgggaaagccgacctttgcgccgttgtcaatcctgcacctggacgtttgtggggtgtaggtggccagcgctgctccaggggccttgggagccacttcttgccagaagcctgcacaaactggcatggtcagtcctcgttagtggagtgagggctctgctagaccgcaccgcaggagtgcaggcatcttgtgtgcacagcccctgcccac

SEQ ID NO: 25581 - DNA, 821 bp, Homo sapiens; identical to SEQ ID NO: 22889
  chr22:22862472-22863293
  binary

SEQ ID NO: 25582 - DNA, 693 bp, Homo sapiens
  chr22:23800945-23801638
  hypo
cgccctgtggctcctggggagggttcccagagggctgccgggcgaagggagtcctttccaaaacggtttcctgagctctgatgcacacacatgcagctcacccccaagtctagcgttccattagtctaccgttccgttcttcccagcacattcggtgcgcagccgcgaccagtctaaccgtggcacctttccaccggccctgagccctggcgtgcccctccacgacatcccctgggcacggagttgtgtcgacaggtctctgtgactggctgggcatgttttcggggtttgcccgcggggcagcgtgtctcagagtttggctgtacgaagcggtgttgacgggtaaacccggttttgtctctccctccggcggttgagggctggttccgcgttccatctgttagtgatgggatcgtgttgccgtggacgtccgtgccgaggtctgtgtgtggacagcgctcagaccccctggctgcgcgcccgggcgtgtgctgggcccatggactctgcgttcagctctttgaggagccgccggctgtttgcagtggccgcatcacacacgctcccgccagcgacgcggagggtctgattcccctcgacccagcagctcatggtgtttgctctcagtggccgtcggcgcgaggcgggtccgtgtctcgctcagttgaggttcacgtttccccggtgcccggc

SEQ ID NO: 25583 - DNA, 1261 bp, Homo sapiens
  chr22:24180526-24181787
  hyper
cgggaaggatacggtcataaggacgcccccgaagagaaacatgaagacgaagtcggccgtgcggccgcggaaggagccctcttccagcatgcggcagtagcggaacctacggcgtcggtataggaagtgccaccaggcggggcctcagtttccccgtcccggcctctctcccagcccggccggcctgccctccacccagcccgtgtccgcagggcgcaggatacacgaagagcatgttgaagaagaagctgaatcccaggggcccgaagaagaggaagttggtgacgagcctccagacctacgggggacgggcggtcaggtgcggggtgggtgggtcgggcccacaggtgcgcggcgcggggcggcctcacctggaacttccggaacacaaggtgcgggttgaagtagagttgaaaggggctgaggagctccagctgctgtggaaccaggggccagtcaagagctgcccgggagccacgccgtaaccatggcgaccctcacccctcccgccagaggctgtaaccaaggcgacgtccggtccgcccggccgcttaccaccgcggcggtggtgaggacacaggctgcggtgtaagcccgcgtcaccgccggcacctgcaggaactcggccgctagtccctgccacgccattgaaccttctcaagcacgcgtggcccagccagcaacgcgctctttaacccgcctcccagccccgccttcggccaatccgcatccgaggcgctgcgcgccccaggctgaaaagagagcccctgagcccgacagccaatggaaggaagaagagggaaattaggggcggaaagggagagtgggcgggtagaggctggtggccaatgggcaggcgccaaggttgagcacgtggcggttgttgtggctgcggtggtggcgcgggagaacgtgtggccaatgaggaactggtcatttcgcggctttctaggagaggaccagtagcgtggacccacgacaccacgggggcggggctaagatcgtatgggttacaggagcgaagacccgagcaggcgaggcaaaactggaaagggcggggcgcgtgggcggggcgcggagtgtggcggctcagaccgtgctggctcactaactgacgacctagccacaacgttgtcctcgctgccagcccaagacaggcccacctaacccacagcagggaggcattcgggaatgtgtccaaacctccccaaacgtccagggccccactcaaatgtgccggccgctgtcggggttcttcccc

SEQ ID NO: 25584 - DNA, 136 bp, Homo sapiens
  chr22:24560376-24560512
  hypo
cggatccccgtggacgagattgaccggccgggcagctttgcctggcacatgaaccgctccatcgtgctgctgctcaaggtgctggcccagctgcgggaccacagcaccctgctgaaggtgtcctccatgcttcagc

SEQ ID NO: 25585 - DNA, 782 bp, Homo sapiens
  chr22:27053098-27053880
  hyper
cgcccctggtccgcggtcgcgcgcagcccccgcgcctctccagccctgagctctctgcggcctaatgtggacgggcaagcgttgccatgacagcgccgcgggtggggatgcgggaggctgagcgcaccggccagctagcccctttgtgcggcgggggctgcggagtgctccctccaagaccggttgcaccccgctttcctggccaggactctgggcgcgggtaaggaggggttgggtgtgaggttgtaggggcgcaaggaggcgggaggagggtggaggtgagggccgggggtggggcgcctccgcccgccagccgctcccgcattaaaatttcatgggcgctgcagcagctacaaagacgacgccggctgcgctcgcgggaccagagggagggaggctgcggacgagtgcggggaggagtttgagatgggaggcgcttgcaggggctcccccagttctgcgctgtgagccggggcacaaagagccctctgcactagcgccgcaggaccgcggacccgaggtaagacgtcgccccatcctagaagccttccttcccaagtgtccttgtcccctaacggggaacagcctaattccccaaggctggggtcgagggtaggtcccagagtcccagggctgggttcagggatgcaacgccgcctgaagtgtcccgcattggatggatgaagaggctttacagcctgtaattctcaaacacagccaagactctggctgggatggggggtgaggtcaggcaaggggaggatgctttaggagtccagtgc

SEQ ID NO: 25586 - DNA, 485 bp, Homo sapiens
  chr22:29467406-29467891
  hyper
cgcgggctctgggagtggataagggggtggcgcccgggggttgagggggcccaggggcgagtgtacccaaggcgtgccggtcccgcccagccgcgctctgggtgcggcgagtctgcacactggtgcagatgttcccgccgccgcgccgggcgcaggtctgcacttgcaagcccgggaccagggacttgaaagcgcccggcgcgccgcctggacctgccccgccgggcgtcaccgctgcgctttaggcgggaactgtaggaaaatcccctctgcctggcgggagggcgggggaggaggacggcccacgaccgaccccgggtgcggcaggggaagaccttgccggggtcggggcggggggaggcgggcaaagggcctaccacgctggggccgaaagtttaagcaagccgcgcgctctctgatccctaacatcccaggctgtaggataagcagtactgtctcatccatttctggacgttgcgttgggc

SEQ ID NO: 25587 - DNA, 177 bp, Homo sapiens; identical to SEQ ID NO: 8445
  chr22:29733772-29733949
  hypo

SEQ ID NO: 25588 - DNA, 229 bp, Homo sapiens; identical to SEQ ID NO: 24376
  chr22:30084279-30084508
  hypo

SEQ ID NO: 25589 - DNA, 561 bp, Homo sapiens
  chr22:30090282-30090843
  hypo
cgtcaccttaccccagccatgttgccagggcatgaggactaagatgcttgccctgccaagcccggaggggatgagcagcctcagctggtgccgccacagacagcacaccacagaggtggctcagggaccttggtagatgggaatgtgagaatctattaaaataggcagggatctccggtcctctgtcaagaggcaatgctgacggctttttcctgctggcgtgcctctgcccaccagccttccccttgcacatcctcatttgtcacctcctaatttgaattattgggcaaatctggccgcttatttgggactgacagccaacttcttgagcatctatttgaacagccttccctttcgctcccagccacctttgaggtgagtccaagtggcaggacaggaccctgtgtgacagagcggaggtcttgtgccctctcagcttcttctctgctttcttacagctcaccttgcagagcgccaagtcccgagtggccttctttgaagagctctagcaggtgacccagccaccccaggacctgccacttctcctgctaccgggaccgc

SEQ ID NO: 25590 - DNA, 674 bp, Homo sapiens
  chr22:30091074-30091748
  hypo
cgtccaaggcaccggtgtgtgtgtgtcttgcactccagagctgacctccaccgcccagcctgggaagtcattgtagggagtgagacactgaagccctgagaagccagtgccatcatccccaccccgcccagggttccggaacattcattcccccaccggtgaggacctggcatgcagcgaagcagcccagcccggcggatcccaggccagcacgcctgccggcttctcatcgtcagggagcccgcccagagctcgtgacgagcaagtgctgggtccccgccaggcaccccgaggcggcgctctggctggcagctggtggggaataggcagggcagctgtggctggggagagactttaggcagaagctgtgatgcaggctgactgccagccgaggggctgggtagtgccgtgcgggagctgatggtacagggcactcgctgtccccctccggccaccctagaccagggtccgagaggcaggcaggagccactcatgtcttccccattgcccgacgcccatagacgctccttcctgtgtggggctggggtactccctggtcgtactgcagtcagcacccgtaacccggctatgaccagggatctgtaagccctgtggctccacaggtgctgcttctcactggcccagactctgagctccaccggcccagtctgcac

SEQ ID NO: 25591 - DNA, 254 bp, Homo sapiens; identical to SEQ ID NO: 8452
  chr22:30190745-30190999
  hypo

SEQ ID NO: 25592 - DNA, 772 bp, Homo sapiens
  chr22:38220591-38221363
  hyper
cgttcacacccttaatccccgccacgtcccccacggttcacaggaggcgcactgggccgcagggcccgggcgcgggacgtggcgcgggcccctgcgggagggcacctgcccgccccgctgaccaggcgccctccgcaggtacctggccgtgcggcacccgctgcgctcgcgcgccctgcgcacgccgcgtaacgcccgcgccgcagtggggctggtgtggctgctggcggcgctcttctcggcgccctacctcagctactacggcaccgtgcgctacggcgcgctggagctctgcgtgcccgcctgggaggacgcgcgccgccgcgccctggacgtggccaccttcgctgccggctacctgctgcccgtggctgtggtgagcctggcctacgggcgcacgctgcgcttcctgtgggccgccgtgggtcccgcgggcgcggcggcggccgaggcgcggcggagggcgacgggccgcgcggggcgcgccatgctggcggtggccgcgctctacgcgctctgctggggtccgcaccacgcgctcatcctgtgcttctggtacggccgcttcgccttcagcccggccacctacgcctgccgcctggcctcacactgcctggcctacgccaactcctgcctcaacccgctcgtctacgcgctcgcctcgcgccacttccgcgcgcgcttccgccgcctgtggccgtgcggccgccgacgccgccaccgtgcccgccgcgccttgcgtcgcgtccgccccgcgtcctcgggcccaccc

SEQ ID NO: 25593 - DNA, 767 bp, Homo sapiens
  chr22:38434385-38435152
  hypo
cgggcccaggcaggtggaagccatggctctggccgggtcacagggcggctggggtttgacctggcggccatgatgggctctggacccaggagccacccgggcacaggatgggacgggttgagagattggtcgtccaggcgttgagtgtgccctcgctcctccccaccttccgccgtggccttgagccccttgcgcccgcgcccatggggttaaatctctccctgtctctctctgctccaagttgttttccaagtgaggcagagaatggttctcttgttaccaacatggcttctgggcattgggtaatgcgctccctcttctcccgcagcgccacaaagggaccttttgttcccctccctgcccctctcgctggctcttcccggccccccacccacccaaactccctcctccccccgccggcgcccgcaccccggggctgcgcgctgaccgtggcggccgcggcgccctccctctcccagcgcctgcactggcggccgccatcttgcgagcggccctcagggcggcctgggctttcccagggttctcggggccggggcagtcgtagggggcggctggggctccacaggacgttcgtgacccaccttgcgccccccagggagtggcaggaccctcccgtccccagcctccgcgccaggcctcgtccctgcatgggacaagaggcagccctccgccatttcccgcggcccttgcctcccgggagcggctcccctctgacgactgagtggactgcgcttgagggggccgcc

SEQ ID NO: 25594 - DNA, 153 bp, Homo sapiens
  chr22:39756871-39757024
  hypo
cgaggctgtcgcccctgctggggtgtacgcttggagggcgagaactgcatctgtcatagccccaggactagattgcttccaggcatctccttagggccccaactatggatggacgtggcgggaactgcactgatcggtcgtccttctagccac

SEQ ID NO: 25595 - DNA, 773 bp, Homo sapiens
  chr22:41656931-41657704
  hypo
cgatcggggactcagcaatgtcctgcggggatggggagaggagagtggaagaggagtggggataaggtcacctgagagcacgtcatttggcacctgagccctgcggctgcccctgcctatctccctgtcttggaggtctggtatgttccttctctgtgccccacaccagtggctgggccaggctactgtcagcactcgcaccatctcacttcaccacttctgagcctggcagatgacactccttggtcagagtggcctgcctggcctgaagccccataggggctggctcaccagtgggagccagtcacacacctttccggaaagtcacacacctttccagaaatgcacgacaggaattctggctcattttcggatgggttaacaggcttggagagggcacgtgacgccccaggtctcttggttgagtgccagccctgggattagcatccagaactgtcagcctactatgccgagtgcacctcaaggctgcaggggcaggatggacagaaaccactcaccctaaaagcttctgccaaggcagtggcgccatcattctccagacggtttctgccagccacaaagaccttcagggccagaggcttgccttgggcactggatttccggtgacattcggtcagagctgcagccaggatctgtggggaaaggcaaggggccctggtcatgggcaggagccccttctcccagcggggtggccactgctgctgaactgctcttcaacatcccacgccacccatcggtgcaggtcaggggac

SEQ ID NO: 25596 - DNA, 69 bp, Homo sapiens; identical to SEQ ID NO: 8457
  chr22:41658279-41658348
  hypo

SEQ ID NO: 25597 - DNA, 449 bp, Homo sapiens
  chr22:41667782-41668231
  hypo
cgcccgtcaagacctcactcctcacttgcacactgctgcagcagcagagagaacccctctggcatcagcactacgcccggaacactgggccatcaagggcagatcccaccctgcccctgccctgggctgcttcctgcacagaggagggcctaggaggtggtgtgcagtgattcactcgagccactgcatctgtagcaggcgggaaggtgcatgcagcactcctaccggccaggctctcccaggacaacctctgaggaagaaggaagggctctatctcctatttcatataagagcccagcctcagagctgcacgcagggcaaggccacgtacggcaaacaaggtggtgctgttagggcttgatcccatgtgccgaaagcaagctcagctcctgctgagtcctgtagccttcaggcccatggctccttcattcctgttcttcacaggtctc

SEQ ID NO: 25598 - DNA, 450 bp, Homo sapiens; identical to SEQ ID NO: 23217
  chr22:42353588-42354038
  hyper

SEQ ID NO: 25599 - DNA, 794 bp, Homo sapiens; identical to SEQ ID NO: 23218
  chr22:42679388-42680182
  hyper

SEQ ID NO: 25600 - DNA, 112 bp, Homo sapiens
  chr22:42995235-42995347
  hypo
cgtttataaaactaagggaatggactagttccagctctgaaaatcttacggcccaaacaaagaaatatttctgcattgaaaggctctattcacgccgggcgcagtggcttac

SEQ ID NO: 25601 - DNA, 141 bp, Homo sapiens; identical to SEQ ID NO: 7312
  chr22:43351254-43351395
  hypo

SEQ ID NO: 25602 - DNA, 332 bp, Homo sapiens
  chr22:44564151-44564483
  hypo
cggtaagtgtcattagccatgtcccccaaccggttcttagacatgtcctgatgcagatccaggaggggctgtgggagtgtctctgttcttgtcaccccaggtgcctgtccccgcagggtgtcagcccgcgccaggagctctcacaaaacctgtgtgtctggggaggcactgcccagagcgtcctggacatggtggtggccagtctttaaggggaagcgctgtgtgtggatgcggcagctggtgtcatgctggagacgtggcttctgagagtacctaccgcaatgacaggaggatggcacgcctctgaagtttctctgtttccttctgcagac

SEQ ID NO: 25603 - DNA, 247 bp, Homo sapiens
  chr22:45075627-45075874
  hypo
cgctctgggacactcagtctgatggggcaggctggtcagaagacatagagccatggtgtgtttggaactttcacagagggaagcctggggctcgggaagcccggaaaagatgccggcgcagcctgagggcttgtacaggtgccactgtgccgaagggtggctacgagggaggcaggtgtatgggtgagggtgagtgcagtgtggctggaggcttagggaaaggtgagtaggacggcgagagacccac

SEQ ID NO: 25604 - DNA, 135 bp, Homo sapiens
  chr22:45088617-45088752
  hypo
cgggagtccgtcccgctctgccgcctgccctgaggagcctcagtctgcaggtctgcagagcggggatgttccccgggcctgcctggcagggcggctgcaaacacgaaggttcggaagtgcacgagctctcagcac

SEQ ID NO: 25605 - DNA, 234 bp, Homo sapiens
  chr22:45120602-45120836
  hypo
cgagcctctcttgcctcccctgtaataaaaggggaaccccggtgaatgcctgcggctgggttggtgaagactgaatgagcttctctggaataaagagtaaacacttgggaagaagctctgcaggcggagagaggaggagcccgtggcatccgggatttggacaggtggaaggcaggagcaaaccaagtgttgcaggcccagccctgccaggtgtctctccagaaggtgtgagac

SEQ ID NO: 25606 - DNA, 1063 bp, Homo sapiens
  chr22:45592910-45593973
  hypo
cggccccgggagtcgagtggcctcgcctggctgcggctccagcactggcgtgccatcgcagaccccggtggcggtggacaggtaggcacttggcagcactccgagggctgggcccggccggggctctgcgcaggctccgcacgcggctaggtcatcaggatgggcttctgccgaacttccaggatgtctagggccggcaggagggaagcaggtgaaacagtaaccctcaacagcggtgagtgctatggtcacggcagtgccacttctgaaggaagcccgcctcagccactcatgcatctcctctccaggcctcacagactgcagaggagacgtgtctccaccatcctcaccctgcagactgggaaatgggctcgcagcaacggcacaccctgcagggcctcaggtgcaagctggtgtgggggccagagccactgcctgtcacagctgctgcaggcctgggtcagcgaggtggcctgagagcctcccctcgcccgtgagtaacacacacctgggcatctgtggccactcaagaggggacagcaggtgcgccagaaaggtgaacaaagggaggacttcagctctgggaaagctacggctccacccaaagtctgagacaaagaggccaagagccctgcaaagaaacccaaccaaccgacaggacagggcgggatgactccgggtggctcacaagtaccaaggccctggaggcagagctggctgtgagaaggtgcggctgcttccccacatccgccagcattacctgttaaaatccgatgcagcggcaacgtgacgtaggttaagtgtgcatagagaaggaagtttccatctgctctgttcagcttcagccaggacccgaccagggaccgtcctgtgcccgacagggaccgagaccgcaggttggttgcattgtgcagatcggctggaggaaagaaggccaggtcaaggcccccacagcatgggacgcggcgggagcagcaggaggccagctcccagtccaggctgaggccaaactctgctgaggccaggacgctccttaccaacacccccacaccagcacccacac

SEQ ID NO: 25607 - DNA, 553 bp, Homo sapiens
  chr22:45603889-45604442
  hypo
cgatcacacggctgttcggggcagcaccacagcacaggcaggcgaaagagcaggttccccatcagaaaggtgtccgtgtgcgcaccaaagccaggcccaagaggacactgggagctgcccggtacccactgacaggagggtggccaggccgccatggtacactctgcaggcattacacagcagtgagaccagattacaaccacctgtgtcaacaggcatgactcacaaacatgacatgcggagaaagaagcctgaaacaacatatactgcccgattccaatgtatgagctgtgagaacaggcagaaccaccgactccacacacatgagctgtgagaacaggcagaaccaccgactccacatgcacgagctgtaagaacaggtagaacccgccaactccacacacacgagctgtgagaacaggcagaacccaactccacacgcaggagctgtgagaacaggcagaaccaccgactccacacgcacgagctgtaagaacaggcagaacccaccgactccacatgcaggagctgtgagaacaggcagaacccgccc

SEQ ID NO: 25608 - DNA, 463 bp, Homo sapiens; identical to SEQ ID NO: 8468
  chr22:46255154-46255617
  hypo

SEQ ID NO: 25609 - DNA, 447 bp, Homo sapiens; identical to SEQ ID NO: 8469
  chr22:46261704-46262151
  hypo

SEQ ID NO: 25610 - DNA, 633 bp, Homo sapiens; identical to SEQ ID NO: 8470
  chr22:46704062-46704695
  hypo

SEQ ID NO: 25611 - DNA, 435 bp, Homo sapiens
  chr22:48027392-48027827
  hypo
cggcttccacagattggacgaggcccacccaccttggggaggggccagctgctgtgttcagtccgccattgcaaacacgaagctcttccagaaacgccctcacagacaccccggaagtcacgtacccactctgtaggtgccccggggcacaggcaagcggacgagccagttatccctcagagctcctgctgcctcgcccgctttctctcggaaacgtgaagtgtggcctcagctgaaagtgaggtgagcgtgagtgtggacatgtgtcagtgtgcgtgtgcatgggaggagtgtgtgtgcgcttgatgacgatgatggagcccagtgagccaccgtccgtggagtgtcagagcctcctaggatggccacgccgaaggtgcggaaggaggcggctggcccagcgtcagacgtttccagcatccgcgggagtgaaac

SEQ ID NO: 25612 - DNA, 291 bp, Homo sapiens
  chr22:49967872-49968163
  hypo
cgctccccagacgccggagcacccacggccagcgggtggacacggtgtccacatggtgcacactcttgcccttgagcctgtgggagggaagccaggaagatatggacggagcaaggggagcacgggagcctcggggcctgcggggggccaggcagcagctgccctcacagttgcacggtacagtttgcagaacacaccctcctgccctgtggaagcttccaggctcccgggcaggtcgctgaaggatcctcttcctggcccctggagtccacaggtgcgacatcccgtccc

SEQ ID NO: 25613 - DNA, 688 bp, Homo sapiens
  chr22:50010096-50010784
  hypo
cgggcacggcccccactggcttcagagctcctcgcagcctgcgccagcgcagagcaggacgggaaacagccccgggagcagaaggtcccagcagcggaattcccctccacttggaccaggcctgcgggagatccgggcactgacaggcggggacattttagaatcttttcaagaaaagataaagaaagaaacaagagtaacaggaggccagaagcaagggcatctactgcagacagcggtgccgcggggctggagctgaagctacccaaggagccccaggctcgggagcctccaggcacaggcgccgtcgggagcctccaggcacaggcagcgtcgggagccaccaggcagaggcagtgttgggagcctccaggcacaggcggcgtcgggagcctccaggcagagacagcgtcgggtggcagggagcccctcagactgtccctgtcccagtggtctccagcccccgactgcactcgactctgcggttctcacccctctgccatcccagaggaaggggcatccctgcgactttccatccactaccctggcctggaccactcaactccagggacttcctccaccacccagacgcctccctgagcccaacccggttgtccctacccataactgacatcagggcaccttccaggccccgaagttgtctctgaggccccagcttcaacacgtc

SEQ ID NO: 25614 - DNA, 351 bp, Homo sapiens
  chr22:50191356-50191707
  hypo
cggaccatgctgatagggagctggcaacacagagcaggacagagtctgctagaaagagcgtcttccacctcctccggacacggcgccagttcttaccgtcttcccaggagaaaggccgccgcggtgccgcagcaggccgctcaggcaggtgcatccccgaggcctcttccaagccgatgctgtccacctcgcgccgggcctgcctcagaacaacacctccctgatcgcgcagcctcaccgcggctctatagaacacggtgtccctggcattgtacttcatgcagttatctataatgagatcaaaatcctcctcaaactcatggaggtttttatacccttgagcttctaacc

SEQ ID NO: 25615 - DNA, 256 bp, Homo sapiens
  chr22:50466785-50467041
  hypo
cgtggggactggggagtcattggtgtctgggaggccacgtcactggccttcctgagtgatccccacacctgggaatgtgccctgcgggccatagccgcgggattgctgcaggaggaacttcgcctcccgtggggcaagaggcatctccgtgagtgggtcccagcccctgaatcgcagtgggaatcagggaggcggcaacacctgcgtgccgtcataaagacccccaccatgccctcgtaaagacccccatcacacc

SEQ ID NO: 25616 - DNA, 458 bp, Homo sapiens
  chr22:50529538-50529996
  hypo
cgtgttcagggcctctggatccacgagggccgatgcccggggggccggctgtgttacctggagcacttgctccgtggatctcttcggtagaacacgcgctcagcggtagctggagctccagctcttggcagcgctcagatcctatgcctgtactgtaaccgtcgccccaggttcctcccgtggctgggaagctgcagtaaaggcacgttcaggactcaggaccgtggctgcagcagtggccagacggctgagggcgtgcgctgctcctgggccagacttgtctgcccagccccgaaccttttccagcaccgtgtttgttgagattctccagtcttccgaggctgctgctgatggtaataaaaagataatcgatagtactaataaaaccgtgcatgctaatgactcccagatgctgatataagtggccatttacatagcacttaacgcgtgtcagccac

SEQ ID NO: 25617 - DNA, 58 bp, Homo sapiens; identical to SEQ ID NO: 8478
  chr3:10011425-10011483
  hypo

SEQ ID NO: 25618 - DNA, 148 bp, Homo sapiens; identical to SEQ ID NO: 24390
  chr3:101230942-101231090
  hypo

SEQ ID NO: 25619 - DNA, 858 bp, Homo sapiens
  chr3:10206343-10207201
  hyper
cgcatgatgcatggtgtagtgccgatggaagtggggtcagaaggcctcctgccgctgcggcagaattcccgtgtggccttctcccaccagggcctcagtttcccctcgcagttccgattctctggccggcgctggggtggagccggcggggccgtcgtgccgcccgtggccgctggggacgctggtgccctcccgccccgcccacttccccgccggtccgcccctggctagagaagccgcagcccgcagtgtccgacccagtcgtcccgcgccggagccggccccgtagcgtgccatggcctgctacatctaccagctgccctcctgggtgctggacgacctgtgccgcaacatggacgcgctcagcgagtgggactggatggagttcggtgagtgcggcccggggaggggaggggaccagggcgaccggagcccccagcgatcccgcctggagcggccgccaagctccctcgggcacccgggttcagcgggtcccgatccgagggcgtgcgagctgagcctcctggaccgggtccgccgcggacctcggcctgtcacctgaaggtgccgcgtggtctctgaggacgtctgtcgacgagcaggggccgccgccactgcgctctgagtccagagaacggtgggtacgggggccctcctgtcagcgctgctggctcggtgacgtccccaggtggcctctcatccagcccacaacagcctgcaaagtgcgagcctcgaccctgtagggacccacggtgctgtcacttcttgggggggtgtgtgtgtgtgtgtgtgtggtgtgtttagttttagtgtatattagaaggatctatgatttaacatatatatatatattgaaac

SEQ ID NO: 25620 - DNA, 735 bp, Homo sapiens
  chr3:124773635-124774370
  binary
cgcaaagagacagcagtcccaaggtcataatggtattatggttagaattccactcagtatgtggcatatttttccagatcataagaaagaactggacacaaaggtagcagggagaagaggtcagttccttctctctgcgtgggacaggcggtggctaccacggagcaacagttcattgggaaaggaaaggggagggaggaggctcagggatggtcctgtatcagcctgtgccttgcaggggttcaaccatgcaaccccaaccgcgttcctttgcttttaagtcgaaccagtagagcgttttgtttcaaactacgtacatcctttgtcctttacaatatcccgtcctagaaccccttaaaaatcagttatttagatgagaaagtcgagccctgtacctggagaggccagttctgtatagcggaaaaaatgaaactggggaccggctggccagatatcggaggtgggagagatgctttgcagtctttttccctttcctttccattttttttaaagtggggtggaagagatacagggtaccccataggaaataagttttcttccaaagggttggaggagaacgggatagtcacacccctcagtccagccaactgcgaaagcgtccctccctacccgccgaccctcagggtcccgcacacgccgggcgaggagcccccaccctgggtcgcgccgcgcggaggggcctacggctggggatgcagcccggggcgcgcccac

SEQ ID NO: 25621 - DNA, 488 bp, Homo sapiens
  chr3:126113474-126113962
  hyper
cgtggcgaataaaccaatcaggatgaaaggagccaacccaagtgcggagtgttgaacctcagaggaagaaacccgcgttcaccaggcccaggcctgggccaggcgctgtcctggcggcgtcagggaggacatcgtgcccagagctcggacccagcagcccggccccgcgccctccctgtcccgcggcccgcaggcccagccctcaagcgcccagcctccgcggcctttgtggcgtcacagccagcctgaagaatggttgccttggagacgtaaacccaagagccctgctcctggagctgagaactgcagcgcggaggcttcggagcgagccggggcagtcggggtcggtgggtgcgctcgcggtccggggagagggggcgcgcggggtccgtgagggcgcgtgggggcggcggcaggggtgcgaaaccagggcccgaggggcgcgcgtggccgggagcggacttgcaaggcgccttccaaggctgccc

SEQ ID NO: 25622 - DNA, 184 bp, Homo sapiens
  chr3:127395778-127395962
  hypo
cgcaggccctcatcctccccactgcccccaggccgcctggacattggcgtagagcatgtgagtgactgtgagcgcctggccaagcaatgccagctgtgggacctgctcagcgacctggaggccaagtgcgagaaggtgtctgagtttggtgcgagcagggtttggggcccggggccatgggtgc

SEQ ID NO: 25623 - DNA, 1002 bp, Homo sapiens
  chr3:127794271-127795273
  binary
cggtacacgcctttggcaattttgcatcaaaaaactaagtgtatgcacattttttttaattgaaagcccaactcagccttcccccactgctccttccccgcatgcacggggggacacacgccttcctccctgcctgccgggacttcaacctcgcttgctgggaagtcgcgcactttcgtcgcgacttcccaagtcgtgctgggtgtgacttggaatctcggatccctgggctaggcctggccacgcccccatggggggaggggcagcgcggcgggggcggagcctgggcccgaaacgccacgggcgcgactctgtgcgcgtccgcccacacgggggcgctgtgtcctcgcaagctcccgcggggtgcctcgcggccctggaacgctgtggttttcgaggggaaaagtgagagtggctggtcctgcctccgctgccgcttggccctgagatccccactgcccacgggataggccccagtccacccagccggggccccccccttcccctcgtctcgctctccttggcagttcggacttcgggtcagtcccacactcgcgcccggctgtccctgctgcgctcctgtcactggcattgggaagccctccggccccctctctgcacacctggcacacggctcctccctggcggcatgtgggtatttgggttgggcgagcctctccctcccgattcccgagttccgagtgggtcccggcggaccagcgctattctggaggggcagtgcctcagaggcaggtcgcttcgagtggggatttgtgcgctctggcgcggaggaggggggtgggaagccggctcttgccctcctcacccggtggggagcgagcagggccaacggtgcgctgagagcgctcagggcgtccccaacagcatgacccgacccagggacgaagctctgggggacgggaccacttgcgatgacagctaaaggagcacaggggggcggccggcatggagaggcggggccggcattcctgcgggcctgcc

SEQ ID NO: 25624 - DNA, 130 bp, Homo sapiens; identical to SEQ ID NO: 8485
  chr3:129231161-129231291
  hypo

SEQ ID NO: 25625 - DNA, 1542 bp, Homo sapiens
  chr3:129693123-129694665
  binary
cgcccgtctgcgttctacattggttctgcggccgtgtccctttcgtgtgtgtctgccctgtgtttctccgtcgtctccgtgtggatctcggtctttgtctcgccctctagctctctcgtgcgcctgtgtttaatcgtgcgcttctctcaatctctctgtccctccctttgccccctacacgcgtgttctcgtcaacagatctccagaggtggtgcagaaacgaccccgcgccggcgccccatcctgcggccagtgcctccgcgccccggctccggtccccaccgtccccgccccagatttccggaggagcaggcgggcggggtcccgcggggccggctgccgtcagcgccccttcccggcggccgcgacccctccccgctgacctcactcgagccgccgcctggcgcagatataagcggcggcccatctgaagagggctcggcaggcgcccggggtcctcagcgctgcagactcctgacctgccgactgcggatcccgagtccccggatcccggacccatcctgtggagcccactcctggcaggtaaccgccccaacccctctccttccgcagacggtgtccgggagcactggaaagggagccctctcggcccgccctcaccttcggttctctgagagcttcctggagaacagggccggtgcacaggcgggcgctgtgctcgcacccccgggtcctccccgagcgcaggccggggacccgacgggaggcacggcgcgggcacatcggaggctctcgctgctgggcactcaggtcgccagagtccgcagcgcggggtgggagctccgcggcaccccctgcctgggtgccgccggacagagctgggtattcagggcgtcggcctgagaacctgggagttcgaatcccaatctcaacgctagaaatagaattttagcgttgaagttaggattttagcgttagaatcagattcctggcttagtcatgaaagcttagcattagaaatagaatcttagctttgcaaatagactttgagctttagaacctgaatcttagcgatagaaatgggatcttcgcgttggaatgaggacgtcggccacggagcttggagttagaacgtggcgatggggacctttgggggagtcttggcggggacgcaaccgttagcgtcgcggctgtgcctggcgctgcaatctcaatggttgcactcccggcgaggcagtcccagcgttggcttccccagttccgcgtcacattgaagggtggcggtggcgctggcgatggggttcctacggcctcctgccttgcgcaagcagaactgggcgcaggcactacaggcacccgtgggggcgaggacgcctagaggtgacaggtgtggacgcagagccggggcgaacccgccgctgctcccgcccctgcacgaggggcagtggtcctgcttctgggagggcggttgaactgtgcgtggtttgtttctggcgggcgtcgggggagatggagcgggatgtgctgtgattcggtgcgctcaggctccctctgtcccctaacccagacgccgcgatgccc

SEQ ID NO: 25626 - DNA, 370 bp, Homo sapiens
  chr3:12976966-12977336
  hypo
cgatgcggtagtgcctcttgcggatgacatcgttgctaaaggcaggcgagtcccagctgttgcgggcctccttgtggtaggtctgcttgctgagcgtctgctcccgcaggctgtcacgggacgatgactcggagctgcagttgatggtatcgttggagttggacgtgctgttgatgctgtcattgtcaccgtctgagtagtccgactcagacttgctctgccggttggctgagccattgatggccaagtggctgtccaggggcctggggggccggggccgcaactcaggctcctcccgggggaggctcttgggggcgccgctgtggggaccatgcttgggactgccctgctgcccgccaaggctgcgctc

SEQ ID NO: 25627 - DNA, 216 bp, Homo sapiens; identical to SEQ ID NO: 7334
  chr3:130424529-130424745
  hypo

SEQ ID NO: 25628 - DNA, 506 bp, Homo sapiens
  chr3:131080684-131081190
  hyper
cggcaccgcccacgctcggattggtccgaggtgagattcgcccttgtgccctcgtaggccttcggaacagcggaagagcagtgtcgggccatggccagggcccgcaggctggagctggccgaggccctggcgctggggccaggctagaggcatgcctgctatgcgctcctgcacgcgccggaccctggaattctctctggccgcctccctctgcgctacgccatactggtgaggagggcgcgcgcccggccactctccgctctggccttgcaccttccttgcggcgctactctcgggtgtccctgccaatcccagcttcctcctctctcagatgcagatgcgctttgatgggcgcctgggcttccctggcggattcgtggactcgcaagacagcagcctggaggacgggctgaaccgtggtctgctggaactgctgggcgaggcggcggccgccttccgcgtggagcgccctgactaccgcagctctcacgccggatcaaggccac

SEQ ID NO: 25629 - DNA, 894 bp, Homo sapiens
  chr3:136537591-136538485
  hyper
cggaccacgattttccgatgctggacacatatttaaacatgaaggaatagacttgcgacttttaagcgcaaacaatgggtggaaatggacagaaactgcctccgtgcccacttgcagcggactacgtagccctggcagacaggcaattgcttcaaacaagcgccctccaagggcgtaagctagaggggcccgggcgggcgctttcccgtggaccctcccacctcgcgggtagaggaagtccttcagttcaggcacaaccctgagcgtcccccgcagtctccaactccggcgccagtcaggttgtggggtgggggcggcggagggcggagagcgcaggcgcagagtccgcgcggcggcgcccctctccctccgcagtactccgggcagcgcccgcctcgattttcccaggcgagggcacgcccgcgtcagtcgcctccggggcaccttcctcgccacgacacgcaggtaaccgggccccgggagccggtcggcggcggcggactgggaccttgatcctgcctgcccggccgcccgacaagggaatgagagcggaccccgaactccacacacccgcgtttagccgccacacctaaggggcacaacagtctttttgggtaagggccgggctgggggcgacgcgccccgcccgctttgcagacttcggggtgctctgcacgacgcctgaaaggccgcggggcccgcatttctctgtgctgccctcctggagaaccgggacacggggacgggagggccagcatcggctacggcccggtttcccgtttctttccgctgtcgcgtgtctgggccctcctgcagcgtccatgatgaaggccaggggctgttgctttcctctcgcccagtagccaacccaagcaaggggtgagtcactgtggc

SEQ ID NO: 25630 - DNA, 415 bp, Homo sapiens
  chr3:138679163-138679578
  binary
cgtatgtgttcatggatagtgaggcagtagcatgaagaggcgggaaattcaggatgggagagggctgcaggacaaagactgcgggcagtccggccgggttcctgggtggaggaaggaaggcacgtttcccggtgttgttccaggcctgacgggtgttcagggtgtaggactcagggtgtaggacgagcgtggcgcgtccctccggaccggaagcggggctcaccccagcgacggggggcttcctcactttcgtaccgcgctccttccccgcagaggcccgccggaagcggcagccggcgatggggaccagggcccgggacaggcgggtgatgtctttcctggaggcagcgatgcaggaagcccgcggggagccccggcttcgccgctcggggttcaggtgcacgggcacagacgc

SEQ ID NO: 25631 - DNA, 506 bp, Homo sapiens; identical to SEQ ID NO: 24405
  chr3:141174173-141174679
  hypo

SEQ ID NO: 25632 - DNA, 81 bp, Homo sapiens; identical to SEQ ID NO: 8493
  chr3:141495392-141495473
  hypo

SEQ ID NO: 25633 - DNA, 152 bp, Homo sapiens; identical to SEQ ID NO: 24406
  chr3:142537613-142537765
  hypo

SEQ ID NO: 25634 - DNA, 2468 bp, Homo sapiens
  chr3:142837817-142840285
  binary
cgggacaagtatttttctgcaaattagaacggggcgttcccctcccccatcaccccaattccagaggacgtcaatcacagtggacgcagcaccgcgagcggaaatgcggagagcatcggggctccgcatgtggggcacaatgaaacaagagcagccccggccagaggtccagtaaagcggaaagacggtcccgcccgcacacccctccggaaaactgaagcgtctcctctgacccccaaggtcagaaagatttattacttccttcgagagggcgcagccacagacccactagagagggcgggcagggtgtcggaagccagagaacggcgctccgcgtcctcccaccgctccagggcgcagaggtgtcctcagtgcccggagaggttggcagtgtcggccccgagggaagcgtggagcggacggccgacaggggatttctgcccaaacttcatcaccaactctttctgagagcaaaaacatggggccgagtccggcagctgcacgcagaatccaactctctggcagctctcggcaccgacgagctccagatcccgcgttcgcatcccggcgctttgcgcgcagagctaagccttcggacccgtggactgcagcccccgcgcgtcgcggtaaagcgggtcgcgtctccagcccccgaggcgcagcgacggtgggagccggctcggcgttgggggcgggggcggggccggcgaagggggagggctgcgcggcggaggggaggagccgcggcgacagacggcggcgcgcaccaaccgggcgccggctggcaggagccgcgcagaggctggtccgagcgcgttgcgggcgcccggcgtaaggggagtcgggtagcagcatcctcctgggcgccgctttcgcgcggcggcggcggctgcggcggggtctttctttgcttaaatacctcgttggccagaagcgctggtaccgggggcgggttgggtcgggtcgggcagtgctgcacacctgggtttccttgcctagagctgtgtgttcggggtcctttggtccagtcggaggctgcggagcggcgggggttgcctgcgctgtccgcccgggcatcctcccggtgatggaagcagccgccgccgccgctgcggggtcgcgctgtgccccatccaccgctgccagagaggtgggaaaattcgccgcacggaggccgaaagcgagaggggctgcgccgctatgccgggagctgagtcccatataagccgcccccagccatcgcccccagccggcttcgttcccctgagcgagacaggaagctgcggtcccgagaaagcggaggagacgtcgctggagccgggaggcgccgggttcggcggagcgcggagcggggctctgggccgcgtgaaagtttttcttcccgagccgcagggcgcccgctgcccggaaactgcccagggataagtcggccgactccccagacccctcgaaggtgcggggacccccagcggaagcgagagggagcgaaatcgaggaacgagtgacagccggacagtccgccgggcggtgatccggggccgctcccgggcgcgccctcggctccaggtgagcggaggaaccgggcagaaccgagggtgggcgttacttaggaggaggaggctgggagggagattggggcgcatccgctcactccgcttcccctcgcaggtcctacccggagccgctgccatgggagagccagccttgggcgctggggaccagccgccgcgcccgcctcggagtcgcggcccgagtcccggcgccagcagccagcccgctgcgtccccttcccgggctgcagggctgcctccgccgcgccgccggcccggattgtgcctgtgatgagccgcagcccgcagcgagctctgcccccgggcgcgctccctcggctgctccaggctgcgcctgcagccgcgccgcgtgccctgctcccgcagtggccccggcgcccaggacgccgctggcccgcgtcccctctcggaatgaaggtgttccgtaggaaggcgctggtgttgtgcgcgggctatgcactgctgctggtgctcactatgctcaacctcctggactacaagtggcacaaggagccgctgcagcagtgcaaccccgatgggccgctgggtgccgcagcgggggcagccggaggcagctgggggcgcccagggccgcctccggccgggccgccccgtgctcatgcccgtttggacctccgcactccttaccgccctcccgctgccgccgtcggggcggctcctgcagccgcggcagggatggcgggggttgcggcccctccaggcaatggcactcggggcaccgggggcgtcggggacaagcggcagctggtgtacgtgttcaccacgtggcgctctggctcgtcgttcttcggcgagctattcaaccagaatcccgaggtgttctttctctacgagccagtgtggcatgtatggcaaaaactgtatccgggggacgcc

SEQ ID NO: 25635 - DNA, 744 bp, Homo sapiens; identical to SEQ ID NO: 24407
  chr3:142895557-142896301
  hypo

SEQ ID NO: 25636 - DNA, 258 bp, Homo sapiens
  chr3:147078974-147079232
  hyper
cgttgttctcgggggaaccaaaataggggttgagattctggtctctacaagcctttcaagcgccttcaactttggcggcggcagcagcaggttgcgttgccatggatactgtactgtatggctgtggcggcggccacggcggccgcagctcgaatcccctaaacaatgccgagccaagtgcaggtttctcgcccttttccgtgcacttttctcttctaatggggctagtggcctcaaatgggagatgcatcttgacac

SEQ ID NO: 25637 - DNA, 796 bp, Homo sapiens
  chr3:147138422-147139218
  hyper
cgagtctccgagctcaataacgcaaggatggctgaagagcgtctgctccatgtctctttgccggactcaacgaccctcacccactgccaccgagtgctaggcccacagaggcctggcagaagccactcacccctcactactcatgactaggaagaaagtggccggggcatgagggttcgagttctgtcctaggtcccggaagccagggctcccagcgtctagtcaggggcgcagaaaccctcgttcctccaaacccccgccacagggaccactccagaagaaacccattcgtgatttgggtccctttgtgtttgagtattgtggggagtgggctatctagactctaaggactccaagctaacgatgacctgtgtgggccttgctctgaacagaaaactcaaactcagcgtgggttcccgcgtcttccccaaaaggccaaggcccaaagaacccttttcatttggcgaggggcttgaggaagggaggggctggggcgggagagggtcggggtctgcaagccagcggcccggcgcagcggacttgtccggctgctcagcttggcagctagcgtccgtgccggcaacgctgttaccctctcctgggctggagagtggggacatcccttccccgcccctaggcgtccctggggtcggcgccagagcccgggagcgccggaggctctggctggatggcggcgaggagggctctgagtcctctcccggccaggccgagcttagtatgtggaggcggcggcgggagtgcgggcatggaccaagggaagggggacacccaaacc

SEQ ID NO: 25638 - DNA, 838 bp, Homo sapiens; identical to SEQ ID NO: 24412
  chr3:157812151-157812989
  hyper

SEQ ID NO: 25639 - DNA, 783 bp, Homo sapiens
  chr3:159480852-159481635
  hyper
cgctgaggtcatcctcagcgtgcagcccggaggggaagggaaacgtgagctaaagcaacaggttccacccacagcctgaacttggaaggggatgcggcggcggcaaggcggctggagctgcgcggtggagggagaggaagcggcgaggaggaaggtggaagggaaatgatggtgcatgaccaccgagcacacgtcactcgggctcccacatgggcttgtgtatgtgcgtgtgtgaggggagggaggtccttcacagggtcactcgggcacttccgcgtggaataggaggcgccaggctcgtgctttgggatgccgggtggcttcggcggggtaacgagtcacgcagagacggcttgaggcaagccaagaaaatacgggtgtcggcgtgaaaatacaccactcttcccagcgcgccgcccttgctaactggctggacctgcgcccctaacgcccagtgcccccttcttttgggcctatcttggcccctccaaccccatcccagcctgcctcctgctccagcctgccgccgcgaaaaccgggactgcggactgcgccgcgcccggcagcctctgggcatgctcggtggcgggaccggctccaccgccaggagggcgcgtcctccctcccctagggcggtgacggcgcctgcagcgacttgccgccgcgccccggccaggcacaccttttggggaggcgggggaccaccctgcccggcgtgggccgagagcgccccccaccccgagccttccggcgggtgggaggaggggccggccagggagacgc

SEQ ID NO: 25640 - DNA, 1438 bp, Homo sapiens
  chr3:16553609-16555047
  binary
cgtaacccctctctggggtttggtgacatctggggtcacttgaacttcgttgggattcagctgttcagagatacaaattaggaatcccggcagcagagaggccctacccacaggcccagaggtcgctcacattacacccggcttccttcctggcaaggccttaacttatcctgagatgacacacgatggcaggggttggaagatgcctagtctagttgagcgcccagctcctgaaacagctgtaccgactacaagggttccagcacatgagttgctggaaactggggtgaccactgacagagattgagccagactttttttttaaaaaagtacttcttgtttgtttgttttaagcccccgaagaaactcactgacaccacccagcgtccctagggatcacccataaccacacagggcagctgagggcaagcacagagtcacagacagacagcagggagcgtgcctggttctacaaccttggcctccacgcggttcttgctgccaaaggcagcgacaccggaggtgaagggcaccagccctggcctaggactggggtgcgcgtgcctgacaacggggcttcccgaaatacacaaccacctcctcctcgcccagacccatatccatcctggcgtcccttgagtctagagaagtgggttaagacaagggaagaaaatcccttacagaagaggagatccccgttttcagtgctggggactctcggcacccgcgtccctgtgcttctggtggttccggcgcttcctcggagcgcgcggcatgtctgctcctacacgtccagcacctctgtccccagagcaaacccacctcccagggcacacgcagaggggcagtcaggcaccgcctccaccctgccccacccaggccgcgcgcaccccggaaacctggactccgcgaccagctccctcctgttcttttccgaggaccccagcggcagtgtgtcctggacccacctgtagcctccaagctcccccacctctgcgtccttcctaggcgcttctgagcctgcagagcctacgacccccaacaggctgctccgaagtgcctctccctacatcgctccaggaatgactcccctacacccgttccccgcaaaaaaaagttggcccaagatccaggcgtcccaaggatcagcccaggtccccatccgacgcgggccagggggtgctgctctggcagctccggagccccggcaaagagcaacctgcagggaggcgccacgcgcggttcccactacccgccagagacccggtccatggggccaaacggaggggcctgtgccggtcgacaccccaagccctgtcgcgccccccccgccgcctaccgtatgggaccggcggaggagaaggcgcggtcgcgggctccctgaggcagcgtgttccgtcccgggaggaaagtttgtgccatacagaggaggcggcgc

SEQ ID NO: 25641 - DNA, 340 bp, Homo sapiens; identical to SEQ ID NO: 8499
  chr3:16926663-16927003
  binary

SEQ ID NO: 25642 - DNA, 820 bp, Homo sapiens; identical to SEQ ID NO: 24414
  chr3:169539913-169540733
  hypo

SEQ ID NO: 25643 - DNA, 924 bp, Homo sapiens
  chr3:181441213-181442137
  hyper
cggcaacaaaaaatatcaacattctagccccaggagcaaaacgtatcaatcattcgcctaaatattgttcagtagatgggggcgggaataggtagacctcctaggagagcggtcacaagtcccctctcctccgcatggacaccaggaatgcggggtctggcggtgctgggcgcagggcgagaagatttgatgtgcagggtaagtaaaggacaagttatttaaaacctcaacacaggaaaagatggtaagagtgctgtgtagccctttgcttgcttgtgactacgagtcgctaggtggcccgcgtttagagtatgcctacggcgcctactaacgtctagacctaggagaggcgtctcccgcccctcgacccacagccagccgccacttgatagctaacgcgtcttccggccggtacacacccacaattaatctttcttattaaagcctccattctgtacccatggggcgactcaaacctatttagatttccgtggttggctgcacaaatttaagtgggcaacgagttataaacctaataacagaggacgagagagggtgatttgagtagagaagacgcaagattcactagggtcgtgaagatgctgcgggccttgcccaccacggcatctacctcggggtgcacgccaggctctgagaaaggtagtgaacctcacaatcacactcaccacacacaacatgcgtacacacacttgcactcctaccccctttgctcacaggtacacttgtgtggaaattgcctcttccgtagttcttataaactcctcccagacaggcagaattctcagagcatcggaaccagggaacttgcagggaaccagggaaggtttgcactgtttgggattaattgagaataattaacactggagccgttaatcaccactttgctgctctctccctcctttc

SEQ ID NO: 25644 - DNA, 909 bp, Homo sapiens; identical to SEQ ID NO: 24418
  chr3:181444664-181445573
  hyper

SEQ ID NO: 25645 - DNA, 130 bp, Homo sapiens; identical to SEQ ID NO: 24419
  chr3:182815985-182816115
  hypo

SEQ ID NO: 25646 - DNA, 926 bp, Homo sapiens
  chr3:182971288-182972214
  hyper
cggggtttccccctcttctcgtattttagaaacggacagcggcagtgcagccctagtttgctgtaagtttccttactttgttactgaggcccccagagctccacgcataagtggtgtgaccagaaaccttttaacaagacccgcctgagcctgcgttagagctcccgctcggaaagtaaaagaccatcctaatccgcggcgctgcggaaccggtgtcccgtgtgggaggaaccgcggcgttccctgggcgtagggcccgcgaggccagcacagtccgcctcttggcggagcgccctgggccggtggttccgcgcggagttagtctgtggtcagttacgtggtgaaaacacggctgtgccgcggccgcatctttccgcggccgaggcctctctgggtgggagtgttggcttcctttccggatcgctaaatggggaaagttctggccgctcggcgggatacgtctccaggccacggatggttcgttctccgtgccgcggccccgagctgggctccctgggtctccagcgcgggctcccggcattgggggctgcgggccggcccctccgccccgcccccgccccgccgcgcctcctcggccgagcggctcgcggtctccggcgcgggaggctccgagtctgcccactccgggccgagcgaggtctctggaggagaagagtggcgaggaggtgagggcacgccggccctcgcccggcgggtggcgccaggacttcaggtgggaacgcgcgcttgggccgggggcgcgtggctggcgtggacaccggatcggggcccgccgccctggcccggaccgcgcacggcccagcgccgggaagtcgggaagccggggaggcctctcccaccgcgggccccggcagcccgccctctgaaagcgcggcggagaaggaggctcgtcccctccccggaac

SEQ ID NO: 25647 - DNA, 809 bp, Homo sapiens; identical to SEQ ID NO: 5819
  chr3:183165024-183165833
  binary

SEQ ID NO: 25648 - DNA, 134 bp, Homo sapiens; identical to SEQ ID NO: 24420
  chr3:183728804-183728938
  hypo

SEQ ID NO: 25649 - DNA, 280 bp, Homo sapiens
  chr3:184784962-184785242
  hypo
cgagatcttctacactgccggaattttctcactgttaacaagttttgcaaaggtggtttcaaatggatgcgtctatatcacacctgaagatagttacagtcaatttccagcttcacggaattctcccctgcgcctttttcttccctttgagcctccaggattgctcaatcgttcccttgggcaagacactgggctggctgcggtgaacacaaaagggagccgtacacagccctgccctcaggcacctgccggctggggaaggacacgttcagcaggaaac

SEQ ID NO: 25650 - DNA, 357 bp, Homo sapiens
  chr3:185362982-185363339
  hypo
cgttcacctatgttagttcaactaaaagggatagcgtcgtgggagttcaggagagatccgagtggatggtgaagtggatggctgaagcctgcagaagccctggggggcgggaggcggggctcggtggttctggcaaacctggctgaccttccccgcccctcctcggcccctggggttctcagggcctcggcagagtccctggccgcctccgcagacttctcattcctcagatggtctttggtttgctcccgatctggctggctgcgtttggtctcattctgtcaggtgttggaagggctacattcatccgttgttttgctggtgcctgtgggagcctcacttgctgcgctgtgaggc

SEQ ID NO: 25651 - DNA, 139 bp, Homo sapiens; identical to SEQ ID NO: 8506
  chr3:186697410-186697549
  hypo

SEQ ID NO: 25652 - DNA, 482 bp, Homo sapiens
  chr3:193775965-193776447
  hyper
cgctgaaggacccacccagggaggaggctgagccgcgctccctctagcctccccagaggtgcattcgttaggttcccgccccggccccagccccagccccagcatcagctccggttcctctgcagacgttcagccccttcggaaatgtaaaacccgggaagcgaaagctgcggcgacctcccagagcctctcaggcacgcggcatctctccccaccggcagcgccttgaaataccaaaggcctagccaaagatggaaccgttttgttgggagctcgggtttcccccgccgcgaggctgagccggtggcgcagctgctcaaaggtcacgcccgagacacgtccgcacaagcccgggtggcggggcgggcagcggggagagaagaggggagtggggagggggacgggggcaggggggaggggcgccaccttctccagggccctgcggggtgggctcccatcttcatctcgcaagcatccaaccc

SEQ ID NO: 25653 - DNA, 175 bp, Homo sapiens; identical to SEQ ID NO: 24426
  chr3:193922622-193922797
  hypo

SEQ ID NO: 25654 - DNA, 277 bp, Homo sapiens; identical to SEQ ID NO: 24430
  chr3:195637231-195637508
  hypo

SEQ ID NO: 25655 - DNA, 295 bp, Homo sapiens
  chr3:196069909-196070204
  hypo
cgggtctcgtaaggctagcgttgggactatctcttcatttccatgtggcgagcctcctagggcaacagaggcacggtcgctgccatgaaagcactgaagcttcacctctttgagacgtgttaataaccgcggagtgtggctctactggagatggagctacttgctgttactttgtcggtgatgctcctagggaggagcaaatgggagtctgaggacataaatgacgaacagggcctgggctgagaaaaccagtcatgccacaaaaggcttcctgaggctgaaagatttgggagac

SEQ ID NO: 25656 - DNA, 411 bp, Homo sapiens
  chr3:196388348-196388759
  hypo
cggtggccgactgggccatggtcacctgcaacctctcctccaagatcatccgcgtgacggagctgcccggaggtgtgcctcgggactgcaagtgggagcggctggacctgggcctgctctacctcgtgctcatcctccccagctgcctcaccctgctggtggcctgcactgtcatcgtcctcacttttaagaagcctctgcttcaggtcatcaagagccgctgccactggtcctccgtttactgacctggctgtgtgccaagactcgaaattcggtccgcacacaacaggacactttctctgccagctttcaagatgtgatgcagaggccaagtctgacgaattgaagtttcaattaaaatttaatatgtttccattcctcatcgcccaccccacccccgcccccaccacc

SEQ ID NO: 25657 - DNA, 840 bp, Homo sapiens
  chr3:42542869-42543709
  hyper
cgcacattctgctcagggctctgggacccgctgccctctccgcctctccactgaactccgcctctccttctgtcacacggctccgccagccactctatcctgccgccgcgaccacatctccagcctcgattgtgcaggctcgagcccgtagaaagagggctagcagccacctgcgcttggtccacaagaagacgcgctcccagggcgcagagctggtgaccccgctccccatgccagggacgaataaacgagaaaaggggctgacccggtgtcacccagcggccgagcagccgccccttggaagctcagcaccaaaggcaggcggccagggtcctggcccctctctggaccccagtatccccagctgtaaaatagggaatgcaggaggaggacgacgtctgtggatcgttttaggtcagctgcggagtcggcctgcgggctgggagcagacctcgctccccacgcgagggcgctggcacttcagcccagcctccctggggaggtgccctggacgagacccgcgagggtgcggacacctcatcctccctggagcaggtctcccgaggcttgaagggccagggcacccaacaggtgctgagcgcgccccaccaggtcacccgggagcagggaacaccaaggaacccagagtcgggcctctttcgagccctcgcttcctctcgcctggcttcttcggcgcgaaggatgaattggggttgttgaaaattgatcaaacaacccgatctctgtcagcgcctggacacttgctgggccccagctcgcagcctgggaagataagtggcacttcctgtctcgtaatcggatttgcgcgcacgaaccctc

SEQ ID NO: 25658 - DNA, 191 bp, Homo sapiens; identical to SEQ ID NO: 7368
  chr3:4347767-4347958
  hypo

SEQ ID NO: 25659 - DNA, 219 bp, Homo sapiens; identical to SEQ ID NO: 8513
  chr3:44945281-44945500
  hypo

SEQ ID NO: 25660 - DNA, 255 bp, Homo sapiens; identical to SEQ ID NO: 8514
  chr3:45719334-45719589
  hypo

SEQ ID NO: 25661 - DNA, 742 bp, Homo sapiens
  chr3:46009350-46010092
  hypo
cgcctcaactctgctagctcctcctcccaggagctcgtgtgggccagcaactcctgcagccgtcgccagagctggtctgcctcctgtcccttcccagacaactcctcctggagtggggccatctccttcaccaggcgctccaggctggcccgggcatcctctttcagctgaagctccttgaccagctgttccagttgggcactctgctgtctgttgacctcctcgaccttggttctctccctttctagggcttgaagcttctcccctagctcctgcatctcctgggccgcatcactgggaataggttcttgccggccctttgtgtctgatgccgtatctgccttctgctgagccatggctagccagcctgggaagctggctaaatgctggtttttcttgtccagtgagtcccgtgtggcctcaagctcctgtgccaagggctgcagcatggactccagccgccgcagggctgtgtggtagtcctcctccttctctgctgctcctagctccaggccctgcaggcatgtctgcagctccttcacagtgttctgggtggcctgggtgacctcccactgcttctggagctcagctaccaagcaagtgaggcgaacgttgtcctccgctgcagtgcgccccctctccctctctgtctgcagttgctccccttgctggctgacagctgccctcagctcctggttctctctgtccagctgctgcatgcgctcccgtagctgcttctccc

SEQ ID NO: 25662 - DNA, 121 bp, Homo sapiens
  chr3:49034180-49034301
  hypo
cggaccggtaaaggttaatcaggtataattaagtctgtccggggttcgacaaacagcatcttgtccaaggtgagcatagcccaaggctatgtgcctgcccggagactcagcttggggttcc

SEQ ID NO: 25663 - DNA, 277 bp, Homo sapiens; identical to SEQ ID NO: 24441
  chr3:50377892-50378169
  hyper

SEQ ID NO: 25664 - DNA, 924 bp, Homo sapiens
  chr3:50402119-50403043
  hyper
cgaggacttgaggctgcggccggggcggcaggcccaggaggagcagcagttgcagggagaccaggacgcccagcgacggcgggaaggaggccccgcggccacagtctgaggtatcttcctgcggggagagacaaggagctggtcggcctgggcgggcgcaaggccgcgggatttcgggtccaccgccccctctcctcactgtcgcgttgtagtcgaagcagatgtgcgggcctctccggtatcgcggtctctgcactagctcacactgctccgggccgtccgctgggcatgggtggggagtcaaggaggcggacggcggcggcggcacggagggggcgcgcggggcagagggggagcgggcggcggggagggcgggggcaggatacagtgcgtctccttctgcagcagccggccagcctcgcactggctgcacagcggcttctcggccaccacaaagagaagattggtgttggtcagtctctgcgcgtggaacagcctgcgggcagcccggaaaggcggggcgttgagtttgccccgccctgacccacccccatcctgcggccccgcccccggccgctcggaggccccgccccttccatcctcccgagcgtctcgccccgctcacaggttccgcccttggcctctggtcccgccccactgccagcacctggagcagtttccgcagtcgatgatggcgttgtaggaggcgtttaccgagccgaagtagtactgggtctgtttcatgacgcagctgctctcgcgcgtctcggggctcccctcggcctccgcggggtctgcgagggcccagagcgcctcagctccgcccacagaccctggcaaggtctccggcctccctcagtcgtagaccccaccctccccatggagtcgtcttagctcagattggggacccggacttgaggaggc

SEQ ID NO: 25665 - DNA, 461 bp, Homo sapiens
  chr3:50604957-50605418
  binary
cggggcggggggaacccccaagcccggcgtctggggctgcgggtccgacccgagatccgccctccctgcaagccccgagccgctggccaggcccgctactgcgcaccagccgcatccgcgagcgctggctctgccggcctgagctagggtgggtagggccgggacccacggcggaggtggggccgggccgagcagcctcgggggatccccgaagctacagcgccttgcctccctgcacgctccgcgcccccggcctccgattggctgtcgggcctagagcccgcccagaattggaccgttcgcttgtcgctcgggtctggctccacccccagagggagcctagaacctggtcgcagtttttagagactaccctcaccccgtggcctgcgccgaagttgggcggaggacagtgggtggccaggcccttccgggccagaactcgggacccctgccagctaccc

SEQ ID NO: 25666 - DNA, 356 bp, Homo sapiens
  chr3:56718095-56718451
  hypo
cgttcatcaacgttttcctatagtaaatgtatattaaagaaaaaataaacttgcggtcacattaaaaaatacacagcaggtcgtcgctctcccataaagggaacaacttcatagttaagagccctttacatagtggtttctaccttatcagtataaactatcacgggttatcgtgagtacagccaatatttactgagtgctttctacgtgctagacacggactggacaagtgatttacgtgcattgtctccatttaatcctcacagcaacagacatgaggtagatactagtttgcagaatttgaaagaagcgttgcaagacactggacaaattatggtaaccgaagatttgaaacc

SEQ ID NO: 25667 - DNA, 931 bp, Homo sapiens
  chr3:62355789-62356720
  hyper
cggagggggcagcagggcccacgctgtcgtggagtttgcgcacatgtttctttaagtcaaagtttctgcaaaaccctttgccgcaagtggcgcacgtgaaaggcttcttgtcgttgtgggtgtgcatatggaaggttaggttgtagacctggtggaaggccttgttgcagatggtacatttgtactgcttctcgccgctgtgggtcagcttgtggttcttgtagttccctacaacagatcaagaacaaaaaacgtgggggtatggagtagaatggtggggaggaagaggcgggcgtcccaggggcagcccaggtgcctgctcaaaaaaggcgacgcttggctaggcgggcgcgacctcttcgagtgaagaagttgtcaaacttcgtaagcgtcaagccgggtgctctcccgacaagaccgagactgagtcccgcggagccgctctgcgctcctgctctgcccgccacagaggctggtgcagcttccctcccgccgcgctccgcgggccgggaaacttttgcgtagcccagagacgcaccgagtccttctcctggctgatgcctcgctagaagaaattcgcacgaacccgggcttcatcctttttcttttcccccttctcatttttaaagttacttctttctcgccccccaactaccaactgaagatccaaaagtgccttggaaaatccgatccaggggccaaggatcataccggtttcccccaatcttagattgttcccgggagggttattttgcctccaatatttttcatttgaaagggaagttccggatacaaaaggaacctttttctatagggcaataccctctccttttcctacatcctttccttctgtccccgtgcttccttcgacctctcgaattcggagtctctcagtgcacccagcctgcatacagcgtggtctactaacccc

SEQ ID NO: 25668 - DNA, 768 bp, Homo sapiens; identical to SEQ ID NO: 7376
  chr3:67048599-67049367
  binary

SEQ ID NO: 25669 - DNA, 367 bp, Homo sapiens
  chr3:72149806-72150173
  hyper
cgggtaagagaataataaatcggtcacttcactatccaattagcagctgttgctccccgctggaggaagaaaacaaacaggaagaccctgccctgttttgtttaggatcaaactcgcctctgtaccacctaccggagggactctggggtttgagttctggggacaagcgcgtgcccctgcctccgaatgagctccttttacgtgtgagtcctgggcacaaaaccacagccaccacaagccgcggatgcttccccagcgggccccgcgaagggaaactccgtgcaggggcaaagctgagttttgcaaccagtgagcgggagcccggggggcgtggccaggctgaggggatgcgttgtcctggtaaccc

SEQ ID NO: 25670 - DNA, 478 bp, Homo sapiens
  chr3:9904234-9904712
  hyper
cgcgtccaggcaggcggcacttaggaaggacaaactccaaaacccagggatccaaaggatccatgggaagatcgggtggctcaggggagtgactccccggcttggtcggcgctttgaggccccggggacccagcggagagggctcgggtgaggcatctggaggcgctgaatggggccgggagccgcgggacccgcagagggcgcctgtccgtgtgggcgcagcagcgcctagagggaggcggccccggcagcccgcaggggtcaggctctgctggagcaggggcgtccctgtctccgcttcccagcgcaggctgggtggggccgatggccattaaagccccgccccccgcggctcaccgccgcctggccccgtccccgaggccagaaaagaggagacccgaggccgtcagaccgcctgtcaagggctgtcctggagcctggcaccttcccctcgctccccgtctgacccccagaggcc

SEQ ID NO: 25671 - DNA, 510 bp, Homo sapiens
  chr3:99594790-99595300
  binary
cgctttgcgaaacctgtctgcagtttgtgatgctgagacagctttaacagccacccacagacttgctacctggctgtctgacagcagtgccccttggtggagcgaagttgctctcccgggcttacctgaactgcctgcgccggggccgggcgggggccgggccggggccgctgtagtgccgcgctgcgagccgactgtgcgcgctccgagagtcgcccgaacaatgcgagcggggcgctgagcgcgcccggcctatgggcgttacgtcactgttctgccttataaggcgctccgcgtgtgcggcgctgtcggcgggggcgccggtgaccgcgggaccctcggccgcggcggcggcgcagccacacaccccagctcccgcggatgttccggccgtgtgaacggaccgtggttcccggctcccagcggagggaatgagtggtgggccggtgggccggggcgccggcgccctcctgtcgggctaacaaagtcattgggaggcagggtcgatcc

SEQ ID NO: 25672 - DNA, 426 bp, Homo sapiens; identical to SEQ ID NO: 23252
  chr4:102711772-102712198
  hyper

SEQ ID NO: 25673 - DNA, 733 bp, Homo sapiens; identical to SEQ ID NO: 24451
  chr4:10462790-10463523
  hyper

SEQ ID NO: 25674 - DNA, 185 bp, Homo sapiens; identical to SEQ ID NO: 8526
  chr4:106335558-106335743
  hypo

SEQ ID NO: 25675 - DNA, 442 bp, Homo sapiens; identical to SEQ ID NO: 23257
  chr4:113443992-113444434
  hyper

SEQ ID NO: 25676 - DNA, 360 bp, Homo sapiens
  chr4:1338505-1338865
  hypo
cgaatcacctagtaagacagtaagtctgtgtgacacaagggccagaagtgccctgggaacaagcacggcaggtttagaaaacggatggggggtgttgagccagggaggtgagcgggtgcagaagtatttgctcagggtgagacatgagcagtggctggaaggaggcaaggaactctgtggatactggcagaagcttcccggcagagggatccgctccccagaggccgtgtggcagcaagagcaggctggagaagtcaaccggtgggatgcagggggcagcaaacacaggccacgacaggttttgccttgccctgggatgggagccgtcggaggattttgtgtagaggaatcctgtgatcc

SEQ ID NO: 25677 - DNA, 910 bp, Homo sapiens; identical to SEQ ID NO: 8528
  chr4:141563919-141564829
  hypo

SEQ ID NO: 25678 - DNA, 199 bp, Homo sapiens
  chr4:153918932-153919131
  hypo
cggtgcatccctgaggccctttcctctgcaccgatgctcggactctccgtgtgtgccattttgcagtggggtcacgctccacgtgttgttctgccactgcctttggtttctcgacactgcctcgtggacacgcagggagagcttgcagctggtgacaagctctccagcaggtgagtaatccagcagctctttctgcctc

SEQ ID NO: 25679 - DNA, 908 bp, Homo sapiens
  chr4:154216342-154217250
  hypo
cgcttgctcagagccacctgcgtgggcaggtgtagagtctccttctcgccggtggagggcactgccccgggctaggccccgccctgtgggacgagctcaccaggcctccggttttcccgcaggtcctccagtcgcagctggatactctgctccaggggcaggagagcattaagagctgcagcaacttcacagcgcaggccctcaaccatggcacggagaccgaggtcctactggtgaagaagcagatgagcgagaagctgaacgagctggccgaccaggacttccccttgcacccgcgggagaacgaccagctggatttcatcgtggaaaccgaggggctgaagaagtccatccacaacctcgggacgatcttaaccaccaacgccgttgcctcagagacagtggccacgggcgaggggctgcggcagaccatcatcgggcagcccatgtccgtcaccatcaccaccaaggacaaagacggtgagctgtgcaaaaccggcaacgcctacctcaccgccgaactgagcacccccgacgggagcgtggcagacggggagatcctggacaacaagaacggcacctatgagtttttgtacactgtccagaaggaaggggactttaccctgtctctgagactctatgaccagcacatccgaggcagcccgtttaagctgaaagtgatccgatccgctgatgtgtctcccaccacagaaggcgtgaagaggcgcgttaagtccccggggagcggccacgtcaagcagaaagctgtgaaaagacccgcaagcatgtacagcactggaaaacgaaaagagaatcccatcgaagacgatttgatctttcgagtgggtaaggagagggcttctgtgcccgacgcctgagctggcactggttaaggggtaactgggcac

SEQ ID NO: 25680 - DNA, 888 bp, Homo sapiens
  chr4:174430248-174431136
  hyper
cgagtactaaggaggagtccagaattggtggccgtcctccctcttgttttctcatgcaaataactcaacactctaatcgtaaatcaaagctccagggcctacttttgcgaggggcactggagaaagaagagagggttgcgcgcgcgcgtgcgggagcttcggaagctaaatctcactcgcggggaggatgggacgcgtggggactgaaggcggcatctgcctgaataaagccctcgcgcgctctgagcctcccactctgtcctggaggcctgaacctcgcgagtagagcctggcgcttttcctccccgggagcacgacggatagaatgcgcggggtcgagacggtgtcggtagcgggggccgcagcgctttgcaaagccggcctctgcccccggcctccttggagggcggtagcgggacctgcgctcgcagcctctccccagggctgtgcgcttcggcctggcggctgccgggcaaaaacctcatttatttccttccttcccgagtgagctcacttcctccccgcgccgctcccttccgtcggccggaacccgctcctgggccgcgcggctgcagccgggagcgcggactcggggtgtcgggcggtgtccgcgcccctccccaccccagggcccttctcgggggagatatccaggagctgaaagagattcctcaggaggaagtggaaacctctgaaaggagaggaaaccgactcttttgcaagaaaactgagcgccggctggaaggcaaggaagccgaggcggccggggagattcacccacatgcctgttgactcgggcccagtacctgcgtctccttccttctctttctggccctcatttcccctgcttctcactttagttcactgctgttttaaaaattcatatgc

SEQ ID NO: 25681 - DNA, 561 bp, Homo sapiens
  chr4:1807117-1807678
  hypo
cggccaggtggtcatggcggaggccatcggcattgacaaggaccgggccgccaagcctgtcaccgtagccgtgaagatgctgaaaggtgaggagggggcggccaggggtgcagagcagggctgggggcgccgccgccgcctgacacaggccccccgctccgtgcacagacgatgccactgacaaggacctgtcggacctggtgtctgagatggagatgatgaagatgatcgggaaacacaaaaacatcatcaacctgctgggcgcctgcacgcagggcggtaggtgcggtagcggcggtggtgccggctgggcggccctcctgggcctggcagcccgtctgaggagcccgtgtccccagggcccctgtacgtgctggtggagtacgcggccaagggtaacctgcgggagtttctgcgggcgcggcggcccccgggcctggactactccttcgacacctgcaagccgcccgaggagcagctcaccttcaaggacctggtgtcctgtgcctaccaggtggcccggggcatggagtacttggcctcccagaaggtgggcagggc

SEQ ID NO: 25682 - DNA, 304 bp, Homo sapiens; identical to SEQ ID NO: 8531
  chr4:1814436-1814740
  hypo

SEQ ID NO: 25683 - DNA, 118 bp, Homo sapiens
  chr4:1827219-1827337
  hypo
cgagtggcctttcgaggctgatgtttcccttgagcccgtgccggcctggcaccaggccaatattcacgcacctgcttcagctgacccctcaggcggtcttccgtgacgcccagggccc

SEQ ID NO: 25684 - DNA, 167 bp, Homo sapiens
  chr4:184667623-184667790
  hypo
cgataggaccaggcagggggccgtgcccgctggggaggcttgagttgtgcgggaacccactgcagggcgggagcgagctcgggcatggcaggctgcaggtcccgagctcttccccatgcagaggccgctgagaccgggtgagaattcaagcatggcacgggcccgcc

SEQ ID NO: 25685 - DNA, 397 bp, Homo sapiens
  chr4:187026475-187026872
  binary
cgccgccagccgcgccgcgggagcagtggggaccctgctctcttggcccagtagccctagagcgggtaaagccccgccccagccccccactccctccggcgggggctgctcccctgctcgcctggtggtcccagcgcggccgccctcgggccccggcggggtctgggccgcgctccccaggaacccgctccagcctggccccggagagcgagagctcggcgcctgcgtggcccccggggctggccccagaaccctgttccttacgctgcctgacatcggcgaggagggggcctcggacggcgactccggggatggcgaagcgtgagtagcagcgtggtccgggcgcgtgtaccttttgccgggacccccgacccctccgcctgccgcactcaccttc

SEQ ID NO: 25686 - DNA, 873 bp, Homo sapiens
  chr4:1993659-1994532
  hypo
cggcatccggtgccctcccagcagcctcccacctcccagcagcacccagtccactgggcctactcttccaccggtgcgcagatgcaagaaaacctgaagggtgagaagccggggccaccactgctcccgcagaaagcctgcgggtgggaaatcctggggatgaggggcgtagagcaggcaggtgcccggcacagcagagcgcaggagcagggtggagtcacctgccgcgggggtgtgtgcctgggcagcagggggtggggcctgggacctggggcagcacccgtgacagctgagctggtgcctagtcaccatctaggcagggacggctgcctctgggtctggacggcgctgggagttggcgctcgtggagcctggaggtggccccgggatctggagtgaggccagggccttggggaggccatgggcgacgtgcgtggaggaagcaggcgcaccccgtgctccctcaatacctgggaggccagatccatccacaccagggcctgcttcggccacataaaccccctcccacgaggaaacgcagagagccaggccatggcgtgcctgtgcctctgccatgcgcccactgggctgctcacagtgtgagacagctgggctggctggcgctgggggtgaacaacagcgccctgccctgtccagacgccggggctgaaaccccagccccaggccttcctgacacccactccctgcgtcaggcgccagagacccgtcctacgagggctgcggccatcacgtccccgcgagcgccgcctcctggtggcctctgagtgggaggaccttccagcgcttccctcactgtcctcatgggcttcctgccctgagggaagttggctcgaagggcagagatcagaggtc

SEQ ID NO: 25687 - DNA, 96 bp, Homo sapiens
  chr4:2514675-2514771
  hypo
cggatgcccgcgctaaggcagagtcaggaggccagggacgggactcttgtaggggataggggccactcacgtgacagggtataataaaatgtttgc

SEQ ID NO: 25688 - DNA, 598 bp, Homo sapiens
  chr4:27086319-27086917
  hyper
cgtttctttctctccttacgcttatcggttttaacacatgccatttaccacctcccacccgctgattagggggctggaaacgggcttacatcactgtcagggcaggagaggaaaaattgcaaagtaaacggcaagatgttgccgcgatagcgagcaggaaaatctgcagtgcttaggagaatgcgggacccaaatgaaattccgcgtctccccgcggcgggtgccgcagagccaccggcgaggggcgggcgccaccacgtgactgattattcaaatggaccgatgattaactcggtttatattgatgcaaataatcctgccggagcctgcaacggctaatgcattttggaactgtggtttttccattgatagcacaaaatattgtagaggaaagccattttcataatattaataatggaattacagaatcaggtcacttaaaggaacggcgctgactcagcgacagcagcgtggaggttgaatgtggggattagcactgagcaaaacgaatacaaaccttttgcagcgatctcattgcataaaacgcacatccccttccctttttctttttaaaagaaaaagagcttcagaaatgacc

SEQ ID NO: 25689 - DNA, 154 bp, Homo sapiens
  chr4:2926297-2926451
  hypo
cgtcgtcatcctgggagctaggcactcctcctaagaggacctcttcaccggtttttgtctcgttctagaccagccactgcattacgtagttgtgactgaaatttgagttgctgaattgtttttcagtgtcacaccgctatttactattcaggcc

SEQ ID NO: 25690 - DNA, 235 bp, Homo sapiens
  chr4:2932837-2933072
  hypo
cgcagtgtacccatgaccgtgcccttctgccctggtgagcctgtgggaagaggcacagtcaggcaccactgcccttctcccgctcaggtggcttcggccgagggaagggggctcaccatagccagcgaccacggaggacaggcagggcaccacaacggcggcggctggtgggagacatcgaggaggtgcccgtcagcccaggggagggtgcatcacccagcccctgctgcccatc

SEQ ID NO: 25691 - DNA, 812 bp, Homo sapiens
  chr4:30723837-30724649
  hyper
cgctggaccgcgagcagcgcgactcctacgagctgaccctgcgagtgcgcgacggcggcgacccgcctcgctcctcgcaggccatcctacgggtcctcatcaccgacgtgaacgacaacagcccccgcttcgagaagagcgtgtacgaggccgacttggctgagaacagcgccccggggacccccatcctgcaactgcgcgcagccgacttggacgtgggggtcaacgggcagatcgaatacgtgttcggggcggccaccgagtcggtgaggcggctgctgcgccttgacgagacgtccggctggctcagcgtcctgcaccggatcgaccgcgaggaggtgaaccagctgcgcttcacggtcatggcccgcgaccgcgggcagccccccaagaccgacaaggccaccgtggtccttaacatcaaagacgagaacgacaacgtgccgtccattgaaatccgcaagattgggcgcatccccctcaaggacggggtggccaacgtggccgaggacgttctggtcgacacccccatcgctctggtgcaggtgtccgaccgagaccaaggcgagaacggggtggtcacctgcaccgtggtgggcgacgtgcccttccagctcaagccagccagcgacaccgagggcgaccagaacaagaaaaagtacttcttgcacacctcgacccctctggactatgaggccacccgggagttcaacgtggtcatcgtggcggtggactcaggcagccccagcctctcgagcaacaactccctgattgtcaaggtgggagacaccaacgacaacccgcccatgttc

SEQ ID NO: 25692 - DNA, 205 bp, Homo sapiens
  chr4:3217005-3217210
  hypo
cgtgcaccgcggtgagtgtggactcctggaagcgcaccgtagctccgctgtgtcctgctgctcctccctagctgtcagggaggctgtagtccattgctttgccagctcttttgtttccgagtgaacaccttatccgtacacatgcggctgtctctgaccctacagaccagctgggatgccactgggggagcgctcccttcccccc

SEQ ID NO: 25693 - DNA, 149 bp, Homo sapiens; identical to SEQ ID NO: 8546
  chr4:3220650-3220799
  hypo

SEQ ID NO: 25694 - DNA, 528 bp, Homo sapiens; identical to SEQ ID NO: 24475
  chr4:39447953-39448481
  hypo

SEQ ID NO: 25695 - DNA, 939 bp, Homo sapiens
  chr4:42154161-42155100
  binary
cggcgcctcggggccggtccctcggagcacgtcccctccccgccgggcgccgggctccgagggtgcctccgccgcctgcccgccgggtctgccctggtgcgcgcgtgtgggagggtgtgtgtctgtgccgtggccgccgccgccgccgcctgtcgctgaggctggcatcgccgagcccccgcgcggggggctgccgcccgagctcctgattgacaggctgcctcgccaatgcctggagggagaaaggaggtaaagagcaagtgtttagggtaatatctgctaatgataatgggggcggggcggggcctggcgccgcagccgcccgcggggtctgcctggcggctccgcgcctccgacggggagcgggggaagggggaaagcgaggacctggaggacgcccgggaactggtgaagaaggtggggatccgggatctggctacggcgagactttagagacccagatgtggactcgaggcttctgcggctgcgggcggggtccggcttccgaaacgagctcgtggcgccccctgcatgaccccaaactctcggggttgcacagaggaggggctagtcgttggggcggggtcgtcagagtacgtgtgtattacagcaagttcttctaccaatcgggaattgctctccgatccttctgaaaagaacctcttgaagatcttggcccgggtggtcgcgcggtgtttacggggctttggggtcctgctttccccgagcatcgcggcctctgagctcatgcggaacataaaagctcgcaaggcgtagaactttttcacgttttcatttgtttcccgtaggggccccgagaacgtgcatgacaccatgatttcccccccattataaagatgagaaaaccgaggctctgagaggttgaagggaattgcccaaagtcagacactcgggagtgtgcggctgtgttgcactgac

SEQ ID NO: 25696 - DNA, 880 bp, Homo sapiens
  chr4:42398819-42399699
  binary
cgggcgtgaacggagaagtcgtgctctttgaggttttgcgagctggccttggctggcagaggtgaccggcaatccttcagccggcggaaaaagtgcgagtgtgtgtgtgtgtgtgcttgtgaaaatgtgccgttcctcccagaaaaagtggaaacgtaggtggaaagctcagcacatgttggcgacacctaaaaaccatgttctcggtcctgaacctttagaagcggtatcccaggaacgagtctgagtctgtgcaacagggcacagatgattcgacaaacttcaatgactgcaccgcattcatgcattatatccattgaaaagtaaatccagcgtctccactcgcgcgcccacgtgcgtggataaacgcgggaattcggcagccctcaacgtcactctgcagagatttccgggctgtgagagagttggggtgtgcggcgggggaggggagggtctgatatcttcaggttgagagtcaagtcctgggggagcggcatgggcgggggtggccggggggaggcggaggatggagcgcgaaccagaaagcgcagaggaccctcggcccgcgccgcacccgctgtgattagctccagaggcgcgatccgggagggcggactctttcttaaccctcattgtctcctcctccctcttcctttttaaaagacgccttgcgggcagagctgtcagcaaccccgcggccgtttgtacttggccgcggcggagctgactcctgctcctgtgacagataggggctggggctgagcggccgcctgtctggggtactcgcacgtggggaacaaattcttttcctccggctcctctcgggacccggcgatcgccacaggttgggactctgtgcggcgctggagttggcagcccc

SEQ ID NO: 25697 - DNA, 433 bp, Homo sapiens; identical to SEQ ID NO: 23275
  chr4:55094321-55094754
  hyper

SEQ ID NO: 25698 - DNA, 76 bp, Homo sapiens; identical to SEQ ID NO: 7402
  chr4:56222936-56223012
  hypo

SEQ ID NO: 25699 - DNA, 1425 bp, Homo sapiens; identical to SEQ ID NO: 24481
  chr4:57521376-57522801
  binary

SEQ ID NO: 25700 - DNA, 236 bp, Homo sapiens
  chr4:6748324-6748560
  hypo
cgtccaccggcaaaggacaatggatctccaaggggtgcggccagcggatgggtgatggcatggatggagggtgggtgcatcaatgctggagcatcaactctgtgtgcccctgcggggagaatcgcccctgccgaagccccggctggtccaaaaccacgccagccgctttaggggtgtctgtggacccaggaccacacagcctcaagagccaagagtcccgagtgtgtgcacctgtc

SEQ ID NO: 25701 - DNA, 436 bp, Homo sapiens
  chr4:7047046-7047482
  hypo
cgtagtcccggctgatgtttacgtttacttcttgccttgaccactttgggagcctccttgttcgttattccccctccaccccattcccctattccacacaccataaccggagcgagctttggaagcacaaagcgcctcacaccggcctcagtggcttttacttcaattaaggcagctttagaagtgttgagcaatgagatctcatctgttacctcccttgatcgttttatatttcttctacctagagtgctctccctgtaaatcatggcccaggattgagctttccacttaaatatcagtgcctcagagggcccttcccttcaccatcccagcacttacctctacgttagctgctaaggaggcgcagagccttggtggcatatctgtgcgtatctcaggacattttcccgacagcccttggcagttggctttggac

SEQ ID NO: 25702 - DNA, 444 bp, Homo sapiens
  chr4:759725-760169
  hypo
cgggacgtgattcctcagcacccttcccgatgaagtaggtccttctcgcctccacccctgctaagcaggcactgtgcgttcttgtgtcttccagaaggcgccgctcctgctgcactacagacccaagatggacttgctgtgaatggtgccacacagcgcccacagactgggccctcgcacccttgggtgctcccggccgccgcgcttaagaacattgcctctgggtgtcatgtggaccagacttctgaatagagaatatttataacttttgtatgagagagaattcacactcaacaagacactaccagcaccacgtttacagaggatgaaaacacttcacagtctcccagagccgatcgtcctctcccccgccccaccccgtgcttcagccttgcagggagagtgatgctccaggcaacacggttctgagtcaccttctgacac

SEQ ID NO: 25703 - DNA, 204 bp, Homo sapiens
  chr4:7647755-7647959
  hypo
cgtgttcattcggtcagcaaatgggccttgcgcacccggcagccacggattccgggctaccgctggtgccgcaggtgagcgaggcaggtgtgtgcccccgggctgtgagcggcttagccgaggagcaggagataaactcccaggacgcaaggaagtcagcaaacagctgtgcaggcgtgagctccgcacagcgcacacggggcc

SEQ ID NO: 25704 - DNA, 692 bp, Homo sapiens; identical to SEQ ID NO: 23277
  chr4:76555346-76556038
  hyper

SEQ ID NO: 25705 - DNA, 310 bp, Homo sapiens; identical to SEQ ID NO: 8554
  chr4:99399725-99400035
  hypo

SEQ ID NO: 25706 - DNA, 176 bp, Homo sapiens; identical to SEQ ID NO: 8555
  chr5:10256093-10256269
  hypo

SEQ ID NO: 25707 - DNA, 1429 bp, Homo sapiens
  chr5:10564301-10565730
  binary
cgcgaggggaaggccccgggggaaggcgtgtccccgcgccccgccccgccccgcctcggaaagcccccgcggtcccgcccaccccaggggctcgctcagcctccggagacttttttctttgagcgcagccgcctggtgccggtttccgccgagctggagcgcgcgggccacggcttctctggggacgcagaagcgagaagcggggacctcggcgcgcgccccgcgtcccgctcttcctgcccgcgccccggcccccggcccgcgccccggccgccggcatggtgctgctggccgggaccgggccggagggcggcggggcgcgctgcatgaccccaccaccgccgtccccaccccggggcgcgcaggtcgaggaggaccccgctgactacgaagagtttgaggacttctcgagtctgccagacacccgcagcatcgcctcggacgactctttctaccctttcgaggacgaggaggagcacggcgtcgagagcgcggagagcgtcccggagggcgtcccggaaagcgtcccggagacggcgaccctcctgcgcgccgcctgcgccaacaacgtggggctgctgcggacgctggtgcggcgcggggtgagcgtcgaggaggcgcaggagactgaccgcaacggcagggtaagcgggcgtccccgcaggatttgagccccctcactgcccccactcccctcctccccaccacatccccgcgcctcccagctcctggctccggaccggtccctcggtcactcagccgccgcccagagcgccttttccccgctgtttgggagcgcggtgccctgggtggcttccccgtctcaggctgggggacgcggtgcggggagggagcagtcgaggtgtcagcgcggcagaaacgccagtccggcgtcctcaccgcatccccttctcgtttaccggtccccgtggacctcctgactgaattcgcgctggctgcccgtgctgcaatccaggatgggcttcttgcggcccggtcccctcctgactattacctttccccaggtccctggcaggggaccattcctcctcccctgcaggagacagcccctcctgcccagcgccccatttggcccctgggcccctcgcgccgcccttgtcctaacacgctggggcgcagatcggctcctccagccgcaatgatttggaagcaacagtttcttccctcgccgggacagcttggtcccctaccccacctccgctgagctttgtggcccgcgccgcgaccagccaacgtgatctctgactggtctgtccgcaggtcaccttcgcgagccaatgccagccggggctccccagagtcagggcatagggagagccccagagccgcgggcatccacccgggtagggcaggaggcgtggaggcaggcacaggctatcctttcgttatgaccagattcagagaaaac

SEQ ID NO: 25708 - DNA, 1420 bp, Homo sapiens; identical to SEQ ID NO: 24489
  chr5:114514898-114516318
  hyper

SEQ ID NO: 25709 - DNA, 89 bp, Homo sapiens; identical to SEQ ID NO: 8560
  chr5:118788280-118788369
  hyper

SEQ ID NO: 25710 - DNA, 541 bp, Homo sapiens; identical to SEQ ID NO: 24493
  chr5:134880146-134880687
  hyper

SEQ ID NO: 25711 - DNA, 981 bp, Homo sapiens
  chr5:142781722-142782703
  binary
cgtttatctgaggcgataacgatctctaaacacgaggtatcgaatggagcccaatgaatttccatgccgcttttttgacagctgccttcaaacccgaaaccaaaacaatatttcctaaaacgaaaacgctccctcaagcgacattatcccccagtttaagttgcaaataacccagccacattaattggccctaatgaaccatgccagagggtcttaagtggtattacaaggttgcaattatcaagtctgcaaccccaaacgtcaaactagcacttgtaaaaatcgcagcacaaaaccattacggttacagggggtctttttctaaaaggggccacttagaaacctcaggcgcgaattaacaacaaacgctaaagagcaagcccttgcggggcgggggtggagaagagaaaaaagtgcgaggttaaaagagaagtacgtccagacctgttgagttctctctccgacacgcccacttctaacagataacgccggccccggccgcagtctccaagttgcgggctgtcagccccccgcgtgtgcaccctcacgcgccccgcacgccctcctcaagccaggcgccgccggggcctccccggagcccgggctcgcgctcgggcgcgccggggtggcgtgcaaatattcgggcgagtaaaattcagacgcggcttagcgttcaccacgaaaacgggtgtcgggcgacccccttggagggaaaggggacactagggggagaaaagaggccaggattcccgcgaggaatgagaggctcgaagcccccggcagttcgacagggctccgctcgccgtccgaggtcaggttcctccccctcggcccggccaggggacgcctgcggagggagaggaagaggccagcgctgtcacccgcgcgctgccctttcgtcaccgtcgcccggcccttgccagccccccacccccactccccgaggctaataaaagtttgtaggctcccgcggcggccccc

SEQ ID NO: 25712 - DNA, 274 bp, Homo sapiens; identical to SEQ ID NO: 8564
  chr5:14332870-14333144
  hypo

SEQ ID NO: 25713 - DNA, 293 bp, Homo sapiens
  chr5:145713606-145713899
  hyper
cggggcatctagggggaaggggagggctcctggcacgtgccgagccctcacggacgctcggcctctggcccctgaatccctctgggcgtctcggatcctctgagccactttgcagacaatgcaaggcagcggccaacagacgagtcccgcagcagctgcgcaggcggcgagtacatgtgagaagtttgtgaaaggcgaccagagaaagggagaggaaggcaagtcaggcggctgcgaacacctggccaggcagccccgccagctgcctcgctgcgcgatggcatcttgagttc

SEQ ID NO: 25714 - DNA, 393 bp, Homo sapiens
  chr5:148206075-148206468
  binary
cgccccttcgcggctgccggcgtgccattggccgaaagttcccgtacgtcacggcgagggcagttcccctaaagtcctgtgcacataacgggcagaacgcactgcgaagcggcttcttcagagcacgggctggaactggcaggcaccgcgagcccctagcacccgacaagctgagtgtgcaggacgagtccccaccacacccacaccacagccgctgaatgaggcttccaggcgtccgctcgcggcccgcagagccccgccgtgggtccgcccgctgaggcgcccccagccagtgcgctcacctgccagactgcgcgccatggggcaacccgggaacggcagcgccttcttgctggcacccaatggaagccatgcgccggaccacgacgtcac

SEQ ID NO: 25715 - DNA, 331 bp, Homo sapiens
  chr5:151066267-151066598
  hyper
cgagggccatgctcttaaggggagccgtgatggagccgggaggagaggcgcatcctcagcagagcttccctcccttgcacacgagctgacggcgtgaacgggggtgtcggggttggtgcaactatagaagggaaaggctgggcgggggtcacacatacctcagtggcaggcaggcaggcggcaggcagagcgcgctctccgggcagtctgaaggaccgcgggaatgtggaggggtttagagacaggcaacaggaaaccactcagagctctgggctgggtctatctcccctccaccccgtggtccctcctcctcctgtctcctccttccccc

SEQ ID NO: 25716 - DNA, 372 bp, Homo sapiens
  chr5:152870120-152870492
  hyper
cgagagagagcaagggagggagagagaggcaggctgcgaggggagaggagagggagtgggggagccagcgctccagctagcatgaggacgggcttcttttcccgtgctcagttaatctggctgtcagttggtgttaacgctgcagtttaagtgttcggattccaagggaaacagacaaacctcacgaaaggaaggaagcaagcaagcaaggaaggaactgcaggaggaaaagaacaggcagaacagcgagaagaataaagggaaagggggggaaacaccaaatctatgattggacctgggcttctttttcgccaatgcaaaaaggaatatgcagcacatttttgccttcttctgcaccggtttcctaggcgc

SEQ ID NO: 25717 - DNA, 750 bp, Homo sapiens; identical to SEQ ID NO: 22920
  chr5:158527374-158528124
  binary

SEQ ID NO: 25718 - DNA, 1199 bp, Homo sapiens; identical to SEQ ID NO: 8569
  chr5:158634816-158636015
  binary

SEQ ID NO: 25719 - DNA, 168 bp, Homo sapiens; identical to SEQ ID NO: 8570
  chr5:159489238-159489406
  hypo

SEQ ID NO: 25720 - DNA, 571 bp, Homo sapiens; identical to SEQ ID NO: 24505
  chr5:159776164-159776735
  hypo

SEQ ID NO: 25721 - DNA, 70 bp, Homo sapiens; identical to SEQ ID NO: 24506
  chr5:171382146-171382216
  hypo

SEQ ID NO: 25722 - DNA, 63 bp, Homo sapiens
  chr5:171708316-171708379
  hypo
cggcaaaacccacctctactaaaaattttttaaaaattagccgggtgcggtggcatgcacctc

SEQ ID NO: 25723 - DNA, 1069 bp, Homo sapiens
  chr5:174119512-174120581
  hyper
cgtgtcctcctgtgcagacgaggaaactgagtcacacgagaggaagcaattgctgatagttcacagttgccacgccctcctcatgcctttacagacatcccaggcctttgatcaaactagggagaggttagaagaaaggcgagacgggcctcagaagaatttggatctgttgaaaaaggattttaggacaagaacgaaacaagacgcgttttcatgggaacgcaaacccagtaacttctcagagccagggcttcgcagagaaactgcatcaaaaggaaaagagtctggtcccaacctttatttctcccaaggcatgaaactcctgatttcaaaccacttctctttgcctctgaaagaaaacaagaaaaagatggggctgtgtagttcttccaacagtgaaaaaaagaaagaaaagagagaagaagaaaactgtttcgggtttcgaaacagaaagggcctccttcccctttatcgataattttgaaagggtcgctgtaagacactgactaatgacacgtgacctttggattctccacgaggcagcaggcgcgggccccgagcccagcggggacccctctgccagttaggggtcactctctccattcaacgctttattagccccctcaagtctcagggcgaagtcctgctgctttgagacgtttacagctttgattgaggaaagctattcagggctggggcgaggatctgtttgttttcaggaggaagcctctgtgagcctgccccctcccccctgtgtttccagagttgctggagagataaaagccatacctccttttgaccttcattggacagtaggagccccgactcagcgtggaataataaaggcatatcatgctgcataaattatcccgtgattgacgctctttcttccagctctgacttaaaggggggtgtcgggggctggggcagggaatggggaggggttcggtttatttactcaagcacctactgtgtgctgctgatggggaacttcctaggcaagtcattgtcgcatttcatccctacaaacagtcccaggaggtaaatattatttatccctgtgatgtgc

SEQ ID NO: 25724 - DNA, 315 bp, Homo sapiens
  chr5:176764115-176764430
  hypo
cgcctggcccggcccactcaccagacaggtcgccggtgccggcggaggccccgaagtagtagccggtgggcaggcgcactcccgtgatgtcaatgcagttcttccactcgttcttgtcctccaggtcggtcatcacctgcagggcccagcacgctaagcacctcgcaggacagcagcctgccctcctgagcctctgtgggaccagcacagggccaccagctgccacccccaccgcctagcctgctcaccgtcagacggccccgggagtagcgcacagccaggaaggtgtcgtgatcgcggttgcggaagtcagcc

SEQ ID NO: 25725 - DNA, 53 bp, Homo sapiens; identical to SEQ ID NO: 8577
  chr5:177525861-177525914
  hypo

SEQ ID NO: 25726 - DNA, 30 bp, Homo sapiens
  chr5:178987428-178987458
  hypo
cgttagatgaggctgggcgcggtggctcac

SEQ ID NO: 25727 - DNA, 235 bp, Homo sapiens
  chr5:179448856-179449091
  hypo
cgactttcccaataacgtcctttacagcagcccaggtccgagtcacatgctacactcagtcgtcacgtcatagccatctccgtcagtctgcaactgtctctcggtctttcttggtgtttgtgaccttggcactttcgaagactacattcggcccagttgatctgtcgaaggtatttccctgtggctagattcaggtcaggtgccgctggcagtaacaacacggaggtgaggctgc

SEQ ID NO: 25728 - DNA, 673 bp, Homo sapiens
  chr5:180632796-180633469
  hyper
cgctctcttgtcccccagctgtctccacagccccgcagcagagctgcctgtgttatccgcttccacaccctctctcctcgctcactctggaggccacttggatcaagctttcgcccgcaccctcctcagaaaccgcccttgccaatgtcaccgggaacttcagcaattctcacccaaaggcgaagacctcgcctcacctcatctgcccccggatgctccctccttcccgacttcccttctcagggccttccaggacccagtgtccccgatcttcttgctgttcctgaaccccgtggcctctgcgctggctgttccccttgcgtggacctcttttctcccaccacctgcatgctccctcccacctcattcaggtcttgtttcaaacgtctctgcccacgaagcccgccccgaacgcgcacactgtgtaaagtcgtctcttagcgcgctcccttctcagggccggctctgtgcccgcactctatctcctctggaatgtcagctttcagatggactgtactaggtttgttcacggctgaatcctgtttttagagcagttcttggcaagctcagtaaggttttcttggattaaacttggttcgaaattcaaaagaggagccgcagttcacggtggaaagtaggcccatcgcctgtgtcccagtcctttcttcctccc

SEQ ID NO: 25729 - DNA, 2352 bp, Homo sapiens
  chr5:1874606-1876958
  binary
cggtgagggactgggagaccgggatggggagagagagggaggccgggctgtctcgtcagcagcaggcgtgcccagggaaacgcaggtggcatacatcgcatgcataatctcaggagacggccactttaaatcttaattggttgccttttaaatatcatttaagggctggcttccctgcctctctctctagttaagaaggtgtcgtgtcaaactctattaccttgctggacgtctctcccttaagttaaaaaaaaaaaaaaaaaaagaaaagaaaaaagaaaaaaaaaatggaatcatcagccgcggtttgagaggtcgataaagcttttagatttggagacgttttccgggagcccatttcctgcggctaagagttgttaatggagcttaaggaattatcttaggccgggcggccgggagagccgtatatctcccgcgcctgttcccttgtcgagcctgaatatgctgctgtcagactcgcttaatgaaaagtaacgcaccgctgattacagttttatttgggctctatgtaaagagcgccgttaatttgcatcccctccttggtgtgtttgaattcgccacgcctgaataaccgagcgcgccggccctgccggcctcccggcgccttcccagcccttctctgacaatctccctgggagcccagtcgcccgccccgacccttccccgtcacgcccccgccccactgacatcgacctccctggcgcgtccactcagacacctaaaattcaccccctccgtgtcacctctttgcaaacgccccctccccaccccgctccgacttcggaattgtcctgcctgacacctccccaccccacaagatcagccagagggtgtttgggggcgcctaaggcaaaccggctggactgtgccccaagggaagggtgtgggggaagcgcccagcgaggggatgccatttcctgcgcgtccccttagaatgtggctgaatccgcctccccacccgacgtctttatttaacacaatctcgcagcttattcaaataagccagctttgtcagccagttccaccaagatccgggggctccagcgagatggaattcctatggccagggccacggggaggggctggggtcccgagggcagcaagcttggctggcggcaggagccctgggtcctccccaggagagggacccagagcccagaccaagtccaacccgccaacctgcgccacccatgcgcgcactgggggctgcagagccccgccaggctgcccgcggccgggagcgtaaggccggggtccacgcctcgattttcagtgtccgcagcccctaccccgcctatctgcgacgcaaggcgaaaccttgtttttgcggaaaatgcctggctttgtctagggctggggtgggggcgtctgggcagccaccctcggccacattaaaattcctggcgccccagcctcgggcctcaacgctgtcccccgagacgccactttcgctattactgtcaagtacccttgactctttatttttgcccttttatctattacaactaattcgagttcttttgcccttttcagtctaagacgtgggctttctgcaaagcctccccctgccagcgagctctcggagcgcggagcctttagaaattgaggggtttactgtcaaaatgaaaatttcacttcaaattaccttggctgatgctcgctcgccaggccgggggctcccgccgcagccttttgacaggcacatgagccgcgagcttccgaacctcgataatatcatctcgagcgcgaaagtcaatacggtgacagcgcgcggccggatacaatccaattacgctcggctgcccgggcgctcctggggctcggggtccggcggccgagggtccccctcagggcccggtccaggccctgtcgccagggttcagggcaggccccaccacgcgggggactttggtggcccaggggtccccacgaggccgcagtccgggtccgcccagccccaggctcctagaggaaagccgagcctagtgagtccctccaaggccgcccgcccgcaagacagtcctgcgtctccggctatcctgtcccaggcaagggcctgtggtcgcctcctcgccgcccccgggccgctcccgtagtccttgggacacctgggcctttgatgagcccagcagggcttcgggcggagggctcggggtggggggtggggggcgagaggagaggcctcaagtccgccaggcgcctgcgggggatgcggaaccgcctccgccgcggggatggggaggggagcccggatttctgagcgtagccacggcttggccgggccccccgagccccggatcgctccgcgggttccttccacacgcccttccc

SEQ ID NO: 25730 - DNA, 346 bp, Homo sapiens
  chr5:1879488-1879834
  hyper
cggtttgcacggtgaccgcctaggcatggggctcggcgtttgggacccccaagacgtcctagaaccgcagagaaggcactgtgcctgcactccagggcctcagcccccagtgacaacctcccaacccacctgcgttcttggagctcttgaggggctcctcccgcgcctcctcctcgcccccctcctcctcctcgccctccgcgtagggccgcttctcgtctgcgcacttgttccgcggcggccacgtcatcttgttctccttcttgaggcgccggcgcgcgttggcgaaccaggtggagacctgtgtgagggtcatcttggtgatgatggccagcatgatcttctc

SEQ ID NO: 25731 - DNA, 1567 bp, Homo sapiens
  chr5:40680513-40682080
  hyper
cgggtccaggacatctgagggctgaccctgggggctcgtgaggctgccaccgctgctgccgctacaggtgagatggcgttgggctgacgttggggtcaacgggtagagaacgcagggatgcggccctcgccgaagagagccaagaagggaagagcgcgctctccaaattgcttttgtaacttgttttcagtgagcattttattgattcagaatctatcgagaatagcactagcgagctacttttcccttgagatgggtcttattcatcttggcaatggagtgagttggattgtggggaggaagaggaatgggaaaatcagtttataaatattaatgtcagcaagagtgtgctgttggcaggacgtatcgcgagcctggagattttggtggccgcagttggtaagtggctacaatccagaaagtaggatcgagttgctccccttgtcttatcagtgtatcgtttctcgggcgcgggtctaacaccttacaagtggtaatttccgctcacggcagctttgtctctcttctaccatccccagacccagccttgcactccaaggctgcgcaccgccagccactatcatgtccactcccggggtcaattcgtccgcctccttgagccccgaccggctgaacagcccagtgaccatcccggcggtgatgttcatcttcggggtggtgggcaacctggtggccatcgtggtgctgtgcaagtcgcgcaaggagcagaaggagacgaccttctacacgctggtatgtgggctggctgtcaccgacctgttgggcactttgttggtgagcccggtgaccatcgccacgtacatgaagggccaatggcccgggggccagccgctgtgcgagtacagcaccttcattctgctcttcttcagcctgtccggcctcagcatcatctgcgccatgagtgtcgagcgctacctggccatcaaccatgcctatttctacagccactacgtggacaagcgattggcgggcctcacgctctttgcagtctatgcgtccaacgtgctcttttgcgcgctgcccaacatgggtctcggtagctcgcggctgcagtacccagacacctggtgcttcatcgactggaccaccaacgtgacggcgcacgccgcctactcctacatgtacgcgggcttcagctccttcctcattctcgccaccgtcctctgcaacgtgcttgtgtgcggcgcgctgctccgcatgcaccgccagttcatgcgccgcacctcgctgggcaccgagcagcaccacgcggccgcggccgcctcggttgcctcccggggccaccccgctgcctccccagccttgccgcgcctcagcgactttcggcgccgccggagcttccgccgcatcgcgggcgccgagatccagatggtcatcttactcattgccacctccctggtggtgctcatctgctccatcccgctcgtggtgagtgaccggggctggggccctactcggcctttttctcgcatccacctcccgcgtccattccccgctccctgctttccctctgagtccttggcagtgaacgtgtcgcctttaggtc

SEQ ID NO: 25732 - DNA, 137 bp, Homo sapiens; identical to SEQ ID NO: 24513
  chr5:40775162-40775299
  hypo

SEQ ID NO: 25733 - DNA, 1687 bp, Homo sapiens; identical to SEQ ID NO: 23300
  chr5:42950747-42952434
  hyper

SEQ ID NO: 25734 - DNA, 1260 bp, Homo sapiens
  chr5:42991800-42993060
  hyper
cgtcccattctggatccttattccagctcctttccctctgcgaatcgcacttggtgggtcgcggggccctcagtaattagggatcacggatcagccaagaaaaatacaggttttcttaagcctgaagccactgacttgaggagggagcgtgggagtaatgtcagtagcagttttttatttcgttttcgtttttattttctagtcactaggccaccaaagaaagttccacccaacggccagtcgatccgtcgcagcgactctcttttccctgaacggagggtttatggctgacacctccacttgtttctcagagccggggctgactgccggctgcatctttgaatggcgaccaaaaaagacatgcatttgtctggcaaagtcgctggcgttcgcctggtgcccgcgcttgccgggtcctagagcagccagattttcacaccagcgagtccagcgcccagcgccactccgccttcggatcaccggtttctcacatccgcagcagcactggcctgacagttttccggttgcgacagcgctagttgagccaaacaaaacgttttcctgcttgctctgggcgtcccattctccatccgaggccttctagtcccggtgtcactgtcgcagcacctggcgttcgttagctctttcaccagcggcgcggagcgggcggttttgctgtcacggcacatgtggcacggagtttctcggtggccgaaaccctcttttttctcagagtccagtttcttggtgacagcgctgttggttgcgccataaggaatgttgtccttgacaacccgccggccgcagtcattcgcaagctccaggcaccgacatttcgcagaactgaggtctctcggtctcagcacagctcgttgctcgatgcctccattttctcggggcgacagcactcaggtcgccgatctgagggattcggagcttccccagctggggtgagcctggcgttcccgggcggcggcggcggcgctgggctaggggagcccgccgctcctccaagccggtgacaggggagctgcccgggcgccgtctcttcccagcgccgccgcagaacccgcagaacagctcgacctccagaaccctgtgctgtggcggcggggctggcgtgtctgtcgcaggaccccgcagattcgtctgtcgttggcttgttggtcctaacaagtttcgatttcagggtgcctgcgtttctttttcttttctcttcttttccttttgttttgttttgagacagagtctcgccgtgtc

SEQ ID NO: 25735 - DNA, 229 bp, Homo sapiens
  chr5:42993305-42993534
  hyper
cgctgcgcccagccggtgactacgatttctatcccctggttcaagtcggggaatagccaaaatgtgatttctcaacccaagcaagtacccacttaggacaaacaccagcctagccctggcggcgatttctaggtcgtaggaagtcgatgtttcgccacagaaaggctgagtgaccctgtgactcatttcccagcaactccgggtttcctgtagcctaatcataacaaac

SEQ ID NO: 25736 - DNA, 1290 bp, Homo sapiens; identical to SEQ ID NO: 24515
  chr5:42994313-42995603
  hyper

SEQ ID NO: 25737 - DNA, 1012 bp, Homo sapiens
  chr5:43007481-43008493
  hyper
cgaacctaggcaggcagcgtggggtggagttggcaaacgtcctgcaacccatgaagagccgctatggtaccactagcggttctaggacccaaaaactaacgaaactgctcaggagaagctgcaggcttgacccaccagaggtgctgccaccgagatcaattctgctcggacgaatgagcggtgctatgactcagaaagtgccagtccgaggaaccagggatactgggacatagtgaaaggagttagccagctttagggagactgtaagggaagggtccccagagaacctccgactggtgttttgtgcagataagggaacttgcacaagggacttgcctaagcatgcctgctgcggattaagagcgcgcatgcgcactgggggaatgggatggagccacccgggattctcgccttatacaaacagggaacccagcctccttagctttcatataaaagcctttgtattcagccgttaaggagcaaccggcaacctgctttcaggacccttgttttttatgagagctttcgtttacgcttaataaattctactccactcactcttcgatatccgcgtgcccacttcctcctgatcgtgagacaaggacccggatatagctgagcttagaagcaaaaatcctgcatcaatagcaaatgcggacactgaacgactagcggagtacccagcggcaaactttagtttttggtgcagttaaggtattgccactaagaaatcgtcgtctctgagaaatatcgaggcttggaaggttgtacagtgcttccaccgagaaagcacctacccaatgaaacgcctgtggcagaaaaaccgagcccaagcccttccagcgaaagtgctgaaagagcgcctcctcggccaatcactgggctgagaccgtgagacagccagcccggggaaagtggcggcgctaggagaggggaagcgttaccacaaagcacttctgagtcttgtgaacaagaaacgttctgggttgttttgtttttgagaaggagcctc

SEQ ID NO: 25738 - DNA, 186 bp, Homo sapiens
  chr5:43008736-43008922
  hyper
cgtgagccacagcgccccgccgaaacgttctgttgtgttcagcgcttccagcggtgcagcagccgagaaaacactgagtctccgctattggcgaaagtgctgatgcgaaactgctggctcgacataggcacagagccgcggaagagaaccctagagaccaggcaccagctctgctccccgactcac

SEQ ID NO: 25739 - DNA, 1396 bp, Homo sapiens
  chr5:43017299-43018695
  hyper
cgctgtcaattctacatccaacgctggaatctttcagcccattttcctccccggctgtttttgaactactatccccaaatatcgaggatatctgacagagtgaaccatcagaataaggagcgattgccacagagttccatccagtaggggagggacttgatgtgcggggcaagcctgatgcccgggtcaggcgactgtgcctttcattctccacggagatcttgaacctagagtttccaagttccgaagagatgcggttgtcgacagctctcctagaatctctgatggctctgaacggggacaaaggtctagggcagagggatggtgtggaaggacccagccacggccattggaagagcagtttcctgcaatgtaatgctgtttgcgaccagcataagctttagctctctcccaggacgagccacatccgccccattcacggtccttattccagctcctttccctctgcgaatcacactgggtgggtcgctgggggcctcggtaattacggattatggcacagccaagaaaaatacaggttttcttaagcctgaagccactgacttgaggggggagagtaggagtaatgccagcagcagttttgtatttggtttttgtttttatattctagtctctaggccacaagacaatgttgcacccagtgccagtcgatccgtcacggcgccgcaaactttccctgaacggagggtttgtggctgacatctctagtttctcagagcctgggagtgatcactggctgcaccgctgatggcgcccaaaagaacgcgcatttgtctttggcaacagcgctgggtttcgcctcgtgcccgcgcctgaagggtcctagcgccgccagattctcacactcgcgggtccagcgcccagcgctgctcctcccaccagtcatcggtttctcacacgcacttcattggcagcactggcgagtcagttttccggtggcggcggcgctagttggtctgcacgaaacgtttcccttctcgctccgtgtgtcccattctccatcccacgtcctccagtgccggggtcatggtcgcagcacccggcgttcccgttggctcttttgccgctgcgcggagccggcggtttttctgtcacagcacttgtacggagtttctcggcggccgaacgtctctttttttctcagagacgacggtttcttggtgacagtaccgttggttgcgccgtaacgaatgttctccttgacagccccaccagctggcgtcactcgcaggctccagacgccgccatttcgccaagccgaggtctcttggttgcggcactgcttctggctcggtgcctgtattttctcggtgcctacagcgcccaggtcgccgatctgagggcttcggagtaccggccgggcgcggtggctcac

SEQ ID NO: 25740 - DNA, 1298 bp, Homo sapiens
  chr5:43019005-43020303
  hyper
cgcgaatgcgattttttttaggtttaccgatgatcagtttagcagtgcctgggagctcttataccaagtttgttttcgcaatattgagtcccaccttagctaagcttgtgtgtattttaaactcccatggaagtcaggaaatgtccgcaaacgcgatttctggttaccaagctccgtttggcaatagcaagtcctgccgaacgcgactttttcctcttgtggaccaagtctgaatagaccagctactgcgatttttaagtcgtagtaaaaaaggtttaaccgtgactgcttttttttgttggtgttgtttgtttttgtttttgttttcgtaggaaatgtagacttaggtgtaacatgtaccggtttagatctgacagagatatcacaattgtaggattgcatcttttagcaaggtttgtaatttcttctttctaggattggttctctgtaatttttgcttatttttaaattctctctttgtcttttgctctgagaacgatgttaccgatgtgtttgctttccatgtttacttgcattttagcctttatttttttaattttgattttatttaaatgttatgtattttttttctactaattttgagcgtctcagcttcctgcttctttacttacattctctcaggatccggggagccgagctcggtctcagtctccctgctgtcaggtgccaggttgtgtctggtggctctccttcgtatgcggagctgatggttttgcatcagcgcttttgccagtagagccgactagcgttttctcagttacggcaccgttcttagcgcccagtgtgacgtttcccattcgccaggtccttatgttctctgtgctgtcactttcttggttctcgcaccgctagtatctgctaaagaacttcctaaaccatgttttactgtgcagaacggtgattgcacggagccgctgtacgcactagtaatttcatagcaccgttagctggcgctttttctgtcacaacacattaaaacgggttaaaatactgcaagcggattaaacacattaagaggattaaaacattaaaatgtctcaacacatttttctgacacaacacatttaaacggagtgggttcattcctccgaagaggatgtttaggcgtggaagcaccgctgtttcccaagagcacggtttctctctggcagcaccacttatggcaccaaaacaggtattttttggcaacaccagcactattcgctaggtgccggcgcttgctgagtcccagcgccgccagtttctctttcggtcgttaagtagctcagagccctagc

SEQ ID NO: 25741 - DNA, 545 bp, Homo sapiens
  chr5:43396922-43397467
  hyper
cgcgctactggtatctgtagtcgtggctgccgtggaccaggagagactgaagtggaaaacagcgggcggtagccgaagcagagagcaaggaagagcgcgggaagtgcagagcgacagcaacaagaaaggggtggcgcgggacgtcgtttacctgggcgacgtccagccgcccttcccgcctctgcgcgtacgcaacctgcttggcgccactgacctggtgaggaggcttctttaaggccgtggacggttcctacccgcgcgcggagaggaccgacgtgaagaagctgccaaagtataacaagtactacgcgaagggtaggtagggtggagtcccaggcagcgcgtgacggccggatgcccagacgcgcacgtcgcccgcaggcgcacgcctggacccgggggagccggctggggcgcccaggaccaggcctagcctaccgcgggctgcccttcacagagctgcaggagaaaacgttgtattgtgcacgcattccctaacccttactagtttttttttttttaattgatcggccagcttttgatgc

SEQ ID NO: 25742 - DNA, 386 bp, Homo sapiens; identical to SEQ ID NO: 8590
  chr5:510026-510412
  hypo

SEQ ID NO: 25743 - DNA, 811 bp, Homo sapiens; identical to SEQ ID NO: 24516
  chr5:54516349-54517160
  hyper

SEQ ID NO: 25744 - DNA, 1069 bp, Homo sapiens; identical to SEQ ID NO: 24517
  chr5:54518558-54519627
  hyper

SEQ ID NO: 25745 - DNA, 635 bp, Homo sapiens
  chr5:6583144-6583779
  hyper
cgcttctcgggcgtcggggctcgccgcagtcacgctgcacaccctcccggcctagggcggcgccggcccgggactcgcgtgtctccccgcggcgccgcgcaggacccgggcctcggagcccggcagcatcccctgctggccgctgggctgaggagccgcgggaggcggggaacgcggggccgcgggggctgggcgggccggagtgcgcggtagagggggcggcgcggccggggtgcgcggtagagggggcggagcggccggggtgcgcggtaaagatggggcggcgcggccggggctcgccagcaccagccctggaaccccatgggggacctcgacaacagcgcctttgcggcgtgggcccctttctgcagctcctccacccgcgcgctgtcggctccgggacactggggctttgaagggcgccagttcccagccgcacctgcacgcctaggagggcgcaggccgcgtgtccctgtgggaggaaggccccggcaacctgcaaagacctcacgtcacagaaacttgcggcgtttgcccccgatgcgcgcgtcaggtgctccgtcccttccaggtggcagaggagagggaagggtcgcgcctggtgggggcctgagagccaccgggctgcggtgcgc

SEQ ID NO: 25746 - DNA, 987 bp, Homo sapiens; identical to SEQ ID NO: 23304
  chr5:72529324-72530311
  hyper

SEQ ID NO: 25747 - DNA, 316 bp, Homo sapiens
  chr5:77140518-77140834
  hyper
cgcaactttgctgagccattttcccgcgaggcccccagcggcgcgggggctgtggggaggtggtgtgggagtacggtcgctgctgcgcggcgtggggagaactggagcggctgcccggacgcccccgccctggtcccgggtactttctcggcctggctgcagccgcgtggatgtctctcgaagcctccaccctattctccttattgttatttccactcaccccccaaccccctcccgccgtcctggttccagaccgcctctctcaggctgccggggagggggcacatcgcgccctccccgagaccctcggctcccc

SEQ ID NO: 25748 - DNA, 1132 bp, Homo sapiens
  chr5:77268330-77269462
  binary
cgagttcacagatggtaaatcgcgtggagagaaatgagctggagagttacaccgagtcaacgcgggacacggctcccggcccgggccgggccaggggtgggaggcggttccctaccgcaggcggcgggactcccatgcgccgagggacccaagtctccactccacccacacgcccacccggcgtcggggcgctgcggcctcgcctcacgagcccagagcaggccgcagcctgggctggggatccggcacctgggcagggtgagcttggccggacatcctcctccaggactacccgcaccccacagtcgcgtcaaaagcgccccatccccctgtctctcgccgcgcaggtttcccaccgacgcccgctcggaaggcgagagcccccacgtggcccggcgcggcgcggcccccggggaccgcgagcaacaaaagcccggcccgcagcccctgctcctcgccttccttttcaattctcccctgatctcaggtggaattaggaggattaaagcagcaagtaaatgaggcgagtgtgcaaaatgactcctttctgaaccaaacggcatgctccgtgctggggaaatgagatgcacatttaaatctcatccatccaccgcctgcggccaccgccatgtacctgcctacttagcccaagggttaattaattgaggcttcaatgcactattgcaagagcattattgcatttgatactctacatctgtgatttaaaactctttcagtcccttgtcagcaagggagggtttttaactaggaaattagcattcagataagggaacgctctatttgcttctgaaaggaaggaaatattaaggatgctggtgcacaaaccgggctgtcatatcctgtcccatcctggagggagcgcgagggcccggctcctctgggagtggcggcgacagggcgtcgtgcaatggacgccagcaccaggggcgggctggagggggaccggcgatcagggaaaccttactcctcgcaggcttcaacctgctggggcgtgtttacgtccgcaaagtccgataatatattttgtccccacttcttaggagctgattcttcttaaaatgcattgccacgttatctctaacgttggctttctgacttccccgcggggctc

SEQ ID NO: 25749 - DNA, 847 bp, Homo sapiens
  chr5:94955574-94956421
  binary
cgacattctgtcctgctgtgctttacacgtaaatagagaatggatgaggttctcagcgcccaggggtccgcggcttccgcgagggtagcgtcgggggccgctgcagagattggaagagtacccgccgggaatgggagggaagacgcggggaaggtggagaataggaatcatgtgtgttcctcgagtgtacaacccacatttgagtgacaaatcacgaggacaatcgacaaaaacaactaagcgcaaagccgcccgaatccatctccctctctgtgcgtgtgccttttcaactaactttgggaactcgtatagacccagcgtcgctccccgcgccgcctcgcctccactttggtttcccgcgtcctgcccgccctcttcggtgcctcctcttcctccgggacaaggatggaggatctctttagcccctcaattctgccgccggcgcccaacatttccgtgcccatcttgctgggctggggtctcaacctgaccttggggcaaggagcccctgcctctgggccgcccagccgccgcgtccgcctggtgttcctgggggtcatcctggtggtggcggtggcaggcaacaccacagtgctgtgccgcctgtgcggcggcggcgggccctgggcgggccccaagcgtcgcaagatggacttcctgctggtgcagctggccctggcggacctgtacgcgtgcgggggcacggcgctgtcacagctggcctgggaactgctgggcgagccccgcgcggccacgggggacctggcgtgccgcttcctgcagctgctgcaggcatccgggcggggcgcctcggcccacctcgtggtgctcatcgccctcgagcgcc

SEQ ID NO: 25750 - DNA, 109 bp, Homo sapiens; identical to SEQ ID NO: 24522
  chr5:94982109-94982218
  hypo

SEQ ID NO: 25751 - DNA, 169 bp, Homo sapiens
  chr5:96114516-96114685
  hypo
cgcaagatccagtgcatgtgctgagggaagaccggcaggacttgcgtagttagatgtctggggaagaaaggattcaggatgactcccgtattttatatgtccgtagtttgctctccattatgataacatctcgggctctttacttttcatgccctgcttcaggatcttc

SEQ ID NO: 25752 - DNA, 140 bp, Homo sapiens
  chr5:98200950-98201090
  hypo
cgctggaaccaagtaagtcagagaagtggccggcaacgatgggaggtgactagatgctacgaggctggtttcaggctaagaatcttttctcctaaatgagatggaaagccactggagtgttgtaggcacagaaatataac

SEQ ID NO: 25753 - DNA, 1333 bp, Homo sapiens; identical to SEQ ID NO: 24523
  chr6:10389924-10391257
  hyper

SEQ ID NO: 25754 - DNA, 895 bp, Homo sapiens
  chr6:10421371-10422266
  hyper
cggtggaaatagggcggtgactaacttttcagagtggaagacacgcacgaagggcgcacctgcagctctccgggattcaggcgggggtcgctgtgctctcttaaaagtgagcggcggtttcagcctgccaccgcttcgcctcgccagctcggaggaaactctggctggaggcgacctcgggcccagccggacgggccgggccgagcctaggaggggctggcagacgtgtcccagggccagggtggggcgtagggagcgccgtctccaccctcagtacttttggggtgggggacctgagcgtgcggagagcgggaggcagagctgagagcggggttaagcgcgaagctaaggcgccgcatagggttgggtgggaatggacagggtgagctggaagcgaagcaccccagccaggccttaggagagaggaccgtcggcatctgtgcacatcctagcgggcggatgatgtgggagagaggcggagggaggtgaaatgcgggagctagaatttagctttgcagtgaggtcacttggggtctgcattcagctccgatatatacatgtaggggctgtgtgatcctggggaagttaccgaccttgtctgaactcctgtttcctggtttgtaaagtggctaattggtgggaattcaataggagaatgtgcgcaaaacgcttagcacagcgcctggccaacaatgcgctctcaagaaaggctgctgagccttgtccaggacggtctacaccgccccacgtccaagatgagttcacagcgcccaagacctgttcaatttaagatgatgtaaactgcattgcccttcttagacacgcagcagccaggagctggtcatctgcacctcccgcgatttcctcctcagaaccccagtcctgccagatttgc

SEQ ID NO: 25755 - DNA, 971 bp, Homo sapiens
  chr6:106959878-106960849
  binary
cgccagggtcgcccacccaggagcggcccgcgggaggactaggcgaggcccctaacggagcccccagtgtgtgtgccgaagaaggctccctggggccccgcaacgcccgcagccagccccccaagggcgcgtctgatttgccaggtgagcctccggccgagggcgcagcgcacacggccagctccgcgcaggcagactgcacagcccgccccaagggtcacgcccaccctgctaaggtgctaactttggacatctacttgagtaagactgagggggcacaagtggacgagccggtcgtgattactcccagagcggaagattgcggtgactgggacgacatggagaagaggtccagcggccgtaggtcggggaggcggagggggtcgcagaaatccaccgactcccccggcgcggacgccgagctccctgagagcgctgccagggacgacgcggtgttcgacgacgaggtggcgccaaacgcggccagcgataacgcctcggcggaaaagaaagtgaaatctccgcgggcagccctcgacgggggcgttgcctccgctgcgagcccagagtccaagcccagccccggtaccaaagggcagctccgaggggagtcggaccggagcaaacagccacccccggcttcgtcccccacgaagaggaagggcaggagccgtgccctcgaggccgtgcccgccccgcccgccagcggcccccgggctcccgccaaggagtccccacccaagagggtgcccgatcccagcccagtcaccaagggcactgcggccgagagcggggaggaggcggcgcgggccatcccccgcgagctcccggtcaagagcagctcgctgctgccggagatcaagcccgagcacaagaggggcccgctccccaaccacttcaacggccgggcagagggaggtcgaagcagagagctgggcagagcggccggagcgcctggagcttctgacgcc

SEQ ID NO: 25756 - DNA, 1104 bp, Homo sapiens
  chr6:107809991-107811095
  binary
cgaacactccacagtaacatgcagtggaacaatggacacccccatatcgcattgtgtcaggtaattatgaagtgtcgaggcgcgggaaggagaagccgggaacgtcaatgtgtcctctgcaacgtgtgggagcgctcagagccgcgcgtatcacagaaacatcatccagtcgtcacccccaatgcctcaacccagggacagggacagactcaatcagacctcggccccaggcgtggcaggagagggccaaagaggggacttgtgagcgcagagggagcgagcaccgctccatggagggcaggcgctagctgggaagtcgggaggagaaagtgcaaccaggcggggaggggaggatcccaccggggcgtggcgagggcgttcggggtccgggtgagcgggaccctacgcgggaccgtgcgctcccagaagctcccactcagcccaaccttttgggcgaaacccaggacacccagataagggtgcaggcggggtcacgcgtaaagctgttactttgaagcagggcataagtgagagagagataaagagagaaggaccaaggggaaaaagaaatgaaggggctgaaggccgagatgtcctacttctaagtagttctttgagaggcaaaagcttcattgccattgcagtccgaggcagcgccgcgtggaggaccggccgggcggggcgcggggacctctccaaggggtctccagcctccgcgcactctgcggtggcccccggagggggaaactattctggcagctcagtggggggaagctcgtccgggctgtggtttcctttccccgagaccccagcgttgcacccccgaggcggcaggctcagtcaaccctccccgggggacggcggccctctagccaggcgacctcaggtctcgcgacctcccgccgcccaaccttctcctttcacccccattcatttttcctcagcggctcctaggacgggctcaaaaaccaactccacacgcaacccagcccacctcgcggagctgagaagcagggctgggttccgagcgggcgccggcgcccctggcgtgtggcggggaggtggcggccgcggggggcgccgcgagccgcccgtgcccgccgc

SEQ ID NO: 25757 - DNA, 1650 bp, Homo sapiens; identical to SEQ ID NO: 24529
  chr6:108439510-108441160
  hyper

SEQ ID NO: 25758 - DNA, 1803 bp, Homo sapiens; identical to SEQ ID NO: 24531
  chr6:108489327-108491130
  hyper

SEQ ID NO: 25759 - DNA, 1114 bp, Homo sapiens
  chr6:111408744-111409858
  binary
cgatccccgaggtgttcgcgcgcgccagctgtcctcgcggccgcctgcgcgctggccgcctgcgcgctgccagcccgcccgcccgccaggggctccgccgccctcgcctcggcctcgttagcccgccaggagccccgcagctcctccgggagcccgctggtaactcgcgtccctcgcgcttctccggcgcctgaggggcccgcctcgggccatggtgctctcccaggaggagccggactccgcgcggggcacgagcgaggcgcagccgctcggccccgcgcccacgggggccgctccgccgcccggcccgggaccctcggacagccccgaggcggctgtcgagaaggtggaggtggagctggcggggccggcgaccgcggagccccatgagccccccgaaccccccgagggcggctggggctggctggtgatgctggcggccatgtggtgcaacgggtcggtgttcggcatccagaacgcttgcggggtgctcttcgtgtccatgctggaaaccttcggctccaaagacgatgacaagatggtctttaagacaggtgaggcgcggcgcccgccgaggccagcctgggcgacccgcgtggggcccccgagcgcatcccgcgtgtgggctgtgtctgcctccgagtgtgcatgtcggtgggtccctgtgccagagggtgcgagcaggggggtctttcgagttgcagacagagcctgccgcttctggggcctcggggtgcccgtctttatatggaatccagctgcagagctgtgtgtttgcaagcaggtcgcagaacttacttgccgagatcgtcctcctttcccctcagcagagcagacgctaacagtccacaggagcccttccttttattgtttgaaaacaaacagaaccccagaaccttcaaccccagtcatcgccctgtcatttttgtggtctctttcgtgactatgccagttatgtagttcttcacctgcctccctgggccgcagaggggtgtgcgtatgttggcggggcggggggtggagtttggaggaatgaaagagatttgtacgaaggtcactggagttccaaagggggccctgcaagagtcacggttccgtgcgttcccgtcccccc

SEQ ID NO: 25760 - DNA, 138 bp, Homo sapiens
  chr6:12287989-12288127
  hypo
cgcgcgcgcgcgcgcgcaggcacacgtcttgcaaattcaggattcaaagagacaggggcaccattatatttggcacggtggggcccttccaggtctgaaatcctgcattcttccttactatttactttccccgagctc

SEQ ID NO: 25761 - DNA, 1766 bp, Homo sapiens; identical to SEQ ID NO: 22930
  chr6:127836014-127837780
  binary

SEQ ID NO: 25762 - DNA, 821 bp, Homo sapiens
  chr6:128901277-128902098
  hypo
cgatgtcgacactctgcacatgctcctcaaacttggtgatctcctcctccagcaagtctgtccccactttgtcgtcctccaccacacactgaatctgcatcttccggataccatagcccacggacgccagcttggaggccccgctcactagcccatccagctggatagagcgcacacatgcctccagctgggtcatgtccgtcttattgtcccaaggcttgatgtccagcaggatggaggacttggccaccagcgagggattcttggccttcttggcgtacagccgcagccgctcctcccgcagccgccttgcctccttgtcttcctccttattgtcgctgccaacagatcaatgtcatcgtcctcgttatcctctgcttcttggccggggtcgtagtaaggggggcgaggggaggggcgctccacttggcgcatgggagacacgtgctgtgtctgcgggactgtggaccatggccaggcgagctcttctctcttctccggcatgttcagccaggcctccaggttggagaccgcctgctgcagctcctgcaccacgccgcgcaggctctggttctccacttccaggctggcgatctggaggacgagctcgctgtggtcttccctggggccgagctctggcgggaggcgctggccacaggcccattcatctgcttgtagaatttcctttctgtatcttcatatttgaatttgtcgagccagatcttctcatgtgctaggaattttgtagccatttttctgacgcctgccaagaatgcggctaccagaaatgaggaatcggtagacgcaggacgcctaagggc

SEQ ID NO: 25763 - DNA, 119 bp, Homo sapiens
  chr6:130499399-130499518
  hypo
cgtgagccaccacgcgcccggctggcccaacccttcttgaagacagtgccttagggctgcttctgctgctcttctccgctgcaatgccgtgtgattgaatagatccccacagtgagtgc

SEQ ID NO: 25764 - DNA, 135 bp, Homo sapiens; identical to SEQ ID NO: 7454
  chr6:136901469-136901604
  hypo

SEQ ID NO: 25765 - DNA, 125 bp, Homo sapiens
  chr6:137144495-137144620
  hypo
cgaggaatgcacacattcgcaagtaggtgttacagactccagttaattgtctcccgtcgcgcgcattggctcagcctgtggttaaagctgctcaggaggctgaggcgggaggatcgcttgagccc

SEQ ID NO: 25766 - DNA, 498 bp, Homo sapiens
  chr6:137310868-137311366
  hyper
cgcagtcagtccaaagccaccccgggaaagatgtggcccgcagcctggcaggctgaggacgtgtagggggctgcaccaggcgcagcgagtaaccctactccgtttctgaacgcacgcgggggcgctgccaatgtaaggctccctgttaggaacgggtcctagccctcagcggagggtcacaaagaaatgagactttcctggcaagactgtggaatcagatcgagccatttttaactgtaaatgtctggctttgcctgcagcatttcaaggaagacttgactgctgtgcgttgccgccctccgccccgctcccctgcacttacccacccacctcgcctgcgctgatccgcagacgcgcgcggggaaaggcacgcgcgatgctttcccactcgctcagcgggcgccgctcactggaaactcgctccggattccgaacccgagagcagagcagagggaagcccctttgctgagcagctccttagtggagggcaatgaacgc

SEQ ID NO: 25767 - DNA, 1460 bp, Homo sapiens
  chr6:137809033-137810493
  hyper
cggacagaactccaaaacttacgaggacagctatccaacactgcctcacagacccttaggcgctgccccctctttgcccctgtcctcctgcggtgcgagaaacccgaccactctgcttctacccgaaccccaggacgcaacagtaaaatcaaggcccgtcgttgaactcccaggtctgcgcatccctccctcctggctccctggggtcttggccccagcaggtccagtacccatccccagagggacccactaccctgggcgtcccagggtgccaggcacgatggcctgcaatgggggctgcaatttaaccgaggcgagttaaattccttttgccggtgcctggctgcgaggacaaacgtccgtactttcgttcgggagccacgggcagtccaggggcttgggttagaagcaacggctctcttccaggggctgtgatccgggtcggccagggagagcgaggccccggggtcctctgtgaggtccccagcgaagagacgcagctggggaaggcgccgcccccgggccccctgcgccaccctaaccgggcctctccttagcaaagttgacaaattcttgagagtgtcagcccagggctgcgcgtgagggcgctgggaccggggaggaaagagcacctgccgcgctcagcccgactttgaatttgtttgttgttaccgtttttgtttttcctcccagtttccataaacgcttagtatttcgaggcactttgcaggtgttggcgcaggtgatgatgggcctcgttggactctgcctcccacgcatccttttgttttctgcgcgccagcctgtctgactgtgtcctgcggggaccccgagacagtccggggtcagggcgtagagactcatgcttgccacttgacccatccgcaacccggggaccccctagcccgtcgcggagctggagtttgggcttccggctcccagctctccgccctggatacaggaagagggcgggagaggtcgcgcacccgcgccgctcggcggggatcgctcacaggggctccggggccaccgcgagcgcggactgcggctgctggcgggctccttcgtcgtccaacgcaccccatcctctcccgccccgcagtgtcccagggaaggcttcactgaaaacagacgctcgacggaaaactgactctgcaggcccgagctttcggagtttgatttctgtgggccccttaaacgggcactgggtacaggagaggccccaactctctgcagggacggggagggaagggcactcactctcccgcaagttttcctagaggcgagctgaagatgcaggccacctccctcccgcacggcccctcccttggcctagttctgtccaaagacacttcccagccctcgagcggcggctcctccactcgattcctgcctacacgtgaagagcttggacccagcggggctgcactcgggaggacaggcccagatcctgcacggcc

SEQ ID NO: 25768 - DNA, 1003 bp, Homo sapiens
  chr6:143247656-143248659
  hyper
cgtatattctatccgggcaatgacaaacggactcaggcctcctgaggtcagcgctcctgggcaccatcaggccccacttcgggagcccccggtgctccgggcccacctgactgggcgtcctctgagtcagggaggtgccagtgctgtggtccccgcgagcccaactgtcccctgacccccgggcttttccgcaccgtggagtcccccgacacgctggggccagtgaacccgggccggggcgcgcgttctccctcccggaccagctcccggcgctgggcccgcggccgagaaactaggtctgggccggccctgcggcggccgccgggcgcggcgagccccactttctcccggcaggaaggggggaggccgagagcatttcctgttgtgcagctgagccctgcggagacgtcattgcattcatgctccctcgggtgtcagcggacggggggccaaagttcaagccgcgtccagggcaggcagcgcgcggcggcgcggcggcgcggggcgggcggccagggctcccctctcccgctggcgctcccggcgcctccgtccccggccggcccagcgctgctaccggaggccagccctggggctccgcggggaagagctgctcttcctcccggaggaaaccgagctcgcaagcccagcgctcccagccgcagactgcaggctgccctcctccaccgcctggatttcccacggggaggaaaaggcgtgcgtttccaggtgtttggaggacgcactggccgggcgcactttcctcagcgtaattttgaacgcagtttccctaaagatgactcttttttccactaggattatttccaagtcatcaaaagtgaaaaatcacgtaagtgttgttgcagttgttttcccctcgttttctatctcctttccaattgtgaattccgtaaataactgtcagacataaaacaggaaaaggaacatttcttcactgcagagctccagtaaggtgaaagtaggcaagaaggccccctgagac

SEQ ID NO: 25769 - DNA, 620 bp, Homo sapiens
  chr6:150311768-150312388
  hyper
cggattgggttttgtactttttctgtgtggttggtttttgtgtgtctgtgggtgatgaaatcgggtcggagtcgctctaaagtcatttttgtctcttgcgcgcctcagggaggatattaaaggcttttgtggatttcaaccgctaaagcctttcctcaaagttcattgcgaggggtttcagttccgcccggcagcatccctcagggttctgcgcgctcccgtggcaccgtctgcgcccgagctccggtcccgtcccgattgcctgatgccccgcagggagcgcccagcggccgccgatgtcccaccagcaggcaccgggcgcctagcgggacccgcgggcggaactgcctttggaagacgcgtgagaactccaccccatcgcggcaggggacagttattatctccgagcttgaggtgaggggaaatcagaggcggctgatggtttcctcctacagcctggtgctgggcgcggggaggactttacacccagctcctgccgagacgtgaccttacagctggggtccttggggctccaaaagtgcggcttccgcgcggatcccattcctgcttgctttgaggctgctggtgagcggcgcctgcgcaggggaagttgtgtgccc

SEQ ID NO: 25770 - DNA, 752 bp, Homo sapiens; identical to SEQ ID NO: 8612
  chr6:150921277-150922029
  binary

SEQ ID NO: 25771 - DNA, 398 bp, Homo sapiens; identical to SEQ ID NO: 8613
  chr6:155577660-155578058
  hypo

SEQ ID NO: 25772 - DNA, 283 bp, Homo sapiens
  chr6:157505832-157506115
  hypo
cgaattctaagccatatacgtttattgcttatacaagtattcaaaaagattccatctacctctacacaaaataaagatcccccagtggccagtttgaatacatgtgcacttctaggaaatgccaccctacaggttcgacagctcgagctcccccgccctctttcggaaatcctcagatttgaactttagtaaaatgaagcctgggcttcgtttctaatgtcccctacccagcaagttctcacttctagggaatttaacaagctgtcgtggtaaggatccacac

SEQ ID NO: 25773 - DNA, 844 bp, Homo sapiens
  chr6:157557124-157557968
  hyper
cgctgcccaggagcggaggggaggggagcggagcgcggagaggagaccggtgccagacttcacccgcctagctctcggaacccccgggggccgcgctcggctccgcctgggggctaccggttctgggccaggagaagaagtggcatccgcggggcagggcgggcggtgacggccggctcaggtggcggccccaccccagcgcccttcagcaggcctgggtcggtcggcctcggaccccgtaggcgccggcggagctggcggcagggacccgacagctctgccgcggactccgcaggggacatcccccaccctggcggcccacccaggcggagcgcggcggggaccgtgcatctagcgcgccctggtgacctgcgggccgaggcgggctgtggggcttggccccgcgactcagccttccgggcccacagcggccctgacccgggaagtgcggaggtttggccgccttcaacagcacctgccaggccactgggagcagcgggggagaagtgggctcgcacaccgacggcctcccgggttcggcggggacgacccgagctaggagcccgcgggggccgtgggagctgctccgccgaggtggacccggggcgcccgcacccctcaccttctttccgtggggtccggggccagggacgcagcgggggacggcgggcatcagccgggcagcgcccgagccgtccctggccgggtccccacacctgcgtgctcgggcatccccagggtcgggggcgcggtgaatcgtggtccccgcagcccggggcccgccaggcccgcggagtcagcccaccctggcgaggggcccaggcacccgcatttaaccagtccc

SEQ ID NO: 25774 - DNA, 56 bp, Homo sapiens; identical to SEQ ID NO: 7457
  chr6:158321417-158321473
  hypo

SEQ ID NO: 25775 - DNA, 520 bp, Homo sapiens; identical to SEQ ID NO: 8616
  chr6:158402113-158402633
  binary

SEQ ID NO: 25776 - DNA, 69 bp, Homo sapiens; identical to SEQ ID NO: 8617
  chr6:159203076-159203145
  hypo

SEQ ID NO: 25777 - DNA, 447 bp, Homo sapiens; identical to SEQ ID NO: 8618
  chr6:160679377-160679824
  hypo

SEQ ID NO: 25778 - DNA, 146 bp, Homo sapiens
  chr6:16218404-16218550
  hypo
cggggttgctggtggagctgcctgccagtcccgcaccgtgtgcctgcacaccggggctgtaaatggagctgcctgccagtcctgcatcatgtgctaagtccctcattgcctggggctagccgggccagccaagcccacgcccaccc

SEQ ID NO: 25779 - DNA, 314 bp, Homo sapiens; identical to SEQ ID NO: 8619
  chr6:169641077-169641391
  hypo

SEQ ID NO: 25780 - DNA, 765 bp, Homo sapiens
  chr6:170474845-170475610
  hypo
cgacgttgctcagcgtccagcaaggggctgcccagatcccgtcttccacagaccccctctgaggccctcgttccctcaaaccccaggagccagctctgcccccgcacagctccacggccccaggctgcttcccgctactgtaacagacgaccacaggtcgcataggccagagcccggcacggcttcttgggtgacaatcgaggggtcctgacccagcacccgtgggcacacccttatttggaaattgggcctagcccggagtgatcatgaggccacgtgacatgggcgtgccagtctcaccaacgtgtgttttcacgggcaccacagagtctgttttctatgggtggggcagcggtgaacatatccctcttaatagcggtacgggtacggccagggaggcggcagaacgtagacagaacccgggcactgagagaccggtgccgccccccgccgtccacacaacccgggcctcgggcagcaccagcaggacttttattcctcaccccgcacgccgccgtccatctcctaggccagcgtgattcttctgagtgcagctgggtctcctcctgggagatccggtggctctagcagcgtgggtgctgggaacaggaccagcctcgccggcggacagtgtggacgcctgagggcaaaccctggaccactctctccccgggggactccgttcccgcctccagggagctgcgaacgctccttctgggacacctgttggcaagaaaccagttcaatcgtctcacttccagaaac

SEQ ID NO: 25781 - DNA, 194 bp, Homo sapiens
  chr6:24494664-24494858
  hyper
cgcggggtcacacttcgacccctcagagaacgatcgctcccaatcaatactacgtgctcaggagctacaactgaagaagcgtgatcacggccttggcatttagggcaggcaccagcgcatctatggaccgcgcacaaattccggggatgccgaatttgggggatgctaaggggagagagtgggtctctagcagc

SEQ ID NO: 25782 - DNA, 1292 bp, Homo sapiens
  chr6:26233864-26235156
  hyper
cgtcacgcagtgcagcccccacactatttacaaatacagtacctgagggccgatatcccaaagctaaggcttatcaaaggcctgcgaaaagacagacaccgggcaccaccagcagttggccattctcaacgaccagctgcacaagatcgtgggccggaagcaccttgggcatgccacgtactgctcacaaccaggacgggatgtgctcaggaagtcacctcaacgctaaagtaaactaaagcatttacaccacatccctgtgtcagaaataaaattttttcagggccacttttaagcgccgcgctttaacagaaatcggccggccaatcacacaccaccgcgggaatttgaagaaaaagtaggacctggtggctcaagtagccttagctatccggtgactgtggctgagactgagacggaaggatccttgcgcccaggctgctgggagctgttaataactgacccccaaccagcacgactaggatagaccgtggccgcacaacaccgcagcacccgcacccctctccaccccactcccccctccaaaaagcttcagctcttttgactgagacctgtgggtggctctgaaaagagccgtttaaaattttcaaaggggaacgtcccgccagtttcactttttcttcggagctgccttctttgcctttgtaaccttcggcttccccgacttaggcttggccgccttgggcttaggggctttggccttagctggactcttggcagctttttttggctgaggtgttttcacctttttcgcactcttggccactttcttggtcccagcagcggttgctggcttctttaccttcttaggagtctttttgatgcttttcttcggggtagcggcgccagccaccttcttgggcttcttggctgccccagcaggcttcctaggcttggctgcgccagcctttttggccttgggtttgccttccccggaagccgctttcttgttgagtttgaaggagccagaagcaccggtacctttggtctgcaccagagtacctttgctcaccaagctcttgaggccaagcttgatacggctgttgtttttttctacatcgtagccagcagccgcaagcgctttcttaagcgcggccagagaaacgccgctgcgctccttagaagctgccactgccttggtgataagctcagatactgggggtccggatgctttgcgtttcccagcagttgcgcctgccttcttcgcctttttcttcacaggtgttttttctgcgggtgcaggaatggtaggagcaagtggagcagtctcc

SEQ ID NO: 25783 - DNA, 1263 bp, Homo sapiens; identical to SEQ ID NO: 24548
  chr6:26271217-26272480
  hyper

SEQ ID NO: 25784 - DNA, 695 bp, Homo sapiens
  chr6:27064607-27065302
  hyper
cgtgggcttctgaagagaaaccgactccggtgtgaacggttttgggaacctcggtctcctgctggctcccaggtgcgctatccgacgcagcgagacgcggtgagcctacagaagggctgaccaggctcacctgacgccccaggtcgacagcaaaccccgtgcgccccgttggcccggtcacgcccgcagcctgctcaggcgcctcctgcctcgggaccaggaagcggaagaaagggagagaccggcccggcaattacgtttctatcatgtcttgaacatttgtgtgagtcccacgaaagctaagcccgtttattccccctcgaagcgtttccactcagttcttgatcattcatgtgaaaacgagccatctccacgtctcccaaacgtcttcaaaccgtttcctaagtcttgtaaggccgcctgtgggttcctattacaaactctgaaataaaatactcgggaaacgtgggttatcaagacgaggtggccgagtggttaaggcgatggactgctaatccattgtgctctgcacgcgtgggttcgaatcccaccctcgtcgggggaggtcttttaatacgaagaggaggaaacaacacccaagtccagccaacttccctttcaactctcctggaattcaggtccctggcgttggagaggaaaaaggagctcttgtaattttgtatcatcagtataac

SEQ ID NO: 25785 - DNA, 629 bp, Homo sapiens; identical to SEQ ID NO: 23328
  chr6:27463044-27463673
  hyper

SEQ ID NO: 25786 - DNA, 850 bp, Homo sapiens; identical to SEQ ID NO: 23330
  chr6:27512842-27513692
  hyper

SEQ ID NO: 25787 - DNA, 1121 bp, Homo sapiens
  chr6:28175204-28176325
  hyper
cgaagggtactcaacaaatgggaggactcgggcagctttcctgggatatcacaccatatagactgagaatttcagaaacgcaaagtgcgcgtcccagcagggcgagaatggcgttaactatgtcaccaccgcccaaattccctataatttaccacttatcgttcctggctttattctccgtgcgtgcagggacatgtaattctctaggagacggtggtccggacttggttcccgactccctcgtggctgcaaacaggggcagctgatttgggtggatgcagaggttgtggccaggggaagggccgcggggcagcgcgtagaactgattgtaaacccaacttcccgcctcggagcgagccgcggctcggagtagcgtcattcgaaagccaccggagatatcgagagagctccttaactgctcactgagcaaacttcgttttacagctttggggttgatatttgggaaactgggtcctaaaagtggcttctggtcttcagaaggctttgttctccgcttttgattttttgacaccacgggtttcacaccccaccccaccccccagtctcacacaaaccactcaaactcgattgcgtctccattgcgctttggggaaaaataatttaagattctcgcttctgaaatacagcgtgatggttaagagcatgggccgtggaaacagacccggggaaagcctcagctcggccactctttgccgcgtgaccctgggtggcaccttctaagggtgattctgggattctatgaattaatgcatggaaagcgcttgcgagagcgctagccggagtccgcgctatttaggtgtttgccaatattattgttgttgttaaggtgtgagggatcttggaagacagaagccaggaataaagtaaacctacagagacgtccctccccaaaccccggccgctacccctgcaagaccttgtggagcatgttaggtttcgtggcgtcgccaagttgtacctcctgcgcttcgccgcagataaagccccagcttagagcatggggtcgcaaccacccagagccttcagaccagtgagcactttccgcacaggtttgaatcccatgaacagtgatttttcttcaattctctagtctcgtctac

SEQ ID NO: 25788 - DNA, 795 bp, Homo sapiens; identical to SEQ ID NO: 23336
  chr6:28367069-28367864
  hyper

SEQ ID NO: 25789 - DNA, 683 bp, Homo sapiens; identical to SEQ ID NO: 23339
  chr6:2903030-2903713
  hyper

SEQ ID NO: 25790 - DNA, 735 bp, Homo sapiens
  chr6:3231595-3232330
  hyper
cgcctgggaagccagcggccccggcggagctgcccggcactgtttagtcgcaggggctgcggggtggcagcctcagagccctgtccttccgcagccgtgggccccgcagggaccagccaagcagggcaaccaaaagctggaaccagcagcgaaaaccccgagcccacgaacgcagcgcagtgcgggaacacttgccctttgttcctcagtaaggccgggtgttttcgcatccccggaggttgtgaatttgagttataatggcctcggtcgggactgagagagccgagcttccacgagagagctttgcctgctttgtcctacaaatcggcggagggagtagcatcctggcttttctagggcgccatttccctgctacaggcaatctcccctcccccacgctgtcaatgatttgtgggattcttaggcaggcggggcaggccgagcccagggaatgcacgctgagtcctagacacagagccaggccgggtggaaaacaaaaagagaagaagtgattatgaaataataagacggaccgtgtgccccttgcaaggtgcggcctgcgaaatcaacagacttataaataaggtctggtggaagcgcaggagcgcacgcgggaggctatggcgggggaacctctgtgagttccgcggcggaggctagaacatcgctgtggctgcgggaccctcacccggcgctgaaaaccctccacatcagctcctgctcggaaatgtctcc

SEQ ID NO: 25791 - DNA, 647 bp, Homo sapiens
  chr6:3285154-3285801
  hypo
cgtatagtgtccaacctacggccaacttcagctgcagttcttggagggcaacggggagaaagagaaaatggaaaccacaggtccgtgagtcttcgagaaaacacccatttagatgtaatatgagacgaggaagcacagcccacgcgcttgggactcacctgagtctgggtgctggctgtactttccaatcactggacccgcagacatgatcgcacccacacggacaagggccaagcaagcgagaagagagaagagagcacattaggtgtggagttagcctagcgtgttcccatgcgacttggttcaagcaaactcccttccgtgtctgggatggcgctggccgccggggcagtggaattcatactgcgctaaacaaagatctttttgttaggaagacaggagtgagaccctgctggcctcagagcctgaggagaaaatggaaccttcacagtgagaccccagcaggtgcaaagggtgagcttccttgcatgtaaagtcacccacaggtcactgccgcctgcattcaagctgcgtcaagtgctgtggggtgcccctgccagccccagctctgctcctcacggctgcttggtgttcgcctggggctcctgtgcattcctgctcagggccaaaggggcaccacaacaccc

SEQ ID NO: 25792 - DNA, 144 bp, Homo sapiens; identical to SEQ ID NO: 8627
  chr6:34520750-34520894
  hypo

SEQ ID NO: 25793 - DNA, 198 bp, Homo sapiens
  chr6:36165603-36165801
  hypo
cggtgtctggaggcgtgggtgggacaaaacacgtctgtgtagagtcttgcatggtcgagagatgcttgagcagccgaggaggtggcaggtggggaaggagaagatggagcggctttcatgaaagtgggcgccgcaccgcctgtctgcgctgtttggggtcggtgtggaggcagatgttctcacctcttctagggcctc

SEQ ID NO: 25794 - DNA, 126 bp, Homo sapiens
  chr6:37275447-37275573
  hypo
cgcaaggtattcttatgagtccggttcaacaacaacaacaacaaggacccgaatcaggtaaaccagaggctttggaaaatagaaaggccatctgcagctgaggcgttggagcctcttggtccggcc

SEQ ID NO: 25795 - DNA, 411 bp, Homo sapiens
  chr6:37358463-37358874
  hypo
cggaagggaaatacaggctcctcatttatttatttctcttctttttctccaaagcaaagagattgttctgaagaccgtgctctaagggcatttgaaagactgccaggtagtgcgagcctgagatggtctggaggattctctctagccgtgactccgctgctctgaaggtcaactgagaagtcttgtgggacagagacttgagttaggaagccctcagtcacttgccttccacggtggccagccctgctgccatcattggctgaagcaccaccaggattcacggcacccaactgcttcagggtacttcgtagactctgcctcactacatgtcgaaagagttatttgagttctcttctgtttttttttaatttgttgttgttgttactgttttgatacctcggaaacacctcc

SEQ ID NO: 25796 - DNA, 1350 bp, Homo sapiens
  chr6:391113-392463
  binary
cgcagagacagtatttgaatcaagcttaatagctcaagggagctgggccatttcctattttctttttagtgagtgcgatgttctctaaacaccgcggagaggcagggttcccggtgatggccttgccgagggtgctcccgcaacctccacctccagttctctttggaccattcctccgtcttccgttacacgctctgcaaagcgaagtccccttcgcaccagattcccgctactacacgccccccatttcccgccctggccacatcgctgcagtttagtgattgactggcctcctgaggtcctggcgcaaaggcgagattcgcatttcgcacctcgcccttcgcgggaaacggccccagtgacagtccccgaagcggcgcgcgcccggctggaggtgcgctctccgggcgcggcgcgcggagggtcgccaagggcgcgggaaccccaccccggccgcggcagcccccagccttcacgccggccctgaggctcgcccgcccggccggccccggctctcggcttgcaaagtccctctccccagtccaacccccggcccccacaggcctcggcgccccgccccgccccaggccccgccccagagagttctataaagttcctctttcccacctcgcactctcagtttcaccgctcgatcttgggacccaccgctgccctcagctccgagtccagggcgaggtaagggctggagtcgggcaggaggaggggtgtgaggctgataccagagaggacccggagcgcgaaccagaggttcgacctccagggcagcgcagggtaccccggcttcggagcgggaagggagcgcgccccgtcctggagctccgactcccaccccatctgcgctgagccggaggcgctggtttgggctccaaggcccgcctccttggctctgcccgagcctccccgcctgccctccgcgctcctgcgacggggtcgccacaagctggacgggatgagctaaccggactgtcggggccccaggagtggctgaggcggggccgtccaaggcacccacacaagacggcacaactgcctgcgagaaacaggcccggccctgtggaccccaatccgaggctccttcccctgctcttcgttcctaaggggcccaagctcacggcggcctccggcgcggtgctcacccgctggcgcaggaggaggaggagctccacatttgggtcgctccgagccttgcgtgcggtggcctagccggcctggcgcggtccctgcctcccaggctccgcagctgtcgtcgccctctcccgcgccctccccgcctccgctctcccgggcctgctccggggtccggcggacgctctgcgcgcggaatccccc

SEQ ID NO: 25797 - DNA, 312 bp, Homo sapiens; identical to SEQ ID NO: 8633
  chr6:41620850-41621162
  hypo

SEQ ID NO: 25798 - DNA, 249 bp, Homo sapiens; identical to SEQ ID NO: 8634
  chr6:41715240-41715489
  hypo

SEQ ID NO: 25799 - DNA, 1025 bp, Homo sapiens
  chr6:41773505-41774530
  hypo
cgcagagaaattcctgcgcgtcctgttggtcgtagccgcggaaggcagggatcaggctccacactgagtggagcatggcgaagggcgacactagggcccacttcccggaccacatgactcggaagagggtgtgcagttcacggcagagggaaatgtgctttgaactcggctccttgttctggatgagctccagactccgactaatggaggccctgccgttccagcagaagccctcccgctcgcatgcctcggccctgtcatttctcaaggacagctccgtggccgagctgttggttggcttgccagaaagctgagtcttcccgttggtggctttgggaaacagatgttccgttttggaagggtcaaggttgaggaaacattctcggaacttctggaggtggctgagcacctggaggatggagttcatgtagcaggtgttgcccaggttgcgcaggcccgtgacgcctggggccatggccggctggcgacgcagcttgagtgtggcggcgggcactctgcgtgaggtagggagggcggcggggcgcgaggcagccgggcccgcgtcgcggggcgtgtgcaggagcagccgtgcactcttgcgcggaggggtgctggccagctcctccagcagccgccgtttcacctcgcgccgccgcctccgcgcctcctccttcttgcgctccagggcctcctcctgccgccgctgctccagcttcgcctggccccgggagctcttctcgaaccacagccgcagcgtcctggccagcaggcgctgacgccggtaccacagagccgtgagcatctgcggctgtccctgaggagcgcgctgcggcaggaccacgtcctcacccgaagccatggaccgcagcgtccgcccacgtctcaccggcgtgtcctgtttctggccccggaccgccaggagggagcttcttagcagcttcaggtccccctctgggttatcattgagcacgtagtccttgcacaggtaacagaacacgtagagatcccggacttccatggctagc

SEQ ID NO: 25800 - DNA, 118 bp, Homo sapiens; identical to SEQ ID NO: 24572
  chr6:42762779-42762897
  hypo

SEQ ID NO: 25801 - DNA, 236 bp, Homo sapiens; identical to SEQ ID NO: 8637
  chr6:43096747-43096983
  hypo

SEQ ID NO: 25802 - DNA, 312 bp, Homo sapiens
  chr6:43748290-43748602
  hypo
cgcctgtgtgcgcccgcgcatgcctccccagagaccacctgcctcctgacacttcctccgggaagcggccctgtgtggctttgctttggtcgttcccccatccctgcccaccttaccacttcttttactccccccaccgcccccgctctctctctgtctctgtttttttattttccagaaaatcagttcgaggaaagggaaaggggcaaaaacgaaagcgcaagaaatcccggtataagtcctggagcgtgtacgttggtgcccgctgctgtctaatgccctggagcctccctggcccccagtacaacctcc

SEQ ID NO: 25803 - DNA, 450 bp, Homo sapiens
  chr6:50674341-50674791
  hyper
cggctcaattcgtgcaacctcagttaccagggggtcccggggccagcgcggaattcgcggaattcaccaagccgcagctgcctgccgctgaatgcgaagagggcgcaggagactggcaggtacagctggtggtcccttcggcctgatttccctgctgagtgccacagcgtccgagatccacgactggccaggtggagccaccgactctgaagagaaccagaggcggaccagccaggggagagggcaaccctgggagcactgcacccttgtcggtcccctggaaagctagcggtaagatccgggaggctgaatttgaggccgcggtagtccaggcgacttcccctggaaggtgtgacgatgacttgtactgcaaaagaagcctagaccaggcctccgtctgggtgttttcttttaggcgtttggagagggatggagatggtgggtgggggc

SEQ ID NO: 25804 - DNA, 563 bp, Homo sapiens
  chr6:50803791-50804354
  hyper
cggtgacttctctaatgatgaataaagacggcttcctgggaggcatgtctgtcaacaccggcgaggtgttttgctccgtcccaggccgtttgtctctgctcagttcaacttcgaagtacaaagtaactgtgggagaagttcagagacggctgtcgccccctgaatgcctcaatgcatctctcctcggcggagtcctcagaaggtaaccccaccacgaaaaacaaaaacaaaaacaaaaaaacaaacaaaaacccaccagtttttatttattggacagtgaggagaaggttccagcaaaacccaatctgcagtctgacgcagttgcctagcaaccgggtggccggagcattgctttcgcgcagcgcttgggaggatccgcggccgccacctgctcgcccacaaactctagtgtccttgcatccaggcctgcccgcgccgcgcaagtcctaccgcagattttgccgccctgggaacctttcactttcctggccctgcgcctggcgcctctcttcctgtcacccctaggacatctcagggggcattctccagcctgagtacaacgc

SEQ ID NO: 25805 - DNA, 159 bp, Homo sapiens
  chr6:50805695-50805854
  hyper
cgaaaaatggggggagatctttgcgagaaaggctagaaaaaatcggtttgaatttacccgcgggcaggcgcaaagcagcaaatgtcacgttactcacctccctggtggaaggtaagcaagacgtgtggccatttcacgaagtggctgagcttaactgtc

SEQ ID NO: 25806 - DNA, 375 bp, Homo sapiens
  chr6:50808438-50808813
  hyper
cgtttccaacgttgctgtttgtcatcttccacagacttgtaaaatttactacaactccagaggggaaaatagtaaatctctggctaaatttaggtctagagctcatttgaacttttacagtgggttttctatttatttgatttactcctgtctttggcttcggtgtcatattgttggtgttttatggccggctcaggcctgcagtgggcggcgctgcgtgcgcccgcacgtttctcttgcaggcgcggcccaaacagccgcgctcatttatttagtgttggaggacgcggtttgtcccgttgacagcgtaatttaaagaaatatatggaaggctgaaaaatcatttgctcaaatttgtccagatgtttttgagac

SEQ ID NO: 25807 - DNA, 924 bp, Homo sapiens
  chr6:5084683-5085607
  hyper
cgtgccgcgtgggcgccggccccacggggccccctctccgccctccctgcgggatcccggggcgcggactcgcgggcgcgtcgggcgggacagggggaggggcgggacgtgctcccgggcctggcgcgaatggcctccggccgctctcggctgcgggccatggccgctccccggcgcgtccccacacggtccccgccccagtctggccgcagcccaccccgcgccgccactgggcagatgggggcggcggctcctgcctcccggctttcggaagagcagagcggagcgcgcctgaccgagtcaggcttccgagtgggattggaacccggggcgccctgaagtttggggaaagcaggagcagaagggaagggatgcgctccccgctctccggcggcgcggaatgggcctccttccagcctctgcgtaggcaagatttccccagttgcgcgctgcaccggggactccccagcccgtgaggcagccaagaggagagcgctcagtgaccctctgggggcagagccgtcaggccaagttcatgggcaggaagactttgtgcacgtgggggtctctgaaggttgagcgcgagctctgcacccccacttcgaggcactcaagaagcggaacagacgcgagccccgccgggggtgcgggtgagggctgcagggagcccgcgaacgacagaaagtcgccccccgcattccaccggagcactcgggaacacggcttccaggtgtcccagcggccgcgcctccccgcccccggccctcccccgtcgcgggcaggttcaaccgggaggcggcgtggccccggagccggccccaggcccgcatcctcctcccacttcgccctgggcagccgcagctaaaagccggaggctccaaagtggaactacgttgtcttgtcgagcctggggcgactcgcctc

SEQ ID NO: 25808 - DNA, 908 bp, Homo sapiens
  chr6:52227115-52228023
  binary
cggggcccgagctcgggaggcggggacgtcaggatcgcggcgttggggagtcctcgcaccccgagctcagaggggaggtccagagtcgcagcgttgggaacctgaggccaggggccggagtttagggccccgatgttgagtctccgaatccaagcccggaaggggggacgacgggttaggatgctggggagccctggagctctgaacggctgtagtggggtggccaggactgcgatgctggggagtcatggagcctgagcctggagagctggcgggggtgtggggaccgcgatgttgggaaggctgagcccggagggcgggagattcaggaccaagacgtgggggagtccgacagggcagaacgaggggcgtcctgtccgcatttgtggggcgccctccgcagggcggaggggaacggaacctgggaggggagtgcggaggagaggaagcccggggcggtagggagagcccgaggaagggcagcccgaggtaggggaaccccggaaagagtagggtgggtctaggcatgtgctttcgccggggaaagatggagggggcttctctgagagggtgggcgcgaggagcggagttgtgatgggaaccgccggcagctggctaatgggcggatgctggggcttggctggatgggaacgccgcggtggggtgtcggaggtggctggtggggctggaacgctgggaacgtctgtctaggctatgagaacgcagcgccctcggtggaacagggtcgtagataactcgagagggaatctagtctagggagcaagaccgggcatccccagacggaggcgggtggggacctcgcactcagcgcgcttggggaatattcggagcctgggtttgggggctgctgcaccttgccgacccggtgcggggacctggaggtagcc

SEQ ID NO: 25809 - DNA, 110 bp, Homo sapiens; identical to SEQ ID NO: 8646
  chr6:52409363-52409473
  hypo

SEQ ID NO: 25810 - DNA, 404 bp, Homo sapiens
  chr6:56112188-56112592
  hyper
cgcagtgtccaggctcggggttgccgtcgcagccagctgagtgttgcgccagggggacaggtatgttccaggcagtggcaagcccaacccgagcaagacctgcgctgaaacggattggctgccctccgcccggagtccgttctccctgcagcggccagtgcagagctcagaggctcagaaactcgctctcagccccctggaggcggagcccgggagataaggttcgcgctccccacccgccccctttccttggccgaagaccagagggtggattttggatctggatcttgaagggcgaactgctagtgtcgccctggtggaaacactcagttcaaatcctgctagcatcagaaaatgcacgattgaggattgaaaacgagggtgaaggaggaccagggaagcgc

SEQ ID NO: 25811 - DNA, 746 bp, Homo sapiens
  chr6:56818408-56819154
  binary
cgttcgctgggcactaatatgaaatcacttaaaaggaaacatgccactttcggctaggggacagcatgttcgtcattcagtgtcctactggtttcttaacacgcatataattaatattggtactcaggaaagagaacttcttctgaccttgagcgtgcgcgctaaataaattacctcagaacgaaagtggtgcgatctcaaaacagcatctggggagaaaagagataaatgagacttcatttaactccttgttcttcacctaccgagtgactcatgacttacctgggagaccagggttgggaaagcacatcgcagactcctggaattcggtgggacatcctgggggagggaggaggagtcctggggccatcggtctctacgtgatttctccgcgagaagtttgcatgaaagttctgggggagttggggagccccgaagtttccatgccttactttcttacccctacgctccagcgaaggatgcgtgaaggcgaggctggcgcagccccggactacgctcaaattacccttaaggctttagcaaactgactaaaaatttgagttctttcctcccctccctgccctcggcatcgccgtggttattcaaacctgggagactggagggcggaggtgacggcaaaaagggcaaggggcgttaaagaaacgcactcagcctggggagtgggcaatgatggggctaggggcagccgaggagaagggagcgagccgcgcttcactctccaaatc

SEQ ID NO: 25812 - DNA, 1475 bp, Homo sapiens; identical to SEQ ID NO: 23341
  chr6:5996316-5997791
  hyper

SEQ ID NO: 25813 - DNA, 901 bp, Homo sapiens
  chr6:71123134-71124035
  binary
cggccggggacctgttgatcgcaggtatagccggctggcccgggctccctcgggactggggcgactgcgcatgctcgctggccgcgctgggccagtagccgagccgcggtgacgaaccggctccgcggttgcggtgtttgcggttgctgtgatggcgatgtgagggggcccggggcgggatggtgctgacccgggtcgggccgtcttcttgcagctggacaacgagctcctccgttcgacaggcgggggaagaggccgagccgggcgagaggtaacccccttactgtcccctctggctcccccggctcccgacacccacgacccctccctccgtccctcttgcccaggggccaggaaggaagcggcctcctcttcgtccgccgttcgcccgccgcggcccctcacccgactgctggcggtcggagcctggccccggccccgttgaaggtcggtggggacggcggtgcggagcgctctgagggaggcgaggggccgcggcgcgctgctctcccggtgcccgcggccgcccctgcccctgcgcgcgtccctcgacccgttcttcctgaacctcgcgcctagcgtgtttgcccttcacccctgctccatcttcgtcgctctgtccctcctttacccgctttcgtggttctgctttttcatcccgcgcctcccacgtgtctttttgcccgggtggtccctccttgggaagcagcgtatctctgtgcttccatcccttgcctggctcttccctgtccggagctccttaccctggccgaccaggtttctcactcttgttacctccataatttcttccttggttttattttcctctcatccacctcctttcggtacttcctcctggttccctttttgttagttgccgattgtgttttgctttagcatc

SEQ ID NO: 25814 - DNA, 587 bp, Homo sapiens
  chr6:73329621-73330208
  hyper
cgtgtccctgtgtcctgccttcctgagacttcttgcctgcacgcggggcccagccgcgccagagagatggaagtgactttacctacccagcgaaagtagcagtctgcaacaaggaaaacagctaagttaagaggaagtggttttcattttactgcttgcagaaaggccaagattttgacgtttaaagcgggcacacgagtcattttaagtctctagatctttcaccctgaaagtccctgcacagaaactccatagggagtctaaatatagcaacagcaccccctcccgccccctccgccttcagtcagggtcccgcgcagctctaggattggagagcttactccagggcgctctctgcatctgcctcgaatagcaccgcacggagcaacctctctcgcacctccacagtgcgtgggtgtgaagtgtattaggggaaagctagagagtgactctgggtgatggtgctcggctcacagtcacatggcgtcgccgccagctgcacagagctcccagctagcttctgctgcccagaggcttggggggaaggagggagggaagcaggctcctgctggtgaccaggagcaggc

SEQ ID NO: 25815 - DNA, 656 bp, Homo sapiens
  chr6:79620238-79620894
  hyper
cgaattatacaacgtagacctaggtcgtgcgatagctacaaaatacctaaggaaatggactaggtcgtaacaagaaaaagtgatatcaagcccgggcagaagggcgcattctcggcgcggagggcggagcctttcctggagtggcggcggatgacccgggctcccgctcctcacctcggcgtggggcgcaggcggcggccgcaaggaccgcggatgcttgaatcgcgcttctcgccggctgggactgccccagacacgcacaccctcccgacctccgccctgtcgcagttccagggcgctccgcgctgtcatgattgctgggtgcgcgctccgtgctgggacagccgcgcaccaacagcggagggcgttagcaccccaagacgctgctgcaggggtctgaaccgctccttggcctactggcaccgggtcctggacgaaatctaccgcggtccaactgagctttatcttgtgcggtgacgcccatgcctaggtcttgacacttccctcctatgccctttattgccaagggtcgggatggccttcgtgtcctctgcagcctccgccttccttctgctgccagcagctgtagattttacctctttcccctaacttcctctcaggctcctactccattcctatcgcgactgcttgagacc

SEQ ID NO: 25816 - DNA, 776 bp, Homo sapiens; identical to SEQ ID NO: 8655
  chr6:89855504-89856280
  hyper

SEQ ID NO: 25817 - DNA, 206 bp, Homo sapiens; identical to SEQ ID NO: 8656
  chr6:90367697-90367903
  hypo

SEQ ID NO: 25818 - DNA, 165 bp, Homo sapiens
  chr6:90661229-90661394
  hypo
cggggatggcggcggcctcaaagctgatgggctctggaagcatctggtccctggggcaagccatcttggccgtctctgaatccatcgtctcctcctcttcatcctcctcctctcctgcagagttctcgcagtcctcgtgtgggcgctggcacgcagcatccttcc

SEQ ID NO: 25819 - DNA, 87 bp, Homo sapiens; identical to SEQ ID NO: 8657
  chr7:100030648-100030735
  hypo

SEQ ID NO: 25820 - DNA, 455 bp, Homo sapiens
  chr7:100091142-100091597
  hyper
cgttggggggcaagcaaggacttgcttctgaggggagacgtgggtctcggcagtgcggacccgtccggtcatgctgaggtccccgaccttacccgcgttttcctttctcccccgcccgcggcacagccccaccccgcgctgccgctgcctctgcccctgccgccccagccggcccgcgagcgtgacgggaagctgctggaggtgatcgagcgcaagcgctgcgtgtgcaaggagatcaaggcgcgccaccgcccggaccgaggcctctgcaagcaggagagcatgcccatcctccccagctggcggcggggacccgagccccgcaagtccggcaccccgccctgccgccggcagcacacggtcctctgggacaccgccatctgaggcgggcgggggggtaccggggcgcctggactggggagggggcgggcacgcctggctctcccgggagcctc

SEQ ID NO: 25821 - DNA, 1063 bp, Homo sapiens
  chr7:100167136-100168199
  hyper
cgagcggggcgtggcaggagccagcagggtgcatggaggccccgttccaaagccctctaatcgccagcgccaccaccgctgccacaagtccgatcactggcctcacaccgaggctttctcggttgccccgacgacgtgtccggaccgcagtcagctgatcggtagagacgcccccacgctctctgcccctataaaggctcagtcttggggtcgaggccgcctctcttggacttccctactcaaactccagttcctgggcgacgtgaggattagtctcgtggggtgggggttccggagcggtcggcggagggagggaggtagtggggagcccaggccaggggcaacagtcaccgggacactcgctgtgcgcagagtccttgccccaaacttccagtcgggagcccgggagagacgctgggcatcaagacgggtggcagcctgcccggccgctgctcccggcccgccgagttcgccacctcacccccacccctgctggcctctccccgtgctcaagacacgagacccagccgtctctgcctcttctgcagccactttattgccttcgcccctgaatgaagcccgcaggcggcggccccggggagagccgggaatggccgccgtgcccctcagccagccgctgccctgggcctgccctgccgacgtgcggttctgcggccacctgcgcgcagacccgccgcgtcccgagtgttccgagagcgagcagaagtttcgcgcgtgccgagcgcggctccagcgcagcctgagcctggcgggtgcgtgcaccaccagcaagtgcgcagatgcgcgccagcaccacctgatcgtcctctacacccgcgacagcagcctgcgcgtggcggcggcaggcgaggcggagcagcaggcgtgatacaacaccctgctcgaggagcgcggtgatgccggtgaggcccgagccccgggcttccgggggcctcgggggcttctggctgtggtttctccgtggctcgcccctcccccaggtcgccgaaagttcaaacattaaaggggcaggtttagagttctccgggcacaggcccggccc

SEQ ID NO: 25822 - DNA, 157 bp, Homo sapiens; identical to SEQ ID NO: 8661
  chr7:100179313-100179470
  hypo

SEQ ID NO: 25823 - DNA, 458 bp, Homo sapiens
  chr7:100179670-100180128
  hypo
cgcaggcttcccagggtgccgatgtcagggggcagggctcccagcttgttgttgctgacgatgaggaccctcaggggcagctggcagatgtagggtggcagcagcgacagctggtttcggctgtggaagggagaaaggcagcggactggctccccaggcatggcatcccagcactgccatcctctcggggtcactgggtgggtcactcagtagtacttgagactgagaagcacacgctcccacgtggccctggctcggcctccctacctgaggttgaggtaggtgagggctgtgagattccccaaggctgggttcaggcatctcaggcaattgtggtagaggctcaggccctccagggacaccagctggcacgccgcctcgggcacctcgggaaaccggttccgggacaggtctggggaaaaggaggtgtcggggagagttgcggaaaggcccagccc

SEQ ID NO: 25824 - DNA, 412 bp, Homo sapiens
  chr7:101652279-101652691
  hypo
cggccccgcgtgctccagcaggtctgcatgattaacctgaattgcagtgttcagaggctcggcctgccagccacagcggttccagatgaaatgcagcttagaaggcagcatggtgtagtagctttggcgccagccgcacccagagtttggattgtagccagatggcctcaggtgcaatgtataacctctgggaattccagatttcctatttacacgacagggatgattccatacctgaagggctgtttggaagcatctagaagcaagcacagtggagtggctgtcatgacgctgaccgcacaaatgatggtgttaggatccctccacggatgtggccaggtgacacccctcacctaggccgcacagcaccctaatgtacacactgaagaaaggctgcgtggggctgcagagc

SEQ ID NO: 25825 - DNA, 595 bp, Homo sapiens
  chr7:1026810-1027405
  hypo
cgggacggagacgacctcggccacgctgcagtgggccgcacttctgatgggccggcacccggacgtgcagggtgagaccccggcgcctggcgagacggctccttctgcccccgggggacccccagggacgagggatggcgctgccacccaagcggcccaccctttgccccaggccgggtgcaggaggagctagaccgcgtgctgggccctgggcggactccccggctggaggaccagcaggctctgccctacacaagcgccgtgctccacgaggtgcagcggttcatcacgctcctgccgcacgtgccccgctgcaccgcggccgacacacagctgggcggcttcctgctccccaaggtggggctgggcctcccttgccccttccatctcctctggggtaggcctcggcgggggtccaggggcactgggacggctgagcgtctggtgggtgcctgatggcccagcgctccccgaccggaggcaataaagggcgtccagccaggagcaggagggaggcagccctctcaccccacagcccagcacttggcctggccagcagacctggcgcctccctgcatgtcctggggtcccctcc

SEQ ID NO: 25826 - DNA, 847 bp, Homo sapiens; identical to SEQ ID NO: 23347
  chr7:117119463-117120310
  hyper

SEQ ID NO: 25827 - DNA, 739 bp, Homo sapiens
  chr7:121956311-121957050
  hyper
cgcactccggtgactactccctgaaagccaatgagcggttgaccctctggtgacatctggaacccaggttcagagtttcgctctcgcctctactcccttaatattttactcaatgtcacagaggagaacagcttaaggcagccctgctccccatcttcaatccgaagctggggtatcccagagaaagtctcgctctgagctcctgctggggcacctgcccagccatgcccctcgagggcgtcgctgctctcaacccctctccgctactgcccggccgcccaggcctgtggacgcgactccatctgtagcaaagttcgggggccaaatgggtcgcggctcttcctcgaaggttactgcgagcgggacttgaagggaaaaggaggcgcattagcgacttcgttttcttgcatagtactggtacagagtaccggtgatggtcgtaggggaactctatgtaaagactggatgaccaccggcctcccggaaaccccacacgccaggcctccaacttcttcacaaaagtggggtgggtggcggagggctgtggcgggggcttggagctgctgagagccgagaggcgcagagcgcaagctggcaggctgggctgctatcccggcgcgcagatgccccgccgccagtcgagcgcgaacatctctccggaacatcgatctatcacctccctttaaggacccggaccgggaaatttccattttctgttttgggaataagaaataaaagc

SEQ ID NO: 25828 - DNA, 459 bp, Homo sapiens
  chr7:127371042-127371501
  hypo
cgtatggagctgcctttagcagcatctgcttctccagctggagaggcttgttttagaacgactggcatgcggaagcggtaggtggaggtctgggaggagctgcgtagccagggctccccttccagcctcccgtctcccttaggctctttctggcctgaggcatggtcgccatgggtgggggcactgcccgcccgattctggttggaccccctttcctctacttcataccgcagctgctgtgagcgagtgcactgtgctctgcacaggagaattggcagacagttccatatgctggttttggccattgggacattcaggattattaggccagtttgtactttaagaggagggagacttgacatcgctcaaagcagcttattttatttatttctatttcttataaaggggaaagaagctagcccagcccttagctgttcctttcaacgtagccggctcaac

SEQ ID NO: 25829 - DNA, 89 bp, Homo sapiens; identical to SEQ ID NO: 24583
  chr7:128097604-128097693
  hypo

SEQ ID NO: 25830 - DNA, 117 bp, Homo sapiens
  chr7:128337420-128337537
  hyper
cggccatgtaagcagagcggacaactctgagggcgtggctgggcggggttcttggggcagcccggcgccactgccggcatctacgcaccctgaacgcgcccgatctggtctcatctc

SEQ ID NO: 25831 - DNA, 287 bp, Homo sapiens
  chr7:128337620-128337907
  hyper
cgctccctctctctttcccccttttgtcgccgcgcttttcaaccgccccctaactctgctcccccttttactccgtcgcagcccgggacctcctggtgggggtccgccactgcagcaccaggcgccactgccataccaccctgaacgcgcccgatctcgtctgatctcggaagctaagatgtggccgcatttaggaccccaccggcttggctgtgcctctcccagccccctggcggagcggactaaccctagcatttcattgattcacaataacgccaccccacccc

SEQ ID NO: 25832 - DNA, 360 bp, Homo sapiens
  chr7:128528758-128529118
  hypo
cgtgcccgggacctctatcaaaggtgagggagtcggagagtgagagaaaagtatggtggagcggcaggcagtgggagggctgggaggaaagtggaatcggtgagaaaggcaccccgggagccccagcagggggaatggaagggcaggtgtggctctaccctggcaggtcgggcagcagtgcccagaggggatgagtgggtggctgcagcccggaggctcacagggccggcggccgcaggtcacgaagcctccaagacaggtacacaggttgcagggttctcgggggtctgggaactcctggttactcaggtaggactcccccaggtactcacagcctttcagagaagagacagagaggcc

SEQ ID NO: 25833 - DNA, 192 bp, Homo sapiens
  chr7:129330248-129330440
  hypo
cgtaagtacaagagcatgatcctggaagacctggagtctgctctggcagaacacgcccctgcgccacaggaggttaactcagaactgccgcctctcaccatcgacggaattccagtctctgtggacaaaatgacccaggtgaggggtgggaggtgaggaggagactcaaagacaagtggcacaggtgtgggc

SEQ ID NO: 25834 - DNA, 866 bp, Homo sapiens
  chr7:129421203-129422069
  binary
cgttaacaccttgtcttgggctcgagcaaaagaagggggtgaggcagtggaagcggggcccgggaaatctatagtttccccacccccagctcctgccgagccgggaggggccaagggtgacggcaaggatacgaacccttcaatatgcccgactcccgggcagggcctgctgaagccgtagatgtcgcagccagatggatcgggaagcaagattcccaccccaggtggataactggacgagtctcagggcctcggggcccctctccccatgcagccagggatgggcacggtgagcgagaacccggacagcggagataatgagcacgtcacagagcccaacgggccaaaagggggtgatagctccacattaacccctccccgtcctactagcattcccccgcccatctaggtcgcctcgagcctccctggctgtctctgcacccgcgccctacctggtcctcagacccatgcgatgctgggcaacccgggccgggtgtgcccaggaccgcaaagcgggaagcgcaggccttgcggactgcgagtggcccccgcggcctgctgctcccctttataacgcgcgccccgccccccgcgctccgggcgccccgccctggcccattcacctgctgtcgagaaccagacaccgcgcagcagaaagctagccgctgggccgcgaggtccggccgtcggagcgggcggggctggggcgccgccgagacagatccgatttccaccttttcttaaatgcgctgctgaaagtcgagaaggccccggccggggagctcgcgtcgcttcctcccccctcagctcccctcgcaccctgagtcccccagccccactccgggaggggccgcgaaactgcaccc

SEQ ID NO: 25835 - DNA, 1387 bp, Homo sapiens
  chr7:129422114-129423501
  hyper
cggagctggactcggacggtgagggggcggcccccggggacctgataccctggatcccttacggctcagggctcaggcgggggaagaggtggctcaggacgacctggggtcctcactttgctggcctgtccagcgcatcctaagcccgcgtgtatcctaccccctccttctgcagatccaatgtccgtctggcaattgccccattccctctcgctggagagatcccttccgcctcgccacaggcgtcccacgctgcccggagtcgtgcgccccgggacgggtagttttgggttcctcgacgcttggccaggtttaggaaagacccgctgtcttccttgctgcccccacctaggagactcggcgccttgcgctccgtcctttttaatggtgtcgcggcttgtccctctggcttgctccctcctagtccctaccccacacggctcccttcgccagctccatgacaatcccactcgtgctgaagaccttgggcaaagaagtaaccatcggtcttcccctcccttcccattcctccggcggcaggactagggggaaaggtgcccgggatacaagcccctcacgcagacccactgatgcggccgtggttctgccattggcccctctccgaatggtgaggttctcctgctaaccctggccccatggcataactagtataaccccagtgagaggaacccagagttccagtcctcccctgctccagtccctctgtgatctcgatctcgagggattcacttcacctctctaagcctcagtttcccatttgcaaaatgggcagaatgactcgcacctctggggatgaagaaaatgcacatgtgagcacgtgggtacttggcgacccggagatctctgcaaactgcaggcccagcgagatggcctcagcacgccctgcaccctcgtccgcgcgactgccgccgggtgcccgccccagccgctgtgtccctggtgcttcctccgccagggccacgtgccggggaagccaaagcgggagtctttcgatcttggcccagcccttagccctcggtcctttgctctagcatctagattctcgtgggtcaacaaagtcactggaaacccaacgaacttcccgacatttttcgaaaaccgtatgcgtgtgcttctgtgcgtttttcctctgatcgaggtagggccctgtagggttctgtttggacgggaggctggagtggttccttcccggctgcggggtcggaggatgcagagattcgaaagaaggagaaacacagagactgtcaaatgaaaggagattctgtcttcggaatcgacccagctctttaaaagaatgaggaaaacatggggtctttatatatcctggaaagtcgcctaggcgttcagtgaaaaacgcaaaaggcac

SEQ ID NO: 25836 - DNA, 1554 bp, Homo sapiens
  chr7:129424378-129425932
  hyper
cgggatgctgaagcctgcaggagttgaatcagagggcgagctgcagagcggaggcactggggcggcgggccttgcccgggctcttggctcccatgaatcctcgatgagtagagaatcgtcgctcggagcaaaggcgagaggagagagaagcgtgcgggtgcggcccttgctgctttttaccaggcgacaccccggtcgactttgacccccgagcaggtgaaacataagcgtccaccccagaggggtcccctacccaagtcagaggagaaggtggcctgccaggttaaaggatcgagtccagcctcggtttcctcatctgtaaaataagccgagaacatccgcgcctctttctggagaaggctgggaggatgccagagagaaactgcgcgcaggccctggcgaggagcccctccggcccatgcggaactctgcacaggctgggtccctccagggttagaaacccagcttccccacccctacccagcagggacccgcgctgcatcccctaacgccccccaaccctctgcacccagacccaagagccggccttcgacgcaccacatgcgtggagcccgggtcccagccctgaggaccaggtttcagggctcagaagactccagcgaggttccctcgcagattgtgtctgcggtcgttgggggaggggccccgcagccttcagcagattatccaaaggtcagtgacccagatatggttttggccacgggccatgtttcacttcctgtgccccaagcagaatttagctgaataattcggaccccaaaccaaacaaaacgctcttatttccgtttggggattcttcggagttgggatttttctgtctcaaattagaataatctgcattattaaccacttaacagttatttgttggttggctgcctgacctttctgagcctcagtttcttcgtctgtaaattgggagcttacccaggtcggaggactgttggaattggaaatattcgaataaggaagtgtttttgcaagtgctttgtaagcagcaaagcgcttcttcaggggtcaatttttttttagctctgcagtcaccacccaaattcggaagatcgttgtgcctttcttggatgagaatgcccggctccagcccggggatgggacggtcttttccttgctaggagtccgctgtggagggggcgatgcgctctgtccaggacctaggagtccctttctccctccaccctcggctcacagcgggcagctcccccgacgcgtaccgcctctttgcccccagcctgaggtgcgctcttccccaggacgcctcctctgtcctctgcacgccgccggccctgctggggttgctttctgccgcggcgtcttcgcgaatatcccctcttgctgtctgcctgggcgtccctccgggttaccgcacaccgcctccgaccctcccagggcgcgggaggaggggcagggcatccgcgttcgtgtctgggccctggcggggagtcgcgtggtccaacccctcgtttttaagaggagggatctgaagcccagctaggcttctaattccagacagagccctac

SEQ ID NO: 25837 - DNA, 174 bp, Homo sapiens
  chr7:129800291-129800465
  hypo
cggaatttaattttgagatggaagccacgtaacaccttctcaaaccgccaggtttgcggcctggcagcttaggttcagatttccgtctgccaagtctttcccgagtcaggggactcctcaggctgtaccgtggatgacactcctccccactaggaacacaaggggcctttcttc

SEQ ID NO: 25838 - DNA, 157 bp, Homo sapiens
  chr7:129846024-129846181
  hypo
cgctgagccaggcgcacggatatagaaaataagaccttcctggttattacccagaggagctcaaccccagcggaggcccacagatgcatttcggtggcaggtgaggtggatgcagtgctccccaaggaggcgcatccagcccagccccagctctcgc

SEQ ID NO: 25839 - DNA, 357 bp, Homo sapiens; identical to SEQ ID NO: 24586
  chr7:1308164-1308521
  hypo

SEQ ID NO: 25840 - DNA, 98 bp, Homo sapiens
  chr7:131041484-131041582
  hypo
cgaggattacctggagcttaatggccactagggaatgtatccaaatcgtgtgcgccaaatatgttgccggtggcagatacccaagttaccccgattcc

SEQ ID NO: 25841 - DNA, 260 bp, Homo sapiens
  chr7:131514717-131514977
  hyper
cggaagcccccactttggcgctcctgggcttggatcccgctgtgaggccgggggcaggtgatcatggcaggcggtaggactcctctcactctctgccccagaccccgcctgggagcctctgccgccctctcctgctccagcaggcaaggccaggaagccgggagtgcttgctgtcaatatcacatgtggagctgcttgtggccggccaggactctcaaagcccagcctcccaggtcaggcgtgggctcctcctactcctc

SEQ ID NO: 25842 - DNA, 1138 bp, Homo sapiens
  chr7:134142980-134144118
  binary
cggctaggcacttctcggggacgctgtgtggtgttgaggttttacagggaaaatgctaaccttggcgcctcctgaattatcaactagctacggggtgcccagatttttctcccgagttccagacccagggcaccccgaggcggcgcctggccgaggagctccgcactgcgccttgttaacagctgggtccgggcaaactcgcgccacctaattctctgccctctaccggcttgagatgcttattcctcagggagggcaagaatcgaaacgattgagaccaactatttacaagtgaggcaaccgggctacaggtgcctcgagggaaaggaggctgggtctgcgctcccacaccttgccgacggctccacgtccctgtctgcgcccgaggtccaccggtctgtgaagcccactttccccgcctccctctcgcgttgtgccgcttggggcgcccgctaggacccaaaatgcggactggtgggccgcccatcaagggttgcccgcggtagggcgggggctcccgtgagctgctcccaaaccccactcgcaggatgctgccctgacgcccagggccaacccggggagccaaggcccccggtctctgcaaggccgaccccagcccgctggggaccctgcaagcccgcgcgtggctcccagcacgccgggcgtccgcggggcgagctgctcagggtcactcggggtccctcgccaatacaggccgcgcggagagtgtgaggcgagccccgggcccgcgcccccacgagcacctaccttccaggtacccaaccccaggatgggcatcttggcgccgttgttgagcaggagacggcttgccatggctgctgcgctccccagacccccgcccagtacggtgcggccttggccgcggcgcgtacctttaaatagcccgtgaggtcggcagaaagggcgcctgcggttggcgcgccgctgcgcgaaggagccttctgattggttgcgctgggggtgccgcggcggccttccccaagggtcggcggggatgcttcttccgcctggtcctagtggcagcggattctttccgcccccaacgctcgcccgcgccccgcgtggcagaaaggagttcctcagctgctgtatctggtgggaaagcgaatgctttagc

SEQ ID NO: 25843 - DNA, 474 bp, Homo sapiens
  chr7:134918319-134918793
  hypo
cgagctgattactgacgcgagggtcccctccctgacccctcgcgaccctgcgaggtgagtcagccccgcccctccctcttctctctcctcccttttctgtcgccttcggacaacttgtaacactgtttcttccactgcccacacgcccattggcccgtcaccacgcatccccattggctgtggcggccagggacagggccgcgattggtccccacccctgtaacgaggtgccaggtctgttttctgacccagacaggaaccgcgatccccactccggcgcacgaagccgggtgactgctgtcccgggagtggggacgtcgcgtgcaccgttggcgagtaagtatcctttgaacgctcctctccagaaaggtgcccttgggcatatgagtgtttgtgtagacttgaaagaattcagtgcagcggagcctaacaggtgaacttttagcgcggggttcacaggagccttttgtatcc

SEQ ID NO: 25844 - DNA, 125 bp, Homo sapiens; identical to SEQ ID NO: 8679
  chr7:148448819-148448944
  hypo

SEQ ID NO: 25845 - DNA, 202 bp, Homo sapiens; identical to SEQ ID NO: 24592
  chr7:148851195-148851397
  hypo

SEQ ID NO: 25846 - DNA, 577 bp, Homo sapiens
  chr7:149111880-149112457
  hyper
cggaaacccgcggggcttttctacacctttccaggagcagccgctggagatcctgcctctccaagagaacctggctaacccccacacttaggtcagaagaaatgtgtgatgggaaaccagccctctctgggagtgtgaaggtaaagacggtcctatatttcagttccagtggggctgcagggtcttttgctatcggtgtgctatgtatgcaggtcttgctagagactgagaacctctaaaagtcattgcgcagagggaacgcggatttacccggcatggtctttggaaatcagtgtgctgtggaagcaggtcttgctagagccaagaaacctctaaaagccactattcagggggcacccggatttgaaccggggacctcttgatctgcagtcaaatgctctaccgctaagctatacccccgtcacacgggaggaaagcgtcactcacgtcttcgtagtcagccgcacgcaagccgcgtacagcactgcagggtccgcgctttgggcggcgcttttctccggcggccagttcggacctttgcgcttttaccgtcacactccaacgcactttcttcccc

SEQ ID NO: 25847 - DNA, 351 bp, Homo sapiens; identical to SEQ ID NO: 8682
  chr7:150676178-150676529
  binary

SEQ ID NO: 25848 - DNA, 138 bp, Homo sapiens
  chr7:150753916-150754054
  hypo
cgcctgacagacgtccagtgtcagcccccgcctcccccaagcggccacaccggcaaggagcacccgcctcccgcacacctgacgatgttcttgtgcttcagctccttgagtaggcagatctcccggagggcggaactc

SEQ ID NO: 25849 - DNA, 304 bp, Homo sapiens
  chr7:150773909-150774213
  hypo
cgaagggtagctgtggggagaggagagggcggcaggttacccgcaggctgggagtgaggatgcgccacgggccaggccagggccactcaccggcaggagctggtagcccatcaggcctaggtgccgctccctcagggccctcgagcccagcagcacccggccgtcccggcagaaatgccagcgttcccgcaacaccagcaccaccctgcagggggagggacgtggctcagggcatggcgggcaaggtggccagggctcccccaccctgcctcctttacctctgggcagggtctcgagtagtggc

SEQ ID NO: 25850 - DNA, 571 bp, Homo sapiens
  chr7:150774308-150774879
  hypo
cgcacagcaggaagtctggaggggagcagggccggcggccttagccagggctccgtctccccgggcctgccgcctgccccttgctcacctgtgcagtagcctggaggcacagtcaggtcctggcggtatttctcctcccccagcagctggcgcaacccctcagctactatgtccttgtgactgaggagaaaggacaccagtagcaggaagggcccggcacctcatcctaatctgtcccagtctagtgccaccaccctgggcaaagccctctgctgcttcagggcccagttttatggtggccgagagctccttagctttggcgcttcatggtccctctggcttttccactctgctggtcccaggctggcccctccccttgccccaggctgccccatccacctgtacttgcagcgggcacggtcggtgatgagaggctggggaaagatgggcacttgctgccttcggggaaggcggggaccccggtatcctgggagctccagctccacggccgtgtccagcagggagaggtagcgacgcacaatcagagcatgaggggtgcctgtggggaggc

SEQ ID NO: 25851 - DNA, 54 bp, Homo sapiens
  chr7:152371372-152371426
  hypo
cggaccttaacctgggtttcaaataatcatttaaatataaggttttggccgggc

SEQ ID NO: 25852 - DNA, 982 bp, Homo sapiens; identical to SEQ ID NO: 24598
  chr7:155166913-155167895
  binary

SEQ ID NO: 25853 - DNA, 1026 bp, Homo sapiens
  chr7:155302323-155303349
  hyper
cggggctgcccttggctgcgcgtcccccacgctgcagccgcgcgatggcccgggctggggtggacgtggggctgggagaggaaggggctcacggacgggcgccccatctcccaggcgggctcctcggctgctttctttgggaacagctggtgcacgtccccgcgcgcccctctccctccggaattcggcgaggattcagctggaccctttggccaccacctccgccccgggcgcgggtcaaagagcacccctcgcccttggtaacggagacaaaacgttcggggccgtctagacaggtcaaggtgcaggatgcggcgtccccgcggctccttccggaagggggcgtggagccgccaagggcgccggaccgcgccgcagcccgggcctttgcgggctttttccctctccaccctctgctgatcaaagtaggaagtttgcatgacaaccgcagtgaaaggggctgaatcacaaatgaactcgatttctgcagtgttgatctatccagcctccattgtcccctttcaggcgcagtatgaacccttccggtgccagcggccgcgctacattcacaggcgcgctcggggcgcacaaagggtctccgcgcttcaccgccatctggccacaaatctcatcagcggcgcggcggcgtccccttgaaagcgcgggcggagggtgcgcttgtgttcttgagacccaggttccattacaaaccacccagcatcgccaccggcgccccccgtttcaataaggaagccactttgtcaaaacattctaaaagaaacttgggaagaggacgcgtcagagaaataccgccgccgattaactatcagctgcgcctcccctgtgcacaggtaacatccctccttctcccccacgactcggctggagcttgattttgagctgctctcaaggcccaggcactcgaatcggaagttaaatagcttatggactatttaatagaatataccaccacacgtatctaatcactcaaataccacgcttttaaaactcatgaatgttttaatc

SEQ ID NO: 25854 - DNA, 691 bp, Homo sapiens
  chr7:156409159-156409850
  hyper
cggcgttggcgccccggtctttcctgcgttggcgctggccgcggggcccagcacccgggacgttggcggcggcagaagggaaggccccggccgccctgctccgctccgctacagctgcaggcctctgcggtgacgggtgggggcaaaaaccctgcagaaaagtcaccgtcacacgcagagtccaaaactcccctttccccgctggaaccactttctccaaggagctccgccccgcgctctccccgaccccgtgcgcccccagacctcgcgtcccccgcgctctcccccgccgcgccctcctgccccgcgcccctcctcgccccgaccccgcgcccctgcgcccgggctccagcccggtccctgccgcctcccgcgccccgcgccccgctcctgcccgcggcccgtcccctccctgcagcgcagcgctctgggttcgggtctctgccctctccacccgcctttcccgcgagtcttcttggcttccgtgtccccctccccagccgggcgtcacccccgcaccccgcatctgcgcccccctcccgctaacccgcggcctccgcaagggcagcgcgctcagccgggtgaacctggaactgtgttcctggcccagcgctttcataaaagggcgcggaatagtaagtcctagttcaaggaataaacacggatccccactggccatgccgggactgac

SEQ ID NO: 25855 - DNA, 219 bp, Homo sapiens; identical to SEQ ID NO: 8685
  chr7:157334647-157334866
  hypo

SEQ ID NO: 25856 - DNA, 250 bp, Homo sapiens; identical to SEQ ID NO: 8686
  chr7:157589680-157589930
  hypo

SEQ ID NO: 25857 - DNA, 203 bp, Homo sapiens; identical to SEQ ID NO: 8687
  chr7:157642963-157643166
  hypo

SEQ ID NO: 25858 - DNA, 218 bp, Homo sapiens; identical to SEQ ID NO: 7517
  chr7:157916520-157916738
  hypo

SEQ ID NO: 25859 - DNA, 201 bp, Homo sapiens
  chr7:158741237-158741438
  hypo
cgcccccgggtgcttcggacacgggaggtgctcagtgaaggtggcgcgggggatggctgagtggcagttgtgtctgcagggcagagtcatatcggaatgtacaagcgcaactggatatgcagacttttattcctggaggctacagtctggtccctcaatgaccccacaccccccacaattatttacaaaattccatttgac

SEQ ID NO: 25860 - DNA, 592 bp, Homo sapiens
  chr7:2232864-2233456
  hypo
cggcccaagccacgccccagcatactcacttgcccaagcaaccggggtgagacaagggccacccagctccgacagccaccacgtcctggagagaaagcgtccccgcccagaggacggtccttgtcctagaacagcaaggccctccaactcttggtcctcaaagcccttccccgcctccgcacccagcaccacattgctgtgctgagtttcagcacagggaccgtgcgtcctgctctctgctgcatctcccagccagtatacaccacggtacgtcataagccctcaacaaatatttgttgaatggaacagacgtgatcacaatatgtgctcctgggaaccctcggctaccagaaaaaaaggcgagacagaaatgagcacttctcaaccctgggagcaaatttataagggttttatcccttcaaaattattaccaaggggtaacacggccgcgggtaactccagattcctccggaaaacctcactgtgcactgccaaggctccagccagagcaggtgctgagccgcgatccgggagacgccagtctcaccctaggctctcttccacaaccaccctcaggcaaggccacaccgtc

SEQ ID NO: 25861 - DNA, 1258 bp, Homo sapiens
  chr7:22893437-22894695
  binary
cgggagccagtcttctgctacgtaattagacgagtcttgaaagaagcacccaggggcgtggctgaagactttaagaaacaccaggcaagggaggggagtgggtaccagagacacctaacattatttgagtggcaggagcttcctctgaccttcaacgaggtaaagagacatcacagccagcgagagtttggggcagactccccagactcggaggccggggcaaagtgggagccggggccaagtgggagccggggccgtgtggggtgggggggggggcccaaggcggggaaggcccgggccgccgacagggggcgcgcgagggcctccgggccccgcgggcggggcgggtgctggacccggaggggccttccggcaactttttggttggtgccgccccgcccaggccccttttaaacttgatctccgcagtgccctcccttttcggccgcggcgcgtgactgggtaagtgggctcggaccttctggacgcaggagccgaccacgtggctccggggctaccccgtgcgcttcctaggcgcgcctctcgctgcccccacgccgaggcctcggctcggcgccgcggggaagcctccgttagggcccctcgggggtgggggcgtcctcgtggcgcttgggcccttcgtcccgggttaggacggcccgtgtccttgtgcgcttgaaggggccgccccctttcctcgaggatcccacccccactcagcagaagccgccaggcgcccgtcacctcccgtgcctgagtccctgccgtccacgcattcggcctacaggcagcttttagtcctttttcaattaaatgattgcattttgaggatcaaattccaaccgcaggcggaggcgccgagccccggacggtctctgggttcttggtgcactcggggctcctgcctgcccaggggctgtgaccgcgcggacggaagcctatttgggaagcgagtgagatctgatgtctgaagcgctttaagtttctaagcggggcagtataatagcggggttagcaaacacacggaggtcatttcactcgcgcagccatcccccaccgccaccagtgccgttcatttgctactggcccgcagtcagataatttaaaggcttggagggacgagtcttgctggagccgacgcctacagtaagttgagcggagtgctgtgagccctaataagggagcctgctttcctcccgaagattcgcttttttgggagtggccagagcgttattacagcacagggcccgcttccaac

SEQ ID NO: 25862 - DNA, 1247 bp, Homo sapiens
  chr7:23052818-23054065
  binary
cgaggattcccgagtatgttaaaatgagcctcaggagaggaataactcatagaaagaaggggcaagggctcaagaagagatcttcagcgaaataaccaaggaaggaagcgtggctgctgtctgaacctctccgccctgcaggggaccaaagaccgactcgggccaacgctgctctccagggggcgagggcggggggtcgacagtgaccattgtggccaccagaccggacggacagtggcggcctcgccgaagtagagggcgcgagtgggagaggaggcagaggccagagcatccgccgcggcagggaggggacggggggctcccgccccaggcccacccggcagaggggcggccggtggggccgaggcggcggcacccgggtcacagcaggaggctggactgctcctcgccgggaaggaaagacccgagtcgcgcgcacaaagctgccgccctccaggcagcgggcaggctgcgcccaacttcggggcgagcagcgccggccgcagcccacccgcccgccagccgcccccagcgccccgcgccgcctcgcacccacccatggcgcctcgcgcgggagccgttacccccagtggagccgcggccccagggacaaagtcccggtcctgtcctcgccgccgcctcgccccggctcctccctgacaaaaaaaagttatccgttgccggacgccctgggggcccggcgtgggtctctcggctggactcaccagggcggctgccggagctccacctgcaggacctcgactcgtgaggctctcagcgacagcgacggaggctgctctgcttcctcccgagtagcagcaccacctgctccccttcttcctagcagaacgggtcccggtgagccatcttccccctcctctcactgactgacaacccagccgggagagccaccactgccgccagcctctctgacaggcacgaccagggacccgtcctcaagcagccaaccaccaccgccccacgccagttcagcctatcgccgtcctccggggcgggatcagaacaacttctccaccaatgagaatcttcttctgctgggcctggggcggagccatgaggcgccttgagtgggcgtggtctgagcaatgggcgtgatccgggcgtccgagggaagttgattgactgtaaggtttgcggtggccgctaggcgatgacaatcagcgaaggtctcttagattctgagccgttagggcttatggccttctcagaaaaaaataaaccttacc

SEQ ID NO: 25863 - DNA, 2253 bp, Homo sapiens
  chr7:23507580-23509833
  binary
cgtttacgcacgcgttccaatacccctggcgagctcacagggcagaggcaaattcctctccactcggccgcgcccacggcctcccaaccccggacagagaaggaaaggagggacccccgcgtgtccgcagctgctttcgcctctcctgctcctggaggggtgggggaatcatccgctgcttcccaagccctgcaaaccccccaaactgcttgttgggacccatttcccgtaggagcaatttgacccgctcggaccgaggacattcagctgtgagctttcgagagattttgtaaccaataaccataatcccgcggcagaggccacagaaaagctttcaattcctgcccagcatcatcaacacacacacccccgccataaacttaaaagcaaggattaaagaccggaacaccacgccacacggcagggggtaagcaccagaggacaagaagttctcagctgagtctctccacccaataacggagtgagaacagaatcggggcaaacagaagcagcagctcacctttgcctttttgggaccgagtgctcaacttctatgggtttcccgtgcagttctattttacctgcggacacacaagaagtgagacggtcggccgagttcagcggctctccctgcccgaagacccgcacagcccaagcggcgacacaaatggcctcctgaggccctcgaagggcccccgaggcccggacgcggctccaggcggagggagaagccgaccccctcgagcggcgtgggcatttaactcgcagatggttggggagcagggtccgctggcgggcccactacttgggtatcagtccagtctccaagcctcccccacccacccctgggggccaccaacaccacgaggcccgcaagagggacgcggcccaccctctcaccgccctggacacgctccacagggcagactcggggcagggggctcccctggctttcttcaggagggggcgccctggccctgccctctgcttcagcccagacccgccgggaacactcagcggtgggcttgaggaagacagggagtggcgagaaagggtcggggacggcaggggagaccacgaacgggagaactggcagaggcgcagctcggcacaggctgaaccaggcgcgaaggacggcgaggcgcccgcaccacgtctgaattgattaaaagggaagccgaaaggcacggggctcccatggggaccccaacgcagccttccccctgggcgtcctgctccgcccggcaccgtccctcgccctggcggagccatacccggaggccgcagccccgcgccagggcccggagagcggcgggcggccggtgcgtggcggcgactcccttccaggcgaccagccgcccccgcccacctgcccctatcgctcgtcggaccaggggaggtggaacggggaaaccgggcacacactctctcctcccacagggtggggaggaagcgcggggccgcctgtgcgaggcaccagcctcgcggtctcactcggcagcacggtcgaggccactttccgttctccacggccgggggtttcggggcgcagcacagacagcgccgtaaataacgaccgaggaaagcaggaaggaacgaggcacaggcgggcattctagctcggcccccgaggcccagcgtgccggggcctggagcacgcgcctgggcccgggcggggcgccgggggagcgcgcctcccccagccccgcgccccccttagccagcgccggggctttcttgacagcgcgttcgccctcacccagcaaaccccggccggggaagcagagccgcgggccggagtgggagccggagctgaggagagccccggcccccacgcgcgtgggtgtgggcgctcaggcctcacccccgctcccccagcgcgccgggcctggggcccgcggagccacccggtgggcctgggcgggcggtgcagggctggggcgagagcccgggtggggccaggcccgggcccacctgaaagcgcctcgatggccttgagggcccagctctcgtccgggcagtccacgaacgcgtagccagtcttcaccaggaagggtcccgacaccgggatcttggcgtccttgaagatactttctaggtccgagggggcggcgttctcgctgaggtttccgatatacagtttgttcattgtgaagagtggttgtttaaaaaaaaataacgagaaaaaacgaaaaattaaaaccacccacggtgatggatggatccagctggttttgttcccctcgtcttctc

SEQ ID NO: 25864 - DNA, 929 bp, Homo sapiens; identical to SEQ ID NO: 24621
  chr7:23510081-23511010
  binary

SEQ ID NO: 25865 - DNA, 1542 bp, Homo sapiens
  chr7:23513246-23514788
  binary
cgcccggcttgggaccagcctggagtctcaagccgaaacccctcacgcgggtgggcacacaatgcccggcgtgtcgcctgggcctcctcggaggtgctttaacaggctcttgcgcttttgaacggccctcctggactctgatctgtttaaactagaggcgttaataagtgataacctggatctgccctccttggaagctgcctgcctatattttattgtttaaaataaataaaaatggtgccccgggagagaagatggggttgtttcctttttcctctggctctgccccgagaaagagggcgggatcctcacggctcacagtggggagggtctttcgtcggccgccggctcgcctcggagggcctggaccactggaccgcccttccccggggccctgccgcgggaccgcgggcttctggctcctcctggggctgcgtccgtatgcgcggagcgtgtggccgggccgtcgccgcgccaccccacctgagtccgccggccagcgcggggacgcaccgggcagcgtgtgtttggcgaccctcccgcacctctggtctcagttgcgtgtgtgcacgaggggttccatagggcccagggatgcttggtacccacgggggagaatccctcgccgaaccctgcgggtctgcggggcgggccgcgagactggcgcgcaaaagcggctccaaggcggggctcccgcgctccccggggccggcttgccgagtccaagttgagcaaccggcgtcgagagagacaccgcccctgctgcgggcgggggcctctcctcgcttccgattggctgacggggggaacctatcgccgtcggccgcctccgccagagcggtttgctggttttcattcattggccccggagccgcccctggatttccatcttttgtggcgcgaaaataaccctttgctccctcgttggttttgttgaggttgaggggtgggactgtgttcccctctgctcgctctcgtttttcctgccctttaacagctcgcccccagccccaacccccaaggaagaaagagggaggtaacgctgaggaagggtggaaagcagttctgcgtccgtgggtggagcccgccccttggctgaccgcatggtgcccgcacggtcccttcccttcccccagcgtccagcgcccggaggttctggatttgcgccatgctcagcagctggagtcacatcttcgtttccctgcccatttccaacatcttagagttgatgcgtccttttttacttaaaacaactacaaccaaccatgttctcaggtaccagaacttttctgggcttctagagaaatcgactcgccctgcccgctcccttcctaaacccctttgtggtccacagggttgttttaagcaaaatcaaacaacccctccaaaaaaagcaaacgaaaaattccgggtaaaatcaactatgctgagaccacgttttcgttgaagctgccctaagaccaatgaagctgagaccgaccttcaaggattaacgatttctgtagctgaaatgttctaatttcactgacgtttggtggagac

SEQ ID NO: 25866 - DNA, 1296 bp, Homo sapiens
  chr7:2472811-2474107
  hypo
cgcgtgatgatcgtgctgagcggaagcctgctgcaccgcggtgcgccctaccgcgacccgctgcgcatcccgcgcgagcacgtgcacaacgccagcgcgcacctgaccttcaacaagttctggcgccgctacgggaagctctcccgccacctcatgaaggtcaagctcaagaagtacaccaagttcctcttcgtgcgcgaccccttcgtgcgcctgatctccgccttccgcagcaagttcgagctggagaacgaggagttctaccgcaagttcgccgtgcccatgctgcggctgtacgccaaccacaccagcctgcccgcctcggcgcgcgaggccttccgcgctggcctcaaggtgtccttcgccaacttcatccagtacctgctggacccgcacacggagaagctggcgcccttcaacgagcactggcggcaggtgtaccgcctctgccacccgtgccagatcgactacgacttcgtggggaagctggagactctggacgaggacgccgcgcagctgctgcagctactccaggtggaccggcagctccgcttccccccgagctaccggaacaggaccgccagcagctgggaggaggactggttcgccaagatccccctggcctggaggcagcagctgtataaactctacgaggccgactttgttctcttcggctaccccaagcccgaaaacctcctccgagactgaaagctttcgcgttgctttttctcgcgtgcctggaacctgacgcacgcgcactccagtttttttatgacctacgattttgcaatctgggcttcttgttcactccactgcctctatccattgagtactgtatcgatattgttttttaagattaatatatttcaggtatttaatacgaaatgtggaagggaatgctggagtaaaatatcccctctcccctccgcccgcccacccgcccgcccgctcgcccgctcgcccgctcctgtggtttttctgagcgtgcgggcgccgggaggggatgctgaggctgatggagctgcctccagggctagggccactcaccggaggagggcggggcctgcacttgaagtcaggccgcacctgtctgtttttggaagggtagccgacaaatccttccagagggaaagttctttgtttaagtgttgtacttgaaaaggtcaatcttcagggcttcctgtttgaagtcaagtcagaggtaaaccggtcagttacagaagcaggatttctaggatttctaactccagctgttcccatactgtctagtttaaattatggctgttaaggccgggc

SEQ ID NO: 25867 - DNA, 878 bp, Homo sapiens
  chr7:24796718-24797596
  binary
cggggacggggagaggatgggaaggggatgctgactgcgagttggggcgggacgcggtgatgggaggggaccgggccgggaatgcgggaggcgaggggagcgacgggacctgccgttccggcggccgggcagccaatcgattcgtctcccctaggaaggagcgaggggagggtggcccagagagaaagcgccgcgcggcctcggctgcccccggcccgggacacccaaacagaccaaagaggatccggagtggagcccggagcggatcccgcagcccgcgcccgccgcgcacttacccgcgcgcccgctgctgggtccccggcagccgcgccccctgcgctggcggagtcggaggagcctgcgctgggccggcggggggcgggcgcttggggagggcggagagagggcccgcccgccgggacctttgctcggtccgggcgccccagagccgcgggactggccgccggaggctgcgggaggggcccgggccagacctcccagaagccccagagagagccgcttcccctccttcgtgtgactctctgggagccgggttgctgacggcccagcgctcagccggagtccccgcgcgcttttcgggactcacccgggagatgtcggggcctctcgggaagagtgggctgcgcctgccttccgcggccgcctcgcctcttcgctgcgcgggaccgtggggtttgagagcggcgcctcctcgcggggccgaacccgccacccacagtggagtgtggactgacaccgcggcctcacggttcaaccaggaaagtccaaggcctgtccagcctgtgggagcccctaatgcccgtgcctggagtagtatctgggtgtgtggtgcgacagtgcccacacttaggcctgcc

SEQ ID NO: 25868 - DNA, 1196 bp, Homo sapiens; identical to SEQ ID NO: 8702
  chr7:25019058-25020254
  binary

SEQ ID NO: 25869 - DNA, 352 bp, Homo sapiens
  chr7:25896245-25896597
  hyper
cggctgggatgtgaagctaatttagtgtgtgctttacaaggaatgcacaaatcaacacagcgctcaaattaaatctcttcttgaggggcttaagtatcttcttcaggaagagtaaagcatgtcttctagttctacttccttcccggttagccagctgctggagagccccctcagtaaattccttccagatcgacctcagtgtgggtgagagcgcagtctgtgaccaccagcgcttctgactcagcggaaaacgccggcaaacaggactacacctcaccgcggcggcaaaagcggcctcagctccagcactcacagccaccactttcaccgtcgccccgccaccaccaccttc

SEQ ID NO: 25870 - DNA, 684 bp, Homo sapiens
  chr7:25896671-25897355
  hyper
cgcgcgcgcacaaacacctctccctgctgtcaatcatacatgcgcgccatagcgcgcatgcgcactggtggactccagcccccaccgatcctacgccctgtctctgcgtctgggaccagacgcaccaataagagagcggattcgggggcgggccacaaggaagtagccaatgagagcgcggttggaagccagggctagagaggagtaaatccttctgtcgtccccgttctgccgcccccgcgatgatttatgcgtcctttttattatttgtaacactttgggaagttattaaaaggaagatctactgcttcctccttttgggttaaactggatggcaatgtttgtcactggcccttattagagaagagtgtggcgaggtggagggccgttggacgctgggtttgtttgtgtgggtcttgttttttattacaagacacattatccttttaattacaagctgtagacagggccaacttcgaaggtcttcgtggcggagtgatcttggatcattcagggggctgaaacccgatgccttctgactttcgcgtccgtactcttggcgttgggaggagcctctcaggaaggtgttgcaacctttggttgtaccagaaggaaataagcaaactcccatcacccccacccccattccccgccctaacacggagtaaacttcggcctttttcc

SEQ ID NO: 25871 - DNA, 444 bp, Homo sapiens
  chr7:26192423-26192867
  hyper
cgtccctcgcaccagcgtggatgcatggctggtgcacagcgtggctgccgggagcgcggacgaggcccacgggctgctcggcgccgccgccgcctcgtccaccggaggagccggcgccagcgtggacggcggcagccaggctgtgcaggggggcggcggggacccccgagcggctcggagtggccccttggacgccggggaagaggagaaggcacccgcggaaccgacggctcaggtgccggacgctggcggatgtgcgagcgaggtaggtgcagagcgggaagcgagcgaagtgcggcgtctacgccgccgggagcccccgaggcttgtgtcggatctgagcaggggccactctcgctgtgtcctggcacccttagcccctggtctttgcaggttcgcagatgctgctgctctgattccgaatgaagggctactagtgctgtc

SEQ ID NO: 25872 - DNA, 266 bp, Homo sapiens
  chr7:26283713-26283979
  hypo
cgcctctctgtgcatgcacctcggtcactggtctcgactaatggtttctccgggagcccagttaacagggaaaaattcgcatggcctctcggtttcttcggtccgaaaatccaacgttggtccaagaaggctctggtgtgtgccaggcactcactgatcatctggtcttacggagacgcctctaagccatttgatcccgttccgggaacgaaaatggcagcggtgacggttgctccttttatggtctccctccggctgtccaggac

SEQ ID NO: 25873 - DNA, 1756 bp, Homo sapiens
  chr7:27135176-27136932
  binary
cgtctgcttcctgatttaacgcgtaggggctgtaaggcgcactgaagttctgtgagccatagcttggaccacaacttgagtgggagtaggacacccccaggttcccggaagtctggtaggtagccggctgggggtggcgatggtggtggtggtggtggtggtggggcgaaccgatctgcacccccctgcccactaggaagcggtcgtcgccgccgcaactgttggcgctgaccgcgcacgactggaaagttgtaatcctatggtccgaggggtaggctcgggctgagcaggtccccgagtcgccactgctaagtatggggtattccaggaaggagttcattcttgcattgtccatctgtcactgagtgacctggtcctgcgaagcccggcgtgactgtgccaactttctcacttcctccatggggccggagaagaaaaatgatatgaatgtacagtgcgcaagagggggggcgggagggcggaggacgctggaggaggggcacgtgacggtgtcagccaatggctgagcctcctgcaaaagtttgccggcttccgcagtgatggatcaccgttttagtggcatttaaatccccggcgctccgccgtctaggtgacgcgcagtcgcccccccaggcagcctaggcggcggcagctgctgcggcgactgcaaaggccgatttggagtgctggagcgaagaagagcaaaagctgcgttctgcgcgcgcccgactccgctgcccgccccgccaggcctccgggaggtgggggctgggaggcgtcccccgctcccgccccctccccaccgttcaatgaaagatgaactggcgagaggtgagaagggaagagggctcccggctctctcggggcgggaatcagtgggccagagctcgccgggtggccgcaagtacgccggcccagcccgcagcgcgcccagccggaaggcggggaatccggctgacaccgcgccccgggttcccaggccacctcctctgttctgaggctgggctgggagaccgtggggctgtgaggagcgcatagaaccgtggtggagggcgaggctgggccaccggctcttcaagctcggaatggagggggaagagcgcagagggctggctgggaggaactcgggtgggcgtgaaggagacgagggcaagaaaagaaacttcccttcttccaggagggtcttcgaaaccctctccccacagcccctctcgtcattagcatggcaatgaggagtttctgtaattcgacttggaggggcggatgagccctggaaactcagagctcgccggaaaaggccgggggcggccgggctcttcttccccaccttccctctctcgtcgctctccgcccctttctctttcccactcagttttgcaccgggagccctccgggatgcggagctactcgaccgccggatttttaggggtaggaggcgggggagagagatgacgctggcggacgtggccagcgcgggggccgggcggtgcgctgcaggccatctgccggcgccctgagacccaggagcctccgcgctcccgcgtgggcctcacagggccggtccacagctccaacatagtagctgaactcccttcgttgcgttcctctttttctggaggggaatgttagaagagagagagagcttccttttataaccttcctcattctgctgcacgtctagagtgggtgtgggggctggcaggtgggaggggcggtggacaaatggctgatggtggacgggacactttaccccaac

SEQ ID NO: 25874 - DNA, 791 bp, Homo sapiens
  chr7:27190485-27191276
  hyper
cgtccccctctaccctgcttgctgggaaatctctgaggggccagtacagcagtcgcgccaggctgcaagaggcgggctgcagctggcgccggtcccggcgacggccacggcgtggcagcagcgagcgccagcacggtcgcaataaataatcggcccgcggcagccgcagtcaggaaggcggcggacctaggatgcaaatgcgccgctttatccgccccgagcgcacgcagagcacgggctaacgtcctaaacatccacagccccttcctatttatcgaatccataccaagatattgtctcaagttggggaaacaacaacccaaacaaaaaacaaacaaaaagaacctcggactcttttcttgtcgctgtccgaggagttctcggggcaaatctggtctgatgtgcacttaggccgagctacagttcgagccaccgcgctacgcaaagccaccgccagcagcacgctctgcgcttcctcccgggcagctccaccatcctctccccgctcgcggaaggtggggagtgcggtcgccagtccgttgcgccaaggtggattggggggtccccctatcgcccagactcggtttgcgtccttccttcaaccttagctgcgggaccctgccacgcgcgctaacagcattatgtcctctgcaccgaaacttcccaccaagtaacacccaattaatcccatcctctcctccaacacagaattccacccacgcacctattccccctcccagcgcttcagacacctctctcatcgaaaaaccgggcgaagggaagccggcaac

SEQ ID NO: 25875 - DNA, 514 bp, Homo sapiens
  chr7:27219316-27219830
  hyper
cgacgctcgcgaggcctagcgaatgcgcgttgctttaaattaccataccaatcacttcttgagggtgagtcccctttttctgttatgaaggggagcgggacaagtgaaataatgtaccgtgctgctcttagtatcagaagcgaacaaaggccaagaatcatgctggggttcccggctccccggcggctttgacattgatcggaagtgcgccatctcgtggcggctgcgcgcctaggttgggccggagttccagccccgagccgagagacggaaaccagctccgggcagagagagaaggagagaggagaggatgtgcccagcccgctgctattgagatctcatttttacatctaagaaatcgctgcaaaaccccagccgggtttatagcggcgcattccaaatatgcaaattggccggccccggacgggtttacgaccacattgtcacagccatcggaggatgggcttttatagggctcagaaatcaaacccgcgcccgcccgccgcccgcccgc

SEQ ID NO: 25876 - DNA, 895 bp, Homo sapiens
  chr7:27281871-27282766
  hyper
cgtagcttgtaaaaagacttttcagccagtttgaggttagctgccaggggcagacagttgtaataatgccgacagaattgaggcttgtaagccgggcttcacacttctaaaatgcagttatggattctttcatcggtgttagatcaaggcaccaagttaagaaaacaaaagtcaaaacaacaataaaagaaaaaatcaaaagcttatttaattaccgagtcccgctgcccctgcggaactcgccgcgcgcgttaagctctcttttctttctgcggaattccatttgcatcccctctgcctgggtgtctccctctctcagtgtgtgtgtctctctgtctgttttcacactctcctccccaatcgagcgaggcccacacctggcgcatcactgccgagccattagctgcgggtttcctttcatcttcgctgtggcagacgtttctatttatccacttgcgctcgccgagtggcgtcaccagcggtactgtaatgacgattgcagcaggaggatgacagcttagaaagaagagggcaatggggcttcctcccagaggcggtgcggcacagaggagcgctcgcttcacaaggtgaccctagctcccaccgccaccgccgcggtcgcggtccagaccgcgctccagcagctccgcgccctcccaggcacccggcctttctttctccctcttgcaaccaagatccgtccggccgctggagacccagggagccggggttaggaactcacttggggctttcccctcccccaccggagagccccgggatggagagccgaaaggacatggttgtgtttctggatgggggtcagcttggcactctggttggcaagagagtctcaaatttgtccgaagccgtgggcagcccgctgccggagccgccc

SEQ ID NO: 25877 - DNA, 856 bp, Homo sapiens
  chr7:27290961-27291817
  hyper
cgtcttcatcgagattatttatagcgcagtgagcgctgctgaaaggtatacgctgttaacagggacaattacttaaagggaagcgtttgtaaaatggaaaacaaatgccggggttggtaacaaatgggatcaaaagcagccattccaatctggctccccgagggaaaggagcgggcgtggccctgtaggattaggggcgcttctgacctccccaagacccaggtgaggccgagggtccccggcgcgccagcctgcgccgtggctgtggctgcggtggcgactcgggccgggcctcgctctcgccggcttcaggttcccgcctccctcgcgcaggcagcgggcgcgtgtggcccgggctgggcaagccgaggaacagcgagcccccggacgctgactgcaggacgtcccagtttgtgcccgggtctccgtccctccccgtacggggctcgtacccccgggcctgggtctgacccacagggcgctgaggcctttgtagctgaagtcggaaggcctcgttgcgagcgcggcacaggttgctggtagcttctggactctggaggcttggccttccttctaagccgatggcggggaaagaacctcgtttccacagcttccccgacccccgccgcttgccatttggggacgggaagcgcgcccgggtcgcttcacgtccctctgggccggagccctttccatggctggctcctctgggggcccttgggcctgtgagcagcgtctacttccctcagagaagaatcctttccttcccccatcgaagtgtccctttctgtatcctgaaataacccctcctgggtgaggccagttcccctctgtcgccctcctcccgcaggcgtcc

SEQ ID NO: 25878 - DNA, 497 bp, Homo sapiens
  chr7:27531212-27531709
  hypo
cggctccagcagagttgtctgagcagcggcctgaggtgctgggtctgacatgattgttggccgtggaaggcctcgggccatcctgagctcagatcttggctgccggccgctagggcggctgcttctgcagcagggctagggtgtcccgcttctcaatggagcgcagctgctgctgctttgcccgcttgagcttggcagggtttcggatcacttggacgatctccaccttccgctcgttctccaggcggcatttcaggttctccgcccgacgctgtttcttctcctggcggcgcctctcctactcctcctccaggtgacgggcaaagtccttggccagcttcctctcctgcttcatcttccgctgccacgatatacgcaggggcttgtcctaaagcatctgagagaatcttttcttggagcggtccttccacacttgccccgacttgggcttccccttcgggattacaggaagctcctcctccttcagcttcttggac

SEQ ID NO: 25879 - DNA, 414 bp, Homo sapiens; identical to SEQ ID NO: 24632
  chr7:2770625-2771039
  hypo

SEQ ID NO: 25880 - DNA, 126 bp, Homo sapiens; identical to SEQ ID NO: 7538
  chr7:27831654-27831780
  hypo

SEQ ID NO: 25881 - DNA, 98 bp, Homo sapiens
  chr7:28110716-28110814
  hypo
cggaatcggctctggagagccagaatccctgtgtgtagcgaaatactacaggtcagcaagcaatgcggtgtgatacaaagatccaactaggtgtagcc

SEQ ID NO: 25882 - DNA, 54 bp, Homo sapiens; identical to SEQ ID NO: 8714
  chr7:30599500-30599554
  hypo

SEQ ID NO: 25883 - DNA, 208 bp, Homo sapiens
  chr7:30603338-30603546
  hypo
cgactcaccgttctggaggctggaagaccaagatcaaagtgttggccgagccatgctcctgctgaagccgctgggggaggctccgtgtagtttctgggagccccaggcatttgtggcgtgtggcagcatctctccgatctctgcctccatcttcacacggcggtctctgctctgtgtgtgtccagatttccctcttcttaataaggac

SEQ ID NO: 25884 - DNA, 126 bp, Homo sapiens; identical to SEQ ID NO: 8717
  chr7:30656768-30656894
  hypo

SEQ ID NO: 25885 - DNA, 955 bp, Homo sapiens; identical to SEQ ID NO: 22944
  chr7:3082731-3083686
  binary

SEQ ID NO: 25886 - DNA, 848 bp, Homo sapiens; identical to SEQ ID NO: 23361
  chr7:42927739-42928587
  hyper

SEQ ID NO: 25887 - DNA, 265 bp, Homo sapiens
  chr7:44835105-44835370
  hypo
cgggctcaagcaatcctccccgcccagcctcctgagtagcgagcgcctcgacgcccagctaatttttatttttatttatttttttgtagagacggcgtctctctaagatgcccaggctggtggccggtgtcgaactcctaagatgaagcgatcctccccggccttggcctccgcgcctcctaaagcgccaggtatgagccaccgcgcctggcctacaagtgcattttaattaaagtattattaatgtctttgcctgaagaaattc

SEQ ID NO: 25888 - DNA, 79 bp, Homo sapiens
  chr7:45046889-45046968
  hypo
cgggagcagtgagcccagccatgtcctctgcatgcatcgctgtgtccttgtgaacagtggatctttgttagcgcgcttc

SEQ ID NO: 25889 - DNA, 270 bp, Homo sapiens
  chr7:47515282-47515552
  hypo
cgcttgcagagtgtatgaaggtaaacacaggatggaaaaaaacaaggacactctgcccttgaacttcaatcaaaagctgtggggccaccattcggaccactgttaggccgcagcatcatgaaaagatcctgcaaacctgcaactaccaaggacagactcgcatgcgcccttgttctgaccgtggtgcctccaagtctgcaaatgcgggatcacaggaatcatctactgtgtctgtcatcggtgccctcaccctcaggaagcaggggacac

SEQ ID NO: 25890 - DNA, 185 bp, Homo sapiens
  chr7:4771516-4771701
  hypo
cgcttgctacgtgccagccgtccggtcaggactgatgttcacggcatggagacctgaggccacacggaggccgggctggccagggcggggctcagattcagtgacttgcccaggtgcccccagggcatctgagcagcccaggctccagccaggcaggtctgacttcacctcccttgccgtgagcc

SEQ ID NO: 25891 - DNA, 887 bp, Homo sapiens
  chr7:502717-503604
  hypo
cggggtcgtgggtgctctggcgggacggcccccaggcagccccgggccaggccagcccagaagggcctaggaggcagccgcgtggttaaagtgggggtgctgtttttgttgcgggatgtctgtgggtttgaacccccttgccctcatcacactggtggtgtgagccttgctcggaaagctggatttgaacgtcgtctgggtttggcgttggccctcagggcccggcgtccttccccggcgctgggacccagcctccggggagccgtgaagccctgccgtcttgtggctccaaagccggtccaccaatgacctcgtgccagcggcatcacgacgctgcctcacaccgcacaagactcgccgggaagatgcgagacccatgacagagcccagaaaggcgacggggtggcccaaggtcacacccacgccaggcccagcactctgctcttcccgctcacccactcggccgggcctgtgccctcccgcccggccaagtgggggctccaggaagggcagcgagtgccccgcggccccggccccactgcgggcggccggaacacagagggcggtgaggaaggaggcgttccctgccgggtgccctccagcaggattcgcgaacccaggggagcgagcgggaggattttccatgtgaggccggcttcctggggcgaggcccacccggcgccagcgtggagagaggagaggagcaaagcgcctcgacacattctccctcggtgatttaatggccggagcattcgtgcgatatttatgcagtaaatccttccactggggggtttcactgtgtcacgggaggctcctcccagcccgtccccatcccgtcccccccaaaaaaagaatcctgagaaaatctcatttcacagtttcccatc

SEQ ID NO: 25892 - DNA, 382 bp, Homo sapiens
  chr7:50560501-50560883
  hypo
cgagcgccggggaagagttgtccgggagagatgagcgcacagccgccaacttgctggcatcagctctgcagcgtctgcggcagcctcggggcatcagctctgcggcaggcactccacgtcccgaaaggctcaactccttctcaccaccgcactgactaagcaggttttcttcagccttaacatacgcactggttgtctggacctgagggcaggacgccgcattcattacactccttcttatcgtgtgtcaatatttgcctccaagattagggacccaaaatatttctggtccctgaccgcttcagtttcctcatctgtaaagagagcgtggcaatgtctgtgtccctcaacacagggctgtcgtgggggtccagagagctac

SEQ ID NO: 25893 - DNA, 132 bp, Homo sapiens; identical to SEQ ID NO: 8728
  chr7:56037272-56037404
  hypo

SEQ ID NO: 25894 - DNA, 189 bp, Homo sapiens
  chr7:564189-564378
  hypo
cggcgttaagaccaggccctcacggagccctcactctctgaggaggaacaataagtcagagagcgcgcgagtgcagcccttcaggcaaaggatttcaggcccaggtcaggaaggccttgtctgaggagtctgagaagaagtcaattgacaacagctagaacatctaggtcaggcactccaggccgacac

SEQ ID NO: 25895 - DNA, 422 bp, Homo sapiens
  chr7:6188625-6189047
  hypo
cgctgggaaggccacacgtgatctgttaactgactttcacgcctgcgcctccacgggggtgcagcagccatgggggaacctgcagcgagtctcactgcgtgaggagaatgtggagacgttgtggggcagtggtggggtcatggctgagtgagtggcggctgaagcagcccctactctccgcccacgtgaccgtctcctttgctccgaggcgagggtgattcctccttcctggcactctgcatcagcgagctcccaggaaacccaaccaggtagcaagtgtgtgactccatgccacaggtcctgctgatttcgatcagatctgggacagaacgagtttggtcggaggattgttttctgtgaaacatgtatgtcctgtttgttgatttattgccagaaaactagggcctgtggaaagtatgcgc

SEQ ID NO: 25896 - DNA, 405 bp, Homo sapiens; identical to SEQ ID NO: 8731
  chr7:64146495-64146900
  hypo

SEQ ID NO: 25897 - DNA, 102 bp, Homo sapiens
  chr7:64458273-64458375
  hypo
cggttgcccccccttgaacctgcccctgttcatcataatagataggtccccgtgtttcacggaggggcatctgccacactctggtgtggccaggtcgaaggc

SEQ ID NO: 25898 - DNA, 170 bp, Homo sapiens; identical to SEQ ID NO: 24650
  chr7:6524924-6525094
  hypo

SEQ ID NO: 25899 - DNA, 282 bp, Homo sapiens
  chr7:6545707-6545989
  hypo
cgagtcaccgggtgctgagccagcgcctcctggggtcaatcgagactcaagacttggaacactactcgtgcagaagccagcaaggtgggactgcagcgggggcatgaaggagctgtgaagaggctagagccaagtaaggggctaccggaggtggctcaggggtctggctctgtcatcaggtctccttggagagcggtgagttcaccagggctgccctgggcagagtgagctggtgctgagagaactgcaactgtgacagcctaggggccagacgctggacac

SEQ ID NO: 25900 - DNA, 253 bp, Homo sapiens
  chr7:7605160-7605413
  hypo
cgaggtcagactcgtgacacctgaggcagcaccattcactcagttttgggaacaaaaaacttggaatcctctttcaccgtcattcacttggtcagtcaccaagctctgttcatcccgccttctaagtattccccagggcccccacttctctccatgcccactctccgtgccactggtaacctgcgtttctatcatccctcattctgatactctatccctccagctctctgcgcaaaaactgatcatactggcc

SEQ ID NO: 25901 - DNA, 445 bp, Homo sapiens
  chr7:7605666-7606111
  binary
cgatatagccagactccgtctcaaaaaaaacaaaacaaaacaaaaaactgatcataccacttgcctgattaaaaactttcgatgactctaacattgcctttaggtaaatgccatccaaactcactaaactggtttccaacccgtttctgaaagcaccttaatctctccccacttcctctgctcattcatccatacctactgcctcctcactgctatgtcctctctcctgacccggcacttgctctttcccagtcctagaaggctcttctcttccagttcccactgcccttttccctttcctggctaatcccatactcatccttcttgtctcaacctagtggtccttaaggaagctttgctgacccccgacaccgagcgggcgtccctcctgtgtagcactgtgttagccctaccaagtcaaggctctccttgcctgtttcctgcc

SEQ ID NO: 25902 - DNA, 926 bp, Homo sapiens
  chr7:8483083-8484009
  binary
cgcaagagtaaaaccctatggggagaagcgattcctgcccctcttcccccggcgaggaacacggctggagccacccaggcgccttccaggctaaggcgcctttagcggcgcgcaggggtgagggagagggtggggagagtcctaattattatgaatttctaaaggcgcagtaattattcacggggagcaggacaaaccatggctaggcagggaaatcgatatatttgctatcgaaagttcctggctcgcctttaatgcagacgaatgggggatgcagcctcattattttccgtggttaggctcgccagcgtggggcctgatgcagcgtgaaatctatcatcattagacccgggatggagcggcgggggggagtttctctttacttaccaaaccgcaacaacaaacaaacaacgacgaacaaccgccccctacaaacactcattctcacacaacgttgccctacctccctcgccgcttgccctggccgctgttgcacactcccctgggggctgtctgcacgccctagagcagacactgcggtcacttaaagtgcgcccagttcctccaccgcagcggtcacaccgttgatttgatccagaaataagacggatagtaccgagcgttggcgctaggggttgtctatgtcaaaggcgaaggttggctgggaagttctgtccgtttctcttgccttagcataggagtcaatccttttcttgtcacccgattctgcaaattctcgctgtattaaaggagcagagatctggcatgtagtgctccattaacccgtagcataagttagctcggacataaggcaagccctcgagaagggaacgaatcagaaggtgaaaagagcggtcggaaggtgaggaagagaaggtttaggcgcaacgcctcggaggtattctctgaggccctggcgagatttc

SEQ ID NO: 25903 - DNA, 410 bp, Homo sapiens
  chr7:907671-908081
  hypo
cgtcttcacagcgcggtagaagacggcttgggggctgaggggcagtaaatccacagctggcatagaggagaagccggcgggtacgtgcccatcgttcaccatctcttctaaacacgaatgaaatgcgtgtgtcgtcctcacacactgaaggcaggctgcgtgcacggtctcctcctccgttgcgcacagcaacgtggctgcctgggcgcagcgtctgcaacttgtcagtcagtccctgtgtgtgcctggggacgctgtgctgcgaacagtgctctccggtcacatctgccctgcacctggaggtgggggtgcgatcgcaggccagaggcagatgtgtgcgcagcaggccgaccttgccaggctgtgcttctggggctgcaggctgcaccgtggccgggttaggttagaac

SEQ ID NO: 25904 - DNA, 223 bp, Homo sapiens
  chr7:920933-921156
  hypo
cggcactgtggggctctgcaaccaggcctcctcgcccccactcccaccccaccccaccccatccccggcacccgtgcatctgcgggctgcacttaggtgaggtggtgtttcctggagttttacgtatgtggaatcacagtgcgcactttctgtctaaccgcttgaattcattcaccacggaggctgggagactcctcctggagcgtccgcagttccttttatc

SEQ ID NO: 25905 - DNA, 1387 bp, Homo sapiens
  chr7:99155672-99157059
  binary
cgcaactgtcagtttcctccgtctctctcggttctattccaatctgctcatctcccctcccgtccccgctttccccaaggacctactgagatttcgatcccacaacttagtgggtcccatctcacccaggccccgcaatcctcgccttctacttgtcagcgttgtactacactctgagcaggcacccctgtgctactcacggaagcgggaccattaggtcggccattcctcctcaccccacgacacgcacccactgggtcgggccgcctccttgcagggagtctcaaggatgggctggcgtcagggaggggcccagggggcgctttcccaacactggtcgcagtcattgttggtataacggctagagacgcccagtgagttagcatggagggcagtgggaccggaaaaagacgtggaaaagctgcgaaaacgagccttcgaatcatggacgcgcgggcccagctcctcctccgagttcctcatccggggccgtcactcacatccggggccctcactcacatccgggaccctcatccggggctctcacccacatccgggaccctcatgcctgggcggaggagggggggccctcattcgggaccctgcactccgtcgccggaagtgccaccgagaagcgccggcctcggggctgtctacagcggcccgggagaggctgtggtggccccgagcgcgagtgtgtaggtgacaggacagcggccaggcccgcccctcccctcggtgagtacccggaagccgttttggggtcgcagcggggtggcagcttgttttgccttcacgggagtagaaggaggcggcgtccggccgcggccgacggtagttcgcttccccgagagtgcgcggaggcccgggtgcgaggagggcctgtttctcttcagccctggttcattcacctcgcggaccgagggccccgccgtcaggagccggcgaccgtgccctggtgcgagctggtctgtatgtcctcactggtccttttgggactttgccttggcctaaaagggaagtgggaggagggcagcgccgggcaaggccttctgaggaccgagctgggagccgggcaggggcccagggcgagggtggtgggagggggacggcaccctcatgcgtccttgggcctgaaggacgccgctcaaacctgttcgaaccgcagctcttacctgcgttgctctcaggattccgggaaaaggccggtctagctggtctgagttagcgaagggcctgaccccaaaagtggagttttattcgccaagcccgtgtagtaaatcggagtgggctgacggtgttaccaagacatttcctagggggcctgctgttttatttatttaaatgagtttatttacgtaaacgcgggcctgtcacggtggttcac

SEQ ID NO: 25906 - DNA, 448 bp, Homo sapiens; identical to SEQ ID NO: 8738
  chr8:100796506-100796954
  hypo

SEQ ID NO: 25907 - DNA, 626 bp, Homo sapiens
  chr8:101118020-101118646
  hyper
cggggataccgctaggagggcaggaggtaaagtccagaggctggcgcgtggtgcggccccgacgccgcgggctgatcctctgtccctgtggggccgccacctacccgcggtgagcctcttctcgggcatgccgtccccgctgcccgcgcctggagcccgcgcgggccgtcagggccctagcgcgcgggtccagcgcgggtcagggcctgagcgacgcggcgacggcgcgcgggctccggagctacgctggctagcgtggccggcgccgcgccggggttgctatggagcttagacaatacggccgcccagggaggccgaggccggccactcaggtgcctttcggggttcccaagctgcgacgggaacacccccgccgccccctaccctcccttcctcctcctctgggcagggaccagcgcggcgaacgaaggctgggggcggacgcgcgtgtggacccccagcgcggtcacccggaaggggcgccctggagacgcctgtgtccctcgagactccactggcagcgaattcgttactgtggtgaccgctgctcaggtccgttattcctccactacagcccgccagcaacggccagggaaacgcggtgctccacgggagggagaggccgc

SEQ ID NO: 25908 - DNA, 823 bp, Homo sapiens
  chr8:114444394-114445217
  hyper
cggaaagtacggtgctgcaaaaggacatttcagagcgctttcaacaagctaactgtccagtgaagttcagctccgaattctggtaaccgttcaagccctgtcagtccggtaaattgggttaacttagcaactcggtggtgcaaagcctccccaaagacaagaccgcattcagggagaagagaaccagcctcatgcctgagccgatctttcttcctttggttgtcctccttcattattattctgcaatgcgcagcaatccctgtgcgtgcccctgtgtcagccccttagctggtcactccagcggggctgggagaagaccactttggctactcagatggcactatgctgtttaatttcttctgctctctccctcagagtctaactaagcccttgcagcacttgagccgggggctgccctcctgctggcctttccgtcgtcgttgaacggatctgggggacggggacgttgcagaggagccacaatccccactcgttgtttccccaatgtgctttccgaactccccgagtgcgtcttagataagttatttgagtgaggacagcgctgcggtccgcctggagaaagggagcttcctccgcacttctacttcatcgtgacagcagtggtcgcagcgccactggccatctggagtcctgggaacattaaagcgctgttacccgccaggcgtttccgcctaggacacactcacacccaccctcggagactcctaaaggtttctccgtgtcaattcatgtgtcctcctcccagcagcacacacgcacacacgcacatcaacagccaagtcagccacccagtttcaacttc

SEQ ID NO: 25909 - DNA, 142 bp, Homo sapiens; identical to SEQ ID NO: 8740
  chr8:117336931-117337073
  hypo

SEQ ID NO: 25910 - DNA, 221 bp, Homo sapiens; identical to SEQ ID NO: 7561
  chr8:118531602-118531823
  hypo

SEQ ID NO: 25911 - DNA, 638 bp, Homo sapiens; identical to SEQ ID NO: 23377
  chr8:124172800-124173438
  hyper

SEQ ID NO: 25912 - DNA, 146 bp, Homo sapiens
  chr8:125580656-125580802
  hypo
cggccacgttcttcaatcaaagccttccggacagcctgcttttctgtttcttccaataagagatacttatcattgacatcttggagagcactgtccaactgaggctggatatcacctctccctgcaaaaaacagagacccaagcac

SEQ ID NO: 25913 - DNA, 62 bp, Homo sapiens
  chr8:128745557-128745619
  hypo
cgatgactcgcacttgtattcccagcagtttcagaggcaaaggccgaaggatcgctttaacc

SEQ ID NO: 25914 - DNA, 997 bp, Homo sapiens; identical to SEQ ID NO: 24662
  chr8:128871653-128872650
  hypo

SEQ ID NO: 25915 - DNA, 617 bp, Homo sapiens
  chr8:128888848-128889465
  hypo
cgtacactcttcccatctcctggcccctccagttctgaagggatggggactaagtgggatctgtcctctaagcaggcggaggagggaaccatgtcagctcctaggtgcccccagagcacctgctgccagttttccacaactcctgtcctccgtggcgcttgggtgacagcagagcagagccgatgtgcctgctcctggtcatgggctgttcgtgctgtcatcgctttcatttgccccatccccccaatttggacttacccagaatccttgggcaagctagatggctgccaaagtttacttagcgagatgtgcctgcgtgacttgagtagagacctgcttctgagaaagtcagaagtgcattccaaagtcaggagcgtgacctccccggaagcccagctaatccaggttttaaagaggagttggaacaaaggtggtgcttatgggatgtatggagctgtgggatgtgggagaggacaggtttagcagagtggcgtggtggaaagtttcctctcgccgaggaggacaactccccagcgcctgagacagcgggagctcagagcgcctagaatgtgcccagattctaaagtgaagcaggctgtggtgtgatgatggccccc

SEQ ID NO: 25916 - DNA, 107 bp, Homo sapiens; identical to SEQ ID NO: 8747
  chr8:128957492-128957599
  hypo

SEQ ID NO: 25917 - DNA, 199 bp, Homo sapiens; identical to SEQ ID NO: 8748
  chr8:140770366-140770565
  hypo

SEQ ID NO: 25918 - DNA, 455 bp, Homo sapiens
  chr8:141599879-141600334
  hypo
cgagatccgtgccatcagcacgagccgcagaacaggacggagtgatggctcagtgagtacagaccagagagtagatgctatcaagctgtactctcctgctaaaatcaggacacgagggtgacaactcacctgttgtctacacaagcaagcctcccttatggccacccaagttgacgctaaacacagtcatggcagcttttttggtgaaatggacagagacggtctcagaatgtgtgctgggaatgcagtcggaacatctgctcctgtcagccggagtgcagacaactgtatgctgtctcccatgccaggcccgggccaccaatgagcccacggtgagccgaagtcaaagcctcacccagcccacgttcacagagacgcgtctggcccaggcgtcacagctgtgcagggatggctggagctgggtccccagctgatgcgttctaccccctcccccc

SEQ ID NO: 25919 - DNA, 965 bp, Homo sapiens; identical to SEQ ID NO: 24666
  chr8:142367176-142368141
  hypo

SEQ ID NO: 25920 - DNA, 804 bp, Homo sapiens
  chr8:142427489-142428293
  binary
cgggcggtggggctggtgggctgggcagggggtctgaactggagggactcgggcgccctcctcctcagggtgcaggacagcacctgcacggcggggccgcatttccatttccaaagctgggcgcgctctgtccaggcctccccaccaggagcgcggcccggcggctcctgccctccggacccccagcccacaggcccgtgcagccccatgagggggccagggggagctccgaggttctagggagggcgcgcaccgggagagggcgccgggccggccggcgggaggaaggaggggtcccgggcggcagcgcccccggccctcgccgcgccccgcacttccctttcctggctgggcttcctcttccccgcgcccgccctgcgcggcccctttgtttcccgggcagggcgcggctatatttaggcggcaggtgtgggagcccccggcagccgggtcgcccgccggtcacgccccccacgtgacgcccgggcgctataaatagccgcaggcggcggtggcggcagcgcctggagccggctccgcggcggaggggcggcgccccgacccagggccagcaccgtgggcaccgccaggccggcgcgtatggaggcggtgggacgcctgcggcgcgggtgagcctggcaggtggggacgcggcggacccaggccttccgggaccccagccccgccggggaggaggtggcgccctccggagggctgggcgggagccccgctggcacccagggagggggccgcgccccttaccacgaccccacccgcgactggttccccgggactccccagagc

SEQ ID NO: 25921 - DNA, 387 bp, Homo sapiens; identical to SEQ ID NO: 24669
  chr8:143333267-143333654
  hypo

SEQ ID NO: 25922 - DNA, 181 bp, Homo sapiens
  chr8:143334502-143334683
  hypo
cgggtgagagtgcggaggtggacaggctggcgacagcccaggctggcactacgggtacgggaggagggccggtagccgtggagtcacagcagtggtgacggcggtgcctgcagaagcagggccgctgggccacctcccgagcacaagcaacaagcgaggcacaggccagcgtgcgtgccgc

SEQ ID NO: 25923 - DNA, 218 bp, Homo sapiens
  chr8:143993982-143994200
  hypo
cgccgcccgaggcactggcgcatgccaaagccaaagggcacgtggtggaagttcctgccggagcccctgatgtctagccagcgctggggattataccgctcaggcctcgggaacaaggcggcattgcgacccagcgagtagaggaaaacctgtaccaatgtctgcggacggtgcagagcagggatcagggaatgactggggagggaggttctcagctc

SEQ ID NO: 25924 - DNA, 321 bp, Homo sapiens; identical to SEQ ID NO: 8757
  chr8:144178383-144178704
  hypo

SEQ ID NO: 25925 - DNA, 349 bp, Homo sapiens; identical to SEQ ID NO: 24675
  chr8:144668627-144668976
  hypo

SEQ ID NO: 25926 - DNA, 218 bp, Homo sapiens
  chr8:144675988-144676206
  hypo
cgtccgagcccacctcctcatttccccgcttcccgcattcccaagcatgggaggacctgccggacgcagcgcaccatctctcctaacagagaccaagtctgagcttcaaagcttgcgcagacgacaggcacgtgcaagcctctcctctccagcaggagagcccggagcaggacacagcgactctttcaactgcgtcccgacaaacggtcagccccttc

SEQ ID NO: 25927 - DNA, 204 bp, Homo sapiens
  chr8:144683693-144683897
  hypo
cggccgcggtgccagtgagggctgcatagccaggccttgtctgtagtctgggcggcccgtggcgctgcccttcagcccaactactcattgccgctgcgtctttggcgaggctttcatttccaacctttcttcccatctcagcccttttgttggcccgggtcccaggaggctggtgtcggtgagggcaggcccgctcctctcatc

SEQ ID NO: 25928 - DNA, 945 bp, Homo sapiens; identical to SEQ ID NO: 24676
  chr8:145697806-145698751
  binary

SEQ ID NO: 25929 - DNA, 106 bp, Homo sapiens
  chr8:21842185-21842291
  hypo
cggggctggtccagcagcagttggaccagctgtccaccattgggcgttgtgaatatgagaagacgtgtgcactcctcgtgcagttgtttgaccagtcggcccagtc

SEQ ID NO: 25930 - DNA, 794 bp, Homo sapiens
  chr8:23020923-23021717
  binary
cgttatgaacgaacgaacgaacgaacgaacgaaagaggcaaccgctctgtggcttcctgaggttcactccggggtttccatcttgactccctccctccgctgattctggaacttcctctggggcagctcagtgcggtcctcgccgcacgggacagccagggggagcgcgcgctctgctccctcgcggcccggtcgctcctgcccagcccgggcaccccactcttcccctgactccgacggcgggttcgtcctgcccagacatgcccggccgcaggcgacccgggccaagcatccccaccgtgtccccctctctccctgcccactcccggcgccaggtgcgctcttccccagccagggaccgcggcggagactcaccggcagcagaaccgcgacgatgaagacgacgaacttaaggatcttggggtccaggagccatggtctggttcccgacgctgtcctggctcctggatagcgccctgctcgagcgctcgaggcggtcgggacgctttgtccccaaagtcccatgagaagggaggagggtggatcgaaagcgccaaaaatcaatcagaaatcgtccccgtagtttgtgcgcgtgcaaaggttctcgcagctacactgccagaatagaacgtgctcctccgcttttataccccggaaaaaaggcgtggtcagttgtactcccttcccgcagtcacttccaggcactcaggctgggtctcccccagcacctccaggagggcccaggttgtgtgggtgggtgcatggacggacaggaactggctctttccggcagc

SEQ ID NO: 25931 - DNA, 943 bp, Homo sapiens
  chr8:37655257-37656200
  binary
cgggggacaggcgcaccccagagaaaggcaccgcaggcgcccactcacctgcacaggtgaagtggagagcacgcctgcagggcacccacgccccggatttccagcctggactagggttgcggactttggggacctgagaagggtgagagcggggaatgctcaggaaagatcgacgctcgtggcccaggagggggctgtggtcctaaccactacggtcgcgtcccggactgggctggaggagtctccggatttacctggctggccttgtcccttcaattggggtcatcccatccttgccccctggcctgccagcgccgcttccagccggtctccttagggcaaggggaggctgggctcagaaaagtcggcccttggaataccggcgctcctgggctgcaggagaccctggcgtccccatccctctagaggcccctctcccacggcgccgtttgtgcagtgagctctgtgctgggtcccgcgtccttgcctctcctttgcctctcctggaagtaactcgagctttggctgtttctccattgacttcgcgcaaagattgcgaagaaagaaacgcggctggggaagcggggttccctcaccgcagcccacccgggcctccttccgcgacttccctcttagtcagggcctcagtacgcctttgctttgctggcagcgagcgctgcagcgccgcagcccgaccccaagcctcctacaagggggtcgcaagtcccagcagccgcgcgagcattggcgacccctccccaccgcagagatttcctgcgccgaccacgtgctcgcagctccacgcacgccgtggatttgagggtcgggcccccgcggccgccgcttcctttcctgtcccaaatccagcctaagagccgcttccctttccctgtcctcctgaccccagtggcaaccgtttctccaccgccccttgcccgcagtc

SEQ ID NO: 25932 - DNA, 406 bp, Homo sapiens
  chr8:38008224-38008630
  hyper
cgctgagagctggccaacccctcatcgcctccttcccgcagcgctcacccttcatgttgcgcatgtgtctgtaggagctcccagcgcacagcttgaatgtcgctagcagcattgtttcctggcaaatgtggcagtggtggggtcgctgccgctgctgctgccgccgctgctgctgcctcttctctcaagggtggttcttcgtccttcctgagcccctcaagcttcgcctctgagtcccgcagctgcagcctggacctggtgttctgcgtcttaaatgtcccccgctgaaggctgtgcatcatcatcaggagataaaaacgccatcactcactgtgcaaaggaaggggtcaaggatagagcgattgcctcacactgctgctttggccgtttgtggggagcttggggc

SEQ ID NO: 25933 - DNA, 824 bp, Homo sapiens; identical to SEQ ID NO: 23382
  chr8:38323132-38323956
  hyper

SEQ ID NO: 25934 - DNA, 65 bp, Homo sapiens; identical to SEQ ID NO: 8763
  chr8:42134216-42134281
  hypo

SEQ ID NO: 25935 - DNA, 132 bp, Homo sapiens
  chr8:42147407-42147539
  hypo
cgatgaggacttgggatgtggcacgcacaaaaaactgaagttacacgcagttgtgccctcagggtctgagttctggtgctgtgagtggggctgggtgagcgccactgacccaggcattgcggttggccaccc

SEQ ID NO: 25936 - DNA, 360 bp, Homo sapiens
  chr8:49334914-49335274
  hypo
cggagtctgctctgagacccagggaccgtgcgttctgcagggaagctggcgcatgcccttaggttctgcagctgtgtgggctgcgctgccttcgggggcacgtgacgccacgtgggaagtgctgtgaggctggtgcggagagcaaacctcctgcaactcttagcgagtaaatgggcacatccacactggagttgaacacaggggcgccggccacgggttcaggctagcccgggcgtctggcttccctgccaggatggctgcctcgttactgagatggaacacacaacacagccgcgtgggcagtgggaggctgcgaggttagcctggcaaagctgtgtccaaggaggcaaagattggtcc

SEQ ID NO: 25937 - DNA, 120 bp, Homo sapiens; identical to SEQ ID NO: 8765
  chr8:54645734-54645854
  hypo

SEQ ID NO: 25938 - DNA, 971 bp, Homo sapiens; identical to SEQ ID NO: 23384
  chr8:55370128-55371099
  hyper

SEQ ID NO: 25939 - DNA, 1448 bp, Homo sapiens
  chr8:55371121-55372569
  binary
cggccacgtcctttcttaaggctctgggttcccttcccgcttcccgccctccgaccctccaaagcagctttccgccttgctctccggctcccggattccccaggtggccgggggcgcgggtccaacggctctgggaaggcgacttcccggcacctccgggcggcgcgagagcacccttggccctgaactgggccggttgtgtccatccctcgaccccttccctagttaggtgtccttttctgtttttcgaacgaccgggtgatgggtgagcggaaagccgcttccaggagaccaaaagaaaggggtgcctttagaggacgggtgttccccaagggctcggactcaggagtcccagatctccctctttaacttcaccccggttgcgcaattcaaagtctgaggggggaggtgcgtccaggtggggccaggtggggcctggagcgggagcgcagccgataagccctgcgcccctctcccccttccttccactgtgcaggcaagtcgtggaaggcgctgacgctggcggagaagcggcccttcgtggaggaggcagagcggctgcgcgtgcagcacatgcaggaccaccccaactacaagtaccggccgcggcggcgcaagcaggtgaagcggctgaagcgggtggagggcggcttcctgcacggcctggctgagccgcaggcggccgcgctgggccccgagggcggccgcgtggccatggacggcctgggcctccagttccccgagcagggcttccccgccggcccgccgctgctgcctccgcacatgggcggccactaccgcgactgccagagtctgggcgcgcctccgctcgacggctacccgttgcccacgcccgacacgtccccgctggacggcgtggaccccgacccggctttcttcgccgccccgatgcccggggactgcccggcggccggcacctacagctacgcgcaggtctcggactacgctggccccccggagcctcccgccggtcccatgcacccccgactcggcccagagcccgcgggtccctcgattccgggcctcctggcgccacccagcgcccttcacgtgtactacggcgcgatgggctcgcccggggcgggcggcgggcgcggcttccagatgcagccgcaacaccagcaccagcaccagcaccagcaccaccccccgggccccggacagccgtcgccccctccggaggcactgccctgccgggacggcacggaccccagtcagcccgccgagctcctcggggaggtggaccgcacggaatttgaacagtatctgcacttcgtgtgcaagcctgagatgggcctcccctaccaggggcatgactccggtgtgaatctccccgacagccacggggccatttcctcggtggtgtccgacgccagctccgcggtatattactgcaactatcctgacgtgtgacaggtccctgatcc

SEQ ID NO: 25940 - DNA, 1389 bp, Homo sapiens
  chr8:56791852-56793241
  binary
cggagaacttgccgggccatttgactctacgtcatcccctcccccatcaatgccctgaacagcctcctgtacacccttaaggaacttactttgtaatgattattaagaactcagcgagaccccgagcatcacctcggcatatcgcatcctttctctagagaacccctaatgttggaagggatcagagcgcacctcctccgctcctgggagcacccccttcctaataataccttggggatgggtcggaaggaaaggaaaggagacgcgagaggtgtagtcgatgtgcctgcgaagcccaggctcctctggagatccttccgtccgtccctacaggagaaggctggcccgggctgctccactccccggagctgcagactgagtcgccaggtttctgtgccttcaaagccctgcgcgacggccacaccaaacacccaaaccttgggcagggaccaaacggtcacttccccgccctccgggctcaatatgcaaatccgagcaccaggaagtagctgggacctctcggccgagcccagagacagccagttcctctcccgccgcgccgggccgcgctgccgctcgctccccggccgtggcgcctccgggccagacgcgctgcagcctccagcccgcggcaagcggggcggccgcgccacccccggccccgcgccagcagcccctcgccgcgcgtccagcgttcccggccagcagcctccccatacgcaggtcctgctgggccgccccgtcgcgccccccactctgaactcaagtcaccgtggagctccgccgccccgaaactttcaccgcgagcgggtgagtcctctgcgcgagcccaggggtgggcgcgggcacgcgggcagtgggtgcaggggccgcggctgtgccaccagccggagtcccgggcgcagggtagactcggggccgggggcatcggcgcggcccgcggcggcttcctggccgcaccgcctctgggctccggcggcgaaggctcttagatgtcttcagccgacgggtgaccgggcccgggggagccagggcgcggggactgaggctccgcaggtgtccgccgcggagccgcgcaggggagcggtgggaggtgcgggcgcgggggcgggctcaccgcgtgtccttcccggtgagggcccgagggccggctgctgtccctgctccggccgcttctcgcacacagtggggaagccgctgcccttgcggagcgggcgcgcggcggggatactggagaggactcctcggattgtgcaatctgatctcccctctggaccctgggtctcctggcagtgggagatggggctcggccggcgccctctcgaggcccgcggacagttgccctccctggtggccccgggcaggagcgtgacgtcgaggggctgcagc

SEQ ID NO: 25941 - DNA, 674 bp, Homo sapiens
  chr8:57069543-57070217
  hyper
cgaaaagtagaaaaacctatgtggacgcatcaacagatgctgaaaaggcatttcctagaagtcggcagccaaacttggtaattcttgcgtgtgataaaggcagccgtctgttctgctcagaaggggtttcctaacaggaggggccgaatgcaggcgtcacatccacgccgccccaggtcgtacacctaggccgtccgggctgtcccagagccgcaggccccgcatcatccgcgtccttagcgcggggcgcggagcccgcagccaggtgcggccgagacccgcgcgccagggaaagcggcgcagcggacgcgggagaaggctggtgggtacaggttgcctccgggccggagcgcccatgcagggcgagctgcgctccgcacaaaattgcggtgggggcgccagaccgccttgctccgcccctgagcggggcgccccggcccaaccccctgagggaggagggtccaggtgccgcagactcttagcccctggcccggcgtccgcccggcaggttctggcactcctcgttggtaagccccgttatttcgtgcgcagtgtttacagaatataaagttcttcaggaaacgatgttataggagaaacgcctggattttccccaaactatcagagagtatcttaactatcaaaaaaaaaaaaaattcatttcagttaacgtc

SEQ ID NO: 25942 - DNA, 252 bp, Homo sapiens
  chr8:58105914-58106166
  hypo
cgctttgggcgcttgtccaggaggaagaagggggtggtgcagtcaagcgggccctggggcaggcctggcccagcgctccgttcttgggagccctgccagcccacaggcccatctgcggcaggcacgtggtgccgcgagaacttggctcagggacggtttttccgccatgcgcagattctcgcctctcgcgggggcgccagggggcagctggttgaggtgcgcatgcgcactggcacctaacggctcttcttc

SEQ ID NO: 25943 - DNA, 2678 bp, Homo sapiens
  chr8:60030067-60032745
  binary
cgaggagcttctccacggggaagtgtgtgtgtgagagcctgcctgtgtgtcaacactgtccaagactcggagctgcgactcggtcgcgtggtgcggagtccagggctgagaaggcagcgcactaaatatctctgtatcaggtaaaaaagccgtttggtgatgactcgccaccaggcaaatgttgggagtcccaacgatttttcccgtggaatgcaccgagggtcgccatggatgtgcctgcaggggctgtgagtatcaggcagatttatcaccaagcgagagttgggcgtctaaaaggcccgcccagcgttttagagaactcaattctctctgccaacgttcatccaacgggactgcttagacacgtccaactagccctaggcgtgggcagtcgtgcccctgcgaccactctgggggaccggtccctgcgtgtcctccctctctgggatgagagagttcgagaagccgggagagtaaccccctccctcgtaccccctgactgtcctataggtggacccagccgaactccgcagcagcccaggccagcgccccacctccgggtcaccggcatgatccgcctctccccgggcccccgcggccctggcacccgaggtcagcgggccgtgggtacagctcagccgcggaccctgctccgcgagtgcgggagctttggacttgaacgcgacgtgctcgcccggctcccaacaaacttgcaatttccgcgcgcaccccttaaacaggaactgttccccaaaccttgacccagctaccccgctgtgctctggcccgcggacctgtgtccgaacccgggctcggctgccggaaccggtttgagaaaacaaaagagttgtggggcagttttccctgtggggggcaggggcgcctcccaggtccctgcaccccgactcccggctgctcccctggcaactaatccggagaagggaagtggtgccacgagcccccactgcccggggagggagggagagagaagggggaactgggaaataaactgaattctcttactctgcctccgttcctggaccccagacacacccccaaagtattccacggttttctcttattatttttttaaacgccccccggcaaacctaggcagggatccttagccgcgaacagcaggaaggaaagaatccgagcaaatcgtgtcactttccgcacaatcgcggtgtttggcaagcccccggagctactccacaatatttactacccaagcgcacgcaggctgcagcgggctgcgagccgagcgcgcccgggaccggcctccgccaagccggccccgccgcggcccggccaccgccgctcccctcccaggatcaagcagcaagaacacggtggaaacaaaagcagagcgttcaccttgttgcaatagtaggggtccaggcagggagaaggtcccagacagggagcgtcgggcgcagcggcgggctgggctggaggtggataaaatcttacgtccatttcactctcacatcaagcaactccttttctttttccttttttaaaaaaaagtgttcagcaaaacaagcttagacggaacagagtgaggtgtctgggctcaggagtaaaagaaacaccttccttccctcacatccgtttgtggtttgtttaagaagaagaggaaaaaaaaaaaaaagaggggggaaaagcgctcaactctcccccaagccgcggcgcgcacccgtcggcgccgagcgcgcagcctgctccaccgccgcctcttggtcccgccgccgccgctgccgccgccgccgggcaggtaacttcatgcgctcattgtcccccccgcccgcccccccatccccgcctcccgcgcccctcgcagcccggcacacgcgctcgggctctaggtactgggcgttttattggagattctgagttgttctgcttgtagtttattttctccaccttggaggcccgggatgtggggggtgggggggtggggcggggatccagaagggacagggcgggaggggggcgagcgtcccgggccgggcggggtagggagcgcggccggacgcgggctcgtcaaggcccaatggctgctgttcggaaccagaggccggggaccggagaaaggaggagcggagaaggagaaggaggagagcacggcctggctgggacagaagcggtgggaccctgggaggcctccgctgtgcccgtgccgcgctcctcgggaccagcgcgtcgcacacaaaggggctgccgagccagagccaccagcggcctcagggcaccgtggggagcgcgcagctagggggcgctgtggcgcaccccgccccgcagccccgcccccggccctccccggccccaccccactcccaccgccctctccgcggccgtccccacccctatctccgcgacccccactcctcctcggctgttccccaaccctgtcactgtgctcccctccctactcccggcccgtagtggaggtgactttcctgcgcagcgccgcttctgagggcggagaacccacagggagtgcgacccctttgcacgctgtgagtgggcaactgtccgagggactcgagccgatcgaagggtgaggaccagctcgcctgggggtggacggcctggaaaagccgcccctctttggcttccctctgccgcctgcagcccgcacccctccgagattcgtgccccactggacggtttgc

SEQ ID NO: 25944 - DNA, 95 bp, Homo sapiens; identical to SEQ ID NO: 8772
  chr8:6633002-6633097
  hypo

SEQ ID NO: 25945 - DNA, 913 bp, Homo sapiens; identical to SEQ ID NO: 24696
  chr8:67874755-67875668
  binary

SEQ ID NO: 25946 - DNA, 850 bp, Homo sapiens
  chr8:70984130-70984980
  hyper
cgaccgaggatgggcctcccgcgccgccgcagctgtcacttccttcgggaaaggctagcgaccttggacgcgcaggctctgaaaaccaaggtccagacccataccgagcgcccaaagaccgcatttgaattctcctcgccggccattgagggagagaaaggaacgcttagttccattcacattcacagaaagaagcgccgagggtgggggaaacgcagtcttgccgggtgagccgggacaggttcctcgcctgccccccggccgctgcttcctcttagctgaatggggagcgacccgccccgggcgcggccttcggggctgaagactgaggtgcagcctcacccccggcctggcagcggcttggaagagagagggaaaggaggaacatctacccggctaagagacgccgccagagtccctaaagctggcgggggacggaggccggggtcccggatcttcagagcgcccgcagccgggcttctgggctcctcggtgcggggaacctgaccctgtagccttcgccagggcgcggcggggctgcaagaagggaggaaggagtgggactagagccttcgagggcgcgggcggcgtgcactcagccttgtctccccgcgcgccctgccgcctgcttgccccctttgctgcaccgggtggccctggtccccgcgcccgcccgcccccgacgccttcgcgtggttccgcgctgcccgcggccagccccgtttcgcttcgcaaggagcgtgttgttttctcaatcgaaatgggatcaagatcccagggtttcctcgtctccttgttttgaggtgataggatcttagccaatagatcgaaaacgtgaaaagtacccgtc

SEQ ID NO: 25947 - DNA, 1631 bp, Homo sapiens; identical to SEQ ID NO: 22967
  chr8:72755373-72757004
  binary

SEQ ID NO: 25948 - DNA, 730 bp, Homo sapiens
  chr8:79428304-79429034
  hyper
cggggtgacgggggagcgctcggaggaaggacgctatgcagagaaagcccccctggctcttctctctcaatccataatccagcgatgctgcagctgtaaaagcattaatagaaaatcaatccacaacctcgcggggcagcgatcgtcgagcgccgtttccaggctgccttccctggggtcgggagcggccccgctccccccgtggctggcgcggaatgtggtgatccgtcccggggcggggatgacttcatgcagccggagctccgcggcgggagcggaggctgctgctggcaggtggggcgcgggccggcgcgagctgaccgagcactcggcgggcgcggcgggactgcggcccgtggcggcgtgcgcggggacctgcgctgactaggtccggggaaggtaagcagcccggcaccggtgcgccctggccgcactgcgtggagctttccgcttggttaataatggggtttgcagcacggagggaagaaggggagaaccccgctgcattctgcaatgagaaaaggagcaacaactaggatggaaatgttgggcggccaagtgcagaggttggaggagcagtgttactgggcaaacaaagaaggcgttcttgcctctatactcttttgaacgtgatctaccatttcagtgccagattcgcgtagacagtgaagaggactcaaaatttaaaataatttgagttactcttttgctttctgtgccttttaccttc

SEQ ID NO: 25949 - DNA, 506 bp, Homo sapiens
  chr8:81213177-81213683
  hypo
cgatgatgtgcagatctggcacttgcttgcaggattacactgcagtgaaggagaagtatgccaagtacctgcctcacagtgcagagcggtatgccgccaaacgcttccgcaaagctcagtgccccatcgtggagtgcctcacttactccatgatgacgcacggccgcaacaaccgcaagaagctcatgatcatgcgcatcgtcaagcacgccttcgagatcatccagctgctcacaggcgacaaccctctgcaggtcctggtgaacgccatcatcaacagtggtccccgggaggactccacactcactgggcgagccaggatcgtgagacgacaggctgtggccgtgtccccattaagccgtgtgaatcaggccatctggccgcagtgcacaggagctcttgaggctgccttccggaacatcaagaccattgctgagttcctggcagatgagctcatcagtgctgtcaagggctcctccaactcctatgctagcaagaagaaggac

SEQ ID NO: 25950 - DNA, 369 bp, Homo sapiens; identical to SEQ ID NO: 23388
  chr8:81478144-81478513
  hyper

SEQ ID NO: 25951 - DNA, 1369 bp, Homo sapiens
  chr8:82192428-82193797
  binary
cggcggtggatatgttgtcaaacggaggggtgcaggagaggcggggccaggcctccaggtgacccctctggcttcctgggcctgcagaggcgccgaaacgtgcaggcgccggcgtccatgaggcgtggggcgcgccgggcgagtccctgcttgcaggaggcgcccgagaggccgtcgcgtaccctggcaagaggagctggttagcacctcccgaccccgagaaggcccagggggcgcccggcgggcggggcggggaccgggcgaggcccgcctcccattggccgcatagcgccgcccagcgcgggccgccgttataaagcagccgccggcgccgggtgcctcacagcacgctgccacgccgacgcagacccctctctgcacgccagcccgcccgcacccaccatggccacagttcagcagctggaaggaagatggcgcctggtggacagcaaaggctttgatgaatacatgaaggagctaggtgaggcacccggcctggcagcgcctgcaacgtggcgtgttgtgcggtcgtctgtccctaggtccccgtcagcgtgccagattctggggcaggagatgctcggcggcctacccccatcccctcccatcttccccaccacgcggccgttgggtgcagcgcgcgcagcaccacgcgggcaggcggcgaggagcagggagcgtgcgcgcctcttgcccgcccgcgggccgcaagattccggaggtggtccaccccgtggtccacctacctctgcttctttcccttcgcccaaacggcagcccttccgcattgcttcctgtcctttagcgcgcgcacccgtcacctcacgctgcacttctttcgaccccctccaggcgaccctgtatttcccttttttccccctttactcatccttccccttcctgccaccattctgtctctcccatttaccccatcgtggcagcacccactcccctttccctccctgtcgcatcttttgttccctgtggcgcgcaggtcaccctccgttttcttcatggggacgcggtgctggcgcgcagtttcccgcagaaatcctgtggaggggtctgagtggcgctacagcttcagcttgcattcctctgtcagccccgtctcccccaggtcctctgctcgcccttaccagttgagccgaaccctttggattggtaccccatggaacaccagggcccccgagaagcgtggcgctggcggtgccgacctgctgctggcactgccgggccggggcgccgcagtgggcgggtggcctgtgggaggagcgcaatgaggcctgggggtggccgtgtgttgccatcctggcctctgccacttgagggtgaggaggaaggaggcagtgggctttgctggaaaacc

SEQ ID NO: 25952 - DNA, 101 bp, Homo sapiens; identical to SEQ ID NO: 8778
  chr8:8898512-8898613
  hypo

SEQ ID NO: 25953 - DNA, 124 bp, Homo sapiens; identical to SEQ ID NO: 24705
  chr8:90913515-90913639
  hypo

SEQ ID NO: 25954 - DNA, 140 bp, Homo sapiens; identical to SEQ ID NO: 8779
  chr8:91014317-91014457
  hyper

SEQ ID NO: 25955 - DNA, 518 bp, Homo sapiens
  chr8:91657148-91657666
  binary
cgaggctccgcgttaggtatgttttatgtgtaggacagacttcccaggctgcgatggaaagtaatcgtaactcctgccgtcaatgtcacttctctgctggtatttatctgatagagcgccctcctagggccgccacaagaccgctcaaaaacagacttggagagggataggccagcgggaccccacttaccgaaaacactgcattctgaagcccaaaaggtatgggtgtcagtctggccagcgccaccactttcaggccgcttcctccctccactacgcgaataaccgcgctcagcttctcgctgctctggatcctggcggccacccaggcggtgaggagccgcttgcagaccacatgggcgatgaaggtgccgatgaggacgcccaccatcatcagacccatgcccagcacgaagccgtacaggtagccagcggccacgttgagcacgatgtagccccagccgcaggggaaagagaccacgatgaagcccacgacgaagagcaggacccccagcagc

SEQ ID NO: 25956 - DNA, 1072 bp, Homo sapiens
  chr8:91996920-91997992
  binary
cgtagctttgactaaaacaccagcaatgaaaaccttgtgccaccgggtggagggggcaaatcgtcttgaaagcctcccaccgcctggcaccaggtgctggggcagagccaaggggagctgtgtacttagctccttttttggcgatggctttggtctcggccacttgcccctccgtcgggctcccctggccccctacactttctttcccctcatccgacgctctcgctcccatcccactcccattcagggtccacagggtactgaaggggccctgagagatttcccgacccacctcagagcttctcttcctcgcctcaactttcccggggtcgggcctgggagacggcgcccacccgcctcctccacaccacggggcccgacttccgtcccccagtgtcgctcatcctccctagccacttaccgactcaaaatccacggggatttcggggcagcagcgtcgccgcgctcagcccacacgcggaggccgagcgccctgctgcccgtcggggaacggctcctgccgctggtccgctggctgaccgcggtggcggcggcggggggcgaggggcggggggcgaggggcggggggcggggcgggaggcggctccgaggggcacgaggcgggcccagggcgggcgcggggcgtggcctcgggcgctgagcctcgagagcagccgcacccctgccggggtagaaccgttaaaagggtggcgcgcgctttcccgggcgagctgggcgcgtggggttggagcggcgccacccagagccggtcgtctagggtaggaggccgcgagtgaggcgctgacaggctagccctcgacggggcgcgcccgcgtgaacggccttgggggccccagaccgtggccctgcttgtgcgaagactgggaggcgccaggcgggccgcctgctgggggcttggcggcgggttccaggcagcgtctgtgagggaggccgcctctgtgagggaggccgccgtcgtgctgacgactgagtccaccctactcctgtcccccgtcagagctgctggcaggcgctgctttccccttggtgcatttagtgggtgtcgggattc

SEQ ID NO: 25957 - DNA, 39 bp, Homo sapiens; identical to SEQ ID NO: 8783
  chr8:95556587-95556626
  hypo

SEQ ID NO: 25958 - DNA, 735 bp, Homo sapiens
  chr8:99076604-99077339
  hyper
cgtctcccctcctgtctcctgggctctactcctccctgccctcctctgcgtcctggccctcccgctctcttccgctttgcgctcccaggctccttccacctcctgccagctcccttcctcctccaggtgcgcaccccctaccattagccccgctgcgcgcttgcgctctacgcccaagggagccgggctgcagagctggagaaacttccgcggctacgggtgcagttgccttcggttcccggttccgggccgacacccgcgcagggctgagacaggtgtctgcgctccccgcaatgggctgctccagcagcgccctcaacaaggccggcgacagcagcaggttccccagcggtgagcagggtaccggcgccgcccgcgcccgggctggggactcgggtgggctaactccccaggaggtccaaagggtgtgtcccgtggccaccccgcctggcaggagccgggccttgtcccggaggatgcgagcagaacccgggacaaagcgcgatttccttccaaatctggagcggcgctgctgtgaccgcgggtgcggcggccctggtgcgctccgcggcgctcgctgcgagacgcgcggggcccgaggccgggcgctggattcaccctgtccgctgatgggatctcggggagttggtgttgaggccctaaggcggttagcctcggcattgccttaaacacaggagaaatgtcctatcaaggccttctaccaaggctgggggc

SEQ ID NO: 25959 - DNA, 1384 bp, Homo sapiens
  chr8:99951812-99953196
  hyper
cgggagggtagcgctgctcagctccagccaactcactgccgcgtaggaacggaggtcatcggaaatcaagatttccgtttgaattttcccaaagtttaagcgttggcaagtgcgttgaaaaacacacacaatatgaaagcctaataaaaatataggtttgcagaccgtgccctagtcttttccgaggatgttcttttctgtcatccatcgtctacccacgttgagcacgacagccgggccagtcccgccctgggcggttggggccttcccagaggggcccggtgcggagagcccccctctccccggatgtgtctggggcctgtccttcactgcgatgtcatcggtaaacctggtcttccttgtcacggacactgaagcgcttggttcgaaaagcaccatgaattcgaagcagccttggacgcgggatcatgggcgttagcctggctctctccgacgaggcaaactgcaggagatccccttccctggagtcaccggaaggcgaaagcacgctctgtgcccgcgcgccgccccgggagcccgctcctaccccctcggcgtgcggcgcgggcctggagaccgcggagcccgagccgtatccagcttgtgcaggagccggtgcgcccttccgcccgctcctcccccgggaccatcctcacgctccagggtcgcggaggcatcttgcgactagcgaggggctgacggtggcctgggtggccttgcgccggctctgggctccgccgctgcggcagccgagggcctcagctgggaaatccaaacccgggctggacctgggctcaaggaggtttctgtccccaggctagaccaccacggccacggccacgcaacttgccctgagaccccgtgctcggccttcccactgagctccccttccctgtgactcagtgcctcgcaggctggtggccggaagggtgcctgcggctggctggcccggcccgattccgggtggcggggttcctgcagtgaggaacgaccctcagctcccgcagacgcgggaaggcccccgcgccatccgtgggagtggggcagcctgtctgcacgcggtcccctgggaaacccctctgcatctcccgcccggacaaggtccccggccttggaatctgcgccgccccgcacgcgaccgcctgcgaactccctgcgctggggtcagaactggtatctttctcctcctctggggaagtcagggcagcccggagtggcgtcgtgggtccgaaaaatccgtctcagaaacccaccaggagaaaaggctctggggtgggggacaccatgtggggctcccacaaaggacccgacggtgggtgtggagaagcttattggccctgagaataggcccaggccctctccacaggacccctaccgcacacgc

SEQ ID NO: 25960 - DNA, 1140 bp, Homo sapiens
  chr8:99985860-99987000
  hyper
cgtgtccatgaagcctctccacgtggccgacttcccttagagaagtcccacaagccctcagccctcacagcctcgcccgcgacgccgtgcccacccctcccctggcagccccgagactctgggcgtgtgcttcccgctccccgagggccttaggcccagcggacgcccggccggagcctgatgccggcggcctccccctccctcagcgaggcacgcgcgtccccaggaccgccggtgccggggcctttaaccctggccgccgacgccgcggggaaaggaagcttctgcggctacagatggcgcaggccccaggtcgcagagaagccctatccaactctgcggactggccctgggagaaagggcccgggagttgcttctccagtcggtgaacgctccgttgagccacgtctatgcgcttgctcatggataagcgcactgggggactatactgcagtgtgaccgccagtgtccccagggaggctgcggaaaagtagaggcaatgagacccgagcagaaatagggacttctcgcggcagtccgcacggaagcagctggggagcatccagctcgaccctccccacaggcccagggtcgggacaccgagggaaggcgcggcgcgcgcggcaaggccaggggcgcggggctgggctcggccggcacaagtgctcggaccgcggagcgtcctcggtgaggcgttcggtatggattgggtaggagcggccctgggcgatgggcctgacgtcggtgggcgcagttgaggccactgcaaggccgctggatcccggatccgcacccgagacggagcgggggccacacgggataaccgagggggcgaacgggagtttcgggcctccgctccctctccgggtgggggacaggtcgccgagtccgaggtcgggcgcgaaggccactcgcattttcccgccttccgcgagcaacccaggggccctgcgggaggaggagagggtcccgggagtccgcccttccctgcgccttcgggaccggcaggaggcgctgcgcgggcgaattaaaagaaaaggaaaagctcgtagtggaggtgttaccgcatcctgcctttggacgctactcttagttgagtgacccgattcggaccttaggggcgttagggtctcctccacc

SEQ ID NO: 25961 - DNA, 998 bp, Homo sapiens
  chr9:100615615-100616613
  binary
cgacctcgctgcccccgcctcgcctctctgcccgtggcgcttacggccaccttggcctcgggggcagggcatgggcggcccccgccagatcgcccagcgccagtactaactgccctcgctctggccttcgagcccgaagcctcttctgcgcgcacaacctaggcagtaatcctaaactagcgggcaccacagaccagctgcagccaccccaacccagggatcacttccggacccctcgaccgcccggcaccagcgcgcaagggacccttcagccggagaccagagtccagtcccggtcacgaggccaccgccgctgcccgcctcgagaagcaccacgcgggctgagccgtcggctagcgggtcactcccgagcctctgtctgcaccgcgccagccccagaccacggacgctgagcctccagcgcgtgccagcctgggccgctgggctctcggggccagcccgcgacgatcccctgagctctccgcagaagggccgagcgtccgttccggggacgccaggcccgcccccgccccccgacagccgcggggatccagagcccgggggtgcgggacgcccgcgccatgactgccgagagcgggccgccgccgccgcagccggaggtgctggctaccgtgaaggaagagcgcggcgagacggcagcaggggccggggtcccaggggaggccacgggccgcggggcgggcgggcggcgccgcaagcgccccctgcagcgcgggaagccgccctacagctacatcgcgctcatcgccatggccatcgcgcacgcgcccgagcgccgcctcacgctgggcggcatctacaagttcatcaccgagcgcttccccttctaccgcgacaaccccaaaaagtggcagaacagcatccgccacaacctcacactcaacgactgcttcctcaagatcccgcgcgaggccggccgcccgggtaagggcaactactgggcgcttgaccccaacgcggaggacatgttcgagagc

SEQ ID NO: 25962 - DNA, 55 bp, Homo sapiens; identical to SEQ ID NO: 8786
  chr9:101558601-101558656
  hyper

SEQ ID NO: 25963 - DNA, 855 bp, Homo sapiens
  chr9:104248306-104249161
  binary
cgccctgcggtcccccggagagagcctgggccgagcagaggatgcgggtcacaacgaccctgcaggagctcacgccccaagacaccgcgagcgcagtgcgacactagcgacgccggagccaagggccagaaagagggcgagacacacccaggtggatctaattaaccctccctcttggaaaaagaatgggggacgatgtccagggccctggatctagtgtctgtcgctgaccttgggcagtccctgccacgcttgagcctcagtttcccacccgtaggccgagctgaccgtctccatcgctgcgctccttcccttctgctggtttttcctggtcctgggagggacgccttcctctgcccagtcgccctcccccagcccttggctgcgaggtcgcccgcagaaacccaacactgctgccgcgctctcggcgcgcccggcgaacctaaggtgtggacgcgccgcgagggtcccctgcttgcgggcggccattaggcgccaggccccttggcgcttcggccctgctaggctcggcgagggtcttacccagactggcacgcgccccgctcgcgtccttctattgacctgtcagcgcagctggcgcaggcaagggccagggaggcgcccccgagacactcaaccatccccgcactgatgcgggcccctgctgccctggggacccctgcggggtcctcgcaatcctccggcaggaagcggtcggagctgcgggcagggccgctaggcaacccgcctgcccgaggcgcactgcccggggcacaggccctctgcgatgactctccccaacccccagctgccctgcttgtgccagctgtggccacccctaatccttgtcccctc

SEQ ID NO: 25964 - DNA, 804 bp, Homo sapiens
  chr9:113800676-113801480
  hyper
cggcccgcgctccgcagcggggctggagacggagtcgccactcagggagcgtcagccgccagtcggcccctactgcccggctttggcgcgctggcaggaggagggggcgcagagggagggccagaggagcagcgccgacgccagcctcctctcttcctccgccttccttcttttctgcttgttccacgtagcacaagtcagcaacacccgaacccccagagtccgccctccccgctcccaagctggaccccttacctggtgtggcgcccccagcgcccctgacctctgcgccccctcctccattcattggctcgacagcccacggtggtggcagggccggggctggggggtggccttagcctcccattcattatctcagcagcctcccccgccccgcccccgagtcgacacacccgcagcgggagacccgtggccgccagctcgggtcccacccccgcccctcctgcgcttaccccagcgccggacagctggcaggactccggtggacgccccggcacggggcattttcacgttgtcgctctcctcttcccactcgaaaagctctggaaaacatcgcggggcccgcaaaaccccggaaatgtggcctctctttcgtggctcactttctaaactttccagaaggcgcaaagtttctcccagcgccgccctgcactggaggctgcgaagaacgcagaagcggctttgctgctaggaaggtgcatacgtttctagttctgatttttcacttcactggatctgtaaacgaaagcaagtgtgtctgctcccctagttctccatatccac

SEQ ID NO: 25965 - DNA, 55 bp, Homo sapiens; identical to SEQ ID NO: 8792
  chr9:128103464-128103519
  hypo

SEQ ID NO: 25966 - DNA, 284 bp, Homo sapiens
  chr9:129373418-129373702
  hyper
cggggaaggcatgcagaggggcccaaggggtgtggactcagcagccccaccccagaccagagaaggcagccaggctctggcgtccaccgagccagcgcccctatctgggcgcgggccgcatggcggcagaccaccctatatccgccttggtggcgtgggatatgactggcaggagcgcggaagaggcgctgagaatgcatgcgcacccggacagaccagacgcggcacggagggggtacttcccacaagtcctcctgccttgagaccaggccttcgagtggtcc

SEQ ID NO: 25967 - DNA, 950 bp, Homo sapiens
  chr9:129388280-129389230
  hyper
cgaagcctgcgtgcccccgggggctccgttttgctcccctcatggacatgggggtggggagctcgtggggtttcagcccaaaggctccagtcagtggaaccggagggggacttcggaggaatttgtctctgatgtcccggctccctggcctcctattagaactcgtagaggatccgctctggagtccccgtgcgccctggcagaggtcggggacgccagagtgcacgcagtctcctgcgcgccgagcccaggctccgggcgcagggaggatcgggctgagagcagggtgtcacctcgtaaaagcgacaggcaaggactgttttatggggagggagaaggagcaggaagtgatgcttccatctctgacagcatagggaccgggagctccgatggaggaaaccctttccgggcaggacgagtagagggacaggacatggccggggaccatgggattcgctgccattaagtatgggacgggcaggcgagagcggggaaggggaccgatggagccagaagccctgagctcacctcccgcccgtcctctcctggagccccctctgcaatcccggctcagtcggcaaccggcccttccttccaggtcaggggtgggggagagactttctccctcgaaacacttgataccaactttgtttttttggcaagaaaaataagccttgtttggaaaggggtgggtggggggcgtcgagcgagcgagggaaggagcaaggaggcggcggcggagcaaactctgcggattaggtttcagcgcctccgccccacccccagccccgcggcggtgatttgtgtgcgggggtctgtgaccctgcaagcatcaaacggcccgcgggaaccggccgagttcagagggacagtgggccgaagggcggcctaagacaacgcagatggttcctatcagcccggccgggcccgcagcgtccgccggtccgtcc

SEQ ID NO: 25968 - DNA, 231 bp, Homo sapiens; identical to SEQ ID NO: 8795
  chr9:129393170-129393401
  hyper

SEQ ID NO: 25969 - DNA, 532 bp, Homo sapiens
  chr9:129400713-129401245
  hyper
cgcagccctgccaccctggggagctgaccccgaccccacccggccccccacgtcccagctcgggggctcacaaagggagaggagggaagagcaaaatcgcagagatttgtcttgtctggggctgacagcggagcgagtgattgccaggcccgcttggcagtttttaatcattttatctctgttctcggctctcgggggagacagccagtgcttagcagtctgctcagaaagacctcggggcgcgtggcgcagcggcggctcggagctcccattattagctgtgctcttcggagcgcgctccgatctctcccgggggagccggtgaaaaattaacacgggccggcggcgcgggcgcccgatgtaactgtaattactccattgatattcctcacacaatagcgctgtcatcagtcatttacataaactttctctccccaggacgggcggaggtgcctaatcctattgggcgcttccactgcatgcattatacatggcagctcctaggtgcggactgagggaggggcggatagcc

SEQ ID NO: 25970 - DNA, 668 bp, Homo sapiens
  chr9:129445218-129445886
  hyper
cgccaaatgtgcatgtgggcctccctggccaggctggcctgggatggctccccgggctcccggctgtgcccgtccctccctgtccctggcccgtgacctccagccccggctgggggctcccgacagcgcccctggcgcggatcaaagggccgaggggccggcggccccgcacagctgcgggccgcaggaagcgcaggggcagccctcgctgcaggcccggccccgacgcggcgaggaggccgggggaggccgggaggctgggagaggccccgcgaggcccgcagagcgcgcccgtctcgccgcgcattccagccgcgtgattgacgcgcgtaccggggcccccgcccgcggctcccgccgccgcccgcccggcccgcggccgccgcatcaaagcagatgtttgcagctggtttgagttggatccccatcaacaggcccttttttgtctcaaaataaaaaacagctacgcccggaatgataaggacgcggcaggcacgtgggggagatgtcagcgagtccggcagggaggaggccgggcggctccctctctaagtgacaggctgactctagcagcagcagccgtgacccccagagtgtctagggtcctgtcgcctagctcctgtgaactgcagctcatccttcagccggcatcatcagagccccgtccc

SEQ ID NO: 25971 - DNA, 257 bp, Homo sapiens
  chr9:131127222-131127479
  hyper
cgtagccggcccctccccccgaggagggggccctgcttcctcccggcctaatgatattctgggctcagccctcgtctttggcggcagtttaacccgagccggggcggatttctttctcactgatctcagcttgacacccaattagcacaagaatgggaggaggaagcctgcgagaggcgcctcccagcctcccggggcgcgcgaggggagcaggcgggaagacaaaggacagcaggcaggggggcacccgcgccctc

SEQ ID NO: 25972 - DNA, 133 bp, Homo sapiens
  chr9:131399183-131399316
  hypo
cgctgccactcaccggccgtaggcacaggccaccacagagccagtggagttccaggagatgctggtcacatgcagaccctgcgcttgggctggcgggtagcccagggtatacagacaagacacctgcggagac

SEQ ID NO: 25973 - DNA, 355 bp, Homo sapiens; identical to SEQ ID NO: 8799
  chr9:132393701-132394056
  hypo

SEQ ID NO: 25974 - DNA, 145 bp, Homo sapiens
  chr9:135116321-135116466
  hyper
cgtgcacgaccggtgcaacgagaccggcttctgcgagtgccgcgagggcgcggcgggccccaagtgcgacgactgcctccccacgcactactggcgccagggctgctaccgtgagtgcgcgccgtcccccgtgggcggggcctgc

SEQ ID NO: 25975 - DNA, 115 bp, Homo sapiens
  chr9:135548194-135548309
  hypo
cgttgtttaggttttttggaagattaaacacacataatcacttggcccagttcttggcacgctgtaaatgctcaaggtgaaaatataatgagttgggccgggcgcggtggctcac

SEQ ID NO: 25976 - DNA, 697 bp, Homo sapiens; identical to SEQ ID NO: 24715
  chr9:135645005-135645702
  hyper

SEQ ID NO: 25977 - DNA, 206 bp, Homo sapiens
  chr9:136728393-136728599
  hypo
cgtggctgatcaatccctccgaggagccgggcgcaggcccagagccctcctccgtggagtctaaggaggcaccagcattcggtcagcgctgacacacaagaacctgtttgtcaacctggagtcagcgcaaaggccccaggtcgggtcgtacagatggaaccgggtcgtacagatggaaccggagacagagaggaggcgtggcgggc

SEQ ID NO: 25978 - DNA, 213 bp, Homo sapiens
  chr9:138393569-138393782
  hypo
cggctccccacctcggtgtcacagaaggcacttgggagcaggggtgggcgggaactgcgctctgcctgtctctgctgccaccggtgggagacgcagcgtcgctcctcctccctgccgtagatttcaacgacaagattttgaatgagcccctcaagcactctgacttcttcaatgtcaaggaactgttttccgtgagaagcctcttcgatgccc

SEQ ID NO: 25979 - DNA, 131 bp, Homo sapiens
  chr9:139103533-139103664
  hypo
cggacatgctccccagatgccctggtgccaggaggatgagccacggactcggccgccagggcccaaaggagcccttccaggggcgcctcccacctcccaccagtcttccagccgtctgtgccagaacgccc

SEQ ID NO: 25980 - DNA, 935 bp, Homo sapiens
  chr9:139268627-139269562
  hypo
cgggggagaaacgtcccttccagaagtgtcgttatcctcgttatccccatcatgaggcatccctgctctccaccaggatgcatgtgaggactgaggccactctcggggtcccccaaaccagcttcagaagagccggtgacagcagggcacagctcggcccccatccagggacaacggacagcagagtctgccctgaactgtgcacttcagcgtgtgggctgccagagcctcatccctgcaggcttgggaacccccaggccccgcctcacccggtaaagctggttgaactgagttgccacccaacaggttcgagaaggggccgccaggctggaaggcaaggaagctggtgtggagcttgcctaaccgttctcagcctccagccctcaggcctctgtgcggacaacgtctgacatcacacattaaggagcggacagttaggggtcctcctgggctctcgggaatgccacattccagggggccgtgcccctgctggacccctcaccatcaacatgagcgagtgtgcaggccggggccatcctgggccctgccagggagcgaaccggagctggcaccaggccctcatgacccagtgtttccccagcgtttaaaacgcggaccttagtgacttccctgtggtgtgtgtccttaggagtgaacacacataccatgttctctaaccatatcggaagctaaaaatcggtaacagatatcggcaaaatctctaaatatttggaaattaaataatataccgctaaataacccacagatcagagtggcccccagactaggcaccagactagagaaccaggcacagcaacacatactcaggagtgaggtcggccatgggaccgtcccgtctgccaggtgcccagggctgaggccccacagtggctccagtgaaggatcgaagcccagatagccaagggcctgggggc

SEQ ID NO: 25981 - DNA, 736 bp, Homo sapiens
  chr9:139317510-139318246
  hypo
cgcgctcgtgtgacacgcgtttgccctctgcactaggcaacgtgaagccggaagatgtgaagagagtcgcttctaagatgctccgagggaagccggcagtggccgccctgggtgacctgactgacctgcccacgtatgagcacatccagaccgccctgtcgagtaaggacgggcgcctgcccaggacgtaccggctcttccggtagaaccgctccccggcctgacagacccagggagctgcagctggagcccgttcccgtgcgtgttagtttggacacgaatttagtctaaaaagctgtctggttgtataaacggtgcaaacaatgtcgccacagcacccacgcggtttgcattcttttggaactcaatgtgccgatcagtggagtcagtatcgagcctgaccaccgcaagccaggaagcaggtgaagtgcccagcgctggagtgcagcgtgccacgaggagggcggtcggtgcttccctcctcgggctgtgggcacatggggccccgcaggttccttggaggagccctgagctgggaggcagcaaaggctgacctatcaaagcctcccggaggccaccgtgctgggtaccaggactcacctctgacaagcaggagaaggtaagggcccggtcagctccaaggagcgcgctccacgcgcgtgcacacagcttccctggtaataaagagctggcatctttcttagcacggtgttttccttctcgcctggggaggggc

SEQ ID NO: 25982 - DNA, 233 bp, Homo sapiens; identical to SEQ ID NO: 8810
  chr9:139374838-139375071
  hypo

SEQ ID NO: 25983 - DNA, 821 bp, Homo sapiens; identical to SEQ ID NO: 23659
  chr9:139698453-139699274
  hypo

SEQ ID NO: 25984 - DNA, 362 bp, Homo sapiens
  chr9:139704054-139704416
  hypo
cgtctctactaaaaatacgaaaaaaaaatttaaaagaaagttgatgtccgaaccaagggccgtattggcttttcttatactctagaacatacgacgacaaagaagattttgatgaagttcaaattagagtcagcgtgctcatcagaaagaaagcgcagccaacacgtttaggaacagaaacggattatgttgaagacaaacaatccattgcgtttgtgttcagtaacccaagcatcaaaggaacttgtggctggggagaaggcttgactatttgaaatctcaggactcctctgtccaggagctcccagactcccgtggagtggaagcctgggggctcgctgaagaagtcacgtgactggaac

SEQ ID NO: 25985 - DNA, 358 bp, Homo sapiens
  chr9:139888779-139889137
  hypo
cggggaggggagcgcctgccccgggacaggattgaggaatgtgccagcccccatccacctggggcaccccgccccaccccggcctgactggtttgggagcccagtccggtcctggagatccctgaggccaccggttgcaggaggcctggagtctgcgccttcttagcgtggaggatgggaccggcccgacccccggcgctcctgcccctgtggttctgggctatcgggctgagcgtcccaccctggggtttggggatgggaagtgatcccgagacctctggcccttcagatgtcaggacaccctcactcccgacaaagatgcctttattgggcgacagacgcggggtggggcgctagc

SEQ ID NO: 25986 - DNA, 128 bp, Homo sapiens
  chr9:2115839-2115967
  hypo
cgagctcaccgcatcgggcagcagaacgaggtccgggtactgaggctctgtaccgtgaacagcgtggaggaaaagatcctcgcggccgcaaaatacaagctgaacgtggatcagaaagtgatccaggc

SEQ ID NO: 25987 - DNA, 184 bp, Homo sapiens; identical to SEQ ID NO: 8813
  chr9:27212729-27212913
  hypo

SEQ ID NO: 25988 - DNA, 73 bp, Homo sapiens
  chr9:33447403-33447476
  hyper
cggctccctccactcaccaccaggatgagggtccccaggcactcggccagcgcctgtcggagcagccggtagc

SEQ ID NO: 25989 - DNA, 137 bp, Homo sapiens
  chr9:34224363-34224500
  hypo
cgttattaaacgcattgtagacaacatcgatgatccttgttttgcaaatacaacgctgagccccaggagaaattccctacatgcagccttagggcacggtatttcttgttacctcctcaaacatggactgtgtggac

SEQ ID NO: 25990 - DNA, 893 bp, Homo sapiens
  chr9:34372076-34372969
  hypo
cgtctgagcccacgcacactcggtagctcagctctggcgctgcggcgcggccggcgggtggcttgtagggcgtgtcgtggtagcgcgcctgaagccgcagcgagcgctccgtgctgttccagcccaggtggaagggcactgagtcattgactttgatggcggccgcgcgcgaagatagccagtagcgctcgaggatgcccccaaacgcggcgtcggaggagtagacatcgctggtgacgaacggctggggctcctgctggccatccaggcggatgggccagtgttgcgtcctcatctcggcgccaccataccagtgggccgccgcgtcgcccaagaacatggcgtgctccacggcccggcccggcgctgcctcctcccagcgcacgcggtagcacatgaccgtgtccttgggccgcacagtctggatgaagaagtgcagcggcagcccgtcggccgtgagcgagcagcccagcagggcgccatcgcggctgcaggagtcaaggtccagcgcgccggagcggaaggccaggcggaagacctgctctcccttctgattgcggatggagaagccgccagctttcaggtccagcagctccgcgcgaagtcgctccgccttgcgtagggagacgctgtagtagcaccaggccaccaccgcggccagcacaagcagcagccccagaaccgcggagcccagcagcggcttcaggtctttggaaggcttgggcttggcaggtgagaagttgtcgggcaggaaggtgtacatagctgcggctgcgatggcctcggggttctgacgctatgcgtagcagccaggccggcggcggcgggggtaggcctggctcttctcctgagggttctggagcattagtgggctgctaagaaaggagcgggcc

SEQ ID NO: 25991 - DNA, 712 bp, Homo sapiens
  chr9:35675509-35676221
  binary
cggttcatccttttcatttatacaggggatgaccagagtcattggcgctatggaggtgagacacccacccgctgcacagacccaatctgggaacccagctctgtggatctcccctacagccgtccctgaacactggtcccgggcgtcccacccgccgcccaccgtcccaccccctcaccttttctacccgggttccctaagttcctgacctaggcgtcagacttcctcactatactctcccaccccaggcgacccgccctggccccgggtgtccccagcctgcgcgggccgcttccagtccccggtggatatccgcccccagctcgccgccttctgcccggccctgcgccccctggaactcctgggcttccagctcccgccgctcccagaactgcgcctgcgcaacaatggccacagtggtgagggggtctccccgccgagacttggggatggggcggggcgcagggaagggaaccgtcgcggcagtgcctgcccgggggttgggctggccctaccgggcggggccggctcacttgcctctccctacgcagtgcaactgaccctgcctcctgggctagagatggctctgggtcccgggcgggagtaccgggctctgcagctgcatctgcactggggggctgcaggtcgtccgggctcggagcacactgtggaaggccaccgtttccctgccgaggtgagcgcggagctggcc

SEQ ID NO: 25992 - DNA, 310 bp, Homo sapiens
  chr9:35711931-35712241
  hypo
cgagagggaggaaggagaggcctggcattctttgactcctacgttcccccaccccctaccgtcctcctaccgagtcactcaggagtcgcttgctggcatctccaactgccctcagggcattatccacatcgcgctggccaggtaggcagctgacacagcggttcagagcctgggtcactgctttagccacctggggtgagaaaggagacagggttgcccaagtgaaaagaatttgagagatcgcctccattcacgcgacatgggagatgactagctctactgcctctgaaagtgaaaaaagaaagggggc

SEQ ID NO: 25993 - DNA, 857 bp, Homo sapiens; identical to SEQ ID NO: 23401
  chr9:36036762-36037619
  hyper

SEQ ID NO: 25994 - DNA, 798 bp, Homo sapiens
  chr9:37034135-37034933
  hyper
cgctcacaggtcggaataattcaagccttccgctcccccgccgagctggggtagctgatcactgagctgaaactaaacgttttaggtggaaaaaaagcgtccgaaggcaccgtgaaatgattaaggaactaaagagcttctcgccatgtgagatcatgtcctgttctcgccaacatcacaagatgtccccagacacgccgcgcccccagcgcgccgccccacactgccggcccggagcgaggaaagggtaggcgctgcgcggccgggcctgctcagcgcgccagacgtggcggacccggcccggccggagtagagcgggaagccgggagagcagcagtgctgctgccgcgccgccccagacttttataggggttggggggagggaaggaaggcttcagcctgcgccgggcgctagccagcgcacctacgggaaggggcagaccgaagcggagcccgggagcccgggtcttccagccgcaccttctattaagacatgcgcttgggggtcgcggccctctgcgctgtgcgcggggcctgtgacatctccatgtgcaaaccccgctgcttagacgagcgcaggccgggtttttgtttttgaagaaattaactgctcggccaagcaggtgcttttgaaaggggttgcaaaggctggcagtgttgccaggcaccgaggcgacgttccggtttactccgattcacccctagggcggcgcccgaccccagggttcccagccatccaacccccaccccaatttgttggggtcctgactattgctgggcccctgaccctagggcagc

SEQ ID NO: 25995 - DNA, 937 bp, Homo sapiens
  chr9:4299244-4300181
  binary
cgccgggagttgaggtgcgcgtatccttaaacccgcgcgaacgccaccggctcagcgtagaaaactatttgtaatccctagtttgcgtctctgagctttaactcccccacactctcaagcgcccggtttctcctcgtctctcgcctgcgagcaaagttcctatggcatccacttaccaggtaaccgggatttccacaacaaagcccggcgtgcgggtcccttcccccggccggccagcgcgagtgacagcgggcggccggcgctggcgaggagtaacttggggctccagcccttcagagcgctccgcgggctgtgcctccttcggaaatgaaaacccccatccaaacggggggacggagcgcggaaacccggcccaagtgccgtgtgtgcgcgcgcgtctgcgagggcagcggcggcagggggaggaggaggcagaggcggggtggctggaccctcggcatcagctcattctcccctgctacacacatacacacacaaataatgtttctaaaaagttcagttgcgactttgtgcctcgcctgtcctgttcatcctcgtcctgggccggggaatgcttctgggggccgaccccgggatgctggctaattgctgccggcgggttccgtcgccggtgtgaccctggacggcgcggacggcgtacagggggtcccgggaggggcagtggccgcggcactcgccgccggtgcccgtgcgcgccgcgctctgggctgcccgggcggcgcagtgtggacgcggctgcagggagaggggaagggggaagagggagggaggaaggcagccgggcgaggagtgtggatgtgtgtgcggccgcgagggccggcctgtagccagctgcttcctgagtgtgagcgccggagggggagggggaagagtgggggcgggctcgcgggtcactaggctggccaattcgaaggcc

SEQ ID NO: 25996 - DNA, 167 bp, Homo sapiens; identical to SEQ ID NO: 7619
  chr9:4864421-4864588
  hypo

SEQ ID NO: 25997 - DNA, 893 bp, Homo sapiens
  chr9:98783135-98784028
  hyper
cgtgggctgtttggtgcggaggttcctggtttgggttggccaggcgtagagtgcttccgacaattcacccaccctccaagacgcgcgggccggggagcggggagagggcggagggaacggcgcaccgggccccgtcggactgttggaccaaaagtcctcagtgtcgggggctcgcagcgccgccgcggcgaacccagctagggggcaccgcctgcgccgggcacagggaggccgttcggctttccccctcgcgcccattactctcaggcgtcccggggaaccccgcgggccaagtgtcgggctgcgtccgggcagaggcggcttcgcctggtgtcagcgcgtttccgaagggcacccgcggcggggcccacaactcgagctgggagccgccccaagcaacccgttcctccgaatcaggctgcttttctctgtaaagaaaagagaaagcaagcgattaactgatggcttggccggctggaaacgggaaagcgagttctccaggagccgcacacctcggggaagcccagtccctcccgggcagggagcgaggggcggtcctgggggctgcttcccgcggggagagaagggagggcggcgcagccctctgcggggtccgcccctcggttctccggacccccgcggcctgggggacacggggcaaattctcggatagcgacgggcaggaaggggacccgggctggcgatgggccgagtgcctcctttgctctcacccccgcgcgaagacgaggccagtgggcgggtggcgtggggcgaggcctccgcaggccgccgggggcccaggcacctggagccgggagggtccgctcccttccccgccctggatggcggcctatgggaaagcagtctccactggatcccgcgcgcgtcgcgcc

SEQ ID NO: 25998 - DNA, 678 bp, Homo sapiens
  chrX:15755988-15756666
  hyper
cgagggaaagtcactttttagataaggctctgaagccccaggtctagtttcaatccactaatgcggccagcggcgagcaggaggagggaggattggtccggcgggggcggggccagagcagggctcagaggcgtggcccaggctagagggaagagcccagggggagcgcagaggcggggctaggagggagcaggggtgaatgggggcgtggcccgggcgagaggggcgtggctgtagctaaaggggtgtggccagggtggagggcagagactggcacagtttggttgggcgtgaccggggcaataagtacggacgtagtggggcgtggatctgccaggtgggggcgtggcctccattgaggggcgtggccctggtatgtggggcgtaacagggcacgagggggcgtagcttcgatggccggacgtgcaggctgcggatccccgtaggcgagcgagcggctaggttcgtgatctggagagacgctcaggtaaggacgggtggccgagaggagtggggggcgaccagggacaggccgatccagacagggccgtgattcttcccacgactctccgctctggcgcaccgggttccggagctaggagagctgttgatcctgcgagtattgtctgggtcccggcagggcgcccgggagtactgagtggggcctaatggggtgtc

SEQ ID NO: 25999 - DNA, 187 bp, Homo sapiens; identical to SEQ ID NO: 8822
  chrX:23801086-23801273
  binary

SEQ ID NO: 26000 - DNA, 892 bp, Homo sapiens; identical to SEQ ID NO: 8823
  chrX:39933533-39934425
  binary

SEQ ID NO: 26001 - DNA, 744 bp, Homo sapiens; identical to SEQ ID NO: 8824
  chrX:39953894-39954638
  hyper

SEQ ID NO: 26002 - DNA, 1825 bp, Homo sapiens
  chrX:39956753-39958578
  binary
cggccccgccgaggggtgggctctgggccgggtgggggcggggcggggcgggctcggggcctccgggcaggtggcgacagccccgtgcgatcctccgggctcccgcagctggactgggcttggccgagctcagcagctcccgcgctgccgccgccgcccgcgctcgggcaggagccccagcgccatgttgacggttcgccgcgagcgcccgctcgggctgggtgtgtgtgagtgtgtgtgagtgttggccaagtcgtccctgcgcggcgacagcgcggcttgggctctccgcccggcggctcgcgggctccccctccgccgccgccgcccgcctagctcccgctctcggtcgcggtctgggctcctgcgcgtctcccccgcagccgccgagctcggcccgcgttcagcgaggagcgcagctctgcctcaccttgccgctgggagcccaggctccgtctgccgccgcacgccgcgatcccaacgcgtcccccctccctggttccctcctcttcctcctccccctccctccgcccgtcctccctcccgcccgccctacctccctccctcccaacagccgcctcccctccccccgcaggcgcagcgctcgggcgacagccgcccgcccgccgccgcctccagctctcgcaagtttgagctccgccagtctccgctcaccctccgctgcggcgcctccgcggcggggtttcgggaggggtgattccccaggaaaggtttgcccgagtttccccggccgtcatcgatgcacggcccggcacgttttggcctctctggatccgaaccccggaccacttgggtggcgccccccctcctcgtcccccggcctcccctccccagctcgggccgagttggctgcgcacgcccgacccgggcgcacgtcctgggcgagccggagaccgacttgggcggcggcggcggcgagggctgccggcagagccagagccgaagggatgggggcggcgggggcggctctcccagccgcgcgccgagactcccctcgctacccagaaggccagtggaggaccgcaattaccataaagcgcctcgcactccgctcagccaaagctgtcaaaccccagcggcagcagccgctgccgccgcctcttgccaccagcgctgcgctctcccggcctcgtcccctccgagacccagcggagcgtggcctgtgtgctcccgtgctcacccccaccccagtttgccccttcctcccagaggagccctttcccatttcggtgttaaaagctacctgaaaacaccaccccaggcaacggtggccgttccgcctgaactccgcgcccgagttccccggacgtttcaattgtgtgggaattgtttggaggtgggggaaggggggagcagcccgtggaggcaccgggaggcgtgtggggggcggtcggcgagcggagatccgcctgtatttctcccggttctcgagcattttcacggtctgtacctctgatggttggaggggctgcccaggcccctcgccccggcgttgggagattatctcccgcgttttattttccttgacagggagcaacttttggcttacaccgttcgccccataaatttccactcggtaacgtcgtgctgatcggtgcttggcggcggcgtacagcctgcgcccgcagcagttcaattcaattgacacgtattgagcttctccagcgcacccggcgcggctctgggcgcggggggagggcgggggcaggcgggagggagggggaagcggagaagcgaggttccggcctccccggagcgcaaagcctcaagggcgagccgagaagccctagttggtgaagctggc

SEQ ID NO: 26003 - DNA, 2334 bp, Homo sapiens
  chrX:40034239-40036573
  binary
cgttttctagcccgagaaggggcaggcggccctcatggcgcctccttcggcggtttcctggcgaagcgcccatcctccccaagcaccaggaacggaggccgtccatattaatactcgcgggcagcctgttctgacctatactgtcattttttccatcggtcgggatcgggctgggggtggggtggggcgggggctctcctccgaggggctcagcacggatcgttgggttttccccggcgaacttaacacggaggcaaaaggggcagatggaaaccaggccccggctggccccgcgcgcgtaagcgcggcactcagcagctcgacgcaaagccagggctggattttcgcggcccgggcccggcggccgcccagcgcccgcgcgatcctctctccttcgggttgagcaaacgtggtcgcctaattccgcccgggagacagcagctgtgcggcgagagggggagaaaaaatatcgcaacttttccaacagaaagtgtgtgcgcacacgagaggtgaaggcccaccccgattctgtgcacgtatcgacacagcatctaatcagtgtcactgccaggaatacgcttccgcggcgggcgacaccgccgccctcgccaacctgcaggagggaggggggatgcaaatggcgtctcgcgtcgtcctagactccgcgcagcacccgctaccgcgactccaagcagacgttgcagcaaactggggtgcagcgtctggggacgcgaacgcgcaggcggcccgagcggtcgcagggaagaggaactagcaccactccccgctacgagaccgttccccgcccccacctccggaagagccgcccttactcgactggggtgaggggcgggaaactttgcaagaagactgttccgcgccttccccgcgtggcacctcagaagaacgtgggtgggtttcccgtccgaggccagaccacgctaccctacttttccaggtttcggacctgaacctcgtggactacgggagggagagtacatttcgggccactgcggggggcggagggacaccaaagacaggcgtcttcaagggttctggcagatggccaagtttgtgtcctttccctcccacgctagagtagcgcacgccactttggggaagcgtgagaccgttcaccaccggccacgaggccaccaatgtcttccaggtggggccgatggtttgtctgcagcactcccttccgccttgcggtcctcgcctggctcccacagtcctggggagcccccagagctagcccgcgtcttccctcgcccgctcttccgggggaaagggaggctgtttgtgtggtgtgtagccccgctccggcttgcacccccgcgagccacctcgcagccctccccggcctcggcctcacggatcccctcccggagtagccccgcgggcccccccgccatgcgtaatggggcgcccctgggacgcaggcggggatggcggttccggtcgttccgggatttgcgtgcaagaagaaaacaaggccggcgactacaagagcggcgactccattcttggggttcagacgccctcgcagcctccgcgtcggttccgctctcgccccgggagcccgcttccgtgtccctgcccccgccccccaacgattcctcgtccggcccgtgccgcaccacgcggagctccgcgcgccctggctcccacaccggtccctccataactcgcgctcctccctcgctccgggctcggggagccgctcgctcccagcgcccagagtcagccggttccaccttcggctgcgagagccgccgccccgcgccacccccgcccggcccggcccttgtcccagcccggctcccccgccagctgcgccgccaccgccgcacgtgacccgcccccgtcgcggcttccgctgagctgcctgttccggggcacaaacaatttttgctctgacgcggggtctctcgggggccctggcgtcctctactccctgctccccaccccaccccaccccctaccttccgggtaggagaactcaaaacaactcgctgaccttcgggccgaccagctccgtcttccactgactccagcattccgttcaaacccagcagccacggcttctaagatttcactccgctctgggctgggggggagggggcgagttctccgggagggggtgtctcagatcgaaagagccacttcacgctctttctcctcctccgaggtgagtttttagactatttggaggccttggggaaacgcgagcagccgcgtgcaaaggagcccccccgccttctccccgcacatgcagccttgtctagtgtgacccgatttccagggtcagcagcagagggcctggccagcttc

SEQ ID NO: 26004 - DNA, 201 bp, Homo sapiens
  chrX:68758240-68758441
  hyper
cgacaccggccgctgggtggcgctgtggctcctcctacccaggctggaggcaccagggaggcggaggcgcagccgcggaactgggcctggcgctagggtccgtgggcgcctgcagagcgggttcttcctcgtcggttcctttctcccacttcgcgcgcttctcccgcgttcaggcccgttcccatccctaacccggcccgc

SEQ ID NO: 26005 - DNA, 200 bp, Homo sapiens; identical to SEQ ID NO: 24732
  JH636052.4:5118715-5118915
  hyper

SEQ ID NO: 26006 - DNA, 1247 bp, Homo sapiens; identical to SEQ ID NO: 22735
  chr1:101702006-101703253
  binary

SEQ ID NO: 26007 - DNA, 969 bp, Homo sapiens
  chr1:107683111-107684080
  binary
cggactttgggtgcgtcgcgtctcactgccatcagtgctatgtgcagtgacatttctgacttgagtggaggaatgcgcgaaggaaacccgggcgaaattggtattagaggatcttcttggcgccaatgctaattgtcctgatttatgccccttctgactaagctcaacgtcttcatctgaaataaaatgaaagcggtgccaagcggcatagaaccgcctggccgctggttctgatccccgggaaccagaaaatcgtcctgcggcttgaaaaaaaaaaaaagaggaaaaaaaaaagaaatagaaatagaaaaaagaaaaaatatccctcagtaaaagtttaaggcgagaagtgtcagaggcagcggagcgaggaggcgcggaggagagccggcgagcaggggactgggctggcacgacctccgaaggctgagatctcattattaatatcactatatttttggagggagaggcacctttctcatcctctcttcctctccgcccacccttactccctccccctcatctacctgtcaaagtcactgatcttttgcatttcggaagaggacgtcaacgggaaggaattccccctctgggtgcgggctccgagagggggcgacttgcaggaggctccccccgggggcggaggcgaaggtaattaagcggcggggagtggcgggccggcgctgggttctcggtcctcggggtcctctcccgccggcggccgggcgcgatcggaatccccgggctgcggcggtggcggcggctcgggtcctcacgcccacccctcccgctccgcccgctcccgcctggggaggaggctccgcgggagctgccgccctccgcccgtacgccgcccgcgggctccgctgctgcggccgccgcccgaggcggaccaggctggctgcgcagggccgccgccccgcgccgtcggctcggctcccgcccggcgcaagggcaaacgagccacac

SEQ ID NO: 26008 - DNA, 2283 bp, Homo sapiens; identical to SEQ ID NO: 22736
  chr1:108506290-108508573
  binary

SEQ ID NO: 26009 - DNA, 1344 bp, Homo sapiens; identical to SEQ ID NO: 22737
  chr1:111216710-111218054
  binary

SEQ ID NO: 26010 - DNA, 54 bp, Homo sapiens
  chr1:11139786-11139840
  hypo
cgggcctgctggattaaaaggtgcatttcgttgatctgctgccgcacaaggggc

SEQ ID NO: 26011 - DNA, 270 bp, Homo sapiens
  chr1:112084812-112085082
  hypo
cgtttagaccagcttaatgaaacagacatccttcgcgtactgacggaaacactggcggcacatattgaggccgtatttcaggatcagacctgccggttcgaacacacgcgacaagagcaaagaagttaaaagagaagtgtctgtgtggctccttccacgtgggtgaaggactgtgccagctgagaggtggtagagcaggaagctgcctgaggacctccatttatttggtgaaaaactgggctccgcccttaagagagcaagtcgagggcc

SEQ ID NO: 26012 - DNA, 142 bp, Homo sapiens; identical to SEQ ID NO: 8837
  chr1:113059805-113059947
  hypo

SEQ ID NO: 26013 - DNA, 612 bp, Homo sapiens; identical to SEQ ID NO: 8838
  chr1:115212647-115213259
  hyper

SEQ ID NO: 26014 - DNA, 1171 bp, Homo sapiens; identical to SEQ ID NO: 23421
  chr1:1168275-1169446
  hypo

SEQ ID NO: 26015 - DNA, 112 bp, Homo sapiens; identical to SEQ ID NO: 8841
  chr1:11982519-11982631
  hypo

SEQ ID NO: 26016 - DNA, 877 bp, Homo sapiens; identical to SEQ ID NO: 22738
  chr1:12123137-12124014
  binary

SEQ ID NO: 26017 - DNA, 184 bp, Homo sapiens; identical to SEQ ID NO: 23675
  chr1:14125492-14125676
  hypo

SEQ ID NO: 26018 - DNA, 791 bp, Homo sapiens; identical to SEQ ID NO: 22983
  chr1:1475540-1476331
  hyper

SEQ ID NO: 26019 - DNA, 457 bp, Homo sapiens; identical to SEQ ID NO: 23677
  chr1:153540038-153540495
  hypo

SEQ ID NO: 26020 - DNA, 71 bp, Homo sapiens; identical to SEQ ID NO: 24763
  chr1:153937085-153937156
  hypo

SEQ ID NO: 26021 - DNA, 936 bp, Homo sapiens
  chr1:154297543-154298479
  binary
cggtgctgtgtcgttcattcaaggagagttgagatacagtgaaatgagccagggcgaggagggagggtgaaggaacggagggcgggcggctccgaggagcgagagtcgggctgagggcaacctggcgccagggaaaattctggttattcaccacttctacagctctcctgccgctccctgcagaggatgctcgttttgcagagaaggcagtgttcctctattcccttcttccgaattaaaaataccccctcagagcgatctagcctcccgaattgttttttcttttaagatgcggatggacgtacgtgtgggggcatcccagcccagccacgccgaggctcggaagggctaagaccctcccactgccccgcacaaagatggctgctccctcctccccgctccttctcccctccccaaaaccccctcccgccccccggcccccgccgccggctccgtcacttccgccccgccgtggccgaaactgacacaaagtagcgggccgaggccccgggggagcggggccgcagctgggggggcgggagcccgtggggagccgagccgagcgccccccgccccagcccccggcatgggcagtacggggccgccggggcgggcgccgagcgctgagcgctgaggtgaggcgaggcgaggcgaagcgggggcgcccgggagcgcggggccaggagggcagagggagatgcggccgcagccgcggggctggaggggccggggagcgggtgtagactggggagcaccgggggccaagatttgggagctgcggccagacggggcggggatggcggccgactggagacgaggggctgtcgggttcccggggacggggcagagcgggggtctgcgtacaggatgggaggatggggtgccgaaggggcgcgtggagagcaggagagcggcgcgagtgccaaggagaagctc

SEQ ID NO: 26022 - DNA, 167 bp, Homo sapiens
  chr1:154954406-154954573
  hypo
cgtgagtcaccgcgcccggcctttttttctttttttcaattgagagaactcaagcaatcctccctcctcagactcccaaagtgctgcgcccgaccaagggttttgaagagtaaaatttggcaaggtgtggtttaccagtcctacaaagaatgaattcggcccggcgc

SEQ ID NO: 26023 - DNA, 200 bp, Homo sapiens; identical to SEQ ID NO: 8849
  chr1:155881090-155881290
  hyper

SEQ ID NO: 26024 - DNA, 252 bp, Homo sapiens
  chr1:155954184-155954436
  hypo
cgtttcctgaggtcaatggcagaggactgggatacattccctgccaacacaaaaggagatgagaagtgtctagctaaagccagacaaaggcgcccagggcttcctcccccacccgcttcacctagatcaggttcccaagctgcaggtgcatgtgacgctattcctgagggcgggcagtgggcagcagggagagagggcggggtctaagcagggcagagctgaagaatttaggagccatgggaacagagcacc

SEQ ID NO: 26025 - DNA, 575 bp, Homo sapiens; identical to SEQ ID NO: 6349
  chr1:1562211-1562786
  hypo

SEQ ID NO: 26026 - DNA, 54 bp, Homo sapiens
  chr1:156233262-156233316
  hypo
cggccatcaggacctgaagcttctcctggatgctgcgctcattccgacaggagc

SEQ ID NO: 26027 - DNA, 1256 bp, Homo sapiens; identical to SEQ ID NO: 24767
  chr1:156390054-156391310
  binary

SEQ ID NO: 26028 - DNA, 977 bp, Homo sapiens
  chr1:156814769-156815746
  hyper
cgaggctctggggttagcgagaagtcaaaccccaaacctttgcacagggtccttggggtcggtgatgggggtagaaggtgtgtgtgtggatcacctactgtggggcatggtgcgcgcaaagacgaaggtggcggcgctgcagcccacggtgtgcgccgcgtggttgcaggcatggatgtcgatccggtattccgtgaagtggcgcaggccgctcagcaccgctcgctcacggggcaccttgtcctcctggatctcgaaatccgagctgttgccccccagccggaggggcccagctgcccggcggtgccgccctgagtccctggggagagcgagtcagagccaaggcccagcccccaaagccacgcccctcagcacctgccctagtcctgctcacctttgggggctcttgttgatggacgtcaccttccaaggggatctggggaggccaggagtagccctatcaggcctgtccggatgcacccctgtgccctctgcagcgcgtaccgcctccaaaagcacccacaacccgggacccgcccacacaagcaaggccccacccacaaaccccacccctcccgcaagacccgcccctcacaggccccactcatcagaccctcccaggccgcgcgcgctcttcgcacatggggatggtgatcgcgttgtgtagaaagttttcaaacttcttctggaacgaggcctcttgcgcctccagcgggggcagaacctgaccaggaggtgggtgctggcaagggcagcagtcggactccatctcggcctcaggatccccgtcttcgccgtcgaagcgcggatcgttgttgctggtgggcagccgcaagcctggcgccgcagcgggaagacactagtaagacaggcggtctacccgcctctgatcccccccacctgccggggccctgcgcctccatctccccttccccacccgccccgcggccggcctgcgcgtcgtccctgcgcaccgc

SEQ ID NO: 26029 - DNA, 571 bp, Homo sapiens
  chr1:158150571-158151142
  binary
cgtcccacacgttgacccaaagtctcctttgaaacaggaaattgagacacgccggttgtgaaacctactgaagtgagcggcggcgccaggattcctgggaccccgacctctttgcagctcgcacagctaagggcgagggcgcccttcggcagaagcagcaaaccgccggcaagcccagcgaggagggctgccggggtctgggcttgggaattggctggcacccagcggaaagggacgtgagctgagcggcgggggagaagagtgcgcaggtcagagggcggcgcgcagcggcgctccgcgaggtccccacgccgggcgatatggggtgcctgctgtttctgctgctctgggcgctcctccaggcttggggaagcgctgaaggtgggtggaacgagggcgcttgagtgcactcgcgggagggcggagagagggagctgggtagggacggggagggcaacgcctgatggggactggtgagacccgggacgcactggcgcgatctaggtagaaaactcgctgctccctggctccggggagaggcagcgcggcacagagttcgctggcatcagcc

SEQ ID NO: 26030 - DNA, 158 bp, Homo sapiens; identical to SEQ ID NO: 6663
  chr1:161367435-161367593
  hypo

SEQ ID NO: 26031 - DNA, 334 bp, Homo sapiens; identical to SEQ ID NO: 23682
  chr1:161367769-161368103
  hypo

SEQ ID NO: 26032 - DNA, 276 bp, Homo sapiens
  chr1:161509771-161510047
  hyper
cgaagacccttcgttcctgcattctcttctgctctccttttctcaacctcttctgctggaagctgagtcctgctccagatctaggcaagtgctagcgcagaaaaaagacctgcctcgctcagggctatgagccgcgccctgaagcacggaaagctaattgtgtcactggtttcaaatcaacctcaatttttttggagacgtgagtgctgagcattttttcttcagtgaagtgacttggcagccaaaatcgccaacgcccgtctctgtggcgcaatc

SEQ ID NO: 26033 - DNA, 570 bp, Homo sapiens
  chr1:161695637-161696207
  hyper
cgccagtgttcgagggtgagccgctagtcctgcgctgccgcggctggtacgacaaggtggtctacaagcttcactactaccacgacggccaggccgtgcgctacttccactccagcgccaactacactgtgttacaggcgcgtgccagcgacagcgggcgctaccagtgctcgggcaccatgcgcatcccggtggagagcgcgcccatgttctccgctaaggtggctgtgacagtgcaaggtgggagagaccaggggccccgggagggaggcaaatgagcattgagaaattctgggacaggagctcggcgagaaaagaaggggcggaagttcaaatagctgccacttggagggtttctcttagactatggacgctgtctcctctcctttgccgtgaagcagcgcttgatccgccgcctgcttggaggctggtccctttccccgacgcacatcctggcttctcactctggctggggactcccacagagagggcagctctggcaggggcaggggccactgtgggactgggacgaaggagcgactccctagcgtcctgcaaggcaggcgcagc

SEQ ID NO: 26034 - DNA, 125 bp, Homo sapiens; identical to SEQ ID NO: 8855
  chr1:16270113-16270238
  hypo

SEQ ID NO: 26035 - DNA, 2034 bp, Homo sapiens
  chr1:166134181-166136215
  binary
cgttgccacctgctcagagtctagttctgaaaggaggcgggtgcggagttatgaaaatttggtaaatataaaagtcccggacgcgaccgcccgtagcctgcggcccctggcggttgaggagccgcggcgatccttggtcttcaccgcagcagccaagcccggcgcgcaccaaccggcgctgctgaaagttggagagctcccagctcgccgatagaattcggcggtgggcgccaggggaatcccttccagtgccgcaattaggaaagttttaaaaagtaaggaccctagacagacaagagatccatcctttcctttagcataagaaacaccccgcgccgcgccagccgaacgctgctcgcacaaggctatccgcccttcttggccgggacgcactcggtgccttccagctccccaccagaactggtccagggggcgcggaaacagagaggcaactgtgtccggcttgtggttccagacggaaacgcctccgggctccctggcccgggggacaagggttcgaaacttcaacagtcgcgagggcaaggacagaactaccaactcccgctcggatgcccgggacctgctcttccaagcccgctccggtttctccaaaggacgcgcggcacagcccatgcgcccccggcactccactccactcctctatggtttcccccaaactcttcccggggagccccacaaagcacagacggcgccctgaaactcgccaggcactcgccagccatccccacctccgcctctcgaaccctccttgtcgcgttcttcccgccccgcacctttctcctcgcgtttctgggaagtcagaagcaaaccacgagaaaatgccttcgcaaggagcctccctacacccgccctgtcactgaaacaaaagcgtagggaggagggaggtgggagaggaggcgggaggaaggtttagaaagacgatggggacagcagtaggaaggagctggggaggggggtcaaggtggcaagcagagctgggggcccagagtccgctcccgtgccgcgcggcgagtcgcttacatgcccaggtcgctgtaggtgttgaagaactccatctgattgcacgcctgaatccagcccaccacccaggtctcgtggcgggggatggggggcatgaccacgcgggcggaggctttgaagtagggggtcttgtagcgcaggacgatgggcgaggtctcctcgatgcgcgtggggcactggtcgatggtggcgcacacatcgtacaccacgatgttctcgcgccggatccgcgccttgcaggtgatgctttggatacagcccatcctgcagcccggtgccggcacggcgcggcgtggggcagcgcgggggcccgcgcgggcagccgggggcgcccgtcacgccggcatggcgacgcgccgctcgctcccggtcagactcagctcgcacctaggagcggggagccgccgggcatccttggggaagccccctcctcttgcagccgcgcggggtccccgctgccccgacgtccgcccacgcccgccccctcgctccggcagggcgcgcggagggtgcactcctaggaggcggcgggtgccctcgccggctccagcgcccgggcggagggcagggaggggagcggcgctgcgaggaatggtgcccaccccgggccggagccccccgcccctcgccggagaggaggaggcggcagcggcggcggcatggagccgggggagggcggcggtggcagcgcccggtctgtctgcctccgcggcggcagcagcagcagccgccgccgccgccgccgctgcatgaacctctgcaccacggctgccccccgcgtgcagcgcacccagcggcgggcgagcgggcggcccaagaggcaggcggaggcagcagcggcggcggcggcgaccggagctcccgccggccccgccccgtagccggaccacaccgacactcctcggcccggctgcctcggcccggggggcgccaggaggctgtggcccggggtggagagccccaacggctggagcagcacaggacgtgctccgc

SEQ ID NO: 26036 - DNA, 248 bp, Homo sapiens; identical to SEQ ID NO: 23428
  chr1:167393552-167393800
  hypo

SEQ ID NO: 26037 - DNA, 740 bp, Homo sapiens
  chr1:167599123-167599863
  binary
cgaaaagagaggaaacaaaaagaattaaaggaccactctaattcttgaagggacaggaaaaagaaagaaggcgcattaagggagggagacgttgagaaggactgagaccgtggcaaagcccagggtcctgagaaacttcgcgagacagaggggcccggtggctgcccatccccatgtttgggcacatggagtcgtggctcccgctcttgagtcctgccctgggagggacagtatctgtttagatttgcgtctaaatttaaaccctgatcgtcggcctccctccccgctccccaccctcccctcccctccccttcctccctccctccctcctcctccttcctcgttctctcgcgcagggcccccgcggccggggcagtcccgcagccgagcgcagccgggcgcgcgccaccgcccactcgccctgtgcccgccgcagcccgaaactggccacggccgggagcggaggggacagcggggatcgtgagctccggcccgggcgagcgggtgcgtctgccgcagagtcggcacctgaaggacatggaggtaaaggaccccggagggagacgcggggctgagcggtgagcggtgtatcgggcgccccttccccgggcggctgcccctgccctgagcatggagcacgcggctcatcgctgctgccaactagaagggcaaatgcctgctgttccgacgcctccttgaccaactccgaaggatcgtccctggtcccacctaggacaccc

SEQ ID NO: 26038 - DNA, 239 bp, Homo sapiens
  chr1:168150738-168150977
  hypo
cgcacccggcctcctctccatataactttctgtgacaaattgccgattggtgcaaaagtaattgcggtttttaattgcaaaaccgcaattacttttgcaccaacataatacaatatataattatattatatataaagcagtcagcttcaaactggggcccccatgtaatttacttacagattctctaagcgatggctgtatacatggagagttttaagggaataaaattccatatctac

SEQ ID NO: 26039 - DNA, 953 bp, Homo sapiens
  chr1:170630196-170631149
  hyper
cgatctgaggacgctgaccccctaaatgactgaggacgctggatctttagggggaacatcgtgtcttgggggtgccaaaagtccccagcccttacccacacctttgtcacgacgggcaattgggtatgtgtaggggaaaaacagcaacgttaaaacgcaactgtgtaaatgaggatagagagtgcgaaaggagggagaggcgaggagctgctctatttctagggaggttttggggagactgatcagctccaaggacagaccgctgggaagggaaaaacggcccacatcgaactggatgccggatggaaacctctctgcgctattagactgcgtccagtacagcagatggcacgagcacgtgcggcgctcagcttaggctctcggaggcagctgagttggaaatcccgacggaaagcacccacaagctcccactctgcgctggcccacccgcgtgcacgcccaccccccacgcgcgtccctggctcagaagcgcacagatgtttactgcttagagccggtaccgctggggagatcgagcgacttgcgcggcgcacagtgcggcgctggcagggctctgggctcccggtcgggggttcgagcggccaagggatgggggtgggggcggggagagtggggggagggcgaaagaccgccgagaggaggggggagtgggtggactaatgatgaaaaagtctcctccatcccagttccttaattaaatgcatggaaagaaccgaggcgagcacatctggtttcaatctacagccctttgatggcatcaaatgttcttttcccagatcagggctggaagttctgggctaactatggccgtttggagcccagaaaccatttacacacactcgtacccttctttctctccagtcgagcctcttgactataggacgaaaaaaaaaaaaagtctagcaatcaagggagtgcgggagtacggatgc

SEQ ID NO: 26040 - DNA, 247 bp, Homo sapiens; identical to SEQ ID NO: 23429
  chr1:171554936-171555183
  hypo

SEQ ID NO: 26041 - DNA, 161 bp, Homo sapiens; identical to SEQ ID NO: 24786
  chr1:180925259-180925420
  hypo

SEQ ID NO: 26042 - DNA, 707 bp, Homo sapiens
  chr1:181454628-181455335
  hyper
cggctgggcttctccctctctcctctctgcatcccgctcccctgctccactctcacagagtgatcccaggccatccattgcctgagttgaacgtatctagctagggtggaggtttcgggcgggggaggggtcgggtccctgcagtcacgcctgccggtgcgctgcacaaagcggacagatctcattgtgttgtgtgctgcggctgcaaatattcctctaggcagtctacggatttcccagctgggccctcctttctcactcggcttctacggttctctaaatcttcccatccaccaggtgctgccttgctgtgcccctctcttaggggcgtgtttattcagacaggcgccctcccgtttctttgcggtagacaaagccgcccaaccgccccgcgggtggcaaagtgtgccagcagccatcgttggcacctcggacagcgccgctgaaactcccggcggcccggggctccccagttacccgggttcagcacctcgggtacttctggccgggcccagccttggagctgagaaaccaggcacgtttcctacaccacgtggtcaccttttttcacgttttctcttccgctgcaaagacaccgcctttccaccaggcgttgcgagcgcgcaaggtgcggctgtgagtcttactcctccctttccttgtctttggccaaaaatggaccaaagagagtcaaacgggagactctc

SEQ ID NO: 26043 - DNA, 1358 bp, Homo sapiens
  chr1:183385886-183387244
  hyper
cgagcccagttcagcgcaccttttaagtttaaagatgaatatttttagcctaagccacctcgccctgtctttaccgctgtggtgtggttttcactaaacctccctaggagggctcgcgcagtcctcaggctccggataaacacgtgtgcccgcatccagctccggcgcgccctgcatttcagcaccgccgcctctggagagcgccttgctggcgggccaggtcagggcctcccacacgctctctcatccatcccagcccactcgcttttccctactcctcgcttctctcagtttcaagaaaaagcacccccaacttctaacttctcaattcctgcttctaaagtgacctccgcgtccctctttccgtgtctaaacgctcatgccccacgcctttgagtcctacgagcagctgcgaagccgcgtggcttcccaccggtggcgcgagacctccaataggcatctatcgatcacctttcccctaccgctgctggaccccgaaccagccagccggatgcccccgctcgctctctctgactccacgccccaaagcttctaagaaacaaacgcgcgataagtcccctccccccaacacgcacacgcatatactcacacacagtcattcgcacattcgtacacacactagacgcctcaagccttccgagtgccatcgccaccctgggcagagcctcagccaacttgggccccgatccttcggctccggctcgcgcagggcctcccgcagcctccgcccggccccctccccgtcctaggcagcgggtccctgaggccgaacctaggcggaaaagggccccctccctattcactcagcatccacctcgcgcgggcaatacacggcccacaattcccaaacactggtccctgggccgcccagaatcaccagccaaatccgaaattaatcttgaagccccagcccctgtcaccggtgtgtcgggcgcgagtgtgtttgcgaatcccaggcacatacatgatttaactccttcgagctttcggcccatcctaaacaaacagcacgttatctccagccccttcctcccctactcggcgccccaacctctgcccccatcccggtcttcgccagcctggtagccgaaccaccgcaccgccacactccagttctggtatctcgaacccctgcccagccccaaatgatactcatctctagtcccctcccatcccccacctttggccccctgcgagccgggtctggccccggcaagtgacgcctcggaaacgcagtctgcgtaccctcccctgagtccaaaatgaaggggccgacctccaccagctggatgagccggcccacccctccgaaggggcacacgccttcccgttcgatc

SEQ ID NO: 26044 - DNA, 748 bp, Homo sapiens
  chr1:18434105-18434853
  binary
cggcttagcggacgagagccgaacagcccagaaaggattaaagaaaagtctgtataatacgcggagagcgcggcgaggggagggcaaggagggcgggggggcggggagagggggagggacggagggagggcgagaggaggggggtgctcgcgccgccgggagaggcgagcgcgaggcagagagcgcgattcggctccaaactccggcgctgcagccgatcggactctgggccgcggtgggcaccgcgcgcagctagggagccgagaaccgcggcgagccccgaggacgcccagagcgcgagggtcgctgcgcctcgcagagccggagccgagtcgagccgggcgcccgggctgcctggccgcggcggcatgggggcgcccccgcggctctccgcgctgcccgccaccgcctcggccagtggccggaggcaggagcgcgtctgagcccatggcgaggggacccgccgccaccgcctccacccccgccgccccgccaccgccgccagctcccgggcaccatgcgaaccgccccgagcctccgccgctgcgtctgcctgctgctcgccgcgatcctggacctggcgcgcggtgagtgcgcgggcgcctggcgggagccgagcggtgaacgtgcgcggggacggggtgccgggggagggcgctggccggggtcgctccgagaggctcgggctacgagcaccggtcctgcccggggtctgtggagctggttggctcgatgagggagggaggac

SEQ ID NO: 26045 - DNA, 982 bp, Homo sapiens
  chr1:18969363-18970345
  hyper
cggggaaggagtccagtgagagcgcagggggaactaccagcatgggaaggggaggggcctggaggaggaagagacggggtcgagggcaaaggggaggcgggggccaaaggaaagggtgtggggaggggatgcgaagggagggggtcggctgcacttggaacttcaacctcctgggagaggaaaagcgtctgcgggtcgctacagcctcgggaggggtgaagggaagttgtgtgcgccccaagtccagctcaaaagaggccccgagggcattctagggcgccttgggcacgcgtgccaggcccccggtttggcagccgagctgagcgagggtggattgcgaggggcactggggccgccgcggagctctgcgtgtcggctgccagtgaattggccgatttccccagtctgagggtcagcgaacggacctttccatggcttggtcgccctggtcctggaggtgcgctgggcccgagctccggtggagaccaagggaggggtggggagaggcagcggagacagagagccacagaggaggagagagctagaaaattcagagtgagaaagtctgagcgcagcagaagagaatcttgcgcacagtttgaggacgctggaaaatgcggaggcgccgagggaggcgccgagcagcaggaagaaagacaaagagatgcagaatcaccgagagactggccctgggacaggcggatcaggagagccagcgggacctagagacagcccgcgggagagcacgggccgagagggcgagtgctcaaagccgggcagcggctaggggaagataggaggcgggcgagccgcggccgcccttttgatccttcgtggcttcgccttatcagaagcgctttcggtgacatccgcacaaaggcagttcatcatattacagcacgtcccggcggctcgctgcgatcctgccgcttaattagaggcgagcgagctgggccggcagggcgggagggaggccgacccc

SEQ ID NO: 26046 - DNA, 462 bp, Homo sapiens
  chr1:18971634-18972096
  hyper
cgcgcgcgcgcgtgcgtgcgcacgacagcagagtgtgtttgcggggctggggctgaatttggcagccagcccccaagctgacctctggagtggcccgcgtcggcgggctgggccttgcttcgccacgggttcgagggagaggcggagggaggagcggctgggctgcggagcctcttgccttcactgcactctttgtctgacaccacgaaaagaccgaagatcaaagaggcccccgagcgggacagaaaaaggggtggggcggcgggcgcgataagtagctcggaaaactccaccctaaacttttctgggtcctttccatgggacccagaccctacagaacctcacccaagtgggcgagtgggcggccggccgtgggttctctacagtcccaagcctccgcgagggcgacaggtggagagggacagctacggctgcgggctccaattcaggccgaggtctttc

SEQ ID NO: 26047 - DNA, 624 bp, Homo sapiens
  chr1:190447136-190447760
  hyper
cgttgggaccattatcattaggattaatagtattccatcagtgcatttcactagtatttcccttgaacattttcacttgcagcaactgagggaggcgtagtaaggaagcccaacacaaccaattcccccactccccaaataaaccactacgaccggtcacattacgatgaccaaatcatcagcgatttgcacgaggcggtggggggtggggggtgcgggcggtgatcgaagggctgaagatgcggaggaggccgagtcgctaggcgctttcgggggcgctgtgccggtgaggcttaggcaaggggacggggaaccgtggttagatgcagcagcggcggcagcagccctcccaggtcccacttctttggcgttcctgctgcctgtgactcaagacaattgacttccacctgaaccctcagctccgaacgccttgcattagaagctagagctttggaggttctgaggacggtccctggggagcaagtggtaggtttcgaggcgcccgcttcccctctgattcctgcagtaactgagagagagtgtgccagaaatggctttgctgccgaatgcattatcttgccattttcgtgtcccaatactgaacaaacgatcgcctgatcgatc

SEQ ID NO: 26048 - DNA, 858 bp, Homo sapiens
  chr1:196577278-196578136
  hyper
cggccctcccatttccgtctctttttcagcaatatttacagaacaatcctccaccacaccactcacctgtcgtcgttttgccatccttggtcccctagcagcaaatctcgaaacctgtacctgggaggcagagggggcacttcgctctccaaatcaaccatccttcctcaaagagtgggaaacatcaaacaacaaatggaggagaggagggagaaagaaagaaaatattgcggagtacagggagaggactaacaagacgctgtggccgagagagggatgggagaaggggaaggggacagggagggggagggggtccgcttggagccggaagctaaggcttgaaagggggctggctcctctttcccgagggtgtaatggggatgatgcaaacccaacccaggagcaaaagtctggctctgacaagaatcaacgctgccaaggaaccgcccccaggctcggcaccgcctctggtccccaggactagggggaggcgggtataaaaagttacttcgccgaaaaagacgcgcggtgcctagaaagaggggagaggggtgggagtgagcgccgcttgatggtgaagcactttccttaaaggcagttgccagatcctcccagagggcagcctcccggctactgttccctcgggcgggcttgcatccggcacagccctgagctggcgggaatcgggggcggtgggtttcggccccagacgcggccaacccggctctccccgcaatctccctgtggagatggagctggaggcccagccaatgagactccccctcattagcatagcacagtgacggcacgggggtgccttggggacaaccaatgggggcgagctaattagcggattgc

SEQ ID NO: 26049 - DNA, 398 bp, Homo sapiens; identical to SEQ ID NO: 22986
  chr1:200009765-200010163
  hyper

SEQ ID NO: 26050 - DNA, 768 bp, Homo sapiens
  chr1:200011552-200012320
  hyper
cggcgatactgtggcggaggactttggcgatggggtgggggctatttctctttcctttttggtaaacaaatcagaggaaacttctgcccggccgtggctttccatcccccacctgccccaccccctgcaaacgccactgattaacttaaaacaaactcggctgcgtgtttgtgcgccgttgggtagcaggaggtagagcctaggcgagagcctggtgcgcccacgggtttcgccgaagagtgcccgggggagtgcgggcagggtcccggctgcgcagacctgcgggtgcccgcccacccgcgccccgcgctcccatacttgacctgtgtggatgtggagtctccgggaaataccggatcaggcacttcctggggtctcctggtcactgcccttcctgtgcatagtttgtcatctttttagctgcgaagacgccttcgtgggtctgcgtccggagcaaggcggttacccgatcccggcagtgagccgcgccgcgcgtcgtggcggcctgatttctgtttaactttaatagggcgatctcgaggtgtttatattttgctatgatgatcggaaacatgtgaggttcattacagggcttcaatactttgaaaccaaaacccttctgtgtgtcttttactcttctggtatttttccccgtacgggcgtcctctattttctttttccttctttttattttcacagattttcaaacgtaaggagatgaaagtatccagaatagaaaagtactgtcaatacggaactgaatgtttc

SEQ ID NO: 26051 - DNA, 419 bp, Homo sapiens
  chr1:202183285-202183704
  hyper
cgcttggagggagagggccgctcagcgagggcgggacagaacctctcccgggctgggagtgcacggcgcggtgcgcccaggtaggcttgggggaagggtgccgagctccggaaagttccacaggtcctccgcagccctggggagcaggacccagaaaccgacgcgacgggtggggcgctacccgggccggccctaatccccttccattgttctgggagccgaggccgcctccccacttccggaccctttcagccatggagcgggcggcgcgggcaggggcgggcaggggcacggccaggcgggctggggtgggcaggggcgcgcgcgcgaggctggtccccgcccccggggccgccgcttagctcccgggtacgtgcgtgcagctaggggctccactgaaccacctggcgtgggttcgc

SEQ ID NO: 26052 - DNA, 274 bp, Homo sapiens
  chr1:203298189-203298463
  hypo
cgcctgacggcgaggtcagggaagagggtaaggaacacacaaagatgggatacagttcaatggggagccagtaagactggggttctggggttcagtcttgagtctgtgcctttagggagacaagtcaattaaacgtgctaggtcccagttaccctgtcttgtaaagtaggctgtatcatacctgtatccttaccgcatagatgtgtcagggaaagaaatgtcatagaagtgaaagcactttatattttctgggttaaaaaaaaggtgtggcgcc

SEQ ID NO: 26053 - DNA, 640 bp, Homo sapiens; identical to SEQ ID NO: 22988
  chr1:20512360-20513000
  hyper

SEQ ID NO: 26054 - DNA, 890 bp, Homo sapiens
  chr1:205424669-205425559
  binary
cggaggaggcactccaagcgggtttcactcagcggggacaggaggatcggctacctccggagccaaggctccctctcacactccccccaatcccaccagcggcaaaatcctttaaaaggaacaaaggcaatgggggcggggagggggcttcctctttggtcgacctagggcggcggctgacgcagcccgccgccggtcagctttcaggtgagtgcctgaacccgcatcccgcccatgccttagggacccctcttcgcccagccaagcccggggcggggaggaaagtccccctcagccgcactcgggcccccaacccggccaaggggtcgccaactcgcggcactttctgcctgtttgttttcgctcagtactcacagtttagatgctaagccggctcctcttgcactcacttcctttgtgtctctctctctctttctctctctctccccctcaccaatctctttcttccctccttgtccgattctctgctgtagcttccagtggagaaaaataattattcttcaatgggttagcacggggcgcacgcacacacgcgcgcgcacacacaccccgccgaggtacccaatcaatgcacaaatcttcggggtccctttaacctctgcggatgactccgggagttaattatgaagcctatttcggcgcggcataaatatgcattaaggtaggaaataatcgatacgctgaacttctgggaactggcatttagacggactccgtctcgccgccccccactccctccatggccccacgagccacctccacagcctcgcgccttcccggggtcgcaacgcctatcacaagcttctacccgggtttcagggggcccctgtagtggcgtgggcgccgcgccggtgccgggagaccccctc

SEQ ID NO: 26055 - DNA, 748 bp, Homo sapiens
  chr1:207627531-207628279
  hyper
cgcccacctcgtgccgggccgtccctcccgcttgtcccaccctcaccggcgccgcgtcagcccccaggccgcctgcaggtgtgcgctcagaactagcacgtgtgccggacactatttaagggcccgcctctcctggctcacagctgcttgctgctccagccttgccctcccagagctgccggacgctcgcgggtctcggaacgcatcccgccgcgggggcttcggccgtggcatgggcgccgcgggcctgctcggggttttcttggctctcgtcgcaccgggggtcctcggtgagctgggagggggagcacggaggtggggacgcgtcccgggcagggaaagtttctgtgccgcgatgcaaagcagggggccaaaagcgagacggtgggggcagtgctcgacgcgtgtccgcctcccgctagctttgagggaccactgcaataaaccgcctggtcctgattgtccccactggcccctccgggagctgggacctccagaattggaggctgcgccacagaggggcgctgtctggtcggcccggtgtggctggcggcgtgcgggtgctcgcggtctcctgccgggctccccgcccccaggattctgcaggtgctcatcgctctctggccggcggtcagcgctaccgctcgccacgggaaacctacccactgcatgaggcaccagctagccacgtgaggctgtttctgtacacccgaaccgcgctcttgcccagcaaaagcggcagaacctc

SEQ ID NO: 26056 - DNA, 829 bp, Homo sapiens; identical to SEQ ID NO: 22742
  chr1:207669273-207670102
  binary

SEQ ID NO: 26057 - DNA, 515 bp, Homo sapiens
  chr1:209381102-209381617
  hyper
cggaagcctccactccagggcttggggtgggctcgggaggccgcccgccgtcggcctgactcacagcgagctcggcgctccctcttgtggcttctgtgttccccgtcagcctcgggaagctgccggccaccacatacaaatggactccgcgtagttaagctgtcaggtctaatgtatttatttgactctctcctgttaaaatgatttctctacagcactgcggttatttacgactattgtcagtacaaggcgatgagaaggcagcagcagaggaaaacaacaacagctgaaggaaaagttctgtctgggagggctgggtggctgggtggctgggtcccgggctttcccgcggctgcagcggctgtgtgtttactttatctgcagcgggggcttcggagctcatccatccataatgcagagcccattgccctcagcccgcagttcacggccagccccagtgagcgcccttgcggaggagctgtggcccggggaggacacccccagctcttttgagc

SEQ ID NO: 26058 - DNA, 585 bp, Homo sapiens; identical to SEQ ID NO: 8871
  chr1:209957600-209958185
  hyper

SEQ ID NO: 26059 - DNA, 554 bp, Homo sapiens
  chr1:214162300-214162854
  hyper
cgctttccgccaaaccccatccttccgatctccccaggctaaaactccggggccggtccccttgtcctttctctttgtcttgtttattatagctgcctttcttcccggctcttccaatttgcttgtcatttgcatacctttcacttctccttttttaaccccagcagaggaccgggaactgggaggaggagagagggaggtgggggggcgctctgttactttcgtctcaaaacgctgtcgaagccgaattgtggaaatccggcttggaggggagcggtgatgggtcccgggaaacgcgcgcggcgcccctcttccgagctcctggacccagggctgggtcaagttgagtagggtaaggcggcaccgggaggctcggggggtcgcgtggcggtgggattgggacaccagcacgaggaggaccggaggatcgcgggccgggtaagagtagggggttcttgggcagcagaaatgggaggcgatgaatctcccagccatcgctggcagactatggtgttgggcagcttcggtctggtctcgtctgggtggtacctacc

SEQ ID NO: 26060 - DNA, 203 bp, Homo sapiens; identical to SEQ ID NO: 22991
  chr1:214387644-214387847
  hyper

SEQ ID NO: 26061 - DNA, 953 bp, Homo sapiens
  chr1:215255075-215256028
  hyper
cgctgagaaagtgggaaggaagagagtttagaaacggattgaagttccactacatcacgtgtgttgttagagaattcgcctattacgacgacagcaacgtctgatctcctggctttcttcccctccttggtgggttccgttccgtccccctgtcgctgcgagtttggctgtccctacgccggggtcttggagtttgggcggggtctggtacctgccaaatacggatcctgatggggaggaggtcggggagcgctaagttcaggctggagtctgagttctcccaccctgctgctcccacccaccgcgcttagaaacctatgtttccagcaaaggggtcttgctctgagagaacctaaccgggttttcttccattccctttgcatctctagatgtcttcgccctggctccaggtgcgttccccatccttttcggtcccggacgttctgcagattatagcgcccagctcatgtccagcaccgccggaggtgaagtggggcgagctggtgactccttaacccttcccgaaggtgtagactggaagaagccagggtcttcattacctcccctactccagggctctcaaggcgccaacggggacacttccctgtacaggtctggggggccacgagggcgaggaggacgccctagtgcaggggtccaaggactcgcgtcccagagcttggtcccacacccggtcccacaccccgaacgctggtcgggaaggagataggatgcagcgcagtgtgatgtggatgccagacagcgagagtgaggattttgcggggtggggatgggggttagtggaaggggctgagaggggaggaggcagcaggtgagccaaggggttgtgcccccaggaagagggaagagaggatctttagaagggagcatcttgcaggggcgacgcaggcaagggtagggctaggaggaggtgcggggaagcaagccctggc

SEQ ID NO: 26062 - DNA, 934 bp, Homo sapiens
  chr1:215256051-215256985
  hyper
cgaagaggagggagttccgaaaggagggaaacgagccggcaaggggcgacaggagcgagccgggaagggagagcagcggagggctgcagagctgcgggcgcccggaccgtgccacacaccccccgcggggcacggagggcattgcggggggagacacacaaagacatgcgaagaggggctgaacgaggctcgcgcacaaagacgccggggcgcacggcagctggggctgcacccaccgcccccgcgccgcgccgtgccggggccgggccagcgagcagcccggggctgagcgcgtggcggcggcggcggcggcggcggcggcgggcaggcgcgggacccgggtcgcccgcgctctccgggtgacccgggcccggcagcaggcgcgcgcgggggcggcggcgcccaagcccaacttggcctccgcctcgccctctgcccagcccgccggtgtcccctccttcccgcgatttcgtttcttctcacgctcccccccccgccccctcccgcgtccagccccgctctccccaccttgtaaaacaaagccggggaaaatgcctgcccgtgcagctcggagcgcgcagcccgtctctgaataagaagtgagtacaatggcgtgtttgtaaaaaaaagcttcaagtccgtctttttcaaaaaacattttgaatgctgcatgcctcatgcttcccagcgcctcgcgggagagacccggctatagagcaggaggtgagaccccccctccggtacccccacccctctggccgcacgctctcctgccccagccttttctgggaggactgcaaatgccccctctcagcaagcggccgtttcccatcttcgcttcgcgtccaaagtgttgggtcataatctggatttggaggcaaacccttgccagatcctctccacgccgcttctcccccctctcccgccggtgccc

SEQ ID NO: 26063 - DNA, 842 bp, Homo sapiens; identical to SEQ ID NO: 24804
  chr1:21573347-21574189
  hypo

SEQ ID NO: 26064 - DNA, 929 bp, Homo sapiens
  chr1:217307433-217308362
  hyper
cgggcgccccgggtcctgtctgaaccagactgctgctgcaatgtgagctcgggagggaactggggatgcgagctgggaacagaccgcgctccagcccccatggtttgtgacggggaacttcgggcgcacacaccctggggagtaggtctcctccaaatggcaccgacacagactggcgctggatcttctctccctgctaatctatccgcaaagaccgcctgggcacttttgggggaatgtggccaaaaggggactctaactgcgacatctacagaggaaggagaaactggtggtgcctaagaagttgatctcgatgcgcgcagtgagggcacagggccctgcgcgccagagaagcgaagccagcggtctccacttacttgttcttaattcctccctacccccgctctggcctctcattttcggcctcatggatccaagacccgaggttattttcagtcacaactttctccacaccccgtacccccaaaagtgtacctcagctcaggcgggaaagggcactttgacccgccgtgcgcgagtttccagccagccgctgcgcgcctgagagaaagagcgcctggctgcggctccgagcgcacagctcttccccgcgtgtttggcgcggctacgtttctcttgctccgggctgaggctcgaggaacctcgccagcctgctgtggtcccgtccccttgacgtttgatttctaaaaccgcatagtctgcggctctggcatttagaaaaagaggacaaggtcaaggcctgtggaccgaccgccgcgatccgcttgcacctttgctctcacagcaagcgagtcctggccgcagccgctggaaaaaggtgccgcagcgcccagtttacctggaattcagggacctgaccctgactctatttccggctagtcccagcctctccttcctctcctttcccc

SEQ ID NO: 26065 - DNA, 1011 bp, Homo sapiens
  chr1:21835395-21836406
  hyper
cgtggacagagacagagagacagggacacgtgggcagagacggataaagacagagacccagagaaagccagatatgttgacagacacagagacagacgccagagaggaaggcagacaaagagacgggtggagacaaagactcccaccaagagacgcagaaggaagatgccgacggtaaagacaaaacaggagacgcgcgcaaggagcaggtcagagcccaggctcgctgagagaggaagggctgggctggggcagcccggaggcagagagaccgagagtgcggggcgggcgagggacgccagggccgcgtcaccccagcccgttcctagctccgctcccggcagggggcgccctggcctcgtggcacgaccggcccgcggggcgcggggctcgggccgggggcggggccggggccgggctggggaggggttggggccgggggcgggggagggggcgggctgcccgggcctcactcgggccccgcggccgcctttataaggcggcgggggtggtggcccgggccgcgttgcgctcccgccactccgcgcccgctatcctggctccgtgctcccacgcgcttgtgcctggacggaccctcgccagtgctctgcgcaggtaaggattcgacgctgccccgcgccctggttccccagggccccagcggacgtggtccatccccttctgcatcctccgctggccccgtggttgaactttaatggcagggccggggtctccagcgccacgccgcccacagcagcccattcgggacgccctgcaattggtcctgcccctgtcctcccgcgcatcccaagctcccggcgcgcgctctgggcgggacaggagattggacgtggcgcccgcggagccggcgaactcaggggaccgcgctcgggaccgccctgcagtcccagggtctcctacctcccgagccgctgcctgggaccctgcgctctgtctgggcacctgcccttggtgccccgtgactgagcccctcctggtgcctccttagcc

SEQ ID NO: 26066 - DNA, 242 bp, Homo sapiens; identical to SEQ ID NO: 8877
  chr1:22191349-22191591
  hypo

SEQ ID NO: 26067 - DNA, 186 bp, Homo sapiens; identical to SEQ ID NO: 8878
  chr1:22351424-22351610
  hyper

SEQ ID NO: 26068 - DNA, 653 bp, Homo sapiens; identical to SEQ ID NO: 22745
  chr1:223936543-223937196
  binary

SEQ ID NO: 26069 - DNA, 63 bp, Homo sapiens; identical to SEQ ID NO: 8880
  chr1:224300452-224300515
  hypo

SEQ ID NO: 26070 - DNA, 64 bp, Homo sapiens; identical to SEQ ID NO: 8881
  chr1:224368640-224368704
  hypo

SEQ ID NO: 26071 - DNA, 983 bp, Homo sapiens; identical to SEQ ID NO: 24813
  chr1:226411007-226411990
  binary

SEQ ID NO: 26072 - DNA, 1058 bp, Homo sapiens
  chr1:226736488-226737546
  binary
cggcggccgcctgagctcggcgcggagcccggagcccgcagccgacagtctcctgctcccgtacgctgggcgccagctccggccgtgctgcccggctgcctgagagcgcgcccggccatggagccctcgcacaaagacgccgagacggcggcggcggcggcggcggtggcggcggcggacccccggggggcgtcctcgtccagcggggtggtggtgcaggtccgcgagaagaagggccccctgcgcgccgccatcccctacatgcccttccccgtggccgtcatctgcctcttcctcaacactttcgtgccgggactgggtaagacacggctgccgcgacccttgcgacccccaccccgccgcgggagggcgtggggggagagaagggcgcggccggagacctcctggcggggccgcgcgctccaagtgctgcgaccacgcgccaccgcccgctcctggcgtccccgggcaggtggcagaagcgcgtggagtgtgcaccccagaggggagaggctgcgctggggtctccgacccgcaggcggggccccaaagagccggaaactttgcggccaatgttggagcccgcagcggcggccggaatggctctgccggcttcggagtagggctcccgtcccggcgccccgatttctgctccttctctccgtcgtgtgcatccgtccgcgagcccacttccccgagaggaatggggtcggatcagaatgagctctagggcctcggcggcgaggatcaaactcccgggcgtcgaagtcagctgagccggggaaagaggacgagccgggctagatatacctgcagccccctttggttcgcggagtgcggaccgcgtggggacgagaactctagccagagtctcctccgcctcattcaggggtacctgcacttccgccagcaccccgcagggcgccagggggatgggggatgattttattagtttggatgcatgtggccagagatgaacccatagctccctcggatcccttctgttcctgagaagtagagagtgcgccgatgtaattctgtgcaggactccggcagcc

SEQ ID NO: 26073 - DNA, 264 bp, Homo sapiens; identical to SEQ ID NO: 8883
  chr1:228112950-228113214
  hypo

SEQ ID NO: 26074 - DNA, 772 bp, Homo sapiens
  chr1:228633491-228634263
  hyper
cgcctgtcactcgtcactctccacgcgggctggctctggaaagcccaaaggaaaaaaccctcactttcaggaagaataagcctcagcccatgtatctagggaacacgtgatgctgcaagaaaccagtgacttaacgcgtgtaaaagcaggagagcgtcagaggttctgaccccgggggaggagcagacccgcggcagcgtgcggagacttagcgggcggaatctgccaccaacgcaacctggcccagaggttttgaactgaccaactgggagacgtccccgagcttgaataagggcctcaaaagcttagcgttttatgcagagtcgcaaccacccagcgctgggaacctgagcctgcacaacccactagaaagcacccgtgaccgtcccctgcgcccgttatccctgcgccccgcacccctgtatccccggcttctctgcagctgtacaccctgcactgcggcgccccccagtcccgctgtccgctccatcgcgcaggtctccaaaacgaatcccggcttggaggggctcagcggccctgggcctgtgcgccgttgcggccgggagggtcattttcatgcctaaggacccgccccttgcacgcaacctcgggtagccagccggaaacggcgtcccgggctccaaaggacatctctttttacatttcagcaaaacagccgcacaccttctccccagatggcctctgtgcagcctgaaaatgcccgctccctccaagtccctgggcaattgctgggacgcatctcagagactgc

SEQ ID NO: 26075 - DNA, 109 bp, Homo sapiens; identical to SEQ ID NO: 8884
  chr1:229606426-229606535
  hypo

SEQ ID NO: 26076 - DNA, 943 bp, Homo sapiens
  chr1:230561648-230562591
  hyper
cgcgcgcccccgccgccctcggccatggccccggccgccgcccgcgcgcccgcccccacagtgcctcccagccgcacacgccgggccctgggcccgcgccgcggcccgccgccccccaccagcgcagcccgcagcacagcgcccgccgccccgtgcccggccggcccgccgtcttggccgcctcgggcccagcgcccggggaagcgccctcggagctcgggcgccgcaggctgcgggccgcggcgggaggcgagccgcgcgcggggctggcaggggcgacccagagcgggcgggacgcagaggctgcggccgagaccaggcgccgccgccgccaccgccgccaccaccgccaccaccgccgccgctgcgtctcctcggcgcccgccgcctccctgcccgccctctccacggcctccggcgctcggctgccgaccttcccgggcgcgagccgccagaggcgggccctgccgcccctcacctcccgcccgccggccaatggggagcccggcccggacagccgcgggggagctgggcgggcccggcgcggggaacgcccccaccctcctccgcggggcggggcggggcgcgcggccggggctggcggttagggggagggccgccggcggcagtgccggtctcctcctacagggacgcgcagcccgggaccgccacgcgcagcgcgggagggggagggcgggaccggggaacaggaggggagggggacccgggtgcttccagcggtccgggcccgcggacggagtgcgggccgatcccgctcactgtccccttccgcagtccgcgtgcagctccagggagctgtccgccccggtggttctgaaccaggcgccgccgaaacgctccaggtaggcggcgggcccgaggtcaccacacccgcggcggcggctgctgccgaggtttcctgggggtcactgccagctgcgcc

SEQ ID NO: 26077 - DNA, 923 bp, Homo sapiens
  chr1:234040687-234041610
  binary
cggggcggccggcgcggcgcagaccctcggtgggcagcgcactccagtcttcccaggctagcggctgcagggagctccggcccgcggcccctccgcctcaagtctgggagctgccggtcccactctgtctttgcctatggggattcgagagtttcccagcggcgcacccaggggcaagagcattgccgtgtgagtagcgccccgggcgtgggtgagcgagccggcgggcgggaggccggagcgccggggtagccctttgcagctgggacactgggcagtctgaggctcggggaagggcggcgcgcgcggtggagctgctcgggaagtttcagtcattctttccctcgccactcgccccaacccgcactgccccgagacgcccaggatagggcactggggacagctgcccggggaagtgggtgagtggcggcgggaagggaggagcgcgggctctgccgcggcgctcgcccccggagggccccggccgcgctcttgctctcgccctgggatctgctcctcacgaatcccctcctctctgtccatgctccccctgcccacccacctgcccgtggcgcctgcgaccgcagtggcatgaggaggtcaccggacgtcagcccccggagactgtccgacatcagcccccagctccggcagctcaagtacttggtggtggacgaggcgattaaggaggatctgaaatggtcgcgctccgtggaggatctcaccagcgggccggtggggctcacgtccatcgaggagcggatcctgcgcatcactggctactatggctaccagccctgggcagcgagctgcaaaagtaagaccccctcacgtcatgtttcccgttcactggtccatcttcttaccattgtcacagcagcctcggggagcgcacgcagtgaggcgtccagccaccccctccc

SEQ ID NO: 26078 - DNA, 586 bp, Homo sapiens
  chr1:234349884-234350470
  hyper
cggggctgggcgtcccggggaggagggcggagcaggtgagctgcggggtgggagcagggagtgcacttgtacgtgacgttggagtttgcagcaacctccaagtaggaggctgtgcgcgcgtgtgtgtggagtggctgcgcggccggggaggatgtgcgctgcagggcggccgccgcagtgagcaacgcggcaaccggagcccggcgggcagccggggaggccgggactgagaggggcgagccgctggtgctccccggcggcagagggccgcgtcggccacgggcccgggagagacgcgctccagccggccccaggatgtaggcgatcggcggcagcgctcctgcaggcggccggctcatcatgaagaagcactcggcccgggtggccccgctcagcgcctgcaacagtccggtcctgacccttaccaaagtggaaggtaatgcgcggccgcctcgccccgggggtccctgcaccctagccggggaatgctgccaccctgaggggggctgtctggctgcggggcgccggggctgggggtactgctcccccaggacgcggctccgcagtgcagagcgccgccgcctgc

SEQ ID NO: 26079 - DNA, 162 bp, Homo sapiens; identical to SEQ ID NO: 5877
  chr1:234812061-234812223
  hyper

SEQ ID NO: 26080 - DNA, 185 bp, Homo sapiens; identical to SEQ ID NO: 23433
  chr1:23693488-23693673
  hypo

SEQ ID NO: 26081 - DNA, 973 bp, Homo sapiens
  chr1:237205449-237206422
  binary
cgctgcactaaccccggctcagctggctccgcgcacttgctcggaggagccggggccgagcggaccgccggctgcaggcagcgagcgcggctgggctgcggggctgcttccccgcgtcctccgggcccgggccgccctcctcccgcacagtgcggagcagggaggccccgcgcctcgaccacccgcgcccgagcgtccgcgcctcctcctccgctctgcaggcggggaccgcccggcgctcggcacccggcagcgcggccccctccagcccccggctcccggcagcagaagcagaaggcagcgccaggggccgccgccgccgccgagctccgcggggctcgggagccggccccggcgaggaggcgcggaaccatggccgatgggggcgagggcgaagacgagatccagttcctgcgaactgtaagcgccgtgcgtcgcgtgtgctgtcaggggaagggggcgtcagggcatccactagcggggtccgggcagagtgacagcgggcagcggggactcgcgggcggggcgagggggtgccccctgaggatgcgggaggagcgggcatcaccaagtgtgtgcaggtgtgcgtgttggggcgagggaaggcaagggcgcgtgtctgtgcgcgcgtgtggaaagctagaggatggagcgcggctagccggcggcaggcgcccgggctcggacccggggcaccggggacaggagcgtcggagctgcgggaaccgggagaggaggggacggccggtccggcctgcctggtggcacggctgggacctcccgggcggccgggggcagggtgcagagcagggtggcccgtgggggcgcggggagcggcgggaactcgggctgtttctgggaataccgccgccgggaggtttcttgggctttcgggctggacccgcgcgttgtcacggagcgaagacgttggttcgcttactccgtgtagcgtgcggcgcagctgaccgggggc

SEQ ID NO: 26082 - DNA, 807 bp, Homo sapiens; identical to SEQ ID NO: 22748
  chr1:2374848-2375655
  binary

SEQ ID NO: 26083 - DNA, 1346 bp, Homo sapiens
  chr1:240254834-240256180
  binary
cgatggcacctctaaactggaattgggcttcagtttttctccgtgtaaaaatttcttcttttttatttaacttttctcttggcaggtccagcagctttgaagatcagagtgcatcttccagctgacgatctcttcggtcggggacaatgcattcgattcgcacggtggagattaaagtccccgagatagaggaaacgtttttcgcgcccaggttcagcgaggagccgcgcgggggcagagggggcggcggcggcgggcggggagccaggcccgagctgcgttctgcgcagccattggtgggcgccgcgctctgcactgagcatgttcgcgccccgccggcccctagccgcagccgcagccgcagcgacggcagccacgggagccgccgcgcattatgcaaagcggcggcagatgcgagcggggccagccgggcgcgcgtcggcctcccctcccagcggctccccccgccgccgcctgactctcccgggagactccctaggcccggacctggggccgaggagggccgggatggcctgagtgcccgcggcgcggcggcgcagcagcgggattgcaccatggggaaccaggatgggaagctgaagaggagcgcaggtgatgctttgcacgaaggcggcggtggcgccgaggatgcgctggggcccagggatgtggaagccacaaagaaggggagcgggggcaagaaggcgctaggcaagcacggcaaggggggagggggcggcggcggcggcggggagtcgggcaagaagaagagcaagtccgactccagagcctcggtgttttccaacctgcggatcaggaagaatctgtccaaggggaaaggcgccggcggctcccgcgaagatgtactggattcccaggccctgcagaccggggagctggacagcgctcactccctgctcaccaagactccagacctcagcctctcggcggacgaggccggcctgtcggataccgagtgtgcggacccttttgaggtgaccggtccagggggtcctgggcctgccgaggctagggtcgggggccggccgatcgccgaggatgtggaaactgcagcaggggcgcaggatggacaaaggaccagctcgggctcggacacggacatctatagcttccattcggctacggagcaagaggatttgctttcagacatccagcaggcgatccgcctgcagcagcagcagcagcagcagctccagctccagctccagcaacagcagcagcagcagcagctccagggcgccgaggagcctgcagcgccccccactgccgtctcccctcagcccggggccttcctgggcctggaccggttcctgctggggccgagc

SEQ ID NO: 26084 - DNA, 533 bp, Homo sapiens; identical to SEQ ID NO: 22994
  chr1:240774935-240775468
  hyper

SEQ ID NO: 26085 - DNA, 1229 bp, Homo sapiens; identical to SEQ ID NO: 22749
  chr1:241519651-241520880
  binary

SEQ ID NO: 26086 - DNA, 307 bp, Homo sapiens; identical to SEQ ID NO: 8893
  chr1:247241973-247242280
  hyper

SEQ ID NO: 26087 - DNA, 819 bp, Homo sapiens; identical to SEQ ID NO: 5879
  chr1:247267064-247267883
  hyper

SEQ ID NO: 26088 - DNA, 177 bp, Homo sapiens; identical to SEQ ID NO: 8895
  chr1:248406552-248406729
  hyper

SEQ ID NO: 26089 - DNA, 574 bp, Homo sapiens; identical to SEQ ID NO: 22996
  chr1:26551673-26552247
  hyper

SEQ ID NO: 26090 - DNA, 256 bp, Homo sapiens; identical to SEQ ID NO: 8896
  chr1:27220862-27221118
  hypo

SEQ ID NO: 26091 - DNA, 148 bp, Homo sapiens
  chr1:29463499-29463647
  hypo
cgatcctcctgtctcagtctcctgtgttgttctgactacaggaatgcaccactgtaccccactttggaaccctttttattgtgaatataatacacctccaggaaattacataaaacttgaatgttcagggccgggcgtggtggctcac

SEQ ID NO: 26092 - DNA, 744 bp, Homo sapiens
  chr1:32180009-32180753
  hyper
cgctaatatccaggtcgggactttgtgttgctgcgagcccaggtccccaccctgaagtctaggacagacccatgagcttgggtgggagagaagagcaatgcagacgtgactgtcctgccaggcgggggcgccgccgccagacgcacgaaaacaaccaaataaatcaggcccaggaactcctaatccttcccggctgtggctgctaccgcttgccccgccggcaccgccctgccaagggcgcagagtcgggccagcagagccggagtgatgccgggccatcgaggcgtcctcagcccccgaggtgggaggtggtgggggggcggggaggagaagaagaaggctctcccgacacggtgactcaggcctccttgacccgctcctgggtgggcacgttcctgcgccccggtctatttttagagccggctctgggcctgagcgcagactgaagggaaggggggcctcgtggggggcgcaggcgcctgaccagctcctccagctcggggctcaagccccaggccctccagctgtctacttggaaaagggtggaagcacatggagggtgggtgtcagggtgtgcggcgcaggcccagagaatgcgccccccttccccacaaggcctggcagttccagagaactgggcgcggcctcccaaataacgacctctgttaagtgggaccaggagcctcccgatggtcgctgtgtctgcccattggaccaggggccagggcgggcggggctttgggc

SEQ ID NO: 26093 - DNA, 1181 bp, Homo sapiens; identical to SEQ ID NO: 24838
  chr1:32237536-32238717
  hyper

SEQ ID NO: 26094 - DNA, 317 bp, Homo sapiens; identical to SEQ ID NO: 6367
  chr1:32826720-32827037
  hypo

SEQ ID NO: 26095 - DNA, 330 bp, Homo sapiens; identical to SEQ ID NO: 8900
  chr1:3344504-3344834
  hypo

SEQ ID NO: 26096 - DNA, 986 bp, Homo sapiens
  chr1:34629584-34630570
  binary
cgcgaagttccgggactctccgcacccgctagatctgccccttcccggactcggtcgtcgggagctggtcccgccgcccgcgccgccgctgccgctgccgcagccgaggcgctcggctgcagcagggcgcgggaaagggcactttggcgcggagtgagcaccgaggggaatgtggcagcgcgaagcctggcggcggcactccctcccccgcctcgggctacaacccccaccccctccttcccatccctcaacaccctccagcccccacctgcaccctcctgcaaggaatgcgcgggacccccaccgtgggcacgcgtccacctgaaccccctcctagctccgagcgccgagggaggggtagcatttgaggagggggatggcggccgcagtctgcagtcggttccagagggggcaccggtttcaattggagaaaatgggcgggggcagggaagggcagaccttgcagacgcagaaatggggagggggcgcacggttcctctccagcccccaggaccagcgtgcctggcagaatcaggagccgggggagtagggctcccggaaagtttatcgggaaaaagcctagcaccgtgggggctgggaggctggagaaactgaagccacagaccaggtgccccgcaaccccgggcggggatgtctgtctcccaggcccccacaccggccgcatccgtccaagttgcggctggggttggggcagcagtgagggtgagggtggaggtgaggacgtggctgagggtggggtgggagacggaggcagggatgagaatgagagtaggcaactgggagggtgggagattcaggcagggatagaggcggggggagggactgggaccgggtcgaggatgggtgggctcggggctcgggtggggcgcgcggcggccgctggctcctcggcgcggctggactcacccgcggcggccgagacgctgagcaacccacagcccagcaacagcagcagaggcggcggc

SEQ ID NO: 26097 - DNA, 828 bp, Homo sapiens
  chr1:35394588-35395416
  binary
cggcacacacaatcgcccacagacccacacagtgacacactcggcacagacacacagcgacacgcactcacattcacacacctgcagaggaaacttctctccggatctccccagcaccacgacttcccccacaaccagctggctactccctcccagacccgagcctccagccgggcgagggctgggccggggctggcctgtccccgcggccctgaccgggagcgtgggtccgcggtccgcgtggtcccctgcccgcccctcgggtcgggcccgcgggcagccaggccggggcaggagcgggggcagctgaggaggcccagcccctcccccctcccggggccgggagccgagcgccggagcccggggcgtgggcggcgccggggccgcagccgggccgtgcctggggggcgctgcagagggagccgcgagcgcggccccgtccccactcctccccgcggcttacctggcccggctcgggctccggccgggttacatggtgccggcggcccgggccgggggcgctgcggcgttgggcaggcgggcagggaccggggcccggcactgcggagcccccagctgaggggccgcgccggctgcggagccccaagcgagcgccgagcggcagcgggcgcgggagcgggaggcggccaagccacggaggctggatttcccggggaccgggaaggggaggcggggggatcccgcccgcgcgctccgcccccgcccccgcccccgcgcagggcagccgagcagggagagggagagggagaggaagagggagggggaccgagctccccgcccccgcgcggacccaggagggccgaggtc

SEQ ID NO: 26098 - DNA, 826 bp, Homo sapiens
  chr1:35395418-35396244
  binary
cgcccgcgggcggccgccggggtcccggaggagcgcccacctcgctgagcgacggtgctgggggcgcccagcgtaggggcaggaatgagatccccctccccggggacccaggaacaggcacccgaagtgtcacggccacgcacagccgacctgggtacagggacccaagcccggcggcgggcgggcggtcggggaccagctcagcctcacggaccgggtctcgccccccgccgaggggcagtcacgccctgaatgtcacacacagcccccaggcccgtccgcttaggagactctccttcgggctttcccggtcggccgcctgacctcagctcctggcttggggtcagggagcccccctcttcggccccagcccctgccaggatggggcgctgtgcccggcctcggagccgctggcaggcgtcccccacccacagtccgcacagccgaggcatccccagtgtggagggagagccccgctgtacctgccgcctgtgctgggcccccgcccgtgcccactgtgcccgcccgcctctgggccctgagcctgggattgtgccatggcggggtcggggtggggggaaagggactgtccgaagcacagctggaggctgcggagcccggacacaggctgcgggagccgagaggcggagagcggactgcagcagtcccctggcttgaatccgtcttggcgcccagagcgatgctgtaatgggggggagggggccacggtggggaagccgcagggggaggggctgaagacgtgggggaaggggtggctccggattccggctttccagggtaggtgtgaggaaacactgcctccggc

SEQ ID NO: 26099 - DNA, 863 bp, Homo sapiens; identical to SEQ ID NO: 22998
  chr1:36042841-36043704
  hyper

SEQ ID NO: 26100 - DNA, 695 bp, Homo sapiens; identical to SEQ ID NO: 23733
  chr1:3606857-3607552
  hypo

SEQ ID NO: 26101 - DNA, 83 bp, Homo sapiens; identical to SEQ ID NO: 8904
  chr1:43147856-43147939
  hyper

SEQ ID NO: 26102 - DNA, 148 bp, Homo sapiens; identical to SEQ ID NO: 6368
  chr1:44132677-44132825
  hypo

SEQ ID NO: 26103 - DNA, 187 bp, Homo sapiens; identical to SEQ ID NO: 23440
  chr1:44351032-44351219
  hypo

SEQ ID NO: 26104 - DNA, 542 bp, Homo sapiens
  chr1:44726788-44727330
  hypo
cgacaggcctcgacttgaaaagggtgctaaaagcaatgatgtctccaagtgtgatgggagatatttgtgtctgctttacccttggctttttgctccggttcaggtaggagcggggtgggccggctggcagatctgagagcgtggcacgccccagcgggcagggcgcacagcgcggaggaaggcgcgagtcagtctggagtgctccccatttatcaagctcacgcaggccgccagccgagcgagtctttctatcattacacctctcaaaatccgattcataccactaatcctgccttcattctcccagattaataacatctctttcaaccttcacagtgtgataaatagacaaagagagaacaaaaggagagacagaagagagagaaagagctggagcaagtccccataatagagagagctgagaaagaggagagggaaaaaaggagagcgaacgagagcaggcagcggccagagactgcagctaccttagagagccgctctgaggagagctggcggctgcgccccgctatgcgctccgctcc

SEQ ID NO: 26105 - DNA, 899 bp, Homo sapiens
  chr1:44872030-44872929
  hyper
cgtagagtagcccgacacgtgggatctcccgggattttcggggtcgggaccccctctcccagcggttctactgagcaaggcgggaggacgatcgtggagacgagggctacttgactactctacttgtagttttatttttatcttagacctgccttaaactgagtaacaatttctcttctgacttaagaacaaaacttttcagtgagcacgccggtcgctgcggtcctgcggccactgccgccgcgcttgtcagcccgggccgagcgaccttctctgcccggaacccagccccgccaccgcactccggagcctccggcctcccccaccccacccccgccccccaacccggggcttttcagggctcggcctgggcgtttcgcctttgtgctttgtaagagaaagccttttcttccagggcacaacaaacttgggcggagagcttccgtgtggccccccgggcgaggccgcccacggtggtgaggccatccgaggggatgcccggttcatcccccagtccaggagcctctccgagagctcgcggcccaggtcgaccccagctggcgagggcgcgcaggagtcccgaagtagcggggactagggcagccaggaggcagggggaaagctctcgcttcccgttaagcacaccctgcattctcgggtcgtggatgcagctccagcggagagcccgtgttccggccctgagccaggcgcgcgtcgcactgggtgggtgcatggggcccgggccataggtgtgggggcacagccctacctggccggcccgggtcgtctggggtctgcgccggcccactggcccgggagccgccgagggggagagcaccgcactcgctgcccacgacgcccagcagccacatcttgcctctcgcctccgctccggactc

SEQ ID NO: 26106 - DNA, 56 bp, Homo sapiens
  chr1:45156613-45156669
  hypo
cgcgcccagtgaagcttcttgaaaaggttgttgaggggcggggcgcggtgactcac

SEQ ID NO: 26107 - DNA, 110 bp, Homo sapiens; identical to SEQ ID NO: 24855
  chr1:46744609-46744719
  hypo

SEQ ID NO: 26108 - DNA, 1448 bp, Homo sapiens
  chr1:46955978-46957426
  hyper
cgcttcggatccgtcacggttttgcctcatttggaagatattacttcgcccctgaaaaaaaaaatacaaaaaaggtttggatattaagcggagacaaatccttctcagtttggaagggggcggcgcggggagggaggtggccggcgtaatgcggaccagatgcggcctggggagttgcggagccctgggcgggggctggggagggggcgcggccggcagcccagttcccagcctgcggagcgcagaggccgcccacgccctcccagcttcctggtccacgcgaaccccgcagtgctccgggcattgcccgggtctggctttggtctcgcccgcgcagatcccgttcaaactcagctgccaccaagtgcgccttttctctctggattgcgattctgcacgaattttccagttgagggtggttcggcgctcagccagcctctgccctcgaagacgcggccttggtctaggaaccttcaggtgggtgtttggggcgcagtggccctagttccctagaattcgttttgcctcccgcggcctcagccggcgtgggtcaggcgagctccggcgaggaacggcaggctggggccagtccccggagcggctctcggggcgcttctaggggagcagtcaaagggttgcgaggactgccagggtctttcctccctaggcttcccacactggatggccgtaactcagtcgttgacggcgacaggccaggggccctgatggactgtgcagggtcccgggcaccaccggctgaactttctggcggtcacaaattcccggaacctgcgcaggggcttcgttggcactggtggttcacttaaggagcttgagggaaacctcctcttccccaaattcgcaccaaatctggggccccgacttttcctggattccagccacactcggtttgggaggcagtgggctcctcaggcttgtgatttgcggcaggaaggagtcccggaatggaagaacggggaggacgagatccgaggccttttcaccctctttgcaagcatgcagttcaccaaagccgagaacccaccgggcctggagcgcagcctcagcgctggttccgacccgggccccagaaggtctttttcgtttgagaaaagtcctcggaggccggggcagggtgcgccgatattggtttactaagggcgcctccagtttgagggcgttggggaaagaggagggctttattgacttgatggaccttggaggaaaggggctgtctgtaccgcaagggttgtgtgctccacagccgaggaaattgtgcaagttcctacctggctgtggcgatggcagggcgaccagagtcctttcccctctctagtgctagggattctgtgcgctgcaggcgggtcagctctgtccaacccctttctagaaagttctatggtctgttagttttaggtgggtgtagtgggggttgttttcaatttttc

SEQ ID NO: 26109 - DNA, 686 bp, Homo sapiens; identical to SEQ ID NO: 23000
  chr1:47009445-47010131
  hyper

SEQ ID NO: 26110 - DNA, 81 bp, Homo sapiens
  chr1:47749528-47749609
  hypo
cgttgacactgagcaataaaacccatttcttagcttttttttttgcgggggggtggggggtggatagagtctccctctgtc

SEQ ID NO: 26111 - DNA, 955 bp, Homo sapiens; identical to SEQ ID NO: 22751
  chr1:50798667-50799622
  binary

SEQ ID NO: 26112 - DNA, 816 bp, Homo sapiens
  chr1:50882781-50883597
  hyper
cgtcgccttcgttgcctgtggttccaaatctgagatggggagcgcgcagtgtgtacatccaaatctacacctcggaaagagcagggactgggcccccagccttgcaagatccctgtgaagactggggccgacgatccaaaaactaagagccggggcaaggtgacccctccgcaagggtgcccaagctggggtacacactgtgttccctctgctcagcggtcgcgggtccttcgggagttgtgagccccgcgccactctggtgggataggtcttccgagtaccacaggaagtctcctctcccagtagccccgagggtcggagatcccacgggacctcggacaagcgtctccttagcgccgcggcctgagtgggaaatcacgaccttccccagcgccccacccccaccccctatttctcgaggagcgggacgggattcggcattgttttcttagaaaataacatttatttctagctcatatctatgcaaaggaaagcacaaagtgctgctctgcagcagcgttttccgctgcgggcccttcagtcagggcgtttggcgagtcccgggaggcgaggatgggcccgcgagcgggcggttctggctcagtcacacgtcgctctgttcctgcttcagtgcgcaccttgacggctccttagggacagaccagccgcaggcaagaggggcaggtgggcaggattcatcccgagtttccaatatatttaatctctaaacctgataagtacaatgcgcgcatagtctaatttttttccattttgtccctttttttgcttgttttgaatgtttttcacgttaatacc

SEQ ID NO: 26113 - DNA, 911 bp, Homo sapiens; identical to SEQ ID NO: 23001
  chr1:50885965-50886876
  hyper

SEQ ID NO: 26114 - DNA, 898 bp, Homo sapiens
  chr1:50893093-50893991
  hyper
cgcgcagcttggtttcctgtccccgtcctctgacaccgctaaaatggtcattttccgtggtcatagccacggatctatgccacgacctgggaccgggcataatttcggagccagaaagtactcctgtggtggcgccgggtttctcaggcgctcttccagctaagggccaggagcccagcgatttccctacagttgcttactgaagtcgcaccattctctgcgaggcaggtccgattattccacttgtcaggtgagaaaacagactcggagaggtgagatgacttgttccacattatcacaattagtgagtaacagtgcaaaaatcaaacccgggagtaccctcatccaaagccaggtctgtctgcacagtgcaggcgcagcgggcgctgcgaatcggctcctggcccaatgcacccctccacacccgttggccgggaacccgctggtgctcagcttctatccggaccccggacctaaaggccgggcagaacaaccaactgaaggtggaggagcgagggcactggtgctgattgagcggcaggagcccccgaggcggagtcccagcggctgcagccctcctttggatcaagccctcgcgtcttccgggcaggcggaagggaggcgtctgcccagtgtcgccaggcttctcacgattttctggttgggagcatctaagcctgagacaaacgcatggagagcggtgttcaccgccccactatttgtttctatttgtgagcgtctactgagtacagccactctgataaacactcggtgtgtgctctcttgcttggcacgcagtccttgggggaagatgcgatgttccacatttcagacacgaggtagccaaagttcaacaaggcgacataacttgcctggggccagagtgctgccgaacttc

SEQ ID NO: 26115 - DNA, 935 bp, Homo sapiens
  chr1:54203431-54204366
  binary
cgaatctccacaggagccgccaggcacgttggcagggccgaactcacccttcccggcggcggcggccttggatggaccgtagtctcggggactgcggggccggaggaggtcgtgggcgcgcggtggcggcgcaggcggccgggctagcaggtcccgcgggcccctgtccccgcagccgccgccactcacggtgaccctgaaggccatgtgcgcgccgaggctggcggggccgcggtcggggccgggcgcaccaggggcctccttaggcctcttgtccgagtgtgcctcagccacctcgcaatgcatggcgccggggcggggcgcacggctgggggtcgcgccgggctcctggggaggggagacagcacagccagttagaatgcggaaagcggcccccgtattgtcccggggccgagtttgagcaggtcactgccccttcggtggattgcgcgtctttaacataggttagcaccacgacacctagcccaatcagaggtcaaacccacctgattccacgcaaaagccccctcgctcaggagcggttcgcccttccctggtgtggggaggaccccaggcccccgcgccgcggcgcattaccgcgaagtcccacccaaatcctcctccaccgaaaccagcctcctttgcacgaatggtgaaactgaggcctggagcgggtaaggcgcctgttccgcgtcccccagtggaacacggagccggcggcaacgaggattcccagagcagggctcgggcgaagccccggagacggctccgggtaggtcacgggctgcgcgcttcgtcgactctccggggccgagctgcgcgcagaagctggggacccgaacccaaaggcccgagggaaacccccagagactcacccgcgaccacccgaacctggaaaacaggagtcccaagctgggcgctgaatcctgcgacgc

SEQ ID NO: 26116 - DNA, 933 bp, Homo sapiens
  chr1:54204376-54205309
  binary
cgcgcagccgggacacccacattcctatgcgcagcggaggaatcgagcccgtcgcgcgcgcaaaccggcacagtgggcaatgcccacgcggccgccgccacacacccgcacacccgccgaggcacgcccggggacggacacgccacccacactgccgctggtcagacgctcagcagcgcacaaccacacagtcccacgctctcgccacacgcgcgtgcgatgggggccgcgacagagcctccctcagcccttccatcaggggcccccaaactctccgttcccctccgcgctccctgcgccatccccaagctgccggggttcgagcgtcgccgggacgccagcctcggatctcgggccccgcacacgcccctccctcggccgcgggccgcgccccctctcacctcgcagcggcagctgcagatcgctgggcgcccggctcggcgcgcctccactggcgcagcagcccccgcagccgccgcagccgccgccgccgccgccgcgtcctgcggggcggttccccgggggacgggggcgggcccgcgtctgcccaacagccgctccagccactggctggccgcggccgcccggctcaggccaatcgcggcgcgagggcggggcatccccccctgggggtctgggcggggcccgacgcggggctgagcagagggtttgacaggcggcggccggctggatccccgcgctgcccgctgttctcagacggccgagccgggcaggacggcggggcggcgccgcggcgagagaggctgggctcgggggtcggcggagtgcgctgggcgtgaggagtgccgggctgaacccggctccctgcccgcctctccactagccccgggcaggatcctcccttctcccggtcggttttcccctccgtcagatgggaacgacgctgtctgctaacgcgaagcggacagatgc

SEQ ID NO: 26117 - DNA, 356 bp, Homo sapiens; identical to SEQ ID NO: 24863
  chr1:54940346-54940702
  hyper

SEQ ID NO: 26118 - DNA, 211 bp, Homo sapiens; identical to SEQ ID NO: 6371
  chr1:61601555-61601766
  hypo

SEQ ID NO: 26119 - DNA, 187 bp, Homo sapiens
  chr1:6166330-6166517
  hypo
cgaggacggctagatatctgtcaaaaaaagaggagagccgggcttgcctgacgttggcagcagcaggcaggccgggcccggcgggcacccgtgtgcatgctgcccggagcggacgggcacctaccggtcacatagggccccaggggcatctggttgtagttgacaatccctcccggtccagggcccc

SEQ ID NO: 26120 - DNA, 995 bp, Homo sapiens
  chr1:63788576-63789571
  binary
cgggccccaagccacctgcggccccctcccctctccctgccccccatctttcgggggcactcaaaccctcttcccctgagctccgtggcagcccccgaacaccctcatcgcccgctgccccctccccgccgccgctaccaaccccgaggagggatgaccctctccggcggcggcagcgccagcgacatgtccggccagacggtgctgacggccgaggacgtggacatcgatgtggtgggcgagggcgacgacgggctggaagagaaggacagcgacgcaggttgcgatagccccgcggggccgccggagctgcgcctggacgaggcggacgaggtgcccccggcggcaccccatcacggacagcctcagccgccccaccagcagcccctgacattgcccaaggaggcggccggagccggggccggaccggggggcgacgtgggcgcgccggaggcggacggctgcaagggcggtgttggcggcgaggagggcggcgcgagcggcggcgggcctggcgcgggcagcggttcggcgggaggcctggccccgagcaagcccaagaacagcctagtgaagccgccttactcgtacatcgcgctcatcaccatggccatcctgcagagcccgcagaagaagctgaccctgagcggcatctgcgagttcatcagcaaccgcttcccctactacagggagaagttccccgcctggcagaacagcatccgccacaacctctcactcaacgactgcttcgtcaagatcccccgcgagccgggcaacccgggcaagggcaactactggaccctggacccgcagtccgaggacatgttcgacaacggcagcttcctgcggcgccggaaacgcttcaagcgccaccagcaggagcacctgcgcgagcagacggcgctcatgatgcagagcttcggcgcttacagcctggcggcggcggccggcgccgcgggaccctacggccgcccctacggcctgcaccctgcggc

SEQ ID NO: 26121 - DNA, 768 bp, Homo sapiens; identical to SEQ ID NO: 23005
  chr1:63792564-63793332
  hyper

SEQ ID NO: 26122 - DNA, 776 bp, Homo sapiens; identical to SEQ ID NO: 23006
  chr1:63795363-63796139
  hyper

SEQ ID NO: 26123 - DNA, 293 bp, Homo sapiens; identical to SEQ ID NO: 8915
  chr1:65431047-65431340
  hyper

SEQ ID NO: 26124 - DNA, 952 bp, Homo sapiens
  chr1:70032839-70033791
  hyper
cgcaaccccagaatgaggagaggacttaagagcaggcacaaggttcgctgccatgactgatgtgaagcgacctgacgcacaagcggagacttttctccttggcagccaacaacctgcagcaggcaaggcgggcgggggaggaaaccccgaggaggcgctcccggccgcctctttgctgagatagcaggagcagcagcctgaggagccacgagctcagcgtcactgagctagtgcgggtgcaggggcgctcaggcaggcgcacaggccgggagccgcttctgccgctcaggcggccgcgctgcagaaagccgcgccgcgctgcccgagcgcccggggctggcccgcgagcgggaggagccggcagccgcgctccgccccgcgctgagattcgtgccacctgcctcgaacaccacggaggcgagaggaacccagagagctcggcctctcgtcccgttctcgaaaagcagcctatcgtgacggagccgggagaaggctagcgtttcaatcctgtgcaggactgggatttttcttctcataatttgggggagccggagtagaggtcagagggacaggcgaggatctcaaaaagagaccgagggttgtgaacatggttaccccctcctatcattggaaaatctccttgacatttttcacactttgaagcagctgcagctggtgtcgtcggaaaagggggtgggaaaaaagagagggggcggggagagcggtgagacacagccaagagccatgagcggcgcctcctcgcctgccaatcctggcacctgtgcgccgagccactgcaccgaggaggaccctactccgggtgaacaccgggcttgaagccacggacacccagccccagtgcagcgggttctcgccggcgggacctgcagccgcccactcgggccaccgccaccgcctcctgcagttgcggagcgctcagcccctccgagac

SEQ ID NO: 26125 - DNA, 895 bp, Homo sapiens
  chr1:72749783-72750678
  hyper
cgtggggccacccctactcttttttcttctttccttcttgaactcatttccagattcaagatccttaagcttttccgggccatttgcaaatcaatgcgagaaccgaggctgagtcgttagcagttacaccaatcaatcttgttcagcgaggagtttgggaagcagagcggggaagtgaaaatggaaaataagtaattaaaaaataagctccctccccctcacacactttttcccttcctccaccccatccccctttagcagtgtttgaagaagatattctttgccagatcccagttcttcttttggaggaaatgaagcaaaacctcacacgtccgtaactcgttttccataatgctagcagggtcatttggcaaagcgcaccgaagcaagactctctgcaggggtcagcatccggctgcctccgcagactgagctctttacgaggcaggcagggagtcgttttgcttggtggtagcagtgttcagagtgatttttatcgccatgcacggggatatatggggaaagggaagggttcccatcacctgtgaccacccagactggcttacagacgaatccttaactagcaacacctccctgctgaactggcactccaaggctgggcagctaacggagacatttgcgtcaggagtcactgatgttagtattctgccttaactctcaaaaccgactcggaaactgagagtgcaatagtttcaaccgcattttgaaacatcaataaaatgttagtcatttgcggatgaatgaaaacattttctttaccgtctggtatgctagggaaataattgtgaaatgacagactctcactaatatcgatgccaaatacctaagtaacactgtcatcttgttaactgcatttttctatcttgcgtggcac

SEQ ID NO: 26126 - DNA, 622 bp, Homo sapiens; identical to SEQ ID NO: 24874
  chr1:75595748-75596370
  hyper

SEQ ID NO: 26127 - DNA, 892 bp, Homo sapiens
  chr1:75600522-75601414
  hyper
cgtagtagcgttagtcagtaatcattgcactccctccccaaaagctcacttaacctgagacatggagactgtaatttgggagatgaagcctcgagcctaaggcgctctcaggtccatgtgagtcgtgcttttgttctatttgctgtggtgatcgtggcggtccgggagagtgggtcgggaggactgggcggctgtcgggtggaaccggagacctggctcgtttcgttcggctgcccgcggacacttgcctgccctgaggcacacctccctctgcggggctccagaaaggcctccgggatccctgggcttgccgggagagccattttacctaaaatgccaaaagaaaaccgcagggcacaaaacgagtcacgcggtttgtctgagtagactggggaagctgacaagctctcacctcactcgggaggcaggacctgtgggtatttggtgttttaagtttgaaatcatctgcagcctgtctgagggcctcagcaggacgcgcgcggggcgcccctgactatttctttgctccgaagccggttggggacaccaggcgaaagcggagctgttctgtttaaacgccctttgtgtgtgaggacgcggcctcagtgcagctacgctgggtcccgcgtagggagcgcaccccagaaagggagggtctcggccgacggtccgggaggcccccaggttggtatcttgcctggtgcttccagagggagggagaaggggaggcgaacagtcagaaatgcagaagtgcgagccgctcgagttcggggtacccacccgcccccgagctagagtttttggaaacgaaagcggtctaagcccagggacgctgcgttttcgtttaagaacaaaactccagcaaatacttggaaacacttgagtaacgcgc

SEQ ID NO: 26128 - DNA, 1675 bp, Homo sapiens
  chr1:77332881-77334556
  hyper
cgcaaaacagaaaatttaggttgcagattttcacatggctatcacgttcagaatccaatcaggttctccttctttactacttgatgacttctttaaagataaataagcccgcggaccaagaagtgggtacactggctcggttaactctctctccccagaaatttcactactgaaaagattattatttgggggcggggaaggggatgtagaggtctttaggacccagcaggcggcggcaggcggcagttgtgtagatcgctgagagactacgagggtccggttcagttttaattctgtctctaatctctgcaacagccgcgcttcccgggtcccgcggctcccgcgcgcgatctgccgcggccggctgctgggcaaaaatcagagccgcctccgccccattacccatcatggaaaccctccaggaaaaagtggccccggacgcgcgagcctgaggattctgcacaaaagaggtgcccaaaatgaagaccctgatggtgagtcagttgtggcaactccaccgggcaaagagggggatccccgggctcagggtccacgggacgcaccgtggagactccgagacgcctaaccctgggccgcgaggtcgcctgttacaaagggacaactttctacccgctccgcgttccctcccgattctccagctctgcctggctcggaatcccagagccaggatgggaactcggggttgcctcgcctcctagatctccggcgagaggtccgagggggtggcggagagctgcaggagcgatggaggagtgggcagattgctcaagggatgggggtgcccaaaagcaacagcctgccaaaaactaagagggacggggaggggggacctttgcagactttcttcgttttcttagatttcaaacttgcaaggatcgcaaggatccagggccccaggaaaggaggggtgtgaaggactcaaaattccagcagcttggctggggtggctgcgccagacgggcccttccccaaagtgcaaacccacccctgtcctcggccccggcgcgctccctccctcagcccggggccgtacaccacctgccctctaccgagagatctgggcggcggcggccgaaagcagcgacgcgcccggagcatcccttgcgatacgctaggggacggtgctttctctgtcccagttgcgtgcggcggggctggggcccaggccgccccaaatctcccccactagagtgaccaccgcacagttgtccccgctgggcgcgctcctccggtgtctgcgctcagccgctctcctcttctctctcccgcccgcccgcagcgccatggtctggcagtgtgtttagcgctcaccaccatgtgcaccagcttgttgctagtgtacagcagcctcggcggccagaaggagcggcccccgcagcagcagcagcagcagcagcaacagcagcagcaggcgtcggccaccggcagctcgcagccggcggcggagagcagcacccagcagcgccccggggtccccgcgggaccgcggccactggacggatacctcggagtggcggaccacaaggtgacagcatgcccgccagcccgctcgccactcagcctggggatcccgcacacctgagccttccccctttcccggggctgggaggcgctgtgagtaggtgccgttcgaaggctggaggggagtggaccc

SEQ ID NO: 26129 - DNA, 332 bp, Homo sapiens
  chr1:7764988-7765320
  binary
cgcgtgcggtcgagggcggcggccggcgggggcgcgcgcggggcgggggcggggccggggcgtggggacacgcgtgctcgcgggccgggggcgtggtgcgcggccacgcgtgtttctggcgcgagtgtgcggggccaggccgggagggcgtgcgcggaccgggcgtgtttacgcgcggcagggaggggccacgagggtgcgcgcgtttctggcgcgagtgggaagtgtggggatccggcgggcccggtgtgaggggcgtgtttctggggcgagagtggggagtgagtgtgaggagcaagggtgaggggctgcagggaggggtgcgtttggcc

SEQ ID NO: 26130 - DNA, 1498 bp, Homo sapiens
  chr1:77747314-77748812
  hyper
cggagacccggaggtaaccgtgtatgtgcgtgcgagtgtgtctgtgtgcgtacaaggtccggagaagcgaaacggtcgcaggttcctacagaccccgaccctgttcccttggccacctggtccccggtagctgcatccctgggcggcgcacgcagtgaagcgtcgcgctctggcgccggtgccgcaccgaggggtatgactacgaccccttgcgcgtgcccgcccccacctccgcacctcgcgccagcccgcgcagcgtgaccggcagccgccgcagacccggctcggggaggcgcggagcgcggcgcgctgaaccggagaggcgggccggctgctgccttgcgttcgccacgctgtcctccctcctccgctccctgcgccccacccctggcggccgcgctgcctggcagcccgggaagccgcggcacagctgctcggcgcctgcagctccggctcgggggctggaaccgaagcgggggcggcgggagcgcggagaccacagcccccggggagaggcggagggggtccctggcctgggcggagaggctgagctgagtgcgcgtgagaaagagggctgcaccgctgctcggcgcggactctgccagccccagcttcagccccggctcaggtcgccgcagcccgggagcctccccgcttgcgccccaaggcacgcgcggcacagccatgaacaccaacgatgccaaggagtatctggcccggagggaaatccctcagctttttgaggtagggctagagctggccgacgggcggtagcatccggggactgcatctcaggggttcgggttgaggcagccgcgccccgtcccaccttccccacacggggcatgtaatgaaggggcttgtagaagcgcactcgcccgctcccccgagggtagtcgcctttcccgcgggttgccagggtccttgtcagaaggctgggcttagaagcctgcatctcacagatcaagtttcagtcttccagcagggttctgaaagcagcctgctcccatcgcgcccctcggatgtggacacccagggtgggctgcagaccgcggccgggccgcactctctgggggcgagggccaggtcaggtggctgcactgtcgcccagcagcgagtaaagactcgaaactgagggagccagagccctagtcactctgctggtcgagggtcggaacccctgggggaaagaggaaatgtggacgaaggcagcccttcctggagacagcttggaagagagggatgaagatgcaaaaagcaaaacccaacctatcaagtgccacctccccggtgacaggcccccagccttgctctgcgctttcgctgaatgaactcctgagcacgtttttcccgttgcctaggaagggttgggccgcaggtttcgccagtgctcgacaacccacctggagatagcgggtcggggagggagctgcgaggggggcggactcctgttgctcagtcttcagaccgcagcacagcatcatctgcaccgggaccc

SEQ ID NO: 26131 - DNA, 970 bp, Homo sapiens; identical to SEQ ID NO: 23014
  chr1:78956569-78957539
  hyper

SEQ ID NO: 26132 - DNA, 233 bp, Homo sapiens
  chr1:85463884-85464117
  hyper
cgaccggcgcgcaaggaataggaaaagcgagttgccctgcgcccgcgtcgggatgaaaggcagggagccgggagggagcgtcagcgtggcccggcgggcgcggagggagggcgcacggccccagggctggactcgtaaccccagcgccctgctgcagccgccgttgcttttccctcttggtgcacgaaaggaagacgcctgtgggaaatcgaacagacaatcggtcgccgttc

SEQ ID NO: 26133 - DNA, 207 bp, Homo sapiens; identical to SEQ ID NO: 23750
  chr1:86860814-86861021
  hypo

SEQ ID NO: 26134 - DNA, 619 bp, Homo sapiens; identical to SEQ ID NO: 23443
  chr1:898245-898864
  hypo

SEQ ID NO: 26135 - DNA, 1493 bp, Homo sapiens
  chr1:91182654-91184147
  binary
cggaaatctccattcatcatgcctgggctgcctgaactggcactggacaaaatcgtgtctattccaaaactcgacccgctggccccttccattgtcattgctacatgaggtccacgccactccgccgttcagcagccgccccgaaccagcgaagaaagctatcgatcgtaaaacaaaataaacaccaaacaatgttgccgccgcttaaaaaaaaaaaagtggggcggggagagaaggaagggtaattgggaagtggcaatctgtggatactttcgacacaactttttttcttttatgcaaaaagtaggggtggaaagaaaaaagatgcggggggcggggggagttaaaaaaatttctgagaaaactcggaacttgcgctccaggaacgactgcgcacgtggcgcggcggtggcggcgcggaggacccaggcgaaggcgaaggcgaaggcgaaggcgcaggcgaaggcgaaggcgcaggcggcgggaagctacgccaaagccgccgccgccgccgctgccggggtctgcccacagcctggcaccgggcggcagcggtggcggcggcggacgcggcaggtgcagcgaccgcgaagcccgggcggccgcgcgccctcggaactcccccgcggctcccgaggtggcagccgcgcgccactcggcagccccgtagccgagtttctgaactttcttggaaagttgcggggcagacacggccgcagcggttgcggcaacccgaggaggaggaggaagaggaggacgacgagaaggagcaggcacagaaggaggaagcggcggagacgcgatgccgggcgactccggccgctgccgggcgcgttcgcttgtaatccggctgctggcgggcggcgccgaccccctcccgtgacgtcacggccactaccgccgctccccgcgccgcgccgcgccgggcccgcgcccccgccaccgaggccgcgcgtccggccccgcgcccctattggccgcgcccgcgcgagcgagggacgccgacgtgccagggagccaataggcgcagcgctcgtgagcccgtcagcggactcggctcggactccgctgctcttttgagaacccgcacatccctgagcccgcagccctgagccgaactccgagtccagtggtcccggtgtccacaatcacgagtgcgaggcaaagggagagggaggaagagatcagagggagaccagagaaagggaaccaaaggggagaaagaaaaaaaaaagtagcaaggattcgcccgttttcttaagtcagaagagagagagaagaggacgggaagggacttacctttaggctccagcgcggcggccctcgcagcctccccaaacgcgcgcgggaatagtccgaagacattaagagcggaggaaggagatccctgaaggaatccacagaaaagtgtgtcacttcaggcgccggagccttgcataagcgggcgggtcggctctgggctctgatttctcgcccgacgaacccaggcgctc

SEQ ID NO: 26136 - DNA, 832 bp, Homo sapiens
  chr1:91316222-91317054
  hyper
cgtgacagagactaaaaagctaagaaccgccgtgcgatggccggctttgggcaccgggggtgggggctacgctacgcgtgaagggcctcagtcctcgggctttagttcaggaagaaaatgaaagctggaggtctcgtgggcgggactggaggcggccagataggcaagaacccgcaacaggagtagggacattttttcttcaaattccaatcccatccagcgatagacaggcgcgtgggtctccctcctccacgaccaccacacaatggcacacacttttgctggaaactgaaatcgaagtctctgaggcaggctggggcccaggccggcagcggggaggggcagggtccagccacctcggcgtggccttggcgagcgctccggggtcagaggccgtcgttctcgccgcgctccacagcgcgtcacccgctgccctagcgacccccgggcgaccccggcatcgcctggctgcgccgtcccggcgggccggccctctccacgccctctcctggggtttgcggtgggcacagctccctccagactgggtctctccactagcctcctccccaactgcaacgtgggaaccagagctatccgagtcacgagccccaagtgcacacaaagcccccaacggggccacggcgcctccacgcctcgctacctccagctccaggagcgcagaacgcagcgccctgggtcaccgcgtctgccctgcggagcagccccactgaggggaagcctcgggcaggaggtgagaccccgcgcacgcaagcacccccgccccaagcagggccctctgcccgagggagactctcacctcaaataaacgggc

SEQ ID NO: 26137 - DNA, 881 bp, Homo sapiens
  chr1:913463-914344
  hypo
cgcttcccccgcaaccccgggaaccacctgccccgcacacggccgccccgggaaccgcctgcctccccctccaaccccaggaaccgcctgccccaccctaaccctgcacactcttggcctgggaactgcctgccccgcacacgcccgccccgggaaccgcctgccccagatacatccatcatgggacatgtctgtcctaagatacatttgtgctggacacgtctaccctggacacgtcttcccgaaacccctctgtcatggacacgtcttcctgagaactggttgccccgggaaccgcctgccccgggaaccgcccgccctggacgcgtctgtcggagtcacatcgcccccgtgcttcttctgcctgagatttgggtgacctggttgagttgggccagtttgggggaactgccagtggaggccccgtgttctggtctgtaaagcatctcccagaggacatcagtgtgagatgggcctcgtagagtgcctgaccctgaaggtagccaggcctgggcgggaaccctgccagaggctgggggagggacgccgccgtcacatgggcccgaacacagggcaacggcggcgcagagccaaccccctgaacaacccgggtgcttggactgggccgccccatctggactgtgtgctgggatgactgggggctggtccccaggctcccctgctaggggatgacccaagcccggcctgcccggcccctgcggccccctgcttggccaagatccctggacagtgtgtgcctgggatctggacgggctgtgggatccgagagcacgtacctgcccgtctaagagccaggtggagccgctctaccacggctggcttgaggggggtcccaggccccgccccctcggaggccgacc

SEQ ID NO: 26138 - DNA, 978 bp, Homo sapiens
  chr1:92950651-92951629
  binary
cggaggaatgggaatagacctgggagaaaagacgcctgggacgtgtcgcggggctcccgcgaagtttcccgctacccaagcgccagaatgcccctaggggtgagagtgccatccgcctccctccggggtggctcctagggctagagctttgtcgcttcctgcacttctcgtccgtacaattagacgccacaaaccccaaacccaattctttaaacagccacgaaactcggaagaaaagaaaaacggagtggcgttgtcccgagggtcccgctgcagcttggacccacgttggctgggagcgggacagatgggggcggggtaactgtcagcgccggagctgggtctgggctggcgccaccagagaccaggcggacgcggaggccgcctccccacccgggctgtaagcccacgcctctctcgcaccccggcccgctttgctggttcctgtggggagcgacagagtttggaggagataggggccccggggcctgggccgagcgcgtgggaaggcaaccccgcgctgcagctggcgcgggaggtggggcggcccctccgcgcgctcaggcctctcctcaccgtccgggcccaggaaggagggagccgagggcgctaagggggcgtcctcccgagcgcagctgccgccgcctccccaccagatgtttccttccctggtggatttggctcccctgccgaaccaccagaccgcctgctgcgcgcccccagctccagatttccagtcacactgcgcgggtcgcgccctaacccagctgccggagctctctgggctcccgcacggcggtccgcagcaggtgggaaaccgcccgcgccctctgatcgcccccgcagtgccagtgctctgcgagtccccgcggccgcccccaccagggcaggaggcgcagaacaggctcggcggacctacctgcggagtcacggcgcgggcaccgcgctaggagagttttcaaacggaatcttgctttc

SEQ ID NO: 26139 - DNA, 1351 bp, Homo sapiens
  chr1:9711649-9713000
  binary
cggcgggggaaggcgaggccctggaggacctgttgtttttcctgttgcaagtgaaaaggaaacaaagtgggaagtggagtgtgcgggttggcggcaggcggggcgccccggcgcgccccgcctccctccctcgaggctcactcgcgcccagcgcagtcgctccgagcggccgcgagcagagccgcccagccctgccagctgcgccgggacggtaagcgatcgccgctggctgcgtcaggggaggtgggaagaggaccgcggccaggggctttgggagctgcggctgcgctcgggggcgcggggctggctggcgggcgtctctccggcacacacagcccgtgcgccctggccctgggcgcctccccgagtctagcgagccgggtcctgggagccccgggggccgggctgctgggacctgggcgggggctgccctagaggcccggggccgtcccccgtgggcccgccgagaggggcgtgcgcagctccccggcgcctgcactgcgcgccttgcccgcctggcccggcagcggggtttcagctgcgctcacagcggcggtgcggcctccggtgcgccggctgaggcgcgaggatactggaagcgctcagcgcgtgcgcccgctccgagcgctgactagaggaccaggggcctcctctgtacggcagcggggtccacagagagcgcgctggtgatgtcgcccgagtgccctggcgcggagagagggctgcgcacagttcgccggcgcccgggtcctgtgcgcccttcccagcctgggcaagtggggagcggggctgcagaggggccggggtggaagttttcggggcttcctcccggctcgtggacccgcgccccgcctcccagtcccgggcctcccgcgttgctcgccgcgtttgctgcagcggcgcaggcgagatcagctccggatctgcggccgagccggggttacgccggcaaaaccgcccccagctttgcatttccggactttttaaaaaaatactcttacccgtaattcagcctgaatgaggctttttaaaaaaatcgagtttcctgtttttatttaggcttcctcatttgcacctcctcctttgaggtagagaagaggggaactgggacgacctttcgtgggcaccaggatgggggcgttgcagggcggggagacgggggtccagagaaccggggaagggccgctgggaggtcccgaaaagtgcgctgtgggtggggcgagggtgaagcaggtaggggcgagatttccggggtcgcgggtggggggcgccctggagcggccaaggtgcagggtcctcgcgtggcacccttgggatctgcccagtttgcggatggagcgcggggctgatc

SEQ ID NO: 26140 - DNA, 1674 bp, Homo sapiens; identical to SEQ ID NO: 23017
  chr10:101292301-101293975
  hyper

SEQ ID NO: 26141 - DNA, 439 bp, Homo sapiens; identical to SEQ ID NO: 22754
  chr10:102430697-102431136
  binary

SEQ ID NO: 26142 - DNA, 901 bp, Homo sapiens
  chr10:102587613-102588514
  hyper
cgcctgccgcccctccccgcctgcctggactgcgcggcgccgtgagggggattcggcccagctcgtcccggcctccaccaagccagccccgaagcccgccagccaccctgccggactcgggcgcgacctgctggcgcgcgccggatgtttctgtgacacacaatcagcgcggaccgcagcgcggcccagccccgggcacccgcctcggacgctcgggcgccaggaggcttcgctggaggggctgggccaaggagattaagaagaaaacgactttctgcaggaggaagagcccgctgccgaatccctgggaaaaattcttttcccccagtgccagccggactgccctcgccttccgggtgtgccctgtcccagaagatggaatgggggtgtgggggtccggctctaggaacgggctttgggggcgtcaggtctttccaaggttgggacccaaggatcggggggcccagcagcccgcaccgatcgagccggactctcggctcttcactgctcctcctggcctgcctagttccccagggcccggcacctcctgctgcgagacccggctctcagccctgccttgcccctacctcagcgtctcttccacctgctggcctcccagtttcccctcctgccagtccttcgcctgtcccttgacgccctgcatcctcctccctgactcgcagccccatcggacgctctcccgggaccgccgcaggaccagtttccatagactgcggactggggtcttcctccagcagttacttgatgccccctcccccgacacagactctcaatctgccggtggtaagaaccggttctgagctggcgtctgagctgctgcggggtggaagtggggggctgcccactccactcctcccatcccctcccagcctcctcctcc

SEQ ID NO: 26143 - DNA, 1261 bp, Homo sapiens; identical to SEQ ID NO: 23752
  chr10:102899421-102900682
  hyper

SEQ ID NO: 26144 - DNA, 773 bp, Homo sapiens
  chr10:102996797-102997570
  hyper
cgcggccccctaggtacactccgtaacttccgaaaccttatttcgtttgagcgaaacccggcccctttggctcttcccacttcccacaagtccctgggttcccgatcctgagggattgcattcatcccatctcacacccaccaacgctcaatccctccagttcctccccagccccttcacttccattaattaggtcgactcccttccttcgccgctccctcctgtccccactcagcctccctacacctatgcggcgagcctcgggccaagacctccgccctggctccgccagtcctgcgggggccggcatgcaccagacctcaaaagggatcttcacgggaattccgcatagccagatcccaagcctccagggaggccaccagccctcccccatcttcttcttcctcctccgtctcctttcctcttccctccgcctctacgtatttctttctattcgtttcttttcgtttggtgaggtgccacccgccacagccctgtcccctagggagaggcctggactaactttgccgtcctcgtggccttagcccggactgtgagtctcgagcggcttccgagaggcagctcgggtgtcttcgcagagacagatgaggtgggctggcgattccctagcctcagatggctctgccaccagccagctctgtgatcctgggtaagtctttcaacctctctgagtcttgacgttggtaaaaggcaggagatttagagaaggtgttgggagactaaatcttttcattcgtttgagaaagggagtc

SEQ ID NO: 26145 - DNA, 601 bp, Homo sapiens; identical to SEQ ID NO: 23018
  chr10:102998293-102998894
  hyper

SEQ ID NO: 26146 - DNA, 570 bp, Homo sapiens; identical to SEQ ID NO: 24893
  chr10:103043865-103044435
  hyper

SEQ ID NO: 26147 - DNA, 124 bp, Homo sapiens; identical to SEQ ID NO: 8931
  chr10:105403473-105403597
  hypo

SEQ ID NO: 26148 - DNA, 795 bp, Homo sapiens
  chr10:11206755-11207550
  hyper
cggcctttttctccagcgtgggcagccaatcagctgcgcagagctgcatagctggaccgctttccattctgagtagcaacaacgtactaatttgatgcacacatggatgcctcgcgcactctgcaaattcatcacccgcatcttgcattagtcatctgacggactgccaagtgtttcattttctttccatgtgactttattattaccacctctctcctctcttccaaaaacctcccaaaaagggcggtggggcggggggcggggcagggagagggagagaaatccagcagacatctagctctgcctttctttcccagccacagccagggtagggctgataaggcgctgatgcgttgatggcagccttgcagagctagacctgcacttaacttgcagctgcctcccgagcctccaagatgtccacgccctgggtgacaggcggcagggcgctgccccgtgctcccccggctctgctcgacagcagcacgcagtgagagcctcgccgccgccgaggagcaactcatggtgcctccgctttgttttagttcatcaaatttctacgactcattaggcactttgccactgctcttcttcctcctccttccgcctccccgctcccccacccccactattttttcttcctgtccctcatcgtgccgccctaactctggctcccggttccgtttttgacagtaacggcacagccaacaagatgaacggagctttggatcactcagaccaaccagacccagatgccattaagatgtttgtcggacagatcccccggtcatggtc

SEQ ID NO: 26149 - DNA, 322 bp, Homo sapiens; identical to SEQ ID NO: 23755
  chr10:116045880-116046202
  hypo

SEQ ID NO: 26150 - DNA, 976 bp, Homo sapiens
  chr10:116852626-116853602
  binary
cggcggacgggaaggacttcttttctgctgaagctgcgaagcctgtgtcgatctctcattcgtggggctcccggggcgcggggtgcgggtggggccggggtgcccgcaccggccggggggaagggcacgcgggccacacctggggggcctgtctccagtcagcgcgcgggccaggcggggtgggcgcgcgcgcgtgggggagtccccggtccctgtcaggggcggggcgagaccaaggcgccgggcctgtggggaggagtgtaggcgcgcgcgagggcggggggcggccccacgcatcgtgggctcccggcgctgccgctgcggccggctcgaggcaccggagacagaatggctgccggggcgcccttgaccgccgggcgggcgaggcggggctgaccgccgcctccttgatcgcccccttccacgttgggcgcgcccacttcggggcgcccgctcggcccccgccctcctgggcgcgcggcgctcggagccgaggcagttggcgcgggccgcgggcgaggcggggccgcgcgcggggtcccctcctcctcccggtcaggtcccctcaggagcgccgggcgcagtctgcgcctcccgctccccgcctccggccgggtccgggacgccgcggctgtggggtcggcccgctaaggacaaggtcgggagactgggtggcgatgcccgagtgcgactggaggcagccgagcggaggcgacggcggttgggatctgtccctcctgaccggggagcgggactcggacgggcgccggtgaggaggaggagaagcggcggcggagaggttttctgcggccggaattcccttcaacagcatccctgtcggcgcccgcgagcgcagtctcgccgggcaggggcgccggggaagatggagactgggggccgggcccgcactggtaccccgcagccagcggccccgggggtgtggagggctcggccggcgggcggcggcggcgggggc

SEQ ID NO: 26151 - DNA, 2768 bp, Homo sapiens
  chr10:118890928-118893696
  hyper
cggctgctgtgatctcagcaaaaagcggagctcaaggctcagggactccgccgcccacactgtgccccgccttattttggatgcctccaacttcagcttcaggcacagtacacgagtaggggcagtaaggcctggctagggccggtgccgcacgggagctgcgggtccctgcaacacccaggtgtgcaggcgctacaagaaggagccggggccgctgcccccgcagcgcggacttcgccccgtgctgcacacgctttagaagagcgtgtccggaagtgtcctccccggccctcctcgcttcccaagatttgtttgcaacgtctacacccgtcaccaccgcataagcaccagggtgaggaggtctctttgcaggaattaatatcgatttcagtctcctgctccttcaaagtttctctttgacgatggcgagacttatattctaagtcagaagaaaataaaaccttgcctattctgggcccatgattgcacaaaatccaaaatgctgccggcatgaagatgcagctggaagactctagaaacctagcattaggaggcagagactttatagtgcccagagatgagttcctaaataaactaagaattacgcagtgggaaattaaggaggagggtctgaggggccgacctcagagggacagatagagaaatcgagagcgaaacactcaaggaagtggaacaaatcgtcgtagccaggcgtctctgcctctccggaaacccgaaatccgcccaaacctcatcccaggcgctcacggtaccagtcgcagggccccgcactataggggctgccaccctctgcccccggagtccccacgccgagactcatcatttgctggctctttcttccttttcttcttttgtttttttatccttcaaatataagacaaaaatacacctcatttatcatcatagatatatatatttcactctcaccacataaatacaaaacatccaaatatccaaaacattcagaacaaagttagtagcctggattcagtgacacctacccgcgtttgaatcgttcattattttcttcactatttgcctagaaaaaaaaaaaagatgaaaaagagggggagagtttccgacgtaaataatttacaataaaattactattttaaaaaagtgtttttcgcttgcttcagatggatgaatacattctagacactgcggcacctcgcagtctgggtctgtgattttggttaaaatgtgggtggccgtggctgtagggacgatcgccgctgcgcagggtaaggaaagagggtgtcgcggttcgtgttctgatttgggaccactgaaaccctaagactggggaggcgaggggagtgtctttcctatcaatcacacaagacgctatctggactccgagactactgctagaggaggcccgaccacccagcggcgtccctgcctccccttccgcaaagaactgctcagaaatccagacgtttcctgcgtgcaggaagggttttgtgaatccgggtgtttgggagaggaggcaatgagtgctgactcgttttccaaaccgagcaattgtgcccgaagctacgcgcctgggaggccgtagggtgaagcgccggctgcgcaggctaccgccggcagccgctttgctctttcctggaggagtgggaagctgtcggccaccgccccgaacaggctcggagaaaagattctgaatttcctttgattagcggcgttaccttttcctttgcttttcccccattaaattcctgtttaaagttacaacacccagaaccttaattttgcattgccctgtggggcattctgtatcctgaattttcttacaccttccaaatttcatcattggaagtatttaaaaactggttccacttcatctggttttacgtagcaattgcttttattgctgattagatcaaatttatcagtgtcgttgcctactacgacgtttgttactgtttcctggggtcgggggtggttgtgattggagttgccctaaaggggagaaaaaccgcaggatttgcccgccaggaagctgtgttgtgtaccgactatcccgagaggtccgcaaagcggggcccaggggctcccacaagccctggtttccctggcaagaggaaggaacgtcctccttttttggtctaaagaaacctggaagcccctggggtctgcgcgcagttttcctctttcaaatattcctaggaatagtcggcagcggcagcagccgcagcagccgcggatctagagcaaacgtcctgtgctttggagttagaaccagtcttttccctcctgggctgggcacggggtcagggcatcaggttgactaactcgggcatttttcccaattctttggatcgctcctggattcagaaggaagttgggggttggggaggaatctcagaggaaaggtagtagaaaaaaaaaatagcccgaatgagatgaaattggtagcagagtctagtgggaaaggagagctgtcagaggcctggtgggagccaggagcccagcgcaggagctctgggcacctaatgcgcgtgagtccataaatatcaccacaatagatactataaatataaatacagggaaacacttaaaatcagtccagcgcttttttctcggccccttctttattgttggtccgggagtaaggctcgaaggccgaggagctcagatatcgggcggagagttcttgcaaattcccagctagcgaaccagccattgttaacggggcggaggacaggcggctggcgacggagccgagcagcgagggcacc

SEQ ID NO: 26152 - DNA, 388 bp, Homo sapiens; identical to SEQ ID NO: 24900
  chr10:122708510-122708898
  hyper

SEQ ID NO: 26153 - DNA, 852 bp, Homo sapiens
  chr10:124901907-124902759
  hyper
cgggcgctcattctgagccgcgacgccccctcaacaggctcccggcaccgcagagccagaggccacgcggtgagaaccccagtgcgtgcgctcttcttgtgtgagaggccggaggtagagttgggagaaagaggagccggcgaaaaggttagtgggatctgctttcccttctgcggccttctgggccagctagggcctgggagatggggaccagggtcggaggcttgggggcgggagggcggtgctgccggctgcttcctgcaagcggtttgaagaggcatcgcgttgtccggccgcctgcgcaagggccacgcgctgctgctttcacccccttgcgcccgcggggcacctggactccccttaagagtccccgtggggcctgagcttctgctgggcgctacgctgccctccacgattccattttgccccatttactcgggtcgtccacttcccgcggctcagtgacccagccagggggcgtcttccgctagcggtccaaatgtagactccgcaaagaggctaagaagacctgtctacccgggtgcgcgcgatggggtcagggtgtaagaaccaggagcctcatagaaacctctgcttggggtccaaagcccagccgggcactcccagaggacaacatccgcccccgcatgtacacgtggccccgcaggacccagccgcagggctcccacgctcggctccccgccctctcgctgtcccccaccccctaacccgggctttgaggtgtgagcgatcccttgcctctgggcctaggactctggaagtgtgcacggccgttgtgcagggtggatggtgttgaccttttgacctgaaaacagttgggggctggggagc

SEQ ID NO: 26154 - DNA, 1457 bp, Homo sapiens; identical to SEQ ID NO: 23762
  chr10:134732799-134734256
  hypo

SEQ ID NO: 26155 - DNA, 76 bp, Homo sapiens; identical to SEQ ID NO: 8938
  chr10:14646259-14646335
  binary

SEQ ID NO: 26156 - DNA, 87 bp, Homo sapiens; identical to SEQ ID NO: 8939
  chr10:14646653-14646740
  binary

SEQ ID NO: 26157 - DNA, 979 bp, Homo sapiens
  chr10:16562056-16563035
  hyper
cgcccattccggactcccccaggcctctccactccccagaaagcccgtaagctaccctctgttgcggaggatcccacggccaggggtcgcttcccgcgccgggactccccagcgcacgagctgtccccgggacccagctcccggcttcccgcccctcgagggtcgcgctcgcaggggcgcgcaccgatcgagggtcccagactccggaactgccctctccaggccgcggggcgccctcctgcgcgcacgacccccgcctctccagggtgggacggcgtccccccttgccgtcgctccagggagcccggccgccgcgcccttcctccgcgggctcccacccccatttccggggtctcctccctctcgcccgcaccttcccgcgctccctccccgccctccccgccgcccgcccgcgctcacctggttgtttttgcagagatcagcccacatgctggtgccgtcccctccgcgcatcaggacgtggtaggtgaagaagtagatgcccgggatggagcaggtgaacttgccggtggtggggtcgtagtggtttccgaggttggtgaccacgtcgtcgaacttgagcacctcgtagccttcatgctgccgcttgaggccggcgtagaaggcgatcttgggcaccgtgctgtaggtggcggcgctgatggccccggccgcgttcaggccgggcgccccgggcgggcccggcaggccttggcggcccggctcgcccttctcgcccgggggccccatggggccgggtggcccgggctctccggggggcccgcgcggacccgccttcccgggcctgccggcctcgcctttggggccctggatgaaggtgggcagggactgcatgaggccgcggtcgggcgtggcagcggtgctgggcgccttggtgcccccgtaggggtcgcagaccatgcggcaggtgcccagcatctcgtagtgcgccgacgtgccggccgagctcaccagcacc

SEQ ID NO: 26158 - DNA, 1740 bp, Homo sapiens
  chr10:17270086-17271826
  binary
cggacgtcgagtttcctctttcacccagaattttcagatcttgtttaaaaagttgggtgtggtttcatggggggagggggaagagcgagaggagaccagagggacgggggcggggactctgcaagaaaaaccttcccggtgcaatcgtgatctgggaggcccacgtatggcgcctctccaaaggctgcagaagtttcttgctaacaaaaagtccgcacattcgagcaaagacaggctttagcgagttattaaaaacttaggggcgctcttgtcccccacagggcccgaccgcacacagcaaggcgatggcccagctgtaagttggtagcactgagaactagcagcgcgcgcggagcccgctgagacttgaatcaatctggtctaacggtttcccctaaaccgctaggagccctcaatcggcgggacagcagggcgcggtgagtcaccgccggtgactaagcgaccccacccctctccctcgggctttcctctgccaccgccgtctcgcaactcccgccgtccgaagctggactgagcccgttaggtccctcgacagaacctcccctccccccaacatctctccgccaaggcaagtcgatggacagaggcgcgggccggagcagcccccctttccaagcgggcggcgcgcgaggctgcggcgaggcctgagccctgcgttcctgcgctgtgcgcgcccccaccccgcgttccaatctcaggcgctctttgtttctttctccgcgacttcagatctgagggattccttactctttcctcttcccgctcctttgcccgcgggtctccccgcctgaccgcagccccgagaccgccgcgcacctcctcccacgcccctttggcgtggtgccaccggacccctctggttcagtcccaggcggacccccccctcaccgcgcgaccccgcctttttcagcaccccagggtgagcccagctcagactatcatccggaaagcccccaaaagtcccagcccagcgctgaagtaacgggaccatgcccagtcccaggccccggagcaggaaggctcgagggcgcccccaccccacccgcccaccctccccgcttctcgctaggtccctattggctggcgcgctccgcggctgggatggcagtgggaggggaccctctttcctaacggggttataaaaacagcgccctcggcggggtccagtcctctgccactctcgctccgaggtccccgcgccagagacgcagccgcgctcccaccacccacacccaccgcgccctcgttcgcctcttctccgggagccagtccgcgccaccgccgccgcccaggccatcgccaccctccgcagccatgtccaccaggtccgtgtcctcgtcctcctaccgcaggatgttcggcggcccgggcaccgcgagccggccgagctccagccggagctacgtgactacgtccacccgcacctacagcctgggcagcgcgctgcgccccagcaccagccgcagcctctacgcctcgtccccgggcggcgtgtatgccacgcgctcctctgccgtgcgcctgcggagcagcgtgcccggggtgcggctcctgcaggactcggtggacttctcgctggccgacgccatcaacaccgagttcaagaacacccgcaccaacgagaaggtggagctgcaggagctgaatgaccgcttcgccaactacatcgacaaggtgcgcttcctggagcagcagaataagatcctgctggccgagctc

SEQ ID NO: 26159 - DNA, 1569 bp, Homo sapiens
  chr10:1778583-1780152
  hyper
cgctgtcagccggctgcttttcctgctttcctggtttgcggtttttttctaccactaacaaaatatgatgcttctttctgttttcctgtattcatttctgcttatttctccaaggacgagccctgtgttctctttacgacccaatgtttacaaatcgacgggcaccacattgagtaaaaactgccagccaatttggagaggcgatcgcagggcttcgcctatcccttcctccgggacagtttggatgggagtagctggcgcgagggctcgttcccccgtttttgggtaattcctttggcactgggagacgagatggcctccggagggtggaaggcagtgccagcccggccggccactggggactgcggggcccggagacgcgcggggtccccggggagctcctcgccgccctcgccccacttcgtccgggtccctcaaacatgtcgcagcgtggctgctcactgtcccctctgggcaagaggaggccccagacatttccacgggatctgaactcccgagcgccctgcacggagcagccatcccgccagcaccccaaagtgaagctgctcacaacggacaagcccggagaccccatgagaggccggggtggagaagccgggggtgaaggggggcaggggccggcgcgccacgcggtccttacctttccgcttggacctccgcctcctcctcctcttggacttgcatttgagttgactgctcagccctccagaccctctgccgctccccaggaccgaggccatggccgagacccaggcgcggagcccagagccgcctccctcctgcacctgcacctgcctccttcccggcagccgccgccgccgctgctgcgaagcttgaggttgcaaacccgggagcggctcacttttcaggactgagcaggaaagcgcgctccgtctctctgtctctcgaattgttctctatgacttgctcccactgggctgggggcctcggctgggcgcctggagcgagctgctccctggtcagggagggcggggaagggcgcgcggcgtcctgagtgctccgagcttcccgcgggctctgcctcctgctctgggctcccagcgcagggaggctacttttgcgcctctgctagttgtttggcaccagccactttgaagccaatcacgcagggagcttgtctatttgctgcagcagcgtctaattagatccaatcacaactgctttctggctctgacatcagcagcagcaccagccgcaccgccgcctggccgcttgcaaactcagctcccgtttggacggtgaagctcccaggaccggcggctggagggaggctgctcccggggaacaaggacgcggcgcgggtgcgtctgggagagaccgggggagcctccaggagggaccctgcccgggaggacgaggcctcctgccgcagcctcgcggacagctcagctcgccctgctcagaaagacacagggacgggtttttccaaccaacagtttttaactagtcaattcattaccatgctccttgtgtcaagggggggaaatacctctttcagaaatgcagagaccgcacttcctcagaaac

SEQ ID NO: 26160 - DNA, 970 bp, Homo sapiens
  chr10:22540645-22541615
  binary
cgccacagcaacgaatcactgcaaaagcaaggttctaacttaaaacaaaaagagaaagtattcgcttctgcggagaacccgagcctcctcctgggcgggcgacgctcggctgatgggaccgggccgcgcaagcctcggatgcagccgggtggggggcaccaggcgctaggcgaaggagcgcaggaccaaaggagatgcttggctcctaagataacacctttaaaaagaagaagaagaaagaaagaaaaacaaacaaacaaactcgatacttagcctcacgatccttgccaccccctccctgctccgccacccacacacaaaataaagtgagccgggcgggggagtgcgcgccctgaaagggaacaagaagcaaggcgcctgtgacacaaaatggagaaagaggaaccgggagtggaaaggaagaaggaaaaccgagtaaaggaggttattcataagaacaggaaaggggccgaggggtagagaacacccgaaggaaagcgcaggaggccctcgtgagagggcaagggggaaaagatcgacgaagtaagagcgaaaagaggaaaggaaagaaagactttctagatgcggagtctccattttcagcagcgccatattcgcttttcctctcgccgcttttggctgggttttgtgtgcggcggtggacaggcgccagcacatttctgcagcttcagcagctctgctcagacacctggggagggccgcagggcccgggcgggggacgcgcgctcttggcccaggcccgggcgcggccccctccccggcctggcggttcctgcgcagcgccagccccgcgctcctctaggctgcaaagggggcctccgactcgggcccggcccggaggggacacctcactcggggccccgcggcagcccccaggggacgcgggccctctagtttcgcccacggtgtggctgggcatgcgtgccaaggggatgcgtaaccgagaacc

SEQ ID NO: 26161 - DNA, 56 bp, Homo sapiens; identical to SEQ ID NO: 8943
  chr10:27144571-27144627
  hypo

SEQ ID NO: 26162 - DNA, 137 bp, Homo sapiens; identical to SEQ ID NO: 7770
  chr10:30736731-30736868
  hypo

SEQ ID NO: 26163 - DNA, 1310 bp, Homo sapiens
  chr10:31607954-31609264
  binary
cggttgccgcaaaccgcccggtccctagcaacaaggttccggccgtagagcgagagcctctaggtgtaaggaaggtgatgtcgtaaagccgggagtgtcgtaaaccaggtgcggtggggaggggggaggggtggaggcggaggggtgggggggaagggggagggagggggaggaggtgactcgagcatttagacacaagcgagaggatcatggcggatggccccaggtgtaagcgcagaaagcaggcgaacccgcggcgcaataacggtgagtggcggaggggaccggggagcggcggagtcagggggagctgggcagccggggcgcccccgggggtgaggggggcgagccgggctgggggcagccggggcagggacggcaaagtggagtgggaaagtagaaagtagtgctctctgcccccctccgctgccgccgctgccggagccgcgccgcggccgctcgctctccctgaaccgttatgtctcttacctggtctctctccgcctagcggctcccgccgcccctgccgcctccctggaccgttagccggcgccgacgccgccgcatccccggcgcagggcgggcggccgggacgcactggccacttttctggtcccgggtggagcggctgttgcttctttccgcacttttccccactcttgtgcccttcggcgcctccctctccccctcctcctggccccctcagcgcgattctccctcagcgcccaggcccccgggagccgcggaacaaacttgtgcccggcgctgaccgtgcaaagtggcttccgcgcgccgcggccccggccggcgccgtcgctgtcgctcgggccccgcgactcgggccgggctgtgggcgcgcggcaggcgggctgcggcggcggcgggacggggcggccgcgggttgcgtggggtttgtgcgcgcgtgtgcgcgggcgccggctgtgcgcgccgcgggcggacagggttcggccggcggcggtaaagttgggacccgcgggccgggcgcgctcgcgtaacggggattagaggcgcgggggcgcgggtccctaagcgcccctcctccctggcgcctcccgctgcccggcccagagccccggcctggggactccgcggcgagccccgcgagtggggtccacgtttggcggggcgcggcggggcggcgcggggaacaaggcaggaaaggtacccacttaacgccgccgggagccgcgcggatgggggcgagctgggcggcgggtgtgtttgcggagttgttacctgggcttagagaccgggaagcaccacagacagatccccctcccggggcagac

SEQ ID NO: 26164 - DNA, 425 bp, Homo sapiens; identical to SEQ ID NO: 23024
  chr10:44806356-44806781
  hyper

SEQ ID NO: 26165 - DNA, 290 bp, Homo sapiens; identical to SEQ ID NO: 23025
  chr10:44882100-44882390
  hyper

SEQ ID NO: 26166 - DNA, 843 bp, Homo sapiens
  chr10:50606013-50606856
  binary
cgccagtctcagttccccatccctgacatcgaccgaggcaagttcctattaaggcccagagatgaccccgggacgagacaggctcatccggcgcggatgagacaggctcagacctgcgcggtctgaggacggcgcgctcgccgagcaacccggcaggtcagaaccctggacagcggcgccggtttccgcacccccacccacccccggctgctgcggagaaagaagccgtaccgggggcccagccggggcccctcgctgctcaggggtgggatccgcccggccggaccccaggcgtccggggaccgaccccaatcctctcccagtccaaacctgcgaaagttactccggacatgcgctcagcgctggcaacagagacaaaactcccttctccgcagtaccacgcgccgctcctacccggccgctgcagccggaaaccatctcgcggcccccgaggagagtccggccgcctcactgactagataaccagccgagctccctcaacacacccacctcgcgggggctctaagccggcttgggaccctcggcctcgcctcgcccggcgctcctctcccggagccgctaggctgggctccttcccgttggcaaaacagcgagtaaacaaacaaccaaacaaccttagaaacgaaaggctgcaccaaactttgatgacgccagccccctttttttccgaatgtctcgacacccgggagaaggtgactaataggtgttcgctacggtccccctccccctaaaaaagggcgttagtaacgaaaaggttatttttccttaatttttgtgcggtaaaatgtattttccaattaaccaaattcgccgatctgtctc

SEQ ID NO: 26167 - DNA, 200 bp, Homo sapiens
  chr10:50821487-50821687
  hyper
cgttcgcgcaacactccatgtcccgaagaccgtagtctgatgatcgaggcagagtcttcccatcatagcgtgaagaggcggctggtcagggtcgcctgtgtgttagctgcgcctgtgagggtctgctctgctgttgtgcgcatgtctgtcctcgatctgcgagtcgggctgtgtgtgcctgggcggagtctgcctttgtc

SEQ ID NO: 26168 - DNA, 180 bp, Homo sapiens; identical to SEQ ID NO: 8949
  chr10:52180055-52180235
  hypo

SEQ ID NO: 26169 - DNA, 386 bp, Homo sapiens; identical to SEQ ID NO: 23447
  chr10:524407-524793
  hypo

SEQ ID NO: 26170 - DNA, 1455 bp, Homo sapiens; identical to SEQ ID NO: 23450
  chr10:5540271-5541726
  hypo

SEQ ID NO: 26171 - DNA, 80 bp, Homo sapiens
  chr10:60272053-60272133
  hyper
cgagccacgtccatggcgatgcctgcgaaagacgggcatgatttcttctccaagccttctttttcctcttcctcacgttc

SEQ ID NO: 26172 - DNA, 902 bp, Homo sapiens
  chr10:63212437-63213339
  hyper
cgagccttcccagtgttgcactgggaccctagggtggccctggggtgcccaagagatgcgcaagcatctcgcgccttccaagcgatcagcgaggaaaaacggggtccaaattcgagtagaatctgcgggttgcgggaagatggcctgcgagtgcggtgggggacaataccctagggccccgtgcgccctcgctttcccggggcactctcaccatttgtagcctctgccgcgcttgaacttgagggtgagcgcagtctccaggaagagcaagaggttgagcagcgcaagcagccagtaccgcggctccttcttcacctcggtcactcgccagaccccgaccagcgagtgcagcaggaacagcaaccgagtggccagggcgttaaggaagaccagtccctccatgctggccggagcactctgcctacgtccccttgcctgcgcccccaggaccctgccgggcgtgcccggagcccaccggtgagcaggaatatgacaagcactgagacctgctgctgcttgtggtcccttctcaccctcagcgcccgatgccggtagaactggtgcgcggctcgcccctcccccaaacttcctgagaactcttcaaagaggggtgagtccaaacccagcttttccagactgctgggttttccagggagtctggggctgcgctgccctgtctccagggcgttattctccagcgctgcccatccccctcccaatctcggggccagtctccatccctgtccggtatccccgcccccgggcctctgtgaggttcccaagaacttccccatcacgagggggcggaaagaggagggaggaggactgaaggtcaaggtgcagcacagccagaaaggcggaggaggagagcatctctggcagctccgccttacttttccacc

SEQ ID NO: 26173 - DNA, 619 bp, Homo sapiens
  chr10:64133789-64134408
  hyper
cgccgcgactgcgaggctgacacgcgtctttccttccctcccccggggaatgatcccagcatctctcgcagtgatgtcagtgtaatcctgagtcggatcgggctcccggctgggtggcgggggggcagatgatgctcccgccagctgggcagagcaagggtgttccccgcggaggtggcagccctgggccgcggcgttccggaacccccgcacccacggcgcggtgccccacggtgcccgcgagcgccgcccccgctggctagccgcgcctcgctccgccctggacgccgccggtcccggcgcggaggtgcggcggggagtgggagccggcccggctcagtctgatttacggctctgctgaaaaccgcttcgctcccgcagcatcagcaccggaggcggcggctgcagcagcagcagcaacaagtcgggtaagaggcggccgccggccatctgcgcccgcggctcggcggaggggacctgccggggtggccggggctggggagggggtccccgagcccgcagcatggcggggagttgggagagccggcttcccggcccccaccagcaggaactcatgtgcacacgaatccactctggcacccgtgggctggcacgcagc

SEQ ID NO: 26174 - DNA, 42 bp, Homo sapiens; identical to SEQ ID NO: 5905
  chr10:68685841-68685883
  hyper

SEQ ID NO: 26175 - DNA, 883 bp, Homo sapiens; identical to SEQ ID NO: 23028
  chr10:70320036-70320919
  hyper

SEQ ID NO: 26176 - DNA, 891 bp, Homo sapiens
  chr10:71332340-71333231
  binary
cgccggcggctccagcgcgtacaagctgtggtccgctatgcgcagcgtttgagtcagcgcccagatgtagttgtgggcgaagcgcagcgtctcgatcttggtgagcttcgcgtcgtctgggaaggtgggcaggacaccgcgcagggcgtccagtgccgagttgaggttgtgcattcgattgcgctcgcggtcgttggccttctttcgccgactccgtcgctgcttgctcagtgccaactcgctcttaggccggctgcgtcccccgcgccgtgcccggagcttcctcggggcccctcggcagcctccctcttccgcctctgcgcagttcccccgtgtgcgagtggggctgggcggggcggacgtggggcaggtcacttcgtcttccgaggctctggggaaggaccgctccgtctcacgggtcacttggacagtgggcgcacccgagggttgaggcgtcatcctacggcggggtcagagggaagggtaagtttgagtccgtcactgggcgcagtccgcgattccgaggctaggtgggaaaaaacaaaaacagccatcctcccagcccccgctgggtcagaggatccctctttcccctgcccgtccctcggaggcctccaaatattacctttctaccggcgcaaaagaatagagagcgatgagcagcgagggccgtggggagctcagcgggcttctggtcgccaagttcagctgagctgcaggcgcccccgcctgggagttgccccagccccaaaggagaaaagaagagagaatggggtccgaggcctctgtcacgctctctctcgaggcgcggcggtgagaccgcagggatttcctgagcagcaagtcgtgtgccccttggcacgctttatctgcttcgcccgggccaggagc

SEQ ID NO: 26177 - DNA, 1497 bp, Homo sapiens; identical to SEQ ID NO: 22762
  chr10:7450674-7452171
  binary

SEQ ID NO: 26178 - DNA, 946 bp, Homo sapiens
  chr10:77160489-77161435
  hyper
cgggcggctggcgcctcagaggctgtgtgcacacactggcttctgcggatacgaaggacggcgactttggaaccgtatttcagacctccgcctgccttcggtgccgagtgaaggggcctgggtcggggtaggggctttcatatcgaaaggagaaacaagtattggcagccttgctccctagcatgcacgccccattccacttcctcccccttttccgccctagttttgaggtacggaagcagtagcctcttcccccattcgggagctgaatcactccgacccccccacctccgcccagatcccgagaaaaagaaagccctagggtggcagccagggtagtggtcccagtgcgatccagagagagggtccttacctcgatggggctgaccggcgtggaaggcaggggctgcaggtactcggggtgcaaaatgtggccagttcgtgccgtcagcatcttcagcaccttgattggcaggcggttggcctggcgcagggggtcagaggggggcacggcgtgcacaaaaggcttggtgctgccggccggggacgagcctgggccggggccggagctatttccagagagcgcgctggtccaggcagggtctgcaccgccgcctccgcctccgccgccgccgccgccgctgtgcttactgcttcttagggcagaaagcgagggcgctgtgctcatgacccacccgcgcgcatgggagcagcgggggggagggctccgggaggcgcggggcgggctcggggctgcgcgctcgccccgggagcaggagcagcgggaggaggaggagctggcgcggcggccacgggcgcccagcgcgccttctcggcgcctggagccagacgcgagtaatcctgggtggcccgcagcggagccgtggccgggctagaggagccggctggactgcgggagtgccgggcggctcgcggtgtccgcctc

SEQ ID NO: 26179 - DNA, 824 bp, Homo sapiens
  chr10:8085011-8085835
  hyper
cgagaaaagcaagtgcccgcgtcagcagaaaaggaacgaggagcgaggccgccagatcgacgggaaacaggcggagagagggtcgtcggcgctcagggccggggtggcccgggggacggaggagagataggagagcccgccctgggtctcagagggtgctgttgcgtgctgcaggttctaagggaaaagggctttcccctggcaggagagccaaaggcggggaagggagaaggaggggcgggagaatgaggaccagaagccggagaagggaggctggaggaagacgcaagtggcccctccgacctagtggacggcgagttgaggtacagttaatgcccgggccaaggagacaactgtcgccgccttggtgacggatgccccctccctgggcccccgccctagtccccatggggggagcagcgcgccagaagggagtaggcgttgttgggaccctctgggggtctggaatgccagcgacacttctcttcccagccgcaggggccttcctgggacaggccaggtagaccccacccccccgaccccgttcgtcagggcaacaggttgggtgcaagctgtcaagagatggccttctccctgggtcctcaaaacgcgccaagaacgtggctctgccacttggtggcggaaggcgggaggcacagggcaggaaggtggaggaggggctgcattcgtgacgacgggggagcagagagggaaggacttagggactccccagagggcagacagacctggccagcttggcaaatcataaatccctctccctggaccctcggcctaaacctacccccagggtgtgcagcggaggc

SEQ ID NO: 26180 - DNA, 571 bp, Homo sapiens; identical to SEQ ID NO: 23452
  chr10:851108-851679
  hypo

SEQ ID NO: 26181 - DNA, 836 bp, Homo sapiens
  chr10:88126546-88127382
  hyper
cgaactgcggaggacgccccctcccctccccctccccctcagctccgctccccctcccctccctgcccgcctccctcccctccgcccgcctctctaccacgtgactgcggagcctcagcctcgccgcgcggctctcgcccgctcgcggctcggagggggcgccgggtgctccacgctcccggctcgggggacgctcggagaccggcacagcggcggggaccggcctgggctgcggcgcgccgagctctgacggttcgggcctccttctccggttcgccaggggcgggagaatggaggagggccggccgctaactgccctcgaggggctcccgaagcgccctggcgacctcagcagccgcgcgtctcgggtcatgtccccggccgaaacagaccgttcctcgtggagtgggacctggggagcaagaagagagaccggggcggggcgccgggccaggccccaggacagctggggagccagagggggccggccgccgcaagcatctcagagtagagcccgggccgtgggctcgaaccctggctggccgcgcggacctcggcgggcgcccatcccccgctccatgggcagcgcgctcagccgggagtcgggcaagaggctcggactctgaagcccaattcatggccggaaaccagcgcagccgtgaccgcggcgcctggacgtgaggagccttccaagcggccggcgggctcagactccgaccctgcacggagctttcatgtgcgagcccgggcgaagagcccgctcctcgcggccacagcggaacagggctccctccgcctccggtgcctgcctcgggccggccaccaccaaagagagc

SEQ ID NO: 26182 - DNA, 761 bp, Homo sapiens; identical to SEQ ID NO: 8961
  chr10:98479725-98480486
  hyper

SEQ ID NO: 26183 - DNA, 1147 bp, Homo sapiens; identical to SEQ ID NO: 22765
  chr11:104034057-104035204
  binary

SEQ ID NO: 26184 - DNA, 924 bp, Homo sapiens
  chr11:106888298-106889222
  binary
cgccctagcctaggggatcctctgtcgccggagccactggaaccctaggccgtgcagggtaaggccgggccgccccccagcggtcgggctctgcgctcgcgccccggctcgcccagcgccaactttacagatccgcgttctctcccccgaaggcggtccccccttccgccccccgctcaccgagggcgccgtcaggcggctgatgctctcgcccagcgagtccaggttgacccgcctccggcgctgcaccctcctggccccggcagtggcagcggcggcggcggcagaagcagccggggtcggggccggggcggcggcagcggcagctgcggccgggctgggctccagcggcccgggcgggctccggctgccattccagcagagcctagacagggggcactccccctcctcctccgggctggtctccaggtagtcggagcccagggagctgaaggactcggacgaaatcttccttcgagacatgctgccggcggagctgcagcggccgaggcggtggcggcgaggacgcgagcggcggcggaggcggcggtggcgggaccggcaagcgacaacgttaagcgcgtcggggccgcggggcgctgcggtcgcgcccggcggggcgggagtccccggggccgcggagccccccgagccggctgctcatggcgggaacttggggcgccgccgcaccttggggcccgggctcggcggcggcgccgggctgggctgggggccgccgccgcctctgctgctgctcgcgcggcgccgcctcagcgcccgcctcggcgcatcgccgtgcgccgcgctcccgctcacggggaggctccgagagtgtgtgaccgcggtcggcggggcggggagggctgcggcccaagcagaaggggaggcagaggcagaggcttctgccgcctgcgcgcctatctc

SEQ ID NO: 26185 - DNA, 1240 bp, Homo sapiens
  chr11:107461663-107462903
  hyper
cgggagcaattaaactgggccacaccagccacctcccacagcagcggggtccgcagatttaaccctttccccccagattccggcactgggtgccgcgctctctcccccagcaccgcgcccgcgcccccggctcccggactgggcatgctcagtagccgcccgcttcgtgctcccagggaagcctctgcacgccctcccccgctgctctcggtcgcctcctcgccgccagccgccccgggtgcatcccggcttgctccgctccacgcgacccagattcctgccccgcccccgccccttccgcgcccgcagccagtgcggcagccgcggccgcccctgtccagcctcggcgcccgggaccgagcgcgtcgctcgccgccgcggagcgcgtagccggagcgcctggggaaggcggagatgaagaccacgccgccgcgcgccgggagctgctgagcctaccgccgccagagtccaggtgattggcgaccccagaggagcctagggagtaggggcgaatgcccttggggaggagagaggtgcggcgaggacgcgaggcatcacgcaagctgcgctgtgcctgggaggcagcagaaatgctaagcatcgggggcagagagggaacgggaatgaaagtgcactctgccttggtgcaggggctccggggtcacccaggacagtgatttccccttctatcctgtcctcccaattaacacccgagaggctgcaggtcggcgcgagaggctgtttgcatctcggcccgggcgtaggtcgcctagcgacctaacgccgagggctcggggaagggatcccagacagagccaaaatggaaggcgggacaagggcggcctggctggggcgaggggctggtctgggtccctgggaaccccttgccttgtgggcttcggtctccagggaggagctaggcagccgggctgcggggccgccggactgtggggtcctccgcgcagcgagctgggaggagcggtcggctgggctgttgagctgcgcctcctccaactgctgggaaactccgcacttcaatattggagcatctctttcccgggcaggtagaattggacagccgagtggggagtgacagctgacagctgacggggctgttaaaagcagagcagtggagtgtggtggtggggtgagctgttgtgggtgcttttttttgttttccaagtgtgggtacgggctgttctgactcagtgtttatgctcaacctctaagcggcgagttc

SEQ ID NO: 26186 - DNA, 1221 bp, Homo sapiens
  chr11:107798868-107800089
  binary
cgcctgtaagaaaacgactctcacttttcattggctgaccctcccggagttgagaccttgcttcattttccttggttgttgctgctgtcacgtcttcccgccacgcccactttcctgccggcgcccagtgagcgttgagggagagtgatttgcagccggtcaggggcgggagttcgcggcagcaaacctgcttccccctcccacgcgccaccgcccccgccccgcccccgtccagaggccccgcccctagccgggcctggccccgcctctctctcccgagagggcgggcaccaggcggcggccgcagccgcaggaatatgctggaaggcggcgggcgggcgcccgcgaggtgctgaaaggacagttcccgccgccgaacttagcccgcgggtggggcggcccgggagccagcggggcacgtgagcgatggagaccatctggatctaccagttccgcctcatcgtgatcggggactccaccgtgggcaagtcctgcctcctgcaccgcttcacccagggccgcttccccgggctgcgctcccccgcctgcgaccccaccgtcggcgtggacttcttctcccgcctgctggagatcgagccgggcaagaggatcaagctacagctctgggacacggcgggacaggagcggttcaggtagggaccccggggaccttgggcaccgcgccgccccctcagcccgcccggacgccccttccccaggcgtccgccccgccggccctggtcgggagaggctctggcccttccctctcgaaagtgcaaacactccattctcgcttcccctttgcccctcctcttccagggacgacttcctcctccgcaatttctcacttctttctttggcgcccatttcctgcgccccctttccatctttcctttcccgcctgaaccggggtcgtcctcgccgccccctcttccccaactctttcagcccctgtgggtatttttatcccctccggctccccggctgccttcttcccaaactcggcttccctggctgcgcacagcatgacccgaccaccctcctccaagcaggcgccccttttcctaccctaacccagcggctcccacgctgtgtggccggggagaaccgcgagggagggttcccagattcgtgatggatcctttagcttcacagcaaggagcgctccaacccaggttcctgcatgagctcactgggcatggttcacagagaggtggatgc

SEQ ID NO: 26187 - DNA, 994 bp, Homo sapiens
  chr11:110582722-110583716
  binary
cgcgagcctcgagcgtcaaattcccgcggcgtccgcctagcgcgctgctgtggcgggcgcggagggcgcgcgccggcagtgggggctgcggcggcggagggcacgggcccccgctcagcgtcctcaccttcttggtgcagctgcctcccgcgagccgagacactcctgtcagggaagaggagcgccccggctgtccccctagagtctcctgctggggggacatcgcttccatgaagaaaatcttcaaacaaatcccagcccaggaggaggctacacgatcatgtccgcgggctgccggccggaggggcgaggacgcgcgggcggaggcgcggctgccgtgctcaggcagggagccgagctccgggtgctcgccgcgcgcctcccgtcggggccatgtacctccgcctgcgctcgacaccgcgggctggaggcgagtgcagcggcgacagcccgtcagcgccgcggcccgccccgcctcgggcccgccccctccgctccgggcgccctgcgccggggcccgcccccgcagccctcctcagccctcctccagcctgggccctcctagcctcgtcccagcctgcggcgcgcctggcgggcgtctctctatatatgttagcacaccggccaccggctgaccttttcggtctgtgactccgcgtgggtgcagcccgcaggagctcatcggcctgtgtcacgcacgggggcctctagtgcacggacacgcgcctctcccgccacctgcccactcccaccagaccccatcccttcccgcgccgtgcccgcggcggaaggcgcccctgcagcgcgtgcatccgcggagcggtggcgacctcagcctgagcagaggagttgcagtgattcctgcctcgctttcagcggactgcggagggaatcccccaccccaccccactggggatagggtggcacgtcgcagagtgtcgcagctgtacaaatttggaagcccacagcatcgcctgacctcttgtgcaatccc

SEQ ID NO: 26188 - DNA, 952 bp, Homo sapiens
  chr11:113930323-113931275
  hyper
cgccagcactaaagatggagaggcgccggggccttgcaggggagggggctcggcgttgacgtgggacgcggcggaggcgcagcagccggtggtgatttgctaacctcgcagcagagaggagttgagggcgatgagagcgggtactgcgaactgccgggcgatgctgtcgctgccgccgtgatacggagagcaacagttccccagcaacacccctccccgacacaggcacacaccccccgacaggcacgcacacccaccccacagtgcccggctcggctgcggtgagtgaggggccgggaagaggcgcaccgcccagcgagcgccgcgcgccggggcttcccggggctggagaggtctggggggcgcgcgctcgcttcggccactcggccgctgggcttgtgccttttttatttggcgtgttcccttcctgccgctgcagccgtcgccgccaccggttgggggtcggctagaagggggagccccggctgtcagcctgggcgcagctgcctccccagcccttcctcttcagggcacggtcggggtgagaggtggggggcgtagcggtgtgcgggggctgagggcgtgagcagaggggtcggggatccggaggctttgtaccgccaggggctggcggagcaacagagcccgtgggtgctcttatgtatgcggaccggtgcgcgggcgcaagataaggttgtggtttatttatttgtgtgtttattcgccggccggctgggaagctagaatcggaggagctgacgagtagatctgggggcggaggggagcaggactgggactgcttacgttttgtttctctttgagaaaacgtggtgggctttttcttgattggacttgatccccaccccccttttgcaggggagggagggaagctccagagggtctgcagcgctgcgggccctcctcggctctcggcgggaccggcggtgacacc

SEQ ID NO: 26189 - DNA, 685 bp, Homo sapiens; identical to SEQ ID NO: 23795
  chr11:120008024-120008709
  hypo

SEQ ID NO: 26190 - DNA, 932 bp, Homo sapiens
  chr11:120435049-120435981
  hyper
cgctcgcggggagggggctcgggaatccgggcccgggcaaccggcgccgcatgctaatcagggggcgcccgcccccgctttgcccgtggccctcctttcccgattccccgacgtttcgggaggagtggggtcggagcgcagggctgggaagggtcttaggacccaggaaggagacgggtgcctcccagagaggaccccatcccctccgaggtccgggcggctcccggcctctccctggggtgccgtagcccccctcgacccgccttcccgcagccgcagtcgttcgggcctggaggtggccgggcatcggtgccgacgccgcgagggcagcgcccgcggcgggaatactaatgcaccctaaagggcacggccgccgccgcagcaggtaattagctggaccgcggcggagcgcgcggaggtggctgctggctgcaaggactgcgcccagcctccgcctcgcccctcgaggctcccgcgtgggccggcgggcagtgcgtgggccacaggaagcgggctgactggacccggctcaggacttcgcacaagggcagctctttgtttacagctcctctcccagctccccgctttcctttcgcccaccgcctcccttttccggcgatcggctccgccggctgcgggggggtggggggggtggggtgtcctgtgtagccgcccacctcctgtcccggcctcgtgctcccgctggggactgtttgcggtgagtctgtcgcacgcacgtcagggccgaggcagtgatgcggggcagcgtgggaggacgggctgcggagcccgcgtcatcctgcctgtggggagcgctgtgcctgctctcctgccagcgcgcccagctgtcccggccgccgccacgcgggactgcctgccatgtcgccaccggctgctgacctcattaggcctcatgtcatggaggagccggc

SEQ ID NO: 26191 - DNA, 939 bp, Homo sapiens; identical to SEQ ID NO: 22768
  chr11:123228638-123229577
  binary

SEQ ID NO: 26192 - DNA, 884 bp, Homo sapiens
  chr11:123300826-123301710
  binary
cgagtccctccccgagggaatccgtgtacagttacactagcggtcgctgccagtgctagcccattcaggatagcccccctcaccccgcccccagcccccgctcctcctcctccttttttgtttttatccagtgtctcgcttcctctctctctctctctctctgtctctctctccctttccctcctaccactgcctcttcctcccgctctctacctccctgcagcgccaagccggctccccaacctggtctgctgaacgcaaaccgctgagagtttgctgcaccgccccctggggcccctggctgccgagtcccgctaaggcaaagacgccagcaagcgaggaagcgcagcggaagaaaaacaagcgggcgcgcgaggggagccccaggagggctgccgagtggctggcaggcggctcccgcccctcccgggtggcctcgccggcggctgacggcccggaggacgcgcgctccgaaaagttagactccgggcggcggcgcgctacgccgcgtcccctcgcgtcccttcctcgctgcgctccgggaaaggaacttgttccttcggccccaggattggggagtgtgccgcggggccgagggtggggaacagccagagggagacgcgaaccaggccgctggcggagggctcagggggagcgcagaggcgacggcccccatgccggcggccaacatgatggagaaccggccgctgcccgccctgcaggtgcccgagccgcagggtgcgcccgagggcagcccggtctggtccagttcgtcgacccccacgcttcgccgccggcgcttcaagatgcgccgcatgaagaacgtacaggagcagagcctggaggccgggctggcccgggacctgcccgccgtcttggccccc

SEQ ID NO: 26193 - DNA, 999 bp, Homo sapiens
  chr11:128564211-128565210
  binary
cggggaggcgaagcggcgggcgggtaggtgcggggcccgcgtcccggaagacgtggcctctctcccttccctccgcgccccggcttcgcgccggctcctccggcgctcgggtggcgagtcctactcgcgggccagccggccaggcgcccgcattgagggcgaccctcccccgaaatcccagcccccaaagtggagccccggcccccctcccacctcgctgcccgccggggctgcaggaggggacggcgggaaaccgggggaccccagggtacggaacggagtcaagggcgagagacctcggggtccaccactcccaccgacacccggggctcccgtggccccagcgctaggcactgggcttcctctccgcagaggcggaacacggcgggggcgggggctgcagtcgcccgggctcgggtccctgcctggtgggccctggggtgggtaagtggcctcgttgcacgagggtaggggtgcaagtgagtgtgtcgggggatctatctgagcgggctcctccagatggaagcccctgtttacatgtcagcgctttcccttcctctcggcactcagtcgcccggctctaggcgctggagagccgccggctccgcgggactcctgggccggcctcgccgcctctccggcggggaaccttccccagcccccgtccgcacagatccctagcgccccgagcccccgcccttcgcgcctaggcgtgcgccggctccaggaccagggctcctggagctgtcgcctccgaaagggtcctgcgtccttcggagccgcctccgttgcaggggccggctgtgagcccgcgccccgcgcccgcccggccattcccaccccagccgccgccgccaagcctgggtctaggttgcaaagtgcaacccaggcggaaaggtgagggtttgggttcgcgtctcacttcagaaaagttgactgctgtctctgaaagggttcgccaagtagggccaggagcagagaggagggacaccccctaac

SEQ ID NO: 26194 - DNA, 284 bp, Homo sapiens
  chr11:131564801-131565085
  hyper
cgctcagcgccctcgcagccggaatggggcctgggaagggaggagccccagcagaggggcagtcggagagccatgaaattgcgacctgctgccaccagagggcagtgttggacgggctgggaggagcgccgccgccgccgggagggtgcaggagagagctgtctgccaggggaaacgcacgatgcgttgtccaggacattctcacctgaaaatgctctgggccacggacaggctgaggattttagtacccacccccccgccctgaaaagaaaaatctctgtgac

SEQ ID NO: 26195 - DNA, 937 bp, Homo sapiens
  chr11:131780712-131781649
  hyper
cggccgcagcgcgcatttgggctccgaggaagttgaccgaggcggctgccgcaggatcccgggcccggatcgcacgaagcccgcgcggccgtctcctccgcgcgccacccctgcgcctcccgcgagctccacttcccatctgctattgtttccgattgttttccggtggcgagcccggctccgaaacttacaaagtgttggatgtcccccgttcgaactgagggactgcagaccgcctctgggtagctggatgaagcccaccccgtccccttctggtaccaaagtgcttactcctctccaaagtgccgtgtctgaactgccgctgggaagaagcggctcctgagacgcgcccacacctttcacctgccgcgcgcttccccctcctcggccaccttcccggcggaagcagcgaggagggagccccctttggccgtcctccgtggaaccggttttccgaggctggcaaaagccgaggctggatttgggggaggaatattagactcggaggagtctgcgcgcttttctcctccccgcgcctcccggtcgccgcgggttcaccgctcagtccccgcgctcgctccgcaccccacccacttcctgtgctcgcccggggggcgtgtgccgtgcggctgccggagttcggggaagttgtggctgtcgagaatgggggtctgtgggtacctgttcctgccctggaagtgcctcgtggtcgtgtctctcaggctgctgttccttgtacccacaggagtgcccgtgcgcagcggagatgccaccttccccaaagctatggacaacgtgacggtccggcagggggagagcgccaccctcaggtagggagctgacattgttctgcgaactgatggtttgtatggggtcggggtaaggggcaggggtgcaggtgtgtgcactgaggcgtgcctgggttggcggagaggtc

SEQ ID NO: 26196 - DNA, 480 bp, Homo sapiens
  chr11:132952521-132953001
  binary
cgccccaccccgttctgcgccgagtggcacagccctcggcacggcacggccctgtcagctacgaagccgggcgaggggctcaaggcccctctggagaccgcttctcccccgcggcccgtcccgccgctgcggaccccatgcgcggcctccccgccccggcgcctgggcctcctcgcggcccgggcggggcccaccaacccggagaggtcgccagcctgcagggtgccgggggcccctccgagccgacctcgtcccaggcagacgcgctgcccggagaccgccgcaagggggcgccaggggccggggcggacgtcgcgccagtgcctcgccgggaccgcacctcgtccgcgcggccgccagagggcgcccgtcagcgccggagcccgcggcggacgccccagccgagcccagccactgcctggtggagccacagggcacccgcccggaaacaccgcctgcgccccgacggcacccgtgtgc

SEQ ID NO: 26197 - DNA, 255 bp, Homo sapiens
  chr11:132953051-132953306
  binary
cgcacacaccccgccgagcgggccgcacagtcactggggcgccgctcgctttgctgcctttcccgcgggtgcactgagcggcgggagcgggagccgcgggctttgcctgagccgggcgcgcgctgtggtctcactcccagacccgacccctctgagctgcccctctccgaggccccgcgaccgcatgcgtgtgtgctcccactgccccagcctgagtcccggatactggtgcccctgtctcgggtcgctggctgc

SEQ ID NO: 26198 - DNA, 394 bp, Homo sapiens
  chr11:133401972-133402366
  hyper
cgcgcgtgtgagcgagtgagtgtgtgtgtgcgtgcacacagcaagcctacctctttcactcacatgcatctcacactccctgtcctcaccccttcctccttgcctctccatctccccactgcctctcctgctctcacgtcgtacaatcaccccagggagagaaaacacccttcccctgtacggtacctgggatgaagagcagggcagttgtcgccgagaagacgacccagtaggcaggatggtacatctcgacgctgcggtgctctcagctgccgggcttgctactgcttctgctgctgctaccgctgctgccttcctctgtgctgaattctgagcaggtttaaatccaatgtttgcaaagggagggagagagcagaagagagagagagcgcgc

SEQ ID NO: 26199 - DNA, 864 bp, Homo sapiens
  chr11:133826592-133827456
  binary
cgcaagccctcgggtgccgatcacacttgctatgaaagtggccacataccaaatcatagtactaccgcgccagcccggagcctcatcctatcgcaaagtgctcccgcgcccgcacgcgcctcgcgcccgagcgcccgcctcgcgcccgcctcgcgccgcctacgccccgcgccggtgctcctgcagcccgggtggccagctctccatccctcctaggctccgctcggctcggcgcgcgcctccccggccccggcgcagcggcacctgcactactcgcccgggcggagcgcagccaggtccacggtgaagcctagccgggccgggcctccggaaccgcccccgccgcccgcctattgggcgccgcccgcaagccgggggtccgattggctcagccttccgcccgtcgcggcgcgaaggaggcgagcccatttcaaggtgcgttgaagtgtggcgagcacagagccgcagaatcatgcgcattgccggggagaaggtggtatagcgtctctgcccgcttctctctcggctcacactgcgtggcaagtttctggtgagggaaatggtagcttctaacgggaccctggcgggtctcaattaccccggacaggtctgagggaagtggagcccccgcccactcatggaacccaacatccggtttccatccggcaaaaagcagttcccgagaggaccatgctgattctatgatggggaaacccaggagccggcggcccgggagagccggggaacgtccttcgccggagatcttttcaaagaggtcacgcgccgcctccccaccccgtctccctccgcacccagacacgtccccagagcagcgcaccaccccctccaaacgtgatgcagacc

SEQ ID NO: 26200 - DNA, 217 bp, Homo sapiens; identical to SEQ ID NO: 8972
  chr11:133920473-133920690
  hyper

SEQ ID NO: 26201 - DNA, 842 bp, Homo sapiens; identical to SEQ ID NO: 22771
  chr11:133938756-133939598
  binary

SEQ ID NO: 26202 - DNA, 881 bp, Homo sapiens
  chr11:14665069-14665950
  hyper
cgtccttctctttcagtcccggtgggtcttcggactgccgccgccgcgctttcctcggcctgggcacgctgggtcggcgtggtcccggctcgcgtccctgttgggcggccgcggcgcgggtggcggcgggacaagtcgtgagcgcgcgctgggcgcgcgcccggccggggcagtcgcgggggaggagcgcccgcccgccgctcgcgcgcccaacggaccaggctggggccgtgaggtaactgttgcagccagcggaggtgggaggcgacactgagtctccagtcccgagaggtgcccgagggaaaaggaggcggcagctaaactggtcctggagagaagccccttccgcccctctcctcagccagcatgtcccggactccgccgctcctcagtccgcgcggtggggaccccgggccgtggcggccggcgcagccctgacgggttgcgaaccagggggcgccccgaacgcgggggttggggtctgggagcgcgagcggccgctacggtacgagcggggtgtgctgagtcccgtggccacccccggccccagccatgaggagggacgagcgagacgccaaagccatgcggtccctgcagccgccggatggggccggctcgccccccgagagtctgaggaacggctacgtgaagagctgcgtgagccccttgcggcaggaccctccgcgcggcttcttcttccacctctgccgcttctgcaacgtggagctgcggccgccgccggcctctccccagcagccgcggcgctgctcccccttctgccgggcgcgcctctcgctgggcgccctggctgcctttgtcctcgccctgctgctgggcgcggaacccgagagctgggctgccggggccgcctggctgcggac

SEQ ID NO: 26203 - DNA, 227 bp, Homo sapiens; identical to SEQ ID NO: 6389
  chr11:1521171-1521398
  hypo

SEQ ID NO: 26204 - DNA, 408 bp, Homo sapiens
  chr11:16634123-16634531
  hyper
cgggggggcggggttgggagtggggggatggcgatgaagaaaaggagaaaaagcctggagtatactaccttgctcaaaaagctcccaaaggcagcgtggagcggcacagacacgaactaagacaatgtgtgtctgcggagcctgtacagggtccatttctcccccacgtcaccctcctccattcccctctaatgagacgcggatcaccctccactctcaccgacactgcagctctgcacaagggcagctggaatctgggaaccttacctgcagcaccaatacctaagagaaatcgcgcttccctgacactaacacgccatgccatccccacgcaccctgccaaagtcctgtaaccatctacttcttccatctgcctaagagaaactgtaaacgggatttcccccccac

SEQ ID NO: 26205 - DNA, 189 bp, Homo sapiens; identical to SEQ ID NO: 8978
  chr11:1795707-1795896
  hypo

SEQ ID NO: 26206 - DNA, 842 bp, Homo sapiens
  chr11:22214131-22214973
  hyper
cgagaccaaaagtaactcccaactgggagaggggttctctccgagtggcacgcatgagcggatcgatgaagacccggccaaccggctgagggagcatcgggaccccctttggggatcggaggaggaggattccgacaggagggaagcggcagccctggggaaccaggattcctggtcgtgggtggacccagtggaaaaggacgtgcgaagcctgtacagaatggagcaggccggccaacagggccggggggcggcgggtcccgaggagggacgggaggctgcatgtccggaggaggtgcgggaggcggcagagcagggacctggggacggcttgagcggagaggagggggccagcgtggagccagccgggccggggggcggggagatggcggtctccgagggtggggcgccggccggtcttgcggtctggaggcggggaaagaggcgtggaaacagggacgcagcgaaggggaaaggaaagctgccagagggcaggagtggaaaggatcctggcgagcaccgggaggagtggcggctgcgggatcagctgccgagcaggcacagggacaggtgcctggagaagtactgggagagcgcccaggagcgctaccggctgagggtggggaagcgcagggccaagcgcgcgaagcaggttgtgggggaccgggtcgagtggaagtacccgccggagaggaaggccggctggctgtggcgcccagagacggtggagtccgaggaggaggagaaggaggcctgcagaaggaagagcaggcccttagaagtccagcagcagcaactccggcggcccacagtcagattcagcacctgcctcagatctccac

SEQ ID NO: 26207 - DNA, 1041 bp, Homo sapiens
  chr11:2398759-2399800
  binary
cgcccgccgcccgcgccgccatgggagtggagggctgcaccaagtgcatcaagtacctgctcttcgtcttcaatttcgtcttctgggtaagggctgcgccgggggccggggcgggagggggcaggcacacactccacgttgggcaggtcccgcggcagcgtgctaggccccgcgggcgcagcgcgggccgcgaagttgtggggccacctgtgggctccaggagcggggtggggggtcgcccggggccaccgcgccccccgacattggggctgagggctgcgagccgagtttcggggcctctgtgctcgggggcccacctctgcggccgggccggggcttctgggggccgccgggcagttcccgctgtggtggtgatgggtgcggtggtcgcgggtcgggacccgagtacccggccgcccctcagctaaggaggggcctgcgcgggtccctggccgcggattccggactgctgcttcgcggggacgaggggggggctcgcgggcgggactcctggcgccccgcccccatgagctcatcaagagccgccgcccctggatggtggggcgggggcgcacactttgccggaggttgggggcgatccgcctcactctttccccagcccagctcactctccaatctgcggtcaccacccgagaccttcctgggggtcgcgcctaaaaggagcgcagactcccgccgggatggcccagaagctggggtgcgcgcaccctggccgtccctgcctgggagccgatctccctctcctcacccagacacgttccagcggaggcctcctcccagaagggctctggaggcctcgcaggagtggggatcccgcggttctgagttggcacaaggaagagagtggcaccaggggcctggagtggatggcagggtccgggagtggggccgctgctttgcaagaggggcccccacgctgggcatctttgggtgccagcgtgggtggaggagggtcttttgctgagaatggctttctcctgaccgcagtctttgctgctgggaagtgactgatgggctttc

SEQ ID NO: 26208 - DNA, 481 bp, Homo sapiens
  chr11:3164459-3164940
  hypo
cggggggggcagaggaggcaggtgcggagcggggcagaggaggcaggtacagcccagtgcgtggaccagcgaccggctccaggggcccatggggggctgcactgtgggcgaaaacgcacggacgcgacacacccaagagaaacaagcacacgcccccaggtggtccgcgcacgcacgctcccagcagcatggctcagggccatcagagagcggacacagccagacatccacatgggtgaacggataaacatggatcacatctgtgcaacggatggaagaacattcggccttcaggaggcaggaagcacggcactcacacatgcgacgacacggatgagccgcagagatgcaccaagtcaaagaagccagataccaaaggccacatcttgtccgcttccacgcccacgcagtgtccaggacgggcaggtctggacacggaacgcagactggtgcttgccagggcccggcccggttctgtccc

SEQ ID NO: 26209 - DNA, 1463 bp, Homo sapiens; identical to SEQ ID NO: 23806
  chr11:31819792-31821255
  binary

SEQ ID NO: 26210 - DNA, 687 bp, Homo sapiens
  chr11:31824579-31825266
  hyper
cggcggtcagttccctgctatcgatcaaataaaggacaacaggaccaccagccatgccagacatcgggcagcccagtccaagcaaccgtgcccctgcccactgtactgcagcagcaacacagagtcagacacatgccaaggaacaagtacacatggacctcactacagccataaccccagcagtgtccccagcccactgcccctcttcataaacactgcagccagcctctgaacccacaaagcgctaagaaccggctctataaatctcccaaagatcccctctgagtgtcaccgcaaaccatgggttctacagatcccacactgaaccttcaaggtctctgcagtgttgggacagtgatagcaaaccttacagcccttgagtgctcccttagacgctaaaatccagaaatgtttccatcaccgtccaaactggccaaggcctggcacaagcatcgagttgggttttgtttggttagaatagaagaaggaagaggagagaacaaccagagcagccagtatgtggctggtgaaccccagtccaggtttccgcacctccagtgcagacgtgagagtcagagcccgggctcggcttcagccacagacaagtccggccaccgcaagtaaggcttagagccgggagtcggttcgcaccagccactgctcgctttatttccgccgctgaactcc

SEQ ID NO: 26211 - DNA, 960 bp, Homo sapiens; identical to SEQ ID NO: 23037
  chr11:31825604-31826564
  hyper

SEQ ID NO: 26212 - DNA, 537 bp, Homo sapiens
  chr11:33891709-33892246
  hyper
cggggacggggagagccgctcagcgaacacctctccttggaaaggaggctgggcaaccactaaatcattcttcagggcttcccctcttccgcctttcccttttggtttaactaaggcagaaagtaacccacgaacagctcgagcaagcaagaaaagacaagaatgtgaaataagcacctacagaaatgcaagtgttcccagtggattttccgcccgtcccaggttcgaggtcccaggtccacggacgccgtgcactgggatgccccggacagcgcggctctgcgggctgcgggctacgggctgcgggccccaggctgcgggctccgggctgcgggctccgggctgcggccgcgctctgcagaggcgatggtggtgcgccagccgggactgcacgggctggggacgcctagagcagagccagggcagctaatcccagagggagggtggctgggagggaccacgcggggccggggctcctctcagtcggctggtggcggaatcccctccctctgcacctttcagaaagcggactcctgc

SEQ ID NO: 26213 - DNA, 261 bp, Homo sapiens
  chr11:35684937-35685198
  hypo
cgaggcaggggaagagagtgagtcggaggaagagagcgagtcagaggaagagagcgagacagaggaagagagtgaggatgagagcgatgaggagagtgaagaagacagcgaggaagaaatggaggatgagcaagaaagcgaggccgaagaagacaaccaagaagaaggggaatccgaggcggagggagaaactgaggcagaaagtgaatttgacccagaaatagaaatggaagcagagagagtggccaagaggaagtgtcc

SEQ ID NO: 26214 - DNA, 1622 bp, Homo sapiens; identical to SEQ ID NO: 22773
  chr11:43599961-43601583
  binary

SEQ ID NO: 26215 - DNA, 994 bp, Homo sapiens
  chr11:43602804-43603798
  binary
cgcggaggggcgggcagcgcgcggagtggtgagactgagccgcgatggaacgcgctggggagacccagcctgttcggctccagggttcggagacatcctgggctgaaggcggcggcgaaccgaagaagccggcatattctgcccttcgcgaatctttttgcggtctgggcttgctgtacataactcaatagccggaagcccttaccccaaaaagcatttgcggagggcgcactcgtcgagaagacggcagccatccagcgatcgccgaagcccgcaccttcccgaagctgctccatccgagccttacccggccctttccccgttttccacggaagattcggccctttcccccgtcctttccgcggtgcccgaggctttggtcacctgtcttccctccgagcgagtcccccgcccccaactttttaacagactttgtatcacagggggaactggagcaggtggggtgtgtgtgttttcggagaagtgagaagaagctaaaatgcaataaaagtttacagaagttgtgtcttccccccaacccccgcccacaccacgaataaccccattcactcaatgcaaagaaaaggatctgagcttaaggccaagtcagaacctggaatatgaatcagtttaggacattttgtggtcatttttgaccgtaatgatccgattctgcaatatgggggtggggaagcccttgagggaggggctggaggcccttagtatcttatgtcctggtgcgggggacccggaggtgaggcgagccgcggtgaattgggtagatccgaaaaagagggaaaacacccaggcaccgcccgatccccggagtctcttcctcccgcgcctgcttccaacctaatttggggcgttttgcagcctcgggtctcccacatctcctctttttcaaaactaagtagcacggaagggggtaaaacaggcgagaactggggaagcccccgcagagaaggagctttggagagatgcggttgtgccc

SEQ ID NO: 26216 - DNA, 946 bp, Homo sapiens
  chr11:43964414-43965360
  binary
cggcgccccgccgcccggccccgcagacgccggaggcgccatggccgccaagcccggcgagctgatgggcatctgctccagttaccaggcggtgatgccgcacttcgtgtgcctggccgacgagttcccgcagcccgtgcggcccgccaagctgcccaagggccggggccggctgcggcggccgcgccagtctcgcttcaagacgcagccggtgaccttcgacgagatccaggaggtggaggaggagggggtgtcccccatggaggaggagaaggccaagaagtcgttcctgcagagcctggagtgcctgcgccgcagcacgcagagcctgtcgctgcagcgggagcagctcagcagctgcaaactgaggaacagcctggactccagcgactccgactcggccctgtaaggggcgccgcccgcgggggggacgcgcgcgtccgcggtccgcgcggggaccggcgtgtgaaccccgagagtgcccgcgccctgctcccgggggacccgcaaggacccgggaccgccgctcctcgcgcgctcggactcccgccccgctgcgaaccggtcggtgcgcccctcgccgcgctcgccctggcccgggagcgccgggagcggggccgctttcctcgtccttgtaaatgtttattttttaactcttcccagtgcgaactctgctgtgagtgtgtgcggggaggcgcgcccgcgctgagtcggcggcgggtagccactccatgcccttgtccgatggtttgcaactccgattttgcacaccgctccaccgtgccccccagcgcacacccattcacactcacgccaacactctcgctgaacacttttataattgttaggcgtggccgttgggactttgggcgcagcgcggctgctactgcgtctggaggattgatatttatttttgcattgcgatggctgaaggcatttatttaac

SEQ ID NO: 26217 - DNA, 739 bp, Homo sapiens
  chr11:43965463-43966202
  binary
cggggtccaggctcccaagactcggggaggtgggggaggaggtggcagggggatgtcggaccagggagccgggagtggagctacctccacaagcttcggtcaccggaacgaggttgcgccaccggtgcgcgggtcggttgcctgcctccccaagtggatccacccccggtccagtgtgctcctgcgtccctggtctattccccatcgccggcatccgggctgaagtgaagccgcaggaggggcggaggcagagctgacgatggagagctctctcctccgtacagttcacttcccagagctggggtcagggtcctcgccccgcacccgccacagaagacgcatctccctctgcgctgattcctggcggcgggtggggagatgtcggagccagcaatgcgagatgtttgggcgttgggacccgagagtgggctggaggccagcctgggttggtcgagagtgtgggtgcgcgctcgctgtcgcgggcaggtgactccctgaccgcagttgacccagcgcagtgcctggcgctcctgcgctgcggggaaaaccgcggccgctatgtctccagccgttctctgcgctccgcagggttcctccaggagggtggggcatgtctttggttagagcctgaagggcacctgggtaccatcgagtccttcccttctccccgcccctgcctttgtttacatatgagaaaacaagcctagggtaacagggagaggagcgcccccagttctcc

SEQ ID NO: 26218 - DNA, 843 bp, Homo sapiens
  chr11:44337578-44338421
  hyper
cgctgcgcgagttatcagaaatccctggagccaaacactacgggggaccggcggaccaaaaggttcctaactcctttggacctccagggctcgcagaaaagctgccacttctccagagccgccagggcgggcgcgagagcagcgagtccgcgcgggtcctcggcgcgctcgccagacccagccgaccgcgtgactcaccacgtcctccgccgggaggaggtcagcatcggccctgggcaccggtccccagccgccgcagcccctgccccaatctccccggaatgcggacgccgccgcgccaacccgagcctccagtcggatagaggcagggagggaggcactgcccacgacgagtgctctccaggcgctgcaaagagcaggggtctcctaggggctttgagaccgcgggcggacctcgggggagcaggcgtgggacccgatctgtgccggctcagcagggccccagcagcgccccagcgtcgcccgcccttcctcctcgcccaccttacgctgggacttgcaccccgagtttaggggcttagccatttccggaactcgggctagtggactctggggaatcaggcgctgggagaggccttcgcagctgcgtctctcctgcccagcatattgtgttgaatgaggcaagggagtgagggggtcgtaaaggaaacccgcactcaggggcacaccttcatttatctgggaacagcgcggatcccagaggtgcgggataaaccaggcgttccagctgctcacacgctgtttggtaccccgcgtctatgaagcacaaagcaggagcggattggaggttttacaaactgaccaaccccgccgcccgcgccc

SEQ ID NO: 26219 - DNA, 1661 bp, Homo sapiens
  chr11:44748073-44749734
  binary
cggcagcgggaagcccaggagcccgatcaggaccgaggatctcaccccaacccctgcgtttgggccccggggtcagctgaaagttcccctggaataaacacttcgggtccagcatgcccctctccccactcccgcaacgatcttccgaattcagacgcagagagggcccgcgagcagagcgggaggtggtcggaggcggaggaaggggagatgggcagagggtgggcccagggacccccagacaaggcctggacgcggggttggaggaggaggcggaggctggcgggaggcgaggggcagcccgcagaggagacgcgcttctcggcagcaacggcgtctggagccgggaggggcggaggtttggggagggggagggagggcgggggaggggagggacggacggcggcggaggtggggccggcgggctggcgggcgtgcagctgccgccggcgtcgcggggctccaggctgcggggcggacgtagcgccgagcgatccaccgcggagccgcgcgaggccgcccgagccccagccccggccccggccccagccccggccccggccccggccccggccccggccccggtcccggccccgagccccgagcgagcgccgccgcctcgcgctgcgggtccccggacgcgccgccaccgccgggaaggcagccggcgccgggcaagttgcgagcgcgcccctccgaccaggaaagtttccccccggccgccggcgggatttggcgcggggtccggcagccgccgctggaaggtatggggctccgcacctccgtgccctccgcacgccgccgccgcgcccccggggacctggggacccccccgcgcgccgccccgggggtgctgctggacgcggcggggaattggggtggagtagggatcccaggacggaagcccggcaaccaagttccactcaaactagcacgcgggggctggggggccggggacggtctccaccccgtgcctgcccggagtccgctgagggccgggggctgcgcccaggacaggtgcagagccggtgggctcccagtgctccgggtggaggagtgggggcttctggagaacggcgcggggtggcaggtgtggttacaaggttcggggtttcggccagggctgcgcccggaaaggggctgctcgccacgccacccggtaagacagtgagggaccagggactgggagcggcgatcggggccgggagggctgtggggcccggcagctgcatggagggcgggctgcctttggggtccctggcagcggggcggggcggggcggaggcgccactcgttcctccaggaccccccttattccttaggtgtgtgcggtttggggaagtggagactccatggagtgctgggtgggtgggaggctcgggcacgtccagatttagggggcagtgggagccagttgggacggtgctcggctcgggtgggatcgcgccggctccgggtcctgctggagtgaggtgactgggctcccgccagggggcgcactgccccggccctcgccagcaggaagcgcgttctggctcctgcgaggcaaccgcgccgacatccaggacgcagggaccacagacacccaacttacgcggggtcccgccccgaggagcccgccctacactagccagacgggggagcgggaccaagagtgaggc

SEQ ID NO: 26220 - DNA, 351 bp, Homo sapiens; identical to SEQ ID NO: 23038
  chr11:45376873-45377224
  hyper

SEQ ID NO: 26221 - DNA, 433 bp, Homo sapiens; identical to SEQ ID NO: 23455
  chr11:47358910-47359343
  hypo

SEQ ID NO: 26222 - DNA, 459 bp, Homo sapiens; identical to SEQ ID NO: 24965
  chr11:61664527-61664986
  hypo

SEQ ID NO: 26223 - DNA, 383 bp, Homo sapiens; identical to SEQ ID NO: 8996
  chr11:66176338-66176721
  binary

SEQ ID NO: 26224 - DNA, 124 bp, Homo sapiens
  chr11:66511209-66511333
  hypo
cgtggaaaggggcctggatagggaggggtcgactcccaggtcccacctttgcgggggaagctggtccccctggattaggctgggagatgcttggggctggttgtaaggtaaaagacggggggtc

SEQ ID NO: 26225 - DNA, 906 bp, Homo sapiens
  chr11:66625105-66626011
  hypo
cgggccaggctcacagaagctggcttctgggactgtcctgggcccaagtgggcacctgcgccagccccacctgtgcctgggctgtggccccttcctacagggcgctcaccatggccccgccgctcctgctgctgctgctggccagtggagcggccgcctgcccgctgccctgcgtctgccagaacctgtccgagtcgctcagcaccctctgtgcccaccgaggcctgctgtttgtgccgcccaacgtggaccggcgcacagtggagctgcggctggctgacaacttcatccaggccctggggccccctgacttccgcaacatgacgggactggtggacctgacactgtctcgcaatgccatcacccgcattggggcccgcgcctttggggacctcgagagcctgcgttccctccaccttgacggcaacaggctggtggagctgggcaccgggagcctccggggccccgtcaatctgcagcacctcatcctcagcggcaaccagctgggccgcatcgcgccgggagccttcgacgacttcctagagagcctggaggacctggacctgtcctacaacaacctccggcaggtgccctgggccggcatcggcgccatgcctgccctgcacaccctcaacctggaccataaccttattgacgcactgcccccaggcgccttcgcccagctcggtcagctctcccgcctggacctcacctccaaccgcctggccacgctggctccggacccgcttttctctcgtgggcgtgatgcagaggcctctcccgcccccctggtgctgagctttagcgggaaccccctgcactgcaactgtgagctgctgtggctgcggcggctggcgcggccggacgacctggaaacgtgcgcctccccgcccggcctggccggcc

SEQ ID NO: 26226 - DNA, 134 bp, Homo sapiens
  chr11:66637058-66637192
  hypo
cgcgaccctggtcgatgcctcgcattagctgtggctgaggccttgctgcagagtgcacaccccggccttcggcatggggaggtgacgcatcctctgctgcctataggccagggaagaagagggggcaggacccc

SEQ ID NO: 26227 - DNA, 269 bp, Homo sapiens; identical to SEQ ID NO: 8997
  chr11:66677377-66677646
  hypo

SEQ ID NO: 26228 - DNA, 882 bp, Homo sapiens
  chr11:74952546-74953428
  binary
cgcgctggtgcgcggcggccccgcgctgctggccgcgctggacgctgcgctggcaccgctggccgagcttcgcctgctgggcctagcgggcaacgcgctgagccgtctgccgccagccgccctgcgcctggcgcgcctggagcagctggacgtgcgcctcaacgcgctggccggcctggaccccgacgagctgcgcgcgctggagcgcgatggcggcctccccgggccgcgcctgctgctcgccgacaaccccctgcgctgcggctgtgccgcacgccccctgctggcctggctgcgcaacgccacggagcgcgtgcccgactcgcggcgcctgcgctgcgccgccccgcgggcgctgctagaccggccgctactggacctggacggggcgcggcttcgctgcgcggacagcggcgccgacgctcgcggagaggaggcggaggccgccggcccggagctggaagcctcctacgtgttcttcgggctggtgctggcactcatcggcctcatcttcctcatggtgctctacctaaaccgccgcggcatccagcgctggatgcgcaacctgcgcgaggcgtgccgggaccagatggagggctaccactaccgctacgagcaggacgccgacccgcgccgcgcgcccgcgcccgccgcgcccgcgggctcccgcgccacctccccgggctcggggctctgagcggcgcccccgggctcggggcttcccttgcctggcccgaagccgtggagatgagacacccgcgagccccgagctctgagaccttcccctgactcggaggcgctaagccgtaccctctcgttcccgcctccgagagctcccaccgtcaaagacccagagatagccggtccgaatccagaaacccc

SEQ ID NO: 26229 - DNA, 993 bp, Homo sapiens
  chr11:75378820-75379813
  binary
cggccggcgcttgggcgccccgagaatgggcgccgacgcctgggaggccgcagagatctgcacgggcttggggatccacgggtggtccccgcggcgcggcagcggccaggcgcggaagtccttctggtactgggtctcgcgctcgaagggagcgtcggagggctggtattcgctgcgcggccggcagctgggctcgggccgctgcaccttccaggctcggtaatcctgccgcatcaccgagtccgcggggccggaggtggagccggagcccaggcccgggcccggcccgctccggccggggcccgccgccggctcgcgctcgccggtaggcccaggcgctggccccgttgcccgggcaactgcatccaactcgccctgggctggctgcgtctctatggcaaccgcgcgcgccgaggggggcgcgagcgccggctgcgcctgctgctgcggcggcggtggctgcggcggggcgcccgggtgctcggtggcctccgagtacttggtgaaaaccagcggcacagcgatgtccgctttgtccaactggttccagaagcgggcgatgcagcaggccctcgtgatgcacggccacgccatgatgctagctgaaaagccggcctcctctttcttcttgtggttctaaagcaagtctctataatcttccttcagcctccgatcctgaccggccaatgtggttcccaccgttttctacccccgatcagccggagctagttcgccctcctccctcagcgagcacccggggagagctgtcctaggagagtctgtagagtccctcgattaccggtcgcaaacgcctttgggagcgcagtctgctgcgagcgccgaagggtgagacgcacggcgttcccgagtccccggcgagggtgtctgggacgcgcccctccctgcggctgcggcggcgcacagacctcggtcgagcgaggcgacgtgaggagaggtggctacaggcttaagccatggcgcagaggaggggcc

SEQ ID NO: 26230 - DNA, 782 bp, Homo sapiens; identical to SEQ ID NO: 22775
  chr11:76381512-76382294
  binary

SEQ ID NO: 26231 - DNA, 1381 bp, Homo sapiens
  chr11:79149245-79150626
  hyper
cgttccccacggctgtgtcagggctggggtggcttatccccctacagacgaaaatcaagatttaaaagcatactcttactgtggtttctctatcaaagcccatcaacgtgatacacaggctgcggcgctggagggaagcggcgaaacggggagaataaacgcaacagaagcaaactgctgtctgcagaggcgagaggcgaaggaacggaagccatacccgaccccagccccatcccgtccccatcagcgccgggctagcgcaggaaaccaggaataggtgtaggtaagggtggcagcccggcagagccagcgttctactccctctaacccctcgccagcgtgggcctggatggctgggctgcctgggcatctccaagggggaccaggcaccgcgggcaggtttctaaacacgtgaagggcacagggcttgaaagacaaggaggggcgcccaggaagggcggaaaagaggggctttggggctccccaggacaccaagtcagtttctgaaaacggcgttccctggaaggccttccaacacctccgagggaagacttggagctctgaagacccaatgaaacctcagttctgactgactcctcctctgcgatcaattccggatgcccccacttagtccctgcctcggtaaccggttctttggggacagcagcatcagcacccgacgcccatcgcacaagtgggcgccgtggtgcgaggcgtatcctagctacccaggccggggtgggggcgccccggtacttacactccccaagcaggcaaactttcaggcttgtctttcgagaaccgggagctcgcatcacagttccgggtaatcaccgaggcagcttatgtaattgcccgcgatgccgctcagcagatctctctccttactcggcctcagagctcagtacatgggcaccctcttccccccaccccccaccccggcgattggaatcccgagcttgccccaccaccgccttctacaaagcagcggggtgatctcgtgtgctacaaacaccaagccagtatgcaggttcaggcaaaactctggctgcctccctgcgcccctttcactgcgtcgatggtttacagataactgcatttctataaaccctctctccacggttagggggtgggagggagttagagatcgggtgggggcttggcgcggtactgttgagggctctgcacccaactgagcagtaatacactcatccacatggacgcgggtgcataaatcgccttaacattttgccctgaaagcggagccaatttccaaagttaaggaccacgcagctgaatttccagtactttccaacctcgcctaggcgggggcaggcagagaaggggcgggcagcgggcagctaactcgcccgaccccccc

SEQ ID NO: 26232 - DNA, 998 bp, Homo sapiens
  chr11:79151127-79152125
  binary
cgggctcctccagcgcccgacgggggcctggggcgagctagtctgcagaggggctgcaggcgaccgggccggggcggggaacgggatccgggagaggcagacgaacctggggcgcgccgcctccctcccacccgcttcccacctccctgccctcccccaacccttgctcccaggctccagtccgcggcgggctccgggggctgcggcggctccaggctccagaacagcttgcctcttcggccacccgcgccctagcctccctcctcctgggccaggggagcaagcaaacatctcccggagccctcggcagccgcgtgagctacccgaaccctgcccgggccagcagtgcagagggcgatggagctggcgaggcgtcgccgcggtccccaaggcgcttttccgtagagcggatcacgccgccttaccgtggctgcaggctgctaccgccggggaagcggcgaggacggcggcagggaggcaaggcgccgcgccggtggctcctctctctctcggcggcgcggctcctctgctccgcgagccgtagcggggcgcccaggaaggagcaggtccgggctctgcgctcagctccagcgagaccaacaatagctcccgcggggagcggagccccagcgagcctccagccgcgcgcgcacgaccggctcccgctcccggccgctcccggccggcgtccctgccagcactgctgccccacatgaaacagctgcaatcccgaggcttctggggggttggggcgggtgtgtgcgcgcgcgtgtgtgagtgtgtgtgtgtgtgtgtgtgtttaatagcttcccttctcttcttcccctccctgcctgctcgcctgcctgcctccgtcccccaccctcgctctcttacacacagaaagagagggcgagcgagagagagacacacacacacacgcacacgcacacgcaggttacatgaatgggaggcggtagccaatcctacgaggccggcgagccgcgcggcgcactggc

SEQ ID NO: 26233 - DNA, 877 bp, Homo sapiens
  chr11:8040276-8041153
  binary
cggtggtttcaagacttccaccctggggaagaagggacggggagacggcgggaatctaggaaattgggggatggctatttccattcctgagaaggggggaacttgattgtgggaggttggctgaagactcccacgccggaaaggagggcgcctctgcggaagggccccgagtggcgacagcggatccgggactcccaagcaagcaggagccggagcagcctcttagcaacccctgtcccgggaaggtttgaaagcagcggtgccctagtgacgccggaaaagatggagcggttgtcatggcgacgcggagcacacctcggaaataaataaataagcgcccaggctgccgcagccgcgcccccgcgggacccgagcgagggggagggggcctcacgggcccgggtccccgcagtcgcgcgtccccgccattggcagagccggagggggtcaccccccggggggcgaatggtacagtcctccgcccgcgcctcggccgggcccgcagcctgcgagccagccccaagcccagcgccgccgccgcccgcggagccccgagcggagccggaggcggcgatggagggagtcagcagccaccggaccctgtcttacagccgctggagctatgacaggtagggcgcccgaagggtggccctgcgtgagcgcctgctgaccctcgatctcctgcgggagaagcgggcctccgggggctaggactggcgcgagcgcccgacccccagggtgggcttgggcacccggaccctcgggcatccgggacccagagcctcgggtacggcgcagcggagctccagcgagggtagtgtccccacacccacggggcagagctgtcggaggagggcacgcggccactgggactagc

SEQ ID NO: 26234 - DNA, 408 bp, Homo sapiens; identical to SEQ ID NO: 23040
  chr11:84431917-84432325
  hyper

SEQ ID NO: 26235 - DNA, 713 bp, Homo sapiens; identical to SEQ ID NO: 22776
  chr11:8615303-8616016
  binary

SEQ ID NO: 26236 - DNA, 772 bp, Homo sapiens; identical to SEQ ID NO: 9003
  chr11:94963753-94964525
  hyper

SEQ ID NO: 26237 - DNA, 513 bp, Homo sapiens; identical to SEQ ID NO: 6394
  chr11:993208-993721
  hypo

SEQ ID NO: 26238 - DNA, 1674 bp, Homo sapiens; identical to SEQ ID NO: 22777
  chr12:103351149-103352823
  binary

SEQ ID NO: 26239 - DNA, 423 bp, Homo sapiens; identical to SEQ ID NO: 9006
  chr12:110778337-110778760
  hypo

SEQ ID NO: 26240 - DNA, 145 bp, Homo sapiens; identical to SEQ ID NO: 9007
  chr12:112196497-112196642
  hypo

SEQ ID NO: 26241 - DNA, 1016 bp, Homo sapiens; identical to SEQ ID NO: 9008
  chr12:117536372-117537388
  hyper

SEQ ID NO: 26242 - DNA, 676 bp, Homo sapiens
  chr12:118198610-118199286
  hypo
cgtattttttaaacggccaattctgggaaattctgttctattcatttgctcagaaccctctgtgaaaagccatttttcattcaaccagagtctggaacgcaagtctgttcccggtttccttgacctgggcagttcctgggaccaaggggcagcccctcgcaggccgggtttcgaccgccccagggcacccaccgatcgcactcacttgggcgtgtgggcctcgtccacgcggtgccccagctggaactcgtgggatttgctccgatgcagcgcggtgaatcccgggatcaagtgtatcagttttcgggaggagggcggtggggtccccgggggcttcagcttgttcttcttcctcatgggcggcgtgcccggcggggtcacggtggtgacgatgttgggggtgcgcggcggggtgcggaccgcgtgccgctgccggggcgatgggggcagggaacggtggcccgactccagtggcgggggcgggcacaagcccgggtaggcgtccacggtaagcctgtccacgtgggtgtacacaggggccccgggagtggggctggtgtgacaatagtgctggacgcacttggacgggaccctggggctctgggagagatgggtgcggatccacggggtgggctccggggggcacacgggattgttctccttccccgtctctgtc

SEQ ID NO: 26243 - DNA, 56 bp, Homo sapiens; identical to SEQ ID NO: 23844
  chr12:121667875-121667931
  hypo

SEQ ID NO: 26244 - DNA, 972 bp, Homo sapiens; identical to SEQ ID NO: 23463
  chr12:121687598-121688570
  hypo

SEQ ID NO: 26245 - DNA, 373 bp, Homo sapiens
  chr12:122439414-122439787
  hypo
cggaggaggagatgttggattgctttgcttcactgtttggcctgaatcccgagggatggaaatccgagcctgcaacctgctccgtcaaaggtaccccagctggctttgtctgggcatgtagctgtggctcactgatttgttgtagacttcagtacatttatttctcctgatcggtgcaagccactctccctaagactgcacataacaaagcatgtctgttgggaatcccacatgaataagttatgaaaagaacagtgagtggtggcttttgttcccgcgctctgtccgtccttttgtttcttctgggcttattttccctttgttccactgacctgtcatcttgccggcttgggtgggtgaatattggccaccc

SEQ ID NO: 26246 - DNA, 435 bp, Homo sapiens; identical to SEQ ID NO: 9013
  chr12:125815555-125815990
  hyper

SEQ ID NO: 26247 - DNA, 293 bp, Homo sapiens
  chr12:126018005-126018298
  binary
cgagggaatgttcctaaacgcttgttttccctttgcatagctgattgcagagcccagcaagtctttctctaaatggctttactttgacaaggggtcgcgatggcattttgattggcatccgcctctcctccggggaaggacctcgtgggcgatggtcctggcgcacccgctagatggcgccgcagaccggcttgtacaggccgcgcgccctcccctccccggcggaggctcctggagcccctgcccggcctgactggctgcgtcctcaggccctgcgatttccagggattccc

SEQ ID NO: 26248 - DNA, 351 bp, Homo sapiens
  chr12:128850403-128850754
  hyper
cgttgattgtgtgccgaggagccctccccgggaaggctgtgatttatacgcgcaggcttgtcacggggtgaaaggaagggccactttttcattttgatccaatgttaggtttgaaagccacccactgctgtaaactcagctggatccgcgggccgtgattaaacacattgcccgctttgttgccgagatggtgtttcggaaggcgctgtgaatgcacttccctttgcggggctcacacagacaagatgtgtgttgcaaggatgaggcgcctgctcggcctccagcccagggccgggaagggagaaggtgctgtgcgtcgctgcctgtgtcgcccgcggctctcctcccagc

SEQ ID NO: 26249 - DNA, 662 bp, Homo sapiens; identical to SEQ ID NO: 6821
  chr12:131272765-131273427
  hypo

SEQ ID NO: 26250 - DNA, 554 bp, Homo sapiens
  chr12:132076273-132076827
  hypo
cgcagcccagtcaccagggccatgcggctccacggcttctacgcttgggcactgaggaccgaggggttcaatcaggtcccagctccagtccaaccttggaagccaagtgttgggaagggagcatccgaggacagacagagccagggcccctgagtcactgcaggaggacgcccccgctgggactcggcgtccgctgcgctgagccgctaaggagccggtctacttgctcccgcagcagcccgggggccggagctgccgacaccagggagacgcgttttctgcactgactcctacgctcccgcgtggacatccccagcatgatttctgtctccacccacttcgcacacaccccgccccggccagacacccccaaacccacacagggtgcagggacaccgccctggccttggctgtggctgtcacactcgcctgtcccgccttggccccaagtcctgccagcccggctccgtccccgccccactcccagtggctctgtgcctgcctccctcccgggctctgccagccctgcctctcccgccacgcacagctcaggc

SEQ ID NO: 26251 - DNA, 804 bp, Homo sapiens
  chr12:132643296-132644100
  hypo
cggatctcacgggggctaacgtgtcccccggaaagagatgtccccgtcctggcccccagcatcggcgagtggaccttatttggaaatagggtctttgcagattaaggagccagctgagatcatcctgcattcagggtgggccatcagtccggtggccggtgtcctagtcagaggcgtgaagaggagggcggaggccggaactatccatcggctccgagggtggagcaggggcctctgggagctggaaaaggcaggaatgggtcctccctgagtctctgagggccccgcctgcccacacctgcccatatttgccccaacctgcccacacctgcctcaggacagcatctcggtctcctggctgccagactgtgatgaagatgcatggttctaggccactggcttgtggtgacttgttgcatcagctgtggggagctcacacggtagcgcctgtcttggggggtgctgggcgggtgaccttcaggagacccctggggccccgctgccctcccaatgcctccagtcccagtgtctctgtggtggcatcctgtgctgaggatggtgcctcgcggagcctccactgcccctgtgtgctccgcaccacgtctgtctcgatggcgcccctcgaagacctcgggaagctccccgttcgctgtggccccccggggtctgtcccctgcagcactgttctctgggggctcgtggtccgagttctgatactgcaggtggcaggtcccctgaaggcatagtcagaggctttgctctgggctggcatggaggtatgggcgtggcggggtgtggctgggc

SEQ ID NO: 26252 - DNA, 1483 bp, Homo sapiens
  chr12:14133451-14134934
  binary
cggtctataaataattcagaaaaggtctggctataccattcctgggacaggcacggatgagaggtgggaaagccaacctgaatggaagaggagagagggagggagcgagcgaaggagggaagtgggaaggaaggaggaagggggggagaagcggcaccatacagcaacacacactcacacacacgcagaaacacaattcccacttaactcgccagcgagtgcggcccccagccccatctgcattgctgctgacttgtctcgctcgctctccccatcgcctccagcagcagcgccgcctcccaccccgggcttgtgctgaatgggttctgattgtgcacggggtgcacactgggcatttcttggaaggggcacactgacgcgcgcacacacgcccccgacgcgcacgcgccccgcgcgcactcacactcacccccgcgcacactcacccccgcgcacactcacgctgccgccgcgctgaggtgcagcgcacggggcttcacctgcaacgtgtcgattggacggatgggctcggcgcgtgggtccggcccggggcgccgctgccctgcccctctgctaggtgaagggatgaaaccccccaaaagaccagagacagccctacccagtcacagcaccccctcccccacaaaaaaaaaaaacctttaaaaaagccacgtccaaattagcaagtgccgggttctgctggatttcagagctttacctcatgccagattcgttcacgatttcacggcttcgaccctttatctgcctgacacccccaaacccctacattcaaaggagagactccaaagcccatctttacgtaccggctccgagcgcctccgcggttgcagtctgcggagaggggtggccggtggctgggaatggagggttttcctttcctgcaaagcaggattaatgatccgtctcgggggttttgaagttcatgactcttctttgcaaggcaaaaggatatgcattcggacgccagcactactggatggtggtgatcaagaatcacccttgacgagcactctcgatagagcgaagccccgagatttcctagaggtgaagaagccggaggaagtggtttttgaaagggggtggggggaaccttcctttctcaaaaagaggtggggggtggagaggcaggagcccagattccagttggtgaggatcggagccgggggaagggaagcgggcgggggcaggctgtgcaagtcaaccgcgcggcagccggagagggagagcaggaggggaggaggggagcgtcagaaaaatgggtattaatcaccggggacggggggaggcgcggggaacgcaggttgcctggtctggatttgggtctcacactcaaaaacgtgccgcgcacacacacacagacacacacacaccccctacctcgcacaccctgactccggggggaggagaaacccacgaagctggggaagatactgcttctgctcccaggggcgggtgtgagcgc

SEQ ID NO: 26253 - DNA, 758 bp, Homo sapiens; identical to SEQ ID NO: 22781
  chr12:21680379-21681137
  binary

SEQ ID NO: 26254 - DNA, 997 bp, Homo sapiens
  chr12:22093966-22094963
  hyper
cgtcccttaattctagaaatagcgatcgcgaaagctaagtgccgagaagtgcgagagagtgcgagggcgtttttggatagcagaaatgttagctcaaaatcgacaacttacagttattcctaaaaatgtttaaatggcattcatgtaaaagacacggattcacttactccgatgacagttttcctcccctaggcgaagcacgcagtgcgccggaacggattatttttagggtggtgggagaccagctgctgcctcctatcgagtttctaaattgcacagactgctctgggccggggcagacaccgcggctgagaagcaggaaactgggcagaagccccgcgcgccgcgcctggggccggagaccttccccatccctgctctgctcagctttgacttggggcgggcgcgacgccgcgattttacaaacccaagtaataggcgtccccttaaacttcattagacactgaaacttggaatatgattccatgattctccggagtcgggttttcaaacgtcaaaacactcaaggtattcttgtttctttgttttgtttttccatgctctgtaagcacccctttattagccacgtaaggaagcggatttggggatttcgctgtttccccctgaacggatccgggaaatgaagggctcattctaggtagaggcacccactgctgggttatgagtgcacgaatgtctcacaggagcaaggctggctcaagtctaattttccgcttttccccggcgacctagaaaacttggtttctctggtggaccagccgccgcgctatcgaagggcgacccttgcccaccgtcccctaaagtgagacgctgattcccatggactgcgtaaacagtcaccctcttctcctgtttccaaccagagacataattaactctcgagataacgtgtttatattaagatcaccccacaaccactcccccgcgaaacacaagccgtgaattttgtccccgacaaccctctttaattaacacc

SEQ ID NO: 26255 - DNA, 974 bp, Homo sapiens
  chr12:22487294-22488268
  binary
cgcacgcttcttcggccccgtcggccccaaaggtcagcgcaaggattttttcaaatgcaacttttccaaggatttctttctaggggaagtggctgggggtgaagtcacgatctatggccatggtcgcttcccctgcagaaggcgggcgctggggtctccgagtgcgcagagagcggcggcggcgagtcgctcccgccggttctgcagcatcacggtcgccctcggcgagggtccgggagaaggctcggctccctcctaaacatgtggcccgtggcgtccccttgtcccctccgagcgatgctcctgcgcccttcgccgcctcccgcgctgctgcgccgccaggcaacccccccccccccaccccgccccgagacgcgctctctgcgccgcaccaagtccttggaaatttccacggcggcccgggaccgctatcctgccccgggctcctccgcctcgcccgccgggaccctcgctccccacccctcccggagaagaaaagaactcgctctcatcagttaattcagcggcgcgccgcagccttccgctgcgccccggacttcgcagacaaacgcccggggattggtggaaatcaaggtctccccctccctcccccacccgcaaaattgcctccttcgacccgatccgagccgcgacactcgcccagagcgcgcacccctcactcgtgcccttgttctttggagataacggcagacaataaaaaccaacagccccccgccaatagaaatatatcagtccctgagtgtggcggagactggctaatatcctgatccttcgacaagcggccggtgtgcccaggctgtcaccctgctgccgtcaccctagtctttctctagctggttggatattaacccgcagccaggcgcgaggaggctggcggagatttattccttcctgggcccccacccccattagccggtcccggagccgcggcccgtgtgtgtgcgcgcgcgccc

SEQ ID NO: 26256 - DNA, 502 bp, Homo sapiens
  chr12:22488321-22488823
  binary
cgcaagcgagcgcgcgcacgaggaggtgcgtgcactccggggtcctccgcctcgcctcctccctgaaaggaagtgctgcatccagatgtgcaggcagctggtgcccaaacactagacctcaagatgtcacattgccttggaggcgcgcggccttttagattaaaggaccgttggttcttagacgtccttcttgcccttcttgcttgtgataagcgataagcttatcgcaaccccgaccttggaaaagcaccacccgccttgacccaccgagccgagagagtcgctgttagccatttctgctcgccccggcggccgacgcatagctcgggtacctcctagcggtcgcctattctatttgcttaagcatctcgtcaagcataaagtgtgcaaggacaaagaagaaacctggtcagcttagtcatcacgaaaacaaaatctaaggctataactccatttgttcagccgaccaggctgcggtgtctggtacctttgtctagcatcc

SEQ ID NO: 26257 - DNA, 921 bp, Homo sapiens; identical to SEQ ID NO: 22782
  chr12:25101390-25102311
  binary

SEQ ID NO: 26258 - DNA, 254 bp, Homo sapiens; identical to SEQ ID NO: 9023
  chr12:2692239-2692493
  hyper

SEQ ID NO: 26259 - DNA, 62 bp, Homo sapiens; identical to SEQ ID NO: 6831
  chr12:27742262-27742324
  hypo

SEQ ID NO: 26260 - DNA, 819 bp, Homo sapiens; identical to SEQ ID NO: 22784
  chr12:40618264-40619083
  binary

SEQ ID NO: 26261 - DNA, 4797 bp, Homo sapiens
  chr12:4377809-4382606
  binary
cgtgggctcactctgcagctgcagttttcagcccttgcagtttagaagattctgcatgagcacggatgccacgagggtatccagcgagtgggaagggagtcgccctacatgttttcacatcgatttgtaaaactgttttgaaagggtatttctagatccatttgttccaaatgcagcaaaattcatccgatatcgctcacaatgcatgcacgggttatcttacatgtaatagccatcgtattaaccaacccagctgatactgagatggtgaatggggcgggggagcagggaggaatatgtcgcgcatgaaaaactccgggtgtaaaagtcaatgcagaactcactccccgaggaaccgaaaaagacattcacgactctcaagtggagagaggatagaaagtcaagtggcgggggtcgcgaccagtgatcgggatttcagtctgatctcagtacccagcggaacaggaccataacctaaagaaatgagctttttccggagcaaagagcggccccgatttcaaagtagaaaaaataaactgcttgggggtggaagatggcgaggggcggggggcggggagggaggcgggtcgcggcgctggctccggggtccgcggcacggcctcctctgccgcgctgcccagggcccggaccctgcccggcgctgcgcccaccgcgagggtgccagacccgccgcgccgccgccgcgctctcccagccgcggccccctcccccgccgcttcctcttgctctcccagccccttcccccacgtgtggatgacgtcaaaattccgcgaaaaagccgcgtggtggctccccgagcggaggcgcgattccgccgcccagcggccccctcccgggggcgcctggagggggagaagggcggaggcggccggttccttctcctcccgggaggcaggaccccccgacgccgaccgccggacgccccccgccccaaagcttattggaaaattcacttttgtaaagcaaatgtatttccagagctattttcggccgcgtgaggcgtgtcctaagctgaatcagacaggaagagggggaagttcgggtcttttaattttttttttttccgaagggaggggagtgagatgctaggtgggtgacagacggcaggcgctcgccttcttaactcacgcctgtcgcatctgccgcctcagtaatccagccccgtccaagccgaaattcgccgaagggagtgcggatgcacaggcctggcggactctgcccccctccagaacgcagcggcccagcgccccggcgggcgcggctgcgaccagagggtcccggaagcgagtgaacacctgcaatcgcactgcccgtccccacccaccctgctcccccgtgctctccgcttcccgacgttttcctcttctccttgtccgcatttttctactttgcctgcactccctccttcctcttgatgtgcctcctatgtgtcccctcggatttatgtgtcccctcgcattttgccagtcgggttttcggttttgattgaccgtccatccctccacggagaaacacaaacacagctccactctttgggggagccgaggggaaggcagtggctcccatttctgagcctgaactcagtcactacccgctccccacctggcctaggcgcccctgcgcggagaaggcgggactcgaactcgcgctgctcccgggccttgagccgaccgcggaatcacctggctgggaggcatcctccaggtaagcttgggagtatgtgtgcttagtgctgcaggctcctgcagaaaagtgcctataaacacccaacaccctgctgcaccctccacctccaggctttgtacactttccaaccgaaactccaaaacgctagcgtagagggtggggagccggccggaaaaagaataaaagtccaataaaactggcgttcgctaaagtttatcaccagtcctacatgggatatatatatatgtatttttttttccgtgaagggtgaaaaggagataaggaagaaccaacaatctaccccctcccgccgccccccacccccgcgccacggtgatcagtttggacttcaaagccagagcacaggctcttgcgctttttcttgaaaccgaagtctacactgaaagaaagtgtgcacttttgcctagaaggcaacatgcgttttcccgcgtgctaggtggagtgcattttaacaagacattagggttttaacacatggctggagtggcgaccaaaagggaaaactcagtttccagtccaagcctcctagagacattcctgccaacctccgcaccctctcacgccccaccccacgtgtgagagtctgcaaaaccaccggggattggattcgatggcgagcttcacgctcgggaacagtcagtaatcggaaggggaagtggacaggggaacttcaagaggcgagcctgccacgcgggaagcgcccgaacttgcgggtctccatgaatgcagagggcgccgggaagggggggcatccggccgcgaccctctctgcccctcccattcgctgcccccctccccgctggaatttctctgtaaagcaagacggagtagggggagggggagagggaaggggcgagagggccctcggctcactcccgagacgtgaggactcgccacccaggcattctcctcggggtgggctgggccccgggacgaccacccgcttcttcctcgcccccgctgcccccacttcgggagacccagagctctggatgcctttccccggagaagggggggtgtgcggagtcggggtggaagagaccttgctcgcagagctatatcaagtgatgtccagaggctgggagccccggcggcctctgtcccttgcctgtcgggttagatttatactttaaaaatacctcccgccctccctccttctctcgcctctccccgctgcaactttctttgatccgctcaaaggtggcttaggtgaaattggagtaattcccttatgggggtcttaaaatgtaagtgaatgtccttatccggggtgactcaaaagcttaagtcgggaagcccaacgtgactaaaaccaataggtgattgttcggggccgactgtgtgcgggtgtacacggtattcggcccgggtgtcatccgcggcgctggactgtttcattttgagtttgcaacttgggtttttcagcgagctttttttcttcctgaaagctaatggcttccacagcaattagacattttcctcgcccgccccttccctcccctttctttacatataggagatgggatactcattcccgctgctattgataaggtcggaggcggccgggcctctccccagctttcgcccgccccagcgcccgctctccctccgccctcccttggcttccttttgatgtagtggggaacgcgtcctactaaaaaaaaaaaaaaaaaaaaaaaaaaaaagtaatctgcccggtaacaatcagcgcgcagtagcaggagccccagagctattggctatgcaaatagagggaggggagacggcgccccaaactcttcctcacccttttaaagcgatatcccctcctttcccccccaccaccccttccgccccaccctcgtttaaagaggctggctccggggcctgagttaatcgcttgcacctctagtttattcgctcccctcctccgccttgcagggaacctagtgtacggctcacccagcccgcgccccaccccgccttgctggctctccgcgcccctgcccgggccccctctctcggtgagggaggcactcagtcggcctcggtgtgcccagagagctcgagccacgccatgcccgctgcacgtgccagcttggccagcacatcagggcgctggtctctccccttcctcctggagtgaaatacaccaaagggcgcggtgggggtggggggtgacgggaggaaggaggtgaagaaacgccaccagatcgtatctcctgtaaagacagccttgactcaagcatgcgttagagcacgtgtcagggccgaccgtgctggcggcgacttcaccgcagtcggctcccagggagaaagcctggcgagtgaggcgcgaaaccggaggggtcggcgaggatgcgggcgaaggaccgagcgtggaggcctcatgcctccggggaaaggaaggggtggtggtgtttgcgcagggggagcgagggggagccggacctaatccctcactcgccccctccccctcccgggccatttcctagaaagctgcatcggtgtggccacgctcagcgcagacacctcgggcggcttgtcagcagatgcaggggcgaggaagcgggtttttcctgcgtggccgctggccgcgggggaaccgctgggagccctgcccccggcctgcggcggccctagacgctgcaccgcgtcgccccacggcgcccgaagagcccccagaaacacgatggtttctgctcgaggatcacattctatccctccagagaagcaccccccttccttcctaatacccacctctccctccctcttcttcctctgcacacactctgcaggggggggcagaagggacgttgttctggtccctttaatcggggctttcgaaacagcttcgaagttatcaggaacacagacttcagggacatgacctttatctctgggtatgcgaggttgctattttctaaaatcaccccctcccttatttttcacttaagggacctatttctaaattgtctgaggtcaccccatcttcagataatctaccctacattcctggatcttaaatacaagggcaggaggattaggatccgttttgaagaagccaaagttggagggtcgtattttggc

SEQ ID NO: 26262 - DNA, 1697 bp, Homo sapiens
  chr12:4382915-4384612
  hyper
cgtcaccgcttcagagcggagaagagcgagcaggggagagcgagaccagttttaaggggaggaccggtgcgagtgaggcagccccgaggctctgctcgcccaccacccaatcctcgcctcccttctgctccaccttctctctctgccctcacctctcccccgaaaaccccctatttagccaaaggaaggaggtcaggggaacgctctcccctccccttccaaaaaacaaaaacagaaaaacctttttccaggccggggaaagcaggagggagaggggccgccgggctggccatggagctgctgtgccacgaggtggacccggtccgcagggccgtgcgggaccgcaacctgctccgagacgaccgcgtcctgcagaacctgctcaccatcgaggagcgctaccttccgcagtgctcctacttcaagtgcgtgcagaaggacatccaaccctacatgcgcagaatggtggccacctggatgctggaggtaggtcggggggtggcgctcgccaggagccaggacccctccggatgctcgggtccccggccggagccctaaacctgggagagggcaatccccgcgccggcctcccggctcctgtgcgggagtttaccgcgcgccttctggcgagacgcgtggctttatttctgttcctctccagataaactggggaggcagaggggggaggaaaatctgggagaagcgaggctgtcctgggcgggggtaggggagcatcccgcgcgcgtgttcctgcatgtggctgcctcttcttcccacccccctcgcgacctgtcttttgcgaagccgccgcggctgcttgcgctgcggccaggaagagagtcggggcctgaaatcgggaccccgagtagaaaggcaaccccccccaaaaggccagagcaaattcgtcttggcctcaggtccccgcctgtggtcgcgactccgcgctggcacttcaccggggaggtggagggaggagggagaaggagagaaacggggaattcgggagccccggaagtcccattgaagaaacgcgtgtttcaggggaacccaaaagaaccgcttcttgcccctcactccaagtctttgcccagcgagccgtgtgcccacgtatgcacagctctggacctgccgtggtttcgccatgttgctttgcaaactccctttggaaaggctgggaaacgtcgcccgcttaccctcgcaccccattatcccggccaccccacttctaatcgtgccctctcccccaccccccacctcacgaagattacttacagtttggttttccagcttcctcggtgcggagatttgggtggggtaggaagggggggagggggtgtgtgtaggggggataccgggtcacccctgaaggagaggtgggagccccccgtgcctctttccagggctctctgctcccgtctttcccctcgctcgtcaccgcgttccctagtttctgtccttgtgggccgcagccggacactcccgccgcggcgctcaccccttcaagtttcctcccgggatccaaagccccaggggtcggaatacagacctttctggcacccgaaacctctgtttcgggaagcctggctcttctttggggttttcacgccaaaagggcttttctaggatatttcctcgatttttaattattttttgaaaccatccccccctgctccgactccagctgccgaggctgcggc

SEQ ID NO: 26263 - DNA, 1481 bp, Homo sapiens
  chr12:45269418-45270899
  hyper
cggtctccaaggcaagcacagaaaaaaaaaaaatccatatccaaacccgcccccttactccaagcttcccactccagacctactttgggtccgggaaaagcgaggcttccccagccagcccatgctgccccgaggcgggagccatccctttccccagccccagctctgcggccactcacctgctccgagaccgaagatcaaacagaatgttctcagtaagacccgagactccatggtgcggatcagctcagtccatcgtctccctctttaaaaataaaaataaaaatcgaagaggttcttggaatcaagcgggaaaataacgtttgtctctcctgctgctgcctcggatttactgatcagtaggattaatacgctttggttgcctaagaaagaaaagggaggcctccccaggcgcgtgaagaacttagaccctccaatgcgcacatcattcccacacgcagggccgaggcggcagcgcggcccggagggggcccggagggaggggtcggactcgccccggcgcggctccgtcggggaattagctcccgagccgaataaaagcagccaaagactcgcacacccggtagaaggggggcggccccaagaaagcccgggctggggcggccccgcacccccccgtcttccccgccgcccgaacctgttgtaaaggcagagacaatggagaaagctccgggagacgcgcggagagactgctcctccggggagggaggggcgggccgggggaggcggggtaaggaggagggaggggccgccgagggcgaggccggcgctcagcgtcggtctcccgcacggtctcctggatgccaaacccggtctagggagcccaggagccgttgcagcctcagctcttctccctccctctctcgatgacccgggcaatgccaacctcctttcgggattgaaagctctaaatccaaggtgctaagttgatgggcggtctttgctctcacccctcgatttcgggcgcgtgtcttgaaagacaggagagaaaaaagaccacccagctgcaggaggcaaggctggagcgagtagcgctcgcctgccctttaagcaaaggagggaagcccatgtgcactcgtgcactgggctccggagcagccccggggtgcagggcactccccctccagggcgtgcggaggaaggccaccaaaacacgctgcactgccgaggtggagctgggcaaagtaggtagagactggtggggacggatggcgagcctgggaagccccgggtgtcctggtggagaggttccctgccgggggcggggcgctggagagcttccccggcgcggagagcttcccgggcgcggagagcgcagagaacttggccaggaggtgctggacagctccggaacccgcgcgccccctgccaaataaagcgtggagacccggactcgggctctctgggaccagcatacagcagaaggcaaggggaactgagccagggcgtctgttcacgcc

SEQ ID NO: 26264 - DNA, 929 bp, Homo sapiens
  chr12:48397567-48398496
  binary
cgtttgcttgctccctcgctcgcgctctctctttcctacttcacctaagttcgatgagttgagatctgtttttgctgaactcgaagtgcttcgaagaggcgagctgtgtgcatgtgcgcctaattatcaaagctggtggaaaagagcccatttatatctgtgcgcaaacttctccgagccaacactttgcaagttcagtattctagcgcaacgtagggacctgcaaatacttgcaactgcgatgggcaccgaggaccctgggacagagtccttgattggcagaactcttcttggtgaacttctgcgtgtcctgtgcctaagtcggcgcgctacgaccccgggagccgttttagcccggagccgcgggctccagagctggagcgggccggggagaaggatgctgagggacgcatggaaagcaggcaggcaggcaggggcgggggaagacttacggacatcctggccctgacaccgaaggacagcggcgacgagcagcgtcagcagcaccagcgtctggggagccccgaggcgaatcatggctcaccgcggggcctggctgagccgggcccgggcggagcgcagcgaaacggcaggagcacggcgcgggtccgggtctctaccgcgccctcatgcaggaggcccttggagcaggagggggaagcgggagacccggcagcccagcagcgctctgcgtcttctccccgccgcggcgcccgttatatgcgcccggcccctttcgaggctggcgaactcgcccaaaccgcgggccgccccctgccccccgctgggctgtaacctgaaccgcccgcccccggagcccgcctgggccctgccagtgcccgcacctgcccaagccggacccccctctctgggagtcacgcttcccgccctccacccctagtgcgccgagtggcctgatcgggcggggc

SEQ ID NO: 26265 - DNA, 239 bp, Homo sapiens; identical to SEQ ID NO: 9038
  chr12:48551355-48551594
  hyper

SEQ ID NO: 26266 - DNA, 1216 bp, Homo sapiens
  chr12:48576803-48578019
  binary
cgtaggagcggtagggtctcataaaggagggagtcccatccttcccccgctccggtgatttctatagctagagggctgatttactgcagaaacctccgtagcgccctcctcctgcctctgcaccgtcaggcccggtgggtccggctccagagcgccaccgtgccccagctcaactctgggatcattagcaacagcctctctaccctctccgctttcctgcgcatcgctggaggacagggaggcaggactcgactttagcgccatcctctgagaaaggaatgcgggctggaaaaatctttccagggcagtctcgctgggtctcataccccggctaggggagggacgatctctcccggacttggaggtttctgcagcagacggctctctcatacttccctattaaacattgcgaccacacgctctttccagccttggccgaagccactgtagcgtcccctctcctccccccaccccgctagtccagactccagagccccactgcagcttccagccatcctccctttttcttcgccacttcctggttaccatggagacacacgtcatttacgtgccgtgcgtcgccttggaaacagaggagcatccgcgacacccccgggagacccaccccagctgctgctgccacactcgcgggcgctgcccggtaatggcctgggggagtcccgagtccgacgcgccgctggcctcagcctggacgcggacccctccgcgagcgcgtctgtgacccacggaaccggcaggcgctctctgcttgtggcgcccagagggcggcgctgacacgggcgcgatccgggaggcgaggcagggcagggcactttcgtcccggggcgatcccaagagacgccggctctgggaccctcgccgggtcctcgtcccgcagcctcttctcggcctcccgcgatcctgcctgcgccctctgcccaggactcgtctctcacgtcggctccccgccagtctcgggagcctccgcttccctcggctcccgctagcccctcccgggacctctccccctccaccccctcccccaccccggaggccgggctggacgcgacccagagcctccgccacccgcttctgccactcaatggaggacggtctgctggagatcatgaccaaggacggcggcgacatgccggcgcccctggaggtgtccaccgtgccggcagtgggggacgtgatctccggggagtacaacggc

SEQ ID NO: 26267 - DNA, 1316 bp, Homo sapiens
  chr12:5017995-5019311
  binary
cgggaggcaacggtggtgagaagggtggtcccaaggccgcgggaggagccaatcagcggcgactctgggctcttgcagcctccttagagactccgcagccctggaggtaccaagctgcctgctgccttttctcgcgctgcaggcgcggagatgcagcgcctctgggggcgcagctccagccgcactcgcagggcaaggcacacgcccccggctcctgctgccatgcgcctctgcgggggaccctttccaaataaattgcaagctttgaaagtggccctgtggaggcactaggctggggaaaaaggctgcgggaggagggacatagggtgggaggtgagtaggcgacttgcttctcagattattcccaattagcaccaagttggcagacaaccccacaaacccacgaagccttcggtcccccacaagtcacattccctgtatttcagaataatcggatcgtaagaaaacttcaagtcccatcgtaggttaaagagggacaggctcttagtaccgccgccgcccagtaaaactacatggaacaaacccagggatcctcatctgcacagctctgcccaaagtctgcagctctgcgagtccagccggcgggggaagctgggtgggccccgcagagagcaagggccttcttgggggaggagcgggatggggcgcagagcagtgcgatcgaagagggttactgtgggactgcacaaaagcaaacccgtcggaggagttttgccagaaacaccaccgcctgcattgcgtcggacctgaccatttccaatgtgaaattcccggggaaggtcgcgagccgctaggggccgttcgtgggcggggcggcgggccacaggggaagtagagttagcggtcggcttttctggtaggagaggaaaaagctgtgctggcaagggtgggaactgaatgacaaccccgctctcttccaaaccaccccctcatattttccatccacctcctcgctcctgccctcccccgccctccccaacccacgcccgggtgggccaatcgctgctcggtattccaggcgctttctcaggtttctgctgatcttgcagcgcccagaaatggaccgagcggacccgccgccgcacgcaccctgctccactccaagctcctaagggctcctggcgcgccgcgtagccttggcgaggtccgcgctggggtgcggagagcgaagggaactggagagccatgtagatccaggctctcgcccgcccgcctccttcgggatcgaatcaagggctcccatagtgttaggagggggcgagagtgctgtttatcgtcatttgcctcggagcttc

SEQ ID NO: 26268 - DNA, 598 bp, Homo sapiens; identical to SEQ ID NO: 25035
  chr12:50297476-50298074
  hyper

SEQ ID NO: 26269 - DNA, 1389 bp, Homo sapiens; identical to SEQ ID NO: 23870
  chr12:52400270-52401659
  binary

SEQ ID NO: 26270 - DNA, 501 bp, Homo sapiens; identical to SEQ ID NO: 25039
  chr12:52652140-52652641
  hyper

SEQ ID NO: 26271 - DNA, 125 bp, Homo sapiens; identical to SEQ ID NO: 9041
  chr12:52672849-52672974
  hyper

SEQ ID NO: 26272 - DNA, 156 bp, Homo sapiens; identical to SEQ ID NO: 9042
  chr12:53272458-53272614
  binary

SEQ ID NO: 26273 - DNA, 725 bp, Homo sapiens; identical to SEQ ID NO: 6845
  chr12:53613775-53614500
  hyper

SEQ ID NO: 26274 - DNA, 211 bp, Homo sapiens; identical to SEQ ID NO: 23468
  chr12:53662999-53663210
  hypo

SEQ ID NO: 26275 - DNA, 194 bp, Homo sapiens; identical to SEQ ID NO: 9044
  chr12:54150983-54151177
  hyper

SEQ ID NO: 26276 - DNA, 1064 bp, Homo sapiens; identical to SEQ ID NO: 23875
  chr12:54338511-54339575
  hyper

SEQ ID NO: 26277 - DNA, 929 bp, Homo sapiens
  chr12:54398724-54399653
  binary
cgggagcgctgggatgcgggcttctctcccagaccgagagcggcgtttccgggcttccaccccgcccctgctcccaggccctgtcgcctcccctcagcgtccatcagcgcggcctgcttcctgcagccggcctgagcggccttactgcgggcaggaaggagggccgcgggcttggaggaccctgaggaaagcatgggatgcagaacaggcccacccggcccggcccactgttcaatcccagcccagcctgcaggtcaggattggaatcattttttattcgctatcatttacgaattaacaacacaacacgcatctggggaaagaaatgaaagctgggggtagagaggggctagcaaacgccctcttcccctaatcttcccctcccacctctcctctgctcctttgtcagaatcacaaaaccctaaagattgttccacttgagaaggcagcggataggtacatttccgcagccccgaaatgccacttttatggcgctgtttgtctccctgttctgggttctcaatggggccgaacaaaacagcagcgcggagctggctagacgtctgggcttaattgttttatggtttaaataaggtggacactttcctttgaaatcggattataggaatgttttgtctatggcccacggagaacaggacctcactggctgagagggagaggtggagagcgcgcgcgcgagagggatgggctacaaaccaggggtcaaacagcctggagaagtccgagtcccaccccaaagtcctgcaggcggcggcggaatagtcggtgcggggccagcatcagggtaagaggagggaggactttagggtgcgcgccgcgggcaagccgtcgtgggagcctcggagcgtgcatccgcgttcgcggagatgttccaagcccagaaatgcgcctgaatggggggagatcgc

SEQ ID NO: 26278 - DNA, 432 bp, Homo sapiens; identical to SEQ ID NO: 9046
  chr12:54400009-54400441
  binary

SEQ ID NO: 26279 - DNA, 419 bp, Homo sapiens; identical to SEQ ID NO: 25051
  chr12:57943755-57944174
  hyper

SEQ ID NO: 26280 - DNA, 1029 bp, Homo sapiens
  chr12:58014708-58015737
  hyper
cggcggcaggaactttcgccatactcagcctcatgacaggctcggccgtcgagcggctggtgccggaacccctcgtggggaatctgagcggaatcgagaaggagcagctggacgctcaacgggttggggtagccgcggccgtggccttcgggagcggggcgttgatggtgagggaggacccggggaggaacccggggggatccctgctgaggggccagggaaattgggccggggaagagggagggaccagctttcggcttgggttcgggagggcggaggtgcgcggggttggtttgctcctcctctagatggtgacagcgcgtcttctcccccacagctggggatgttcgtgctgcagctcggcgtcttgtccacctttttgtccgagcctgtggtcaaggcgctgaccagcggggccgcgctgcacgtgctcttgtcccagctgccgagcctcttggggttgtccctcccgcgccagatcggctgcttctctctcttcaaggtgggggtggaagaagaaaggagaaggggcttctagaggtcccgtgaatagggaaactcgaaaagggaggaaggacggagggtggaggggtagtatgtgacaagggagcaggaaaggaggttggagccacgtggctgaacgagggcgctgaggaggtgtaagccctggtggcactgggtagagagggcctcgctctgggggtcccgcgccggggcgcatgagccctggcacggggccctctgctcatcgcccctgccctcagacgctggcctccttgctgactgcgctgcctcggagcagtccggccgaactgaccatctccgcgctcagcctggcgctgctcgtgccggtcaaggaattgaacgtgagattccgagaccggctacccacgccgatcccgggggaagtcgtcttggtgaggatggccgtgcgcgccggccccctgcccgcgcagaccctgcggtcctgtgggaactggccgctgccgccccctggtggagtgcagagaggccacggaacagagggcc

SEQ ID NO: 26281 - DNA, 937 bp, Homo sapiens; identical to SEQ ID NO: 23876
  chr12:62584692-62585629
  binary

SEQ ID NO: 26282 - DNA, 852 bp, Homo sapiens; identical to SEQ ID NO: 23052
  chr12:63025588-63026440
  hyper

SEQ ID NO: 26283 - DNA, 917 bp, Homo sapiens
  chr12:64062220-64063137
  hyper
cgagtcaggcgaggtccagagagacctgactcgcctggcagcctcaacggacttgtccccgcagccgttgcggacctcccggtcgtcatggcgactgtgaaatgtggggtggggcgcatgcgttggaagccattcgcgcgggcagtccctgagtgtcccctcacgtgctccccagcgcgagcagcacccccgcctctgcgcttcccagagcgtgcagcttccggtgagggcagccccacgcacagccccccacaccctccccagcgcctgcagcctccggtgcgcgcaggccccaagcccacatgcgcagtcctcaccttgcgcgcagccccatgtacagccccggacgggctcccagccccactggcgcagaacccatcaccgcttgcccttcacgcgcttcattgggagtgcagcccccaccccgagcgcgcagctccacgcagcctctccacactctccccagcgcctgcagcacccccagtgcgcacagctctgccagtcgcttccccgggcgccgcccctgcaccacttcggcccataaccttgcggcgactgtctgaagaacttcccgtggtttcattcttttcttcgggtttagtcttagctgtgacattttaaccaaaagattacacgttaattaacgaggtattaaagggaaagatctcagctgaaagaaatgactgtaggaagtgtgtcagggaagccaacggaaccgccggcccgccggcggtgcgcccggcattaggaacgtctctactcccctacgatcgctgaggtatcggacagtcagtgcccgttgccaacgcagagggaacgggccgagactgcgggcaacaagtggcagagccggcgtgagtccggtgggtctgatcccagagcctcaggttgacgccacttccttggcacgggacagc

SEQ ID NO: 26284 - DNA, 463 bp, Homo sapiens
  chr12:68758776-68759239
  hyper
cgcctcagtattgtcgatttccacatccacagcctaacaacgtggtgcaatcgccctttgcgacgccgcagaccaacagacggatgctgccctgctgcagtttcacagcacaccgggtctttccgcttcagctggacagaggcccagccaggccgtagggaggattccgaaggtctctctgcagaggaccggcctctcagaccgagaaggctccacccaggcaggaaaggacactgtatgtggggcagtcggcctgggccccatggctcgtgtttgttgctgaattgggcaacgtgggctgcggttcacagggcaacagagacttcaccacctaacacatcggggctggtgcagctgaggagggctgcttctgcctcttggtgaccacgccctttcccaggctgggcccacaggaagtctggccgggaagggaggaggcactgcaagctgtgggaaccacacc

SEQ ID NO: 26285 - DNA, 733 bp, Homo sapiens
  chr12:70760478-70761211
  hyper
cggggggagcacgccagccgccgagagtggggggcgatggcgaagctccgggtggcttacgagtacacggaagccgaggacaagagcatccggctcggcttgtttctcatcatctccggcgtcgtgtcgctcttcatcttcggcttctgctggctgagtcccgcgctgcaggatctgcaagccacggaggccaattgcacggtgctgtcggtgcagcagatcggcgaggtgttcgagtgcaccttcacctgtggcgccgactgcaggggcacctcgcagtacccctgcgtccaggtctacgtgaacaactctgagtccaactctagggcgctgctgcacagcgacgagcaccagctcctgaccaaccccaaggtaagaacgccccgcgcacccaggggctccccgcgagggaggtttggaggcagcgtcggtgttagactccgcgcggggagggttcggcgtgtgctcgcattgctaggaggagaccaggtggcgcaggctgtgctcaaaccaggaatgactacatcagggagccccagggctccggtcttttcaggtgggtttacgcgcggcgaccagtggtgcccagaggcttactttaaaacctgtcttgcctggtctcagattttgaggcctcgacccagtccgggtcctgcgcctaccggactgggtttggagaagtgcaaggagccaagaaagttaacttttcctccatttaaagccagtggttagc

SEQ ID NO: 26286 - DNA, 406 bp, Homo sapiens; identical to SEQ ID NO: 25055
  chr12:75728083-75728489
  hyper

SEQ ID NO: 26287 - DNA, 454 bp, Homo sapiens
  chr12:77719278-77719732
  hyper
cggggggacgtcggggatgggggtggccagcgcggtcctgggagtggcgggttcggatgggctggctgcggtgggccactttgggcatctcggcgtggcctgcgccggggtcacggggagggctgtcagcgccagggcggcggaacccgaggtctccagacgagtgagggagggatgcaggcttgggggtgatggagcgcttggctggtggctggtgagcgtccatacatcatagctctccttcccactcccccgcccctcttcgggattctctctttctctttccccgtcctcatttctttcttcctttactcaccactcgcttcattctcttccttccatttcctctttttttctcccctcatttcctttttttcctttcccttttaaagaaaggggaatcgtttgtaaccctttcgttctaccaacgtggaatagctgtgaaacctgcagc

SEQ ID NO: 26288 - DNA, 744 bp, Homo sapiens
  chr12:79257237-79257981
  hyper
cgaggttgagggagggagaaagggaaatagttctctccgttttgaaatcctttcacctgtggagcagataatggacgggcccctctcccagctgggctccgctcccgcccctagcctggcgcgcggtcccttcccccacccgctgagccttcctgttcggtatttcggtattaccaagctataaattgcctgagagcttagagacaatcaggtcaccaccgccctcacaagagaaaagcttcttacttccgagcagaacggttcagctgggaagagaggaagcagggagagaatctatgctttagtcgtcactgctctggcaaggggtcgagagagatgggggagggaggtggcaaaaaataaaaatgaaaaaataaaaaagcatctccaacaatgttgcacttgacccaagtgtacaaacttattggtcgctgcaatggaaactcccagtgcactctccacggcctggcagccgccgctgatgggtggagtcgcgctcccggccccacctatgggacggagctgcttctcccgcatctcggctccaccgcacccttcgcgggaagtccccaggcttccagcaaagctcagcttatcccgcccccgcttccaacccggaaccccagaagaacagcatgatgagcctccggcagccaggtgggccacctccccgcggctcagtttgaggacacttgtgcggaaccctttcacatccccaccctacccagctttcacaactccgcc

SEQ ID NO: 26289 - DNA, 815 bp, Homo sapiens
  chr12:81331048-81331863
  binary
cgagcttgctctctgcccctctccaaccccgagcccctggcgcctatagccgtccccgcgcagcggctccaacaaagccagaggaccggagacgacccggcgaggggctgggagtggcagcggggaccccagagccagaaggaggcgtcccctcggcggggcgagtacagtgggaaggggcagcgggaacgtagcggggagagaaaggggaagaaagtgttctgttctcggcgcgaacgccttcctggctcgtcctcgttccccttctcctcctgcctgagcgcgtcccatgtcccgttgggaattggcaggcggggaagggaggaggggagaggggacgcggtggcctggcgagcgagccgctcccttacctctgtccagggtgagcggctggaccactgtcaatgtcgccatgtctgccgtgggagccgaagtgacgctcggcttcagcatcagcaaccgctcgtagtgagaaaaaaaggaggagattgggggcgggggtggagagggaagacggaaaggagggggaggagggggaaggaaggaaggtggtggtggtggagaagaaagcttgggtgggttggtagccagatggagacgcaactgttccgcggcggcagatcttcagttgcggtgcggagctgagcaggtatccgagagcgactgcatcgccgggctctgggagggaaggctctgccctagaactttgctattccacccccaggagcgctgggtgggtgtagctggcgggttgcttcctttcaactttccactctaataaaatggtcagaatatacgtgtgtgcatgcgggtgc

SEQ ID NO: 26290 - DNA, 963 bp, Homo sapiens
  chr12:85305601-85306564
  hyper
cgccacactctcaaattccaggatgcgcagaaacacaggagccgtgatttctccagcagccacgtgcctttcgtacggcgaaaggccccctttcgggccatttatcacaggatacctcaagcaaaggggaactgtggtcacgtgaaaacactctgtcctcggtagtcgccttctgcctttgctaaagcgaacggaagcgaatgaggaataaagctctctgctctccccgccccatcgcccacctgcacgaggtttagcttccaattcacctcgcgtctctctctgccccaaccctcccaactttcctcttggactttcccgtgttggaccccacccttcaaccaaccccgacttggcttggaaacgagtaggtctctggggatgctgtgggcaatttccacgacgggaagaaaggatggcggcacgtttcaacccatgtgcttccccttacatgtgcagcctgtcgccccccaccctgattgtacagagatgcagagttagacggttgcccgcccagcccagcttctccctcccagggcttttgagctgccctccctcctcccaccccaggacgcagcgagtccttcccggcatccatccatcaattcgttcccggtgctggtgcccaggctcctgggtggctaatggcgagccccacctcacccccagttgtgcccttagcgtaggcgcttgccattaccgtcagtgtgtcttgaccaagcgcctcttgctgcttccacgtccgggcagcagcagcagcagtcgcgaaagggtagggtccaggtggctgtgacggaggccgaagaggagctgttggcagagaagcagcttcttgcctaggttgggacccggagctgggttttgggggtcgccgccctgcaggctggcaaggagagactcgtgagcgcctgtgtgtctgccagggaaacagcacgggatacaggcgcgcgggtgcgggtgcgc

SEQ ID NO: 26291 - DNA, 2345 bp, Homo sapiens
  chr12:94541793-94544138
  binary
cgacccggggaaacccacaccctgtcacaggggcgccttggtccccggagtctccggctcggccatgtctcccgcgcgcctccccggggcctccctctcgccgctccacacctgtcagccgctctcgcagcagccctgtggcccgagcccggggcctcagctgcaaccccttcgcaccctggatcctcgctccgcgcgcctggcgtatccccgacccggctgctgtcgtaaacaaaaccgggcgttggagcagcaccgcgggcggacgggcgcgggagcccgctccgtgcgccgttagcgcgccccgggagccccaggcgagccaagggggcgatggtggcggccgcggcggccgcggcgggcggctgagctttgttatgaatagatgaaagaggccacctacacagtaacccaaattacgagacctccctcctccctatctcaccgaatcaagaggggaggggagatgggcgtggagggagggcgggcgggcgggcaggaggcggagggcggaggaggaagagaggatgaggaagggggccagttgcatcccactttcacaatgggaaagtgaaacgcacaagcgcacccaacctctccagccctccccgcccgcctcgctcctctccgcccgtcccctcccttcccctccgcgcctccccgcgagcgccagcgctgcacacaggaactctccggcgaaggagggcgaggaggaaacggtgccggagcgcgcagggcttgctgccgccaccgccgctgcacaggctgccggagcgagcctgccgcgcgccgccctccccgctctccttcctgggcgagctgcggggatggggcggccgcgggagcccgagcgcgcgcaggaaccgccgccgccgccgcccgcgtctccgttgccgcgcgcctgagccgccgtcgccgccgcgcgccctgcccgggggcggcccccccagccccatggaggtctcccggaggaaggcgccgccgcgccccccgcgccccgcagcgccactgcccctgctcgcctatctgctggcactggcggctcccggccggggcgcggacgagcccgtgtggcggtcggagcaagccatcggagccatcgcggcgagccaggaggacggcgtgtttgtggcgagcggcagctgcctggaccagctggactacagcctggagcacagcctctcgcgcctgtaccgggaccaagcgggcaactgcacagagccggtctcgctggcgccccccgcgcggccccggcccgggagcagcttcagcaagctgctgctgccctaccgcgagggggcggccggcctcggggggctgctgctcaccggctggaccttcgaccggggcgcctgcgaggtgcggcccctgggcaacctgagccgcaactccctgcgcaacggcaccgaggtggtgtcgtgccacccgcagggctcgacggccggcgtggtgtaccgcgcgggccggaacaaccgctggtacctggcggtggccgccacctacgtgctgcctgagccggagacggcgagccgctgcaaccccgcggcatccgaccacgacacggccatcgcgctcaaggacacggaggggcgcagcctggccacgcaggagctggggcgcctcaagctgtgcgagggcgcgggcagcctgcacttcgtggacgcctttctctggaacggcagcatctacttcccctactacccctacaactacacgagcggcgctgccaccggctggcccagcatggcgcgcatcgcgcagagcaccgaggtgctgttccagggccaggcatccctcgactgcggccacggccaccccgacggccgccgcctgctcctctcctccagcctagtggaggccctggacgtctgggcgggagtgttcagcgcggccgctggagagggccaggagcggcgctcccccaccaccacggcgctctgcctcttcagaatgagtgagatccaggcgcgcgccaagagggtcagctgggacttcaagacggccgagagccactgcgtaagtcctgcccccggggcgccgcggagagcgctgctgccggggagccgccgccgccgccgaggcagaacgagctgggggcgagcggcggggcgggggtacagccgggtgacatttaccaggtctcaggttcacaccgcgggcggccgtccgaaggctcctctcggacggtccccgagacctggagcacggcctgaggtccccaaagggagagtgtaaaaaggggggcggggagggttggagttagactcaaaactctagtggctgcatcccattgccatccttccctgtccaaacggggacgcttgtttggggctgagtctcctcgc

SEQ ID NO: 26292 - DNA, 107 bp, Homo sapiens; identical to SEQ ID NO: 9063
  chr12:96183929-96184036
  binary

SEQ ID NO: 26293 - DNA, 923 bp, Homo sapiens
  chr13:103052559-103053482
  hyper
cggcccccggcagagcccagggcgtcagggaggccgtggagagccatgatctactgcaccgcagtgccagcgtcaggagcttccagagcccgggctgccactgcgggacggccgatctgcccgctccctccttcagacacaaccccagacaaaaacagccggccccgggtccctctccaccctgaacggagctaggggacgccacacactcccggctgccagcgtgagcggttccgggaaaggctgcgcccagcctcctcgccagcgccgccgccaccaccatgcagccctccagcctgcctcccctgggttgctcgcccacagctccgcggccgcccccaatcgcctcggactgagacgcggggacgggaacccctgggatccgactccccaaatcagatgcatttgcatttcttatgtaatgtactgcaagttcccttgttggagccctttggaatcggggcgcatgatcaccagtaggcttaaaagcaggaactcacggcctggctcatccccacccctggccctgtgggaccccgacgcagggctttgacaccgctttctaaagggggggacttcaattacaaatattagaggggctgggcttgtcctctcagtctggggttccctcccggcgcaagccttgctcaagtattcccggtggcaggatgtgtcagaggcagacagggggaatgagttaatgctcgggcacccggagctggacgggggagggacgcgggggctgacggaggagcggggccgcgagggagggggcctcttttactttggtaaaggtgatcgtggtggcgaatattgtgcaagctaatcagaaagtctagagcaggttctcggaacccagctacgtccctcgaacctgctgcagaagtaaggggagctcgcggttctttttcctggcaactacc

SEQ ID NO: 26294 - DNA, 246 bp, Homo sapiens
  chr13:107570099-107570345
  hyper
cggaaacggggacagggcgcagggcagagcacagagcgcaggggcgcagagaaggggacgaagacggggccggaggcgcctgaggggggctccgtgcgggaatcggcggcgccacccagccccgcacatcgccgagagaggcccgcgtgcttctgagagcgccgcccctgacgtttctgctgcgcgctgggaccgaacctacaggaagcaaaaccctagaggaagaagtcggcggctttttggctc

SEQ ID NO: 26295 - DNA, 510 bp, Homo sapiens
  chr13:108518148-108518658
  binary
cgacgcactgcctgcaagtggtcatctcgccgccttccttgagcaccacatccagactgcagttcaaagtgttgggactggacaaccccgagaacaactcccaaagtgtgtaggaattacaaaacgaaaggtaaaaatccgacaagttccagagcggagtgggatgcttgctcctcacctcctgcccgtcccccccggccgccccccgactccagttcctggcgcacaccgcgtccgcattctccaccgtgaagcactggcccgaggacgcgccctgggggtaacaagtctccaggcgccacacgggcttggcagagtttcctagaaaaagagccttgccccggtcgtctttgcctcggttgcccttgccgccgccgccgccgccgtctcccggggaggggggcagggtgggggacgaggaggcggagaggagtctgtgtgcctgggcggcgggcgaggactcccccatgctcgccaggagcgcgggccaggagggctcctgctgccgcc

SEQ ID NO: 26296 - DNA, 922 bp, Homo sapiens
  chr13:108520140-108521062
  binary
cgggaagcgtccgagttgcaggcgcccgggcagaggtctctactggtgcgagggtctgggcagagtcctctcaactaaggaccgagccacttcggatggaaggtgggggtccgcggaggaagctcgaattggctagaggagggatgaggtgacatttggtctctgaatgcgtctcggatcccggaccgcgagatccatcgctcccagtgcgtgcagttattccgtcctgctgtgtgacacgggagaatggcgcgcacgcctgtgcacctgcatcgaccgtgtagctgcctgggtgacagccacccatttgtctatgttttctttcctattctaaagtaaacgattagaagtggcctcatagagtcttaggaagaaacagtaagccctgtgccacccggggtcactgcctagccctgccctccgcgcgcaccgtccgcgtctccgagggctcctcctcggacctggaccctctggagcggcttcgaccctccctctgcccccgctgcctgcgtccagaccccctcccgggtgggctcctccgaggacctccgcagccgcgggcgagctgggtgcctgcgagtcgccgccgcagtctgagcctctggtgccccttagcgttggctctcggagttctgagaagggaaaggagacagacactctgggaaaatctggggtcacctcgattccggctcctacgctggatgccgtgggcaagcatcggtctcctttgatctgaagatcctgcccactccgccccttgcccctgccagacccgcgggagcagcaggtggcgtgggtgccagacgctgccggtgcgcaccgagtgcagcgctgccccggctcgccccgggggtcgcgtgggacagcggtttgcggtgtcgccctctctgcggtgctttccaaggaccctcatgccccgccc

SEQ ID NO: 26297 - DNA, 871 bp, Homo sapiens
  chr13:111766814-111767685
  hyper
cgtgtccttttaagaagaggctccatttcttcctcgcatgtcaatgtgtgcgtgtcatcagttgttcgaggaagctcgcgcatgacgcgacacttgccgtctgggctctccaggttcggcctgctgctttcacagcccagatcttcggcgtccccgagacgcagccaggcgcccggcccggcccggcccggccctctgcacagccccacttcaggccacgccgtttccttgaccttcccccggcagggtctgaagcgtcaccgtccgtctagagcagagtcgcgcaggcccctgccctgccggtgaggtcggcgccgcgctccggagagtcggttcctcccgattcagacccatatggcttcagatggaaccatcatttctgttccgtcatgaccggcttgcaaggtagcaaagcgaaacaaacgtctcgttttcagcctgtccccgccaccttgaaataaaaccggcaaaaataaaaagagcattctgggaagtacttcatcatttcaacgctcacgaattcaaaacataaacaaaggcttccgagtgccccggccaggggcgcggggcgcacggcgggcccggggcaggtaagcgcaggtgcgcgcccgcccccacccccggctccctccccatccgctccccgctccccttcccctttcccttccccgcccgctcccagccgccgccgccgccccgcgcacggcctggagcggaggctgcgcagggcgcggggcggcgcgggccgggcgcgggccgggcggacggccgcgtctttcttctcctggcggtgatgtcattgggcgacggcggccgaggccggggggcggcggcgggcgcccgcaggttcccgagccgctcctgagaaggc

SEQ ID NO: 26298 - DNA, 877 bp, Homo sapiens
  chr13:111767694-111768571
  hyper
cgggccggggcgcacggagaagcgggccgggccggacctgctgggccgcgccgagccaatcgccggcgccggccgctcgatgggcgaggcggcggcggcggcggcgggggccgcgggccgggccgccgctccgaggtgaaggcgcgcgcccctccccgcctgcctcccgggccgcagcgatgaattccgccgagcaaaccgttacgtggctcatcactctgggggtgctggagtcgcccaaaaaaaccatctcggacccggagggctttctgcaggcgtcgctgaaggatggggtggtcctctgcaggctgctggagcgcctgctccccgggaccatcgagaaagtaagtcccggcccgcgcccccgcccgcgccccccggtccggcccgctgcggcccgggatgcgcgcggagcacctgaggccggccgcgctcgggaaacccgtgcgccctcctttgtgcgcggagcggcggcgcggccggcgccaggaccgtggcgggagctcggggggcgccattgtgtgcggggcagggggagggggccggggagcggggtcggggggaggggcggcgcgggcggcgggggtccccgggaaggagagtgcaccgcagcgaggagacggggcttctgcgccgcccgaacgctaagttgcccctccgcgtggggggccggccccgctccctggcagcagccgcatcggaaaccgcgttccgacgcggtgcggctcactccgctggctttgtgtggacagttcttgccggtggcgttgcgtgagtttcgcctcccaggttaattgaccggttgctctgtatttttaaagaggcacgcatctgtagctgagggctgcgctgtgaaacgatctactactttcccctc

SEQ ID NO: 26299 - DNA, 77 bp, Homo sapiens; identical to SEQ ID NO: 7921
  chr13:111911450-111911527
  hypo

SEQ ID NO: 26300 - DNA, 922 bp, Homo sapiens
  chr13:112760441-112761363
  hyper
cggagctgccctggctggtgattggaggtttaacgtccggaattcaggcgcttctgcagctcagatttgccggccaaggggcctcagttgcaacttttcaaaatggtgtttctggaaaataacaaattcagactcaactggtgacagcttttggctatagagaatgaaactgcttccctttggcggtggaactcttaaacttcgaagagtgaaagaatacaatgaaataaaatgccataagatcactggatttttcagaaaaaggaagaccccaaattactcccaaaatgaggctttgtaaattcttgttaaaaatctttaaatctcgaatttccccctacaacatctgatgagtgctttaagagcaaacgagcaaatcccacctcgagaatcaacaaacccaagctctggccaaggctctccccgcgttttcttctcgtgacctggggaatgtcccgccccatcgctcacctggctcttgtcatctcgctcatcttgaagtgacccgtggacaatgctgctccctgccgcagctccgccggtcactcaggcagaacggggtatgcaaatggcctggagaggccgaggccgaacactgcgcccattgtcccgggcgctcaaagcgccgagcagctgcgcagactttctgggctcggaccctcggccgccacgctaatgtcatcattgcaaaacatcagattttgagaactatgcagtctgaattcattagcagccttctcggcgaaggttcttttccccgtgacaagtttcaaagtccagaccccctccaacgttggtaggggtaggaagaggaggaggggcccagggaggggggtctttcgcaagtggggcctcgggggatccctgctctccttctggtgcattccgcaactttaaaagccttccttggggttctgagcgc

SEQ ID NO: 26301 - DNA, 162 bp, Homo sapiens; identical to SEQ ID NO: 9071
  chr13:113507123-113507285
  hypo

SEQ ID NO: 26302 - DNA, 110 bp, Homo sapiens; identical to SEQ ID NO: 23890
  chr13:114188365-114188475
  hypo

SEQ ID NO: 26303 - DNA, 440 bp, Homo sapiens; identical to SEQ ID NO: 23470
  chr13:114807499-114807939
  hypo

SEQ ID NO: 26304 - DNA, 143 bp, Homo sapiens; identical to SEQ ID NO: 9074
  chr13:22178308-22178451
  hyper

SEQ ID NO: 26305 - DNA, 998 bp, Homo sapiens
  chr13:25320788-25321786
  binary
cgcgggcctgcctgcgcgtggggagagcggggaggcggggacaggagacctgagcccctgggcgcccctaccacgtgtcccccgtcccaacactggacctcttcagattccttgccgagaggggcctcgtcccaaggctggatgcgccgcgcagcggtgaaagccgccctcgcagcccgcaggcgaccagtgggtgctgttggctttcgccccggggagggaacgggcttgggggcactggcggcggcggagcgcggcggggaagctgtgggggtcgtgcgatggttatggagagtgctccatccgccaggcctgggctctgggcgagctgaggagaccggagtttttccccaggagggagccgcgcaggccggcgacctcttcccaaggctctactgctggaccgcgcccgcggcgccgctcccgccccccttcagcgcactctgcgcctctcgctgggtatggccagctcgcagtgcgcgtttatgctgcggtaaacgcattgaaggaacgcacagcttatctaatagggttttgaaataattttcggtatgccagctggggtgtggtttgcccaattctgatcctgtttccagagaacacagctgcttagacaatctgttatcttcgcgtcctgtcttccttttgacgccagaacatcctagggatcaggggcctctcccatgccctggaaccatcctctcacggtgctgctcttcactggtgccaataacagagctcccgcaggcaggcctggatcagtggggactggggccctgaagtgagatggagcaagacagagcggcccttgggagaggggcatggggcggccctgtgctttagactcggcaccctatggcttgaggaggtgacactgtgtcgacgtgcgtttgaagggaggacggctgaaggtacatgcagtctcccggacgtcacaaactccgcggacgcgggtcacacccgcgcgcacgcgcagcaggggtcttagccacacaggc

SEQ ID NO: 26306 - DNA, 890 bp, Homo sapiens
  chr13:27131483-27132373
  hyper
cgcaaactcaaaggtactgtaatgggcacctagcaatcagaggtgatacaagggtctcttggcccgaagtatccccacctctcctcgctggaaaggacgctgcctaagcctcatcccgagctgggggcggaggaccaagggtgagagccaccgcctccgcaatcccccgcccctcggcaccgtcgctcagcgcgctcgccggctccctattggccgaggcactcgccaatcctggtgaagcggccccgtgagttggccctggttggtggagccggcactgagcccccctcctgctccggccgagcccccccgccgggagggggcgtggccgcggccgtggacgggccggaggcggcgtcgctcgcgccgctgcgtgcggtgtggtgcgaggcgggtgcgccgggcggccgcggcgcggcgggaccatggagctcagagcgcagccccggcgccggcggcgggaccgcggaccggtgagtgagggctgcggtcgccccggctctccgctgtaggctgctgtggccctctcggctccgggccgggcggctgtcgggggaggggcggccccacggcgaactgaagttgctgcatcgccgcgcgctccggccgggcggcggggcccactgcgggctgcggcgccgcctcgcgcctatccctgcagcccggccgcattctcccggccggctcccgcgctggcaggggcttctcgccgtcacggcgcggccaggcggcccttctctcccgcgcctccgggcctccggccctttgccgtccggtgcgcgctccctggactcgggacagccacccgccctccccgccgtaagtggcgcccgggcctccgctcgcgccccacgcacgacgccccgggccgctccgcgtccgggaccttc

SEQ ID NO: 26307 - DNA, 1051 bp, Homo sapiens; identical to SEQ ID NO: 23056
  chr13:28491488-28492539
  hyper

SEQ ID NO: 26308 - DNA, 1793 bp, Homo sapiens; identical to SEQ ID NO: 23902
  chr13:28527202-28528995
  hyper

SEQ ID NO: 26309 - DNA, 979 bp, Homo sapiens
  chr13:28540416-28541395
  hyper
cgcatttgaatggggctgcggccccgaccccgcgcctgctatgaaagtaaagggaactaacgcgactttctccgcggtggacgctcggacacgcgtgaccgcctcaaacccactccaggctgccattggtactcgcccctttttacagatgaggaaatggagaatcagaccgggtcacgcagatagtatcaggcggggttggcaccggagcctggctggagccacagaggacacctccggagctgaggcgcagggcagttccctcagccgaacaccccgggagggagactcgcctggaagtgtctcggagcgacccttgctcgggtgctgccccttcagtgtcccggacgtgccgggcaacgcgatgaccagaccctgagcgctcttcgacccatgccccaagggccttggaggcgccccacaccccctgggaacctaggagcggggctatggaggggagggatgagagggacttgtcagaattcattattgactgcgaaagtcaccaccctctttccgggccctaaaagagacaatggcagggctgggaaggtgtatatcaaagcaagccaggccgcgtccccccctccacccccacaccttgacagatgacgctccgcagaggagcccggctccggcccgcgggctgcggccaccccacattaacatcacaagggcacccggcgccgactgcggccttgccacctcggcgcaggacttcacagcggcctctcatctgctgaccccgcggcctgggctctggcggcttccctcccgcccccttcccggccctcaccccgcggccgctctcccgggacacgcaaaggtcttccttagggcgtgcgccacccccgccaaccgcgccccagacaggggctgtagaaagtgggtctttgggagccaggatctgggagcccctgctaggagaaaggcgcctcctctaggagaagggaccaagccaaagctctgaggctcaccc

SEQ ID NO: 26310 - DNA, 995 bp, Homo sapiens
  chr13:28542253-28543248
  hyper
cgcagcaagtgccggaggacgcgattctgccggcgtccagcagtgctcacgccgacattccccggagcttcccgaaggtgtcccggggttgcgaatgaggagctcttggaaagaggacgcctgaacacggtgttgagactcagaatattcactcccaggctcagtaggtcagagaagccccgacgggccagaggcccccgaatttgtctccgggccgtgcccctcctggcgccgagctcccagacagcccgggacgcccctgtgcgcactggacgcgcgacgcgcagcagccactggctcgacccgcgccttcccaagcaccctccgaaggggcgcagcctctgcttaccttggctgccgagggactgctgcgccggcttccgcatccactcgcacaggttccgccgctggccgccgggagacagctgctcggcggcagcggtggcggcgggcccaggagggccggggttgagcgtttgcagcagcccagaagcgcaggaaggcgcggcggccgggtggtgcgggtggtgatgcgggtggtggtgcggatggtagtctgcggggctgctgtagcccatggctgcggccggggagccaccgttgaggccgtgagccacggcgttggcggcggccgcggcgcctccgggcgcgtagccattccagtcctcccggagtggggcgccatacgctgccggccaggatggccccggggactgcgcgctgtccaagttcgctgccgctgcagctgcggccgccacgtggtaaccgccgtagtccgggtactgcggggggctgacgaagttctgcggcgccaggttgaggccgccagagtggcgcacggagctagggtacatgctcacgtccttgtccaggaggtagctcacgtacatggtggcgagggtccgggagcagacctcaccatgctgcctggggaccgacgctggaggctgccggggggcacgaagggaaaggggcgaggggactcgaggagcggc

SEQ ID NO: 26311 - DNA, 705 bp, Homo sapiens
  chr13:28544184-28544889
  hyper
cgtgcataactggaggcgagctaggggatcgttggtaaagcagtttcttaggctgctggttacacagaatgtcagtttgtgaaaattcattgagctacacttgtatgtttattatacttaaatataaggaaaagagaatttctgctaatgcttacctaggtatttatgtgtcttacatcatacctgtatctttaaaactctctgtcctttacaaagggaaacgttctccgaagaaatttatttctcatttccaggagatgataaggcaactcagggccattattaacgactgctaatgaaaagctctgagttgagaaaggatctctcttggtttgggaagcgctgcggccaaggggcctagggctggaagtggccgtcttggggaccgaagccgcgcagcccgggatcgggagctgccccgacaggagcgcggaggcggcgagattcggcccccgcgcgcgcccagctcggtttcagcaaccgcgtggagtgggcctgcggccgccgttcacctcctaatacaagcctttgacagcgctgccagattcgggaatgaggatcactgcggcgaggcccggcgggctgggcagcctgactcggcggctttgagcgctctcagaacccgcgggcgctcgcggcactcctggagacctgcacttgtctgttctcattgtcaagcgtttcgctcggatatttgtcaccatc

SEQ ID NO: 26312 - DNA, 1254 bp, Homo sapiens; identical to SEQ ID NO: 23903
  chr13:28673915-28675169
  binary

SEQ ID NO: 26313 - DNA, 1093 bp, Homo sapiens; identical to SEQ ID NO: 22791
  chr13:29292491-29293584
  binary

SEQ ID NO: 26314 - DNA, 291 bp, Homo sapiens; identical to SEQ ID NO: 23057
  chr13:29393559-29393850
  hyper

SEQ ID NO: 26315 - DNA, 898 bp, Homo sapiens
  chr13:35516217-35517115
  hyper
cgccccgcctctgccagcttgccccagtgtctggcagcagtccccatgcacctgctcacctgtctatccgttcggggtggttgggggagggacgaggggtgtcggggtgggtgggtgggaagagaaggagggcagggcaaaagagggggtgcaccgagggctccgcccccccggaggctgtgcgcaggcgcagtggctgctaccgcaggcagggggcggcaacatggcggagtgagcggcggcgtcggggcttcacaacaacagtggtggccgtagcagcggcggcagcagcgtcaatagcatcggccacagcctgagcttcagcaccggccagcgtcgtggccagctgctcgcgtcctcgggcttctcggagcggctgcagcatctccgcggggggcgggccgggccggacagaccgggagagggagagagcagaggcagcggcggcggcagcggcagcggcagcggcacacctgctgggcgggcacagccgcttgcccggcagcggttagcggtaccgccaccgccgagaataagcctgcggatcccccgccgcctccgcgggggagagcgccggagcgggccgggctgaggcgcaggcggggagcgggcccggcgccgcggcgctggtggatgctggggctccgaggcgacggccggggggcgggggccgaggcaggtataacggtaccggcggcggcagcgccgctgctcttcccttctcctcaggaggggggccaatggctagcgagaagccgggcccgggcccggggctcgagcctcagcccgtggggctcattgccgtcggggccgctggcggaggcggcgggggcagcggtggtggcggcaccgggggcagcgggatgggggagctaaggggggcgtccggctccggctc

SEQ ID NO: 26316 - DNA, 841 bp, Homo sapiens
  chr13:38443221-38444062
  hyper
cgacgcagaatgtaatcgatcggtagaacattgatcactctccttccttcgttaccctactttaagtgccggagagctaaggcctcacttatatgcacccagatgcccccgagatctccattttccccaaatgcataaaaggctaaaaacggccacattccccagcaccacggcgtggctgcagctcctttgtttaccatataagtcacaccgggggttcactcctcgccctctcccctgctttaaagccgagtgcggcggaagactgaggagcacccccaaactcctgctcagcccgagtcaagcaccgaaagcttcacaggtttttttcctgagccttgaagagaaaccacatagccagaaccttttgaactcctaaccccgcagggatgtccgcctcccagaagagagccggcttcccaggcagcttaggaaacttaaccgagatcccagaaagaaggcgaggtgtagctccggtcgaacggagccccgaggcgacatcctctttacctgcaaagttgcaatcttcgggctgaagtgatgggatccgaggactgacggcgcgggtgccgtgcggggtgagagcacgcccggcaaattccaatggaattcccttagtcgctgctgagttttggagcattccaaggaaaacgatcgaagctggagcccacgcagctggcaccgaactgggcggagtgaggatgctctgaaagcgaagccatgggaggcgggggaggggcggcccgggagggggaggtaaccgccaggggaggagaacctctcccacccccgcctgcacagatccctctggataaagttaagagttcccacggctgacagc

SEQ ID NO: 26317 - DNA, 777 bp, Homo sapiens
  chr13:45492040-45492817
  hyper
cgccagtctaaaatttcggcgttcccacaccgggagtcgaacccgggccgcctgggtgaaaaccaggaatcctaaccgctagaccatgtgggagacggcaatagcgactccaagcctagacaaattgagtcttctcggtcggcttccgcccactccatcgcgttcatccgtaggcgtcaaacctgctcctgcgcctgcgcggagtctgcagcggtttaaaccgttcaggttcgcattctactgtttctctccttgcaggggcccttgaatctttcttcaatctactctcgcgtctttcgtgatctcatccagtctcctggtgctaggtaccatgtcgacaccaatgtagacactagattggatgagtcattgttcacaattcctcacaaaactcctgcaaagtccaaaagaactggggtttgaatgttagaggctggtgaagaagtgaggaccacggggcgtcataacaccgcgcagtggaggccacgctgcactggccggtgtccgccgacagggtgtgtgccacagacgcgcagtgccttgcccgaatctgtccctcccctcagcgctggtccaggctggccacaggcaccaccccgtccctgaaagtggatcttttcctctgaaaaaacaggaatgagaactgcccggaagcctggaacattccaggttctgatgactcagcggctgaaggcaggatttgtgtcaccgaaagcagccagagtggcggtctgtaaatgtagcttagaaaagtggagaaagtctcttactgcaggc

SEQ ID NO: 26318 - DNA, 313 bp, Homo sapiens
  chr13:46425375-46425688
  hyper
cgtcggggaaagacatcagaccatcaatccagcttttcctgccagctggggaaacaacactcggtcactaacagcacccaatcacctagagagcgagagtgagccgaggcaaacacgccgggttccagacaccgtcccagcccccgagacccgggtttgcaaagggctgcacacgttcgccggagggtcgctgccgcctccgagaaaggacttgaacctgagcccggtgaaggtaaaatgacacagagactcacctttaggttgtgtgtggggttgacgacacagacaagttgcccggcagcggagaaaaccc

SEQ ID NO: 26319 - DNA, 775 bp, Homo sapiens
  chr13:52979741-52980516
  hyper
cgcctggaagtctacccctcgcgtcgtcagcttaaagccctccttaatgaggaccgtctttaatttaatttaatccttgtatttcatactttttgtatatcagaaaggatttctttttggaaagaaacagtagctcaagacgcgatttttcaaggttctgtggccagtctcagtcactcggcaacatctgagccaaggcagagccaggttcacttaaattcgggactccgaagtgtggagaccaataccccttaaaagcgtcccctggggccgaggcgggtgtggggaggggccgccaccgtccacctgcgccttcaggctgcggtgaggtggcagagtccggaggcatttcccgaccccagaggagcctccaagagtctcgcggcacgggcgcgaacaccaggatgcggagggcgcttcttacctttcgagactgacgggcagcaaccccaggccgtccgggcgcgtggcgaggcggacgggaaggctcaggggcggcgaggtagagcgccaagcatcccgcgtcccagactgcacgccctgaccccgcggcgttcggctcccacagccccgcggggcccgcccccgacggcgtggggagggcgggcgccgggagggcggggggcacacgggaccgggcgtggtcggttcccgccccttctgggcagcgcatcctttcctgccggtccccagctcgccagctgctggacaggaaacaggcaggaaacgcgcggccagccaaggtcctgcgggagggggtgcggccccggcagac

SEQ ID NO: 26320 - DNA, 141 bp, Homo sapiens; identical to SEQ ID NO: 9093
  chr13:60738352-60738493
  hyper

SEQ ID NO: 26321 - DNA, 1884 bp, Homo sapiens; identical to SEQ ID NO: 23060
  chr13:67803750-67805634
  hyper

SEQ ID NO: 26322 - DNA, 247 bp, Homo sapiens
  chr13:79160914-79161161
  hyper
cgaaaagccccagacagccactgcagtgccaagtgtgctgctcactagcgacccctctaggtcttagagagaagagagctcatgcagaagagtactcgggaccattgccgggacgagaagcccatcaggctgactgctccattagggagcatcgcaagctcggggtgcgaaagcttccccgccgccaaccagccagccctgccctgtgtagacgggtcgccagagcgcggcgcagggatcgagctcc

SEQ ID NO: 26323 - DNA, 960 bp, Homo sapiens
  chr13:79169684-79170644
  binary
cgggcgcttcttctctccagcccttggttcgccggagcaggatgctggtctcaacactagggctatgtcggcttctcaccgaaccgagattttcaatttcagctttgcgattcaggattccacttgaattccccaggacgaaagcctagcggccaggctgcatttcgccccgggtataaatccctgccggataaattcaaatctgtagcagggttttggtaatatgcatcttagcaacaaaacaaaaaccaacctcgtatgccttccagttctttttaaaacgtgtacggcagttgtgaaagttttgtggtgcttgagactgttgacttatgcaactggggagagggtttttttaaccgctttgagatattggtccatcccttttctctcagaacgtcctcaagggcacgtaagagttggaggtgacctccgggagcgcctaattttgagccgcggaacttcggcccacttctccgaggggaccaggcgcgcgccaatacgcatgtgcgggctctgagcgctcagagcgcgcctcttccttcccggctccccgcggtgcgcacccgctggccactctgcgcacgcgcgccgggtgccccggcctaaggccgttgacctcgggttctccccggcacagtcgaatccacgccagggccctcaggccggtagctgtcctgcagtccgagcggagctgcgacctcgggcagctggaagcctgtgggctgctgcttctccaggcaggcggcggagggatgcaggcaggatgagcggcggtcccttcgccgccacccggagaaccgcggctggtgcccttgaaggccctgggatgcctgggttgggtgggtgagtgaacgagaaccctgagtgagtgaggggagggcgggtcccctcctggcttcaaattcaacccaatcagctctgccgatggtttgaaactgcacacgccgacccacccgcccc

SEQ ID NO: 26324 - DNA, 1613 bp, Homo sapiens; identical to SEQ ID NO: 22794
  chr13:88323357-88324970
  binary

SEQ ID NO: 26325 - DNA, 966 bp, Homo sapiens; identical to SEQ ID NO: 23063
  chr13:92050674-92051640
  hyper

SEQ ID NO: 26326 - DNA, 530 bp, Homo sapiens
  chr14:103010929-103011459
  hyper
cgctgcccggaacgccccgcgggagaacatctgcgccaggggccgggggccgggggccgcggcgggcgaaatccgagaggcccgggctcctcctgctgcgcggccggggaggggggcgcctgccgggtcggggctggaggacctgcgcgcggccccgggaggccccgcctcgccttccagtctgtgaaatggggcgacggcctgggcgtggcggcgagttcttgtccgctgccggcgggcgcggtcgtcgaggacacagctaggggaggcgcagaaacacccggaggcggcaccgccgtctcctccccgggatcccacaccccgcaggttcaggaggaaggcgcggcccgaggcctccggggcggggtgtccccgagacgggaacccgaacccgacggcctccgttccgcctgcgccccttcaaggctcccggacgggcctcagtggcttccccgcccctccccaccgcgtcccggctccccgggcggggggtggggggggtcgcgtgcggacggttccccaccccgcgc

SEQ ID NO: 26327 - DNA, 795 bp, Homo sapiens; identical to SEQ ID NO: 23472
  chr14:104048314-104049109
  hypo

SEQ ID NO: 26328 - DNA, 346 bp, Homo sapiens; identical to SEQ ID NO: 25083
  chr14:104159197-104159543
  hypo

SEQ ID NO: 26329 - DNA, 457 bp, Homo sapiens; identical to SEQ ID NO: 23925
  chr14:104202370-104202827
  hypo

SEQ ID NO: 26330 - DNA, 492 bp, Homo sapiens; identical to SEQ ID NO: 23934
  chr14:105511981-105512473
  binary

SEQ ID NO: 26331 - DNA, 173 bp, Homo sapiens; identical to SEQ ID NO: 23936
  chr14:105739475-105739648
  hypo

SEQ ID NO: 26332 - DNA, 725 bp, Homo sapiens; identical to SEQ ID NO: 23064
  chr14:21098618-21099343
  hyper

SEQ ID NO: 26333 - DNA, 686 bp, Homo sapiens; identical to SEQ ID NO: 5949
  chr14:21099793-21100479
  hyper

SEQ ID NO: 26334 - DNA, 528 bp, Homo sapiens; identical to SEQ ID NO: 23066
  chr14:21100641-21101169
  hyper

SEQ ID NO: 26335 - DNA, 185 bp, Homo sapiens; identical to SEQ ID NO: 22796
  chr14:23355352-23355537
  binary

SEQ ID NO: 26336 - DNA, 290 bp, Homo sapiens; identical to SEQ ID NO: 23474
  chr14:23776969-23777259
  hypo

SEQ ID NO: 26337 - DNA, 885 bp, Homo sapiens; identical to SEQ ID NO: 23067
  chr14:27067019-27067904
  hyper

SEQ ID NO: 26338 - DNA, 747 bp, Homo sapiens
  chr14:29225546-29226293
  hyper
cggggagacattcctggagggccagagcggggatcgcagcagaatctgcagcactggtgttaaggagaatttgagcgctcgaatgctgttgttaaatttcttcccagagccccatgctccctcgtttagcatctcccttccccaataattacttgagaggatgagctcgagattgaagagtgaggttggcttttctgtgtgaggagccgataggatccaccaacactaaaatcaaaaagactcctggtgcttgcgagtacaaccccaaattctctcgcacactgcccaagtttcttgaaactcggaggctcagctcagtgtaaaaacatgggggttctcctgagtcggtttccctgaccacagggggacccctgcaaacacggcctcctctttaatacctttgtaactcagttcttcaagcaacccacctaggagaataaaaggacccactgagctccaataactgagtagatgattaaataaagccgagatctcagatcttcgcgtttggggtggggagtgggggcgctggggaaaagtcgggaatagccccgcggtacctggggatcccagttgttttttctaagaaagcccggggttaaaaaatgcattggaatgtggcgatgcctccatcagccgtcactttataagttcccaagtcacgctgctctagaccattgtggatgaaagtggattgtctctccagaaccaaatattccctgacctgcttccccaacgcgccctcac

SEQ ID NO: 26339 - DNA, 235 bp, Homo sapiens
  chr14:32597635-32597870
  hypo
cgtggcccgccttgtcaccatgagaccctgagaaagtcccttcacctcgctgggctctggtttcctcattccaaggatggctctgctatctgcgtgtcggctatcggtgctgaggctggcccgcctctgcgtgggcaggatcttggcattccttttgctccatggacgctgcctccctgggctcgccgcgcctggccgcccggcaggcagccccaggccccggctgctccatccc

SEQ ID NO: 26340 - DNA, 1091 bp, Homo sapiens; identical to SEQ ID NO: 23940
  chr14:36974427-36975518
  hyper

SEQ ID NO: 26341 - DNA, 920 bp, Homo sapiens; identical to SEQ ID NO: 25093
  chr14:37127458-37128378
  hyper

SEQ ID NO: 26342 - DNA, 1206 bp, Homo sapiens
  chr14:37135434-37136640
  hyper
cgtgggtcagagaatttggaaaggcctactctgaggggagtaaaacttcaccaggccctgggctggaagcacaggaggtcgcggctgggcccagcgccctcgggaggccaagggcagggagccgacccaaggtctaagccctccagctctccgtcgcgggtttgggtcccgtctcaagagtggggcgcgcgggctgggcctccggcctgacaccctctcttctctccatcagtgagcgacagctccccctaccacagccccaaggtggaggagtggagcagcctgggccgcaacaacttccccgccgccgccccgcacgcggtgaacgggttggagaagggagccctggagcaggaagccaagtacggtcaggtgaggaggcgagggtcaggccaggtgggccgcgtggcggcggggatttaggcgatggaacactttgtgatgggtccctttctgagcttcccgcgagagaagcccaggctggcgtccctttgctgctacgagccagatccttcgtggactggggcgaagcagaggcctgagccttggaaggcggagctggggcctcgacccccgccaggggccgggagcgctcgtcagggcgctgggggtctggggcggcagctccccggggcgaggctctgggaagcgcctccaggcctgtcggcctccgggagcttggggaggcggctcccgaagccctttcggcggctctcgttgggggtagagttaaccaaagaaggcgcttctgaagggccgagcggagcagccctggggcctcagagccgcgccttcacgcccgcgaaacgcgcgccccgggtctcggccccacggtgcgactgcggctgcggggtcctcacgttcggactttctctccggtggctctcggacaaacacgcttggccaatcctgcggagaggggcacccagataaacgtaacaaagctaccattttctcgactaaaggtcacattgtaatctcccaaggaagttagtgagaaaacctcaaattatacggactggctgtggaccgtttaatttttctttccctccgtccctccctcatgtctccaaaggaaaatttaaaacactcgtgtttttattttccccccgagaaaagctaaacaaccaccacaacaaaagccccagatttaagtctaaattcatcaccgtcctggagtcaagagttcaaaactctcaaaaaacc

SEQ ID NO: 26343 - DNA, 1295 bp, Homo sapiens
  chr14:42076491-42077786
  hyper
cggtccgttatatcagaaaaaaaaagcgcaactggacgggggtggggcagaccaacgaaacctagacagacacacacacactcagaggagagaggaagaattgaaagacttgagaagactttgataacctccctgctggcccttctgtgttccggaaagatcctggatgttggctaccttttcaagtcatcttggcatgtctctagtgttttgtaagccgctttccagctagctgcgtgtgtgtgtgcgcgcgcgtgtgtacgcgcgcgcctatctgatgcatttgactgtcttttatccaactgcccagaagcaaatgtgttaactcggcgatgccccttcatgcccgggttcttgcagagctctgaggacgcccagacccattttcctggctggatttggagcggctgctgggctgtggacccaggtgtgtggatcgctttacccagaagcttggaaagcgccaatattaacctgcttccaggtacatcacaaggtcaagagagtgtcttgcagccctcttgtttccgtgtatctacaccttcttctcttggccagaaggatatttacgttttggttcacagcatttgaagccaaaagttcagcccttcgaactggtttgctatacaaaacaaaacaaaacaaataaggtaatgaggattgcttattaaactgcttaacaaaatccccgactcttcctcagccctttctcggctccctcctccccaccaaaatgtcaccagctcttgaattacgtggattcgggttggaggagaacttgaaggaaacgtgattaaagggctatgcgagaacgctctctttgctgcccgcggtccggtgggcttcgaagccaatcgtgagaaggaccggttccctccgtgctgcttcctccccgtgcagtgctgggtgtgcgtgtgcgagtgtgagtgcaagtgcgcgcgcgcccgggtgcgagtgtgtgtgagtgtgagcgtgtgtctgtgtgtgcgtgcgcggccgccctgcctctgcccgctccccgggcgcggagccgcgggtttcatggggcgattgcagcgattcccccacccagagcgacctgcgggcagcggcggcagtggcaggagccgcctttccgattccctacgatgcgggtgctgagctatggcaaagggcagcgaagtgacgagcgagacccgcgtacgactgtgaaagccacctggagccaccttgccgggattgtacctgcaggcagaaagtcttcctacgaccgtcttttcccttagaggcaccaggtaacaaaccaacgattactc

SEQ ID NO: 26344 - DNA, 1426 bp, Homo sapiens
  chr14:51560302-51561728
  binary
cgggctcatcagtattccgcctgcggcgtctccccgaccctccgccgtgcctcaccaggtccgcctatccagcagcgacagactcccgccgtccgcgcgaccccaccgcccccatcccagtccctccccgagggttcgcagcccgccctgccctcgagcgtgcctagcggccctgggcactggcgcggctctacccagctatgcagtgctttcccacacactggccgcggccactggctgcagacccgccgcggaaagggggcgccctgagtcccgctcgcaggcagcgcgccccgagagacccgctctaaggcatccccgcaacaactctgtgggggcattcaactcccccgtgcgccggttaagattcccccatgcctcctgcaatgcaccagaccagggaggtaaacatcgaaggcacctgcattgcgcccccactgggatgcgctgtgcgcaagagacggggaccgtctgctgcaaaaccggatgatcggagacgcagggagttaggagtgggttttcttaggactcaccttatgtagtttccacatggcccccagagccttgacttcgtggctggagtgtttgccctcctccaagcactggtagcacacgggcatcttgcattgcacgcagtacatgctgtggttctccagctcgtggtctgtgcaggtggagaccttgcgtgggctcagcctccggctcacacgaccctgggccgggggcaccaggcggtgcttggctaggggcccccggggcgggtggcagcgcaggcggcacggatcgcagtagaagacatcgcactgttcgcacatgacggtggcttccttgggcgccttctcgcagagctggcacttgagggccgcggctttgctctgctggtagcggtcaattaccccttccagtacgcgattcttggggaagccgcggagcccccggtcatccaggatgaggctgcggtgacactgggggcaggtgatacaggagttgcggggcaccggggccagggccggtgacaagtgggtggccggtggcggcatagccgggggaaacacgcggacgccgttgggggacttctggcacggggtagtgggggcgctggcgaaccccccgtaggagccatagccgctgtccgcctcgctgtataggctcatcttgtccaggtccagatagtcatagtcggagaccccggagcccgcggcccgatggctctggggggattcagactctggggtctgcaccaggatgttgcgggcgcacgcctgacacaaattgtgagagcagggcaggatgatgggctcccgatagaaggagccgcacacggggcatttcaactcctcttccatctcctccatggggaccggtctgggaggagacagcgacggctgcagcgggtgcctgagctggcgaggtggccgacgggccc

SEQ ID NO: 26345 - DNA, 909 bp, Homo sapiens
  chr14:51561751-51562660
  binary
cggcggcggctgtggtggtggtgccttcccgcgcagcactggcacggacacccagagaggcgctagctctgtgagccgcagccgcgtagccgccgcgccgcgcgccagcccggaccgcccctacctgccctcctagtcccgccccggcccatgagcagcggcccattgggcggggggcaagagatcgaagctctcattggccaccagacccgtccgtctcctcgtctccgcaggccacagggggttcggtagagtctgaggatagggcagtcttcgctcgcggctgcaagatctctgaagggggccggcgtgcggaggctaggggaccgggaaggaggagttaggcgggatgattcatcctcgcccggcttacttccgacctccggtgcagtctcccaggagctgggggcgtgagaaacccctccccgcagcgagtgggctgccggagggggctggggcttctcgccagcgtttgcgtttggctcccagctctgagctccgcgcccacctaccgcgggcgagtgctgcgcagcacggaggacgccccttctcttccgctgctggcagccttcgcaggcgtctcacccgggcctaggcttctgcacggcagtggggcttttctccttctccgtgaatccgctgacgccgtgccctggagctcccccatcccgggagtctgacggcgctggcgcaagccctggcgacactcttggcttctttcatcctgcgtccctcgtttcctaaagagcatgtataaagtcgatttcctagtgtcgacatgagattcaactgggtaaccgatggaaatggtcagcattagtcagaatctatgaccccttcgtttcatgctttaaattatagctcggcccagaggcctcagtgccgtggtgtgaacgtgcttccttccac

SEQ ID NO: 26346 - DNA, 260 bp, Homo sapiens; identical to SEQ ID NO: 7958
  chr14:52327346-52327606
  hyper

SEQ ID NO: 26347 - DNA, 1076 bp, Homo sapiens; identical to SEQ ID NO: 23072
  chr14:52781114-52782190
  hyper

SEQ ID NO: 26348 - DNA, 372 bp, Homo sapiens
  chr14:57272024-57272396
  hyper
cggagggtgggcatggggaagaggggtgcgggagtgcagcagggctcacttacccgggtagcccacggaggggtgcagcaagtccatacccgaagtggtcagactcagcccattgactgcgtaaggcggttgcttaagataagacatcatgctaaggttgtttggaggtgcaaagtcggcccaaatcgggggtacccagctggaagatcttgatgcgcccggggtggacaggttcagagtccttggtgggtgggtttggagcagtggaactaagggcaaagcaaacaaacaaacagaggggctggtttactgcttcggaggcagcagctcttccacgttccagcactaacttaaaaagagcacggactaggc

SEQ ID NO: 26349 - DNA, 905 bp, Homo sapiens
  chr14:57283314-57284219
  hyper
cggtgcaaacgcccccggctccctcctttcccaattcacccacttcttaatttgagtttcttaatgtgcaagcgccagggccggctgtggtcaggcgggctattttctggcaagtgtggcgcggggctggacgcccctgccggcgggtcgccgggtctcgagctgcgccgccccgctggaggcgccggggctgcctggctctccgcgcaaacctcgcgcccttccgtttgcgcgcatggagccgggtgagggcggccgcggccaccgcgcgatggaggatttggaagctcagagccagctggtacattttgagaaatttagcaaaccagactgggctgcctcggaaactgggttctgttctgactcatttgcagaaaagttatggggaaaaacatcttgtaaaattaaggttatgtttggcgggtacagtcttgagcgcacatggtcatccggcgaatcagccaagttttccaaagcgccccctctccagctctcaggccaggggagcaaagcgtaggtgtgtgcgtgtgcgtgtgcgcgcgcgcgtgtctctgtgtctgcgtgtgtgctcgcaagcgcgtgtgggtttggggtggggggacatcctgacctttctacaccctagtgcgtcccaactccagactgggaggagacgtctgcggcctctggtcttttcccttcttggacgaggtgcggccagctgagacctcacaccggccacctcggacccagtgcgccgagctaggggagacggcgcgggactgggggacccctgggatcccgccctcgtagcggaaggagtggcagcccttggtgccgggcctggtccttgaggctgccggccctccggggcgccaggactcgaggacgcggtttgcccccgcagtcctaagatccccggggcc

SEQ ID NO: 26350 - DNA, 523 bp, Homo sapiens
  chr14:60043257-60043780
  hyper
cgctcagggttcccgctgagtgcctcctaagcgccacctctgaggagacgtcccttccagcgcccgaggggcgtcttacccacaacaaacagctgctccagcgcctcgaccgcgaccgaggagcccagggtggagggtaaggtgcataactccagggaggggccagtggagacggcagccgcctgcaccagcttctcgccagcgcccagccctggggtccaggggctcagggccattttgccgctctacttgagcgcctcctaagccagagccaaggattgccggttgccacgggcaacgaggacaccgaggtcgtggggcgccccctcgtggcccgcacctctagtaggtaccctcctggttctctaattttatccacgataattaagcagtctgggaagaatgactctctctttagctaatttttcccctttcaatttccattgcgttagttcaggcctgtatcttttttgtgggccactggaatcataataatgatcacttttgagcgcatctttgtgcc

SEQ ID NO: 26351 - DNA, 544 bp, Homo sapiens; identical to SEQ ID NO: 22799
  chr14:60097114-60097658
  binary

SEQ ID NO: 26352 - DNA, 882 bp, Homo sapiens
  chr14:60336808-60337690
  hyper
cgccagcagccagaatgctgctgtttgcctatgagaacaatttttaaagcggaaataatcatgataatgaaataaaaggatcaaaagcatcttgactttttctgagcctttgggaaaaataaaattgttgttttctaccagcccgcgaatattcccagtcgcccgtggcgacgcgggggtggggtcggcgctcaaggcagaaagcgcgaggcaggtgcccaggagagccgcgcagaaggggactgactggggggccctggtccccgacgccatttgaggggcagcggcgcccgccttacctgtggatgcagtttccatggcaacgggcgactgccgggcggggcccgagccggcttcccgcgacgccgcttcccgggccctggcgcccaaccccgggctgggctccccagcctgcggcgccggcgtggcccctttcggcgtcaccgcttcgttctccccctccccccggtgcctgagccactgggacccggggccggccagcggcagcagctcgtcctgcggatcccccggcgcggccatggctggcggtcccccggcgcggcgacggcggcttggctgggcagaggctcggtggctgcgcgggcgctccctgctgctgtccccggagggactcggcgctcagggaagctgcggtgtctcagcgtcgccgccgcctctgctgcaactccgccgagccgctgcctgccgctcttcccgcttcagctcctccttctcccccctcctcttcctccggccccgccgcggccgctgcctgcgctcctcctcctactccactcgctgctgccgccgctgcttcgctattcccaatcctgttattacgcaggtgaaaatggcctgcttggtccgggtcctcctgggcac

SEQ ID NO: 26353 - DNA, 893 bp, Homo sapiens; identical to SEQ ID NO: 22800
  chr14:60385935-60386828
  binary

SEQ ID NO: 26354 - DNA, 986 bp, Homo sapiens
  chr14:60977289-60978275
  hyper
cggaagagcccggcctcatcccccaggcccaaatgctccttacaatcctttttgcctttaggtcgggccgacccgatccaacgcgatcgcgggagcacttgctcaggcgtaagccccaggcagacgcaccgttagaaatggtatcccatgtccctgggaccgatctgtccttgtcacccacacttcgtttatttcctgacagtcctgtaaatctcccaaaagtgcacaacaaacagggaggacactgcaagcccagtatataaaagacctgggagctgcggcgctgagaaagggcgcgaatcatggtggggcacaacagtagggacccgcggaggggcggccgcggactcctgcccgacctctgtcgccttgccgagtaatcctcgccttaactgctggggtcttcggaagaacctctagccgccgggctggagggacgcaggaggtggtgggggcgggcgacgggcggctgtgttacgagctgtgacccgtgttccctttcttccccgtagactccagcagcaggtcctgtcacagggttccgggcgggcactacgggcggagggcgacggcacgccagaggtgctgggcgtcgccaccagcccggccgccagtctatccagcaaggcggccacttcagccatctccatcacgtccagcgacagcgagtgcgacatctgagttgcccatccaggatgctcagaagcagattccagtgtaaaaacgagaaaaacaaaatgaaagaggggaagaagatgagagacctgcaaatccagcgccacagaagccaggtgaccagggacccgcgggctcgggttgccgtttcccgccccaccccgcggccggcctggcttcactggcgccctttggccgcgaccacgggaaccagcggtgaggcctgacccagcaccacgttcttcttgctttgctttttcctaaggattttgctgcaaagtctccttcggaacccgaactgcaagctgagc

SEQ ID NO: 26355 - DNA, 834 bp, Homo sapiens
  chr14:62583679-62584513
  hyper
cgctgcttcctcagccgctgaaagtgccgccccacccctctccccaaacccgacctccgtaggggacaccgagccaaggcctgcagcgagtgacctgcccggggaggcgcgggaccgaggctcacctacccgggcccgcgagtctcgcccagccccagcctcccaacccactctgccggccccaacttaggcgagcgcagtcgggacccttctgtcggggctctttgttcgccgcccctcggcgttccagctctcaaccttgctcccagcagcccccgccggcgcactcgacctacaggaaagttgctcccgagctgtggaggggcgtcatcgcctcctagcaacgctcctagcaaccgggtaacatctgctccctgtggtccaatgcgagctgagaacagctgcgcgcccgcctagcgctgcgaacccggagtgagaggcgcttcagagactggagggacggacctgcaggagccagggctgcccgccgagctgcagttgccgctactgccgctgtcagcgcccgactgaagagtgacagccgcaaaagcaggagtgagcaccgaaccccgcgcttctacctaacaggtgcatgcgccgatctggtgagtggacccagctcacaaggtatgtctggattcatccagccaggtgccttcctccgagctcagaagggactcctttccttgagggggaggatagggacgtgttccgggatcccaccccgcccccaaccactgaagagtagccagctgctggtcccaaatgacctgattcgattttttaaatgtaaaccttaggattggttcttgggtgaagagtccgctgctcttc

SEQ ID NO: 26356 - DNA, 241 bp, Homo sapiens; identical to SEQ ID NO: 25102
  chr14:68067574-68067815
  hypo

SEQ ID NO: 26357 - DNA, 1758 bp, Homo sapiens
  chr14:70654358-70656116
  binary
cgcgcgcgcgtgtgtgttgggggatcgggggagggttagttatatatttcgattctctccaccgagtcccggatcacgcagaccaccaggggctggagagtgcagcactggagaaaccctccttctccctcgcccccttggccccagcggtgggtgctctggggctgcagctcccgacccgcggcggtggagtcccgagattggggtgagcgcgtgcgtgcgtatgtgcacgcgggcgcgcgccgagtggataacgcgcttccctgctagcccccaaacccggcggacactcacagcaccagaagcacaacacgccctggcccaggtggcacacatatgccgacatgcatccagcacacacaacacagcagtcagtctccccaaacagcacccgctaccaacccagcatgctcacgatccaactgtacccacctgcccaggcatctctctctgcccctccccacccggcggcaccctcctgtagacacccactctgccagatctgcccccccaacactgcatacacaatgtacactttccggggcaccctcaccccacttctcctggcactaaatccacaggaaggcggttcatatgaatgatcttgagaaataacttaaccccgttactcacaatcagggatcctcttaggggcatcccaagccccccaacctctacctcccatgtctcggctgcccgctaagggggaagggcaggaggctcaccccattactcaccgtttcctctcggcctcccgagcggagtgggcaagggaggggggtgaggaaggtacgcgatgcccccgccgcccggcgcctcaccggtcgcagcggctcatcgcccccgcgggctgcccgccggccgcagccgcgtccggggcatgtcagtccgccgccgccgccctcccgccggggttcgtgggctcgcagctgtcagggagctgcggggcagcgcatctggagcgcggggtctgggagggagggtgtctggggccagggcgaggggccccgggaggggtccttccgcacggatttcagaaagagggaaaccccgacccagagcggtgactggaatctacgcccgggagaggcccggagtcccggccgcgggcggcgggggattcctgcaggaaggggcaggaaggcaagcagcccggcgcgccctggcggctccgagggacctgggctcgggcttgcggtcgcgtcgcctgggctttccctgggctgggagcgcgccgggtctccgccttgcacgctgtcaccgcgggagacgtctcggcctcgccgcgcgcagaggggacgcgcggagaggctggtttctgggcgagcggagagctttgcccattaagctgccggaagaagccaaatcaaaaagccaatctccaagcctccaaacggaacgtcaccctatcagctgggagacagcgccgcactgactgacaagccgcgcatatttatcctcgcgcgcggaggggagactctcagaacgctcctcgaccagcagcgaggaagtcgagcccgcatcccgcatcccgcatcccgcatccagagcccccgagggacgaattcagatccaacccctgccccgcggccacccaccctagtcgttggagcctggcgcccgcgcctcccggccggcagcacgtcaaaacggcggcgcgtcctgacctggattccgccgagttgggagctccaggcagcaggcgggcgcgcggcaccggctttccccttgtcctcaggagacgctgcctgcaattcc

SEQ ID NO: 26358 - DNA, 561 bp, Homo sapiens
  chr14:73318400-73318961
  hypo
cgagggatgagtattttgatgcagatacttcttcaagtgaaaaatgtacaatgtacaaaatgtccactcgaggatctgttcctccccgtgtgggtaatcgccctcctaccacgggcaacgggtaggcaaccgatatgcccagaaaggcggccaatgggaggacagctcgcccagcctcccgattggccaggcccgccaccagctggaaccatggcgagctttgaggacagcagagccacttgatgggattctctctctcttcaaagcatagagcaaacatcaattaatcctcaaaagacgctttcaagaagaacattatcccttttggagacgcagaagctaagaggtgccgcaggtaggtgaagggaaggcaggaagttgaagaggagaggagaaagtggagcaccgggctttcagccccagttctggttctcctgagagagtcaagttgcaggagaagaatgaacctgcagaagccgggcagggagaggtggtggagaagccgctgctcttgggtgcgcccctcaaggcttcccactgccccatcccctaggagaccac

SEQ ID NO: 26359 - DNA, 720 bp, Homo sapiens
  chr14:73358909-73359629
  binary
cggttatgtgatttcggctggaaatggggaaactgaaaatcagttgtgggttcggtagaaacagcatcagcggtgttgcagcgaaagcaaccggcagcgaggatgcggcgaagttacgcccatttattctgccataaaacattttctttcttgggtgaaacgctgtggcgttcaagcgcagtgtatccgagcttccgagccagaactgaagccaggagctcctatctgatcagcctcagcttccaacgtcctcttaacggcagctttcatataaatatatttgaaacctggggccttcctacccctttccctatttctgatgggcgacgagctggcgcaaacacgtccgattctccctgtgcattcctttgcgttaggaaccccctaccgtccccgggagcgaacctggttttcaactccaggagtggccaggggtgaagacgagaatgcgctgaattaaaagaaccagggtcgacagcggccacgcaccagggagaattcggcatgaaccgccccccacccgacctgcacctccctctgccacttcgcctgcggcttcgtccgggcggggaagtcccggtcgaaggggtgaggaccccccagcccacctcggatacggagggagccaccctctgccgacatcacccaatagcacccctttcagagcgacactagttttccgaggccacccctggctccgcgatcgcgagcggacttggc

SEQ ID NO: 26360 - DNA, 464 bp, Homo sapiens; identical to SEQ ID NO: 9133
  chr14:73359779-73360243
  binary

SEQ ID NO: 26361 - DNA, 227 bp, Homo sapiens; identical to SEQ ID NO: 9134
  chr14:73360763-73360990
  hyper

SEQ ID NO: 26362 - DNA, 143 bp, Homo sapiens; identical to SEQ ID NO: 23951
  chr14:73602342-73602485
  hypo

SEQ ID NO: 26363 - DNA, 979 bp, Homo sapiens
  chr14:74707337-74708316
  binary
cgttgcgttttactttgttttacgtggaaaggcaacgaaaaccagcgcgtcgcaggctctcgggcctcgagtagggacgcattgtgccgccttgcgaaaaggacggtgctcggcagcccccagtcttcccggagcccagctccccacgcctccgctccgctcctcgctcctcgaggccaactttccggcccggggcattggggctggccgcgcagggcagggcgcagcagggtcgcgagcgctgccggggatctctgcggccccctaaggctgcctcgctctccgtcgtcccggtcccaagcgcgccggggcctttgcctctcttacaacgaaatctgttcaaaacctccggattcgggccccggcgcgggagaggtcagcctgagctcagggatgggacggccaccggggcgcccgcaggcttcctggggagacagagcaggtccccgccgctcgcggaggcagcccggggtggggccctcgcgggtttcgggcacagcggagcgcgtcccccactctgccgcatgtccctacgcccgcttttcagattctgaagatgtttcctccagcgatcgaaaaatgtccaaatctgctttaaaccagaccaagaaacggaagaagcggcgacacaggtgaggcccccgctttctgttacctctcctgcccgcgcaccccgctgccgtcccccgttccgggatcgggtctctcggaccctattttcgccgacaacggatctgaggtccgaggccgtgccagggcgcagaccacgggttgtttggcggaatctgcccgggggccttggcgtcggcaccggttgagcaggatgagtggccgccgggaaagcggcccggttcgggctttctcctccttgttcaggagaaaggaaaggctccaacacaggccaaactgagccacagagtgggggcggtccccagatccccgcaccagtacattctgagagccacacagacccggcggc

SEQ ID NO: 26364 - DNA, 854 bp, Homo sapiens
  chr14:77607449-77608303
  hyper
cgcagcgcagtgcacgcctgagggtggtcgccgggggctgggcacgcccccagtcctgcgccgccgggggctgcggcggtgctgcccaccccagagagccctcggcctggggctccggcgaagcaagtgccttcccggcgccggtcgccaggggggcgcgggagcagccagatgcgccgcagcgctgggaaggcggcgaaggacaggggctaggggagtgaggggcgctcggcaggcagcctcagccctggccctgcgcgggagaagggacagcagagaccgcccgtggggccccggggtgtagggagctgtccgttcagccctggcgcccgcctcgcccgcggcagagggcggcacagccggagccttggaaagaccggcagcgccggcagccgcgggcttctcggccactgcctcccggacgcacgggaagccgccccccgcgccgccgccgccgcactgccgccgtcgcagaggggtgaggaaatcaactcaccgagctctggtcgccgacaagaggagccccggacgccggctctcgccctgcccgaggctgcaaagttgtggactcggcccggctggctcgcagcctgcgcttcgcttcgggaactgggcaagtagcggggatgtggggaggagggagcgggcagctgctggcttcccacttgggcgccagcgagtaagggccaggaagcggcggggatggcagctgggcaccccccagccccgccacccctccctccgctcctgggggcggtgctctggccgccagtctcagcatcgtggacttgccccctcctcccctctcgattccccttgagcgggctggggcgccctgcctggtttcagcgccc

SEQ ID NO: 26365 - DNA, 913 bp, Homo sapiens
  chr14:88789765-88790678
  binary
cgaccctccccgcggcgcgccccagacgccgcgccccggcaagagggagcagggcgagcagcggaccgaggctcccagctgggaaggcgcgctgagcccccggcacccggctcggggcagcgggaggcggtcgcggacttgcccgcggggcggcgggaggcggtgggcggtggcggggaagccgcggaggggcggggaacgagcggtgggcgcgccgctacttactggctcggccggccggcgggcgggcgtggaggcggcagcggcgcgcttgctggagttgcagccggagacacgcttggttgcctggaaggcgctgcaggaggcggaggaagggccgctgcggctccgccgcagacctcggcctccgggtcacctcttctcaccgctctcaccctgagctctccctccttctcttttctcacttcattttttttcctcccgcgtctggctctctcgcctgagtcccgaacccacgtccccgccgcactccaaggaggcccgtgccagccatgagccttttgttctgggaccgctccgcatctgctgcgctctccccgcccggggaagctcgctcccaaggcacagcttggtcccttccccagctacctgcagccggactggggccgctggtcgttggctggaaaggaggcttgagagaggcacgggggcccccggaggaaagcggagttgccaagacccggcagctcccggaagcggcggccccgggatcctgggaccagcagggcagatgcgaagggacccagacctgttcccggaaaggggctaaacctggagcattcgtctaacgccctctcactgcccctgcttgaagccccacaggggtttgtggtggggcctcagtcttcagaaaagccaggtggtgctgaggtgctcttgaacgggtcactcc

SEQ ID NO: 26366 - DNA, 761 bp, Homo sapiens
  chr14:89493135-89493896
  hyper
cgagcaagagcccacgatggggttggcggagaggcgcgtcctcgaggtaacagggatgctgagaggtggctgaattcttccttctttcagcgcccctgacctcccggcacggcgctggggaactcacgggtctggagcgtgtccgtgctgggcccccggagatgatttctggaatcgcgacccggggacctgaggccactctgggacctgcgaggcagttgttgcccaaagacaaggcctgggtacaggagctcgggaagctctctgctgcccgtctccgttatccacgttcgtctgggcaccctcctcgggtgctgcccattattcctcccgcacctgccggatccaagagtagacgcagaacccggacctcggaatgggacgatgcgacgggcggggaaggcctggcccggccgaggtgccctcggccccgccctccaccgagggcagggaggcactgcctccgctccgtccactcgtaactggtgacgctggcagccccgccggggggcggggggagtgcaagaaaatcctgaggtgtgtcgggggacctggaccagatgccctcctgcaccgccctagctccggggaagtcgctctccggctccgcggcgcgggacccgccagcgggcagaggcgcggcgctttgatgtcgcgcggccacacggtggcgctgccgcaccgcccgctggcggagactgggggccaggggtgcccggggtggggtggagccgggacgcgcgcactccccagccacgccc

SEQ ID NO: 26367 - DNA, 111 bp, Homo sapiens; identical to SEQ ID NO: 6413
  chr14:89875711-89875822
  hypo

SEQ ID NO: 26368 - DNA, 624 bp, Homo sapiens
  chr14:90085312-90085936
  binary
cgtgacaatgctaaacccgagcagattaggaggcaggaaatgagccccattttcgttaccttcgatcgcctgcccccccgctgcttctcgcggccgcattggggggctgcggcgacgctggactcgcgggtggccccgccgccgggtcgcgccgtctcccggccgagctgcagcagatcgcggccggaaccccggctcctgcgcccggcgcccgcccggggtcggcggcgcggctcccaccccggcctggagccctgctgggtcctagtgcgcgccgcgcgcccgcctcgcggcccggtctgcagcccgcaccgagggcaggcagctcccagcgccgcgagtctccgggcgaggccgccaccctctcggtcccttgcgaaagcggccgcggggtgtgcggatgaactggagcttaatgtcaaatcctggcacaagatgttcaaaagaaagacattggctccaactgaactcttagaaggcagatgctaggatctgcagcccgagggtaagcgtaggggcagtacctggcagacagaggtttgccgggtgcactggtgacattggccgttcacagacggtgagacgcggtacgggatcgataaagatagatttcaaaaatataac

SEQ ID NO: 26369 - DNA, 754 bp, Homo sapiens
  chr14:90526570-90527324
  binary
cgagaggactgctaacagcaccagggtttctgatgaaaatgcactcgccagagctgtgtttctttattcgaaatcacacggttttactcaacagggctcctagcccttctgtctctgctcctggtgcgtaagggcggtgtgtggggctctgcgcctgaaaccgctctctcggaaggtgggaagatgcccacgtatccattcctctccgcgtacagattcgctcccacacgcccgggcgggtgattccggagggccgcgcggggctgtgtgcgcgggcgggggcgggatgtgtctggagggggcagagcgccctctcccggccccggagggcccacgcggaccggctgagcgtcccaccagccggttctgcatccactacccagatctgcgcgccctggtgggagcaccgcagccccgggtcggcccttcgaacgccgagcgtctacccgcggagaccagcgcaggaggcgggcccgcgcgcaaggaggcgggcgacagggtggagtcgccgcagctggcagccgcacggctctacctgttgcagcgtcggagcgcgcccgcctgagaaggcagagcgcggtgcggacctgtgctccgcgcgccggctggcagggcagggccgcggctgccaggaggcccgggaacagtcccgacggagcggcgcggagagggcgctccccggaaggtgagatctgagcgcggcagcggcgccagcgcccgctacaaggcggggtctcggggagggggccccggc

SEQ ID NO: 26370 - DNA, 1280 bp, Homo sapiens
  chr14:90527853-90529133
  binary
cggagactcgggaggccacaggctcagcgcgacaccacgaccacaactaggaggcaccatcgtcgatctacctggggaggcacctacaaagccagcagactgacacccgtgtcctagccgtcggcggcctgcgaagcgatagtcaaaggaaccaggacccaggaccccggcgctctgcttacccgcagacctccggaccgcgccccccccccgccgccccgccccgccccgccccgccccgcgaccgtctctttgcgggaaactcgagttggctcgagcttgccctgaagacgcgccacgccccctcccctatctgagccggacagggagccggggtggaaactgcgcccgcatcccagcgccaagcagacgtgaactctgcgcccgttccccgggaccttcagcgttaaggagaactccgaggagagcagggggagtggaggggaacggcggcgacaaagcggatttgaaactaggagtcaaggaggacgtggggagctggcgccacaggagctaccgaggcggcggccgggggagcctcgcggcctgcgggagagcccggcggtcatgggcgagccggcggtggggcgcccgggagctggctgagcgccggggcccttatttcccgggggtgtgggcgagactccgccgacgcccggtgccgtgggcctgggggctgcccccgggggcccggccatggctggccggggtttcagctggggcccgggccacctgaacgaggacaacgcgcgctttctgctgctggccgcgctcatcgtgctctacctgctgggcggcgccgccgtcttctccgcgctggagctggcgcacgagcgccaggccaagcagcgctgggaggagcgcctggccaacttcagccgcggccacaacctgagccgcgacgagctgcgcggcttcctccgccactacgaggaggccactcgggccggcatccgcgtggacaacgtccgcccgcgctgggacttcaccggcgccttctacttcgtgggcaccgtcgtttccaccataggtaagtgtgctggccggactcgctgacaacctccgggcggcctccacttcctccggggggcaggaccgaccctctcatcctttcattcatccatctgggcgcccagccagactccactgacatgagctgtcgcctgatcaacaggtggtattgcctccccgctgctctaatgtggtccaggcaccggcagcttcagcgtcacctggcagcttgttagaaatgcagtctcagtcccctctgcagacctgcc

SEQ ID NO: 26371 - DNA, 206 bp, Homo sapiens; identical to SEQ ID NO: 9141
  chr14:94404864-94405070
  hypo

SEQ ID NO: 26372 - DNA, 547 bp, Homo sapiens; identical to SEQ ID NO: 9142
  chr15:100889946-100890493
  hyper

SEQ ID NO: 26373 - DNA, 497 bp, Homo sapiens; identical to SEQ ID NO: 9143
  chr15:101458286-101458783
  binary

SEQ ID NO: 26374 - DNA, 892 bp, Homo sapiens
  chr15:101459085-101459977
  binary
cgttaacgctttagaacgacacatttctgtatcgccccgtgaagagctctacgcacatgaatgttccccgtctgtttaactgttacggccgcagtgtgtgggccgcaggcgcgctgggggctcatctgctgattttgctgcccctggagcagagggatagcgaaagcggggctgagcgcagcacggaccgatcccatcgccgcgctcgccccgcgtggaggcagccgggtgcccgaacctgaaggaggacccggtgccggaagggcccgcggaccccggcgtctcccggggcatcgagcgccatcgcccgcgttttacggccagggaaactgaggcggccgccgaggggacgcctcgcgacggttcctgggagagctggcggcggccttgctctgcgcgctcttcgcgccgccctccccgcccgcccgcctcaggattgaggaagtgcgtctgggcccggccccggcgcggggggcagacggcggtgggacggccaggccccggccccgccagtgtgtccgcccggccccgcgtcccggagcgcccgcacccggccccgccgccgcctcaggtaagcgccgctcctgccggcgccccccggcggcctggctgcctcccggccccgcccggggaacccagagcccgcgcccggcgcccgcggggagcctcggcctctgcctgcccgcgggcccctgcgctccgggcggccgcgtggtcgggcacggggggccgttgcgcaggggccgcggcccgaggggcgcggagggcgtgtggggcgaccccggtctcacgtccccgctgcctcccgccgcgcccggagcccagccagcctgtgggaggggagcgcgcggggcccgagcagggaaccccgaaaccccgtccgggcagggtc

SEQ ID NO: 26375 - DNA, 953 bp, Homo sapiens
  chr15:26107409-26108362
  hyper
cgaagactgaggcagggacttcaggccagggggccaggctggcttttcctgcctttcacttcaggtgggagcggctgtggatgaggatgtccagcggccgtcggtttctagccttgggatcattctggccccgacacggagtgacaggggatccccacgcgtccccgcatccagggcgcccctttagctgcggcggaggcacagagaggccttggcggcgctgtggcttcggtcggcaccgggtcccgcgcagccgggccctccaccctgagtggagctgccttctaagcacccagcccctgccaatcactgtgcccaacaccaagttcccggggcgccctgccctgcgccaccgcgcgctcgctcgcccgcccgcccaactcacctgctgaagaccaggcagcccaggtggttgatcttgtggtcggagcggtggcggctgtagtcctcccacaggtccctgaaggccgtgatggccaggatgaagagcaccggcgccagtgccaggccgggctggaaggcgttcaccgccggcacgaagttgagcagcgcgatgaagacaaagtacacgttggccgggcggtggaactgctcgaacaggttcttgggcaggaaggacagcagcgtgtacttggtagtcttgagccggttgtcggccaggtgctgggcacacccgcgccgccgtcgccgctcgcccttggccgcgccagccgcagggtcctcggcgcccgggggcggcagcaggttggagcgcaccgtgcgcgtcctgccctctcggcgcctccgccgtcccggaggcccgggctcctcggtccccgccggctcccgctccatggccgcgtgtcgccgcgcccggctcctccgccgctcacgcccgcccgcgccggcctcttaggttatcatcactcgcggcccgggcgcggcggtgcgagctccccgcctgcgggacgcac

SEQ ID NO: 26376 - DNA, 409 bp, Homo sapiens; identical to SEQ ID NO: 5966
  chr15:26178877-26179286
  hyper

SEQ ID NO: 26377 - DNA, 145 bp, Homo sapiens; identical to SEQ ID NO: 5967
  chr15:29432142-29432287
  hyper

SEQ ID NO: 26378 - DNA, 1176 bp, Homo sapiens
  chr15:29561185-29562361
  hyper
cggtgtggggtatccgccggtattccaggtaacgctgtcgcacaaagtcctcagtaatgagtttctttggatctccgaaaattaaatgcttcttggtggggtagacccctaagcgccgcagaaagtcccaggcttcagtttccttgatggtgttgcccttcataaagatgagccctaagacgatcatcaggaggcccgtagtgggcgtgccttggtcacccctcatctcggcatcctcctccacaggctccagggtgttgatgaggatgtaagtgttgctcttgggttcaagttccaccagcttatacccgaagacgtactggaggcgctcggcggcccgtttgaagaggtcggggaagatgtccttgtagtccccgatgacgtgcttcagtatgtcggcccgcttgatcggaatcttcttctggtctttaatcagcaagaactgcaccagctcggacactttcagctccagctgcttctggctcctgggccccacggcgggggcggcctgggcccggcgggcgccctgaggcgaggggccctgcgacccctgcgagccgcccggcccgcgggacgtgctcggggcctcctcggcaaagccgtctctgagaacccgggcgtcttccccggcccgcgaagccccggggtttccgctatggctccagtctctgtccctctcggcctggccgccagagcggccccggttcctcggtttttgcaacatgtctccggcggcaggtgccggcgcacactccggtaggcaagcagccgcggcggggattgcgggtcggcgacccgctaacgccggtgcctggaggcgcgcgcagtgtcggctgagactgcgtgctgcgtcatgaagcctgcgccttgcgtcagggcggctgggcggtgcgcctgcgcggctgcggcgggtaccaaaaggaacagcgttttccgtgcagccctgcaggtccgggcgatgatttttagtatagtgaagtgttgttaccaaaccatgcaaacagagagcgagaaccgaaactcctaaacaagtgtgtcgctaaattcagaccacacaggctcaggcaagttttacagacagtattatgagtttctaaatcgggagcatttgtaaacggaaagaattcagaggatgaacgtgtgagaaaaaaaaaaggtgaagaggaagggccgacc

SEQ ID NO: 26379 - DNA, 507 bp, Homo sapiens; identical to SEQ ID NO: 5754
  chr15:31774606-31775113
  binary

SEQ ID NO: 26380 - DNA, 566 bp, Homo sapiens
  chr15:32322362-32322928
  hyper
cgcagcttctggctgagagcgggagcgggctgagtggggacaaagaacgcaagggagaggtagagcctggccttgggcagcccctggcctggccagaggcgcgaggccgagagcccgctcggtggagactgggggtggaggtgcccggagcgtacccagcgccgggagtacctcccgctcacacctcgggctgcagttccctgggtggccgccgagacgctggcccgggctggagggatgggggggcggggacgggggcgggggcggggctcgtcacgtggagaggcgcgcgggggcgggcggggcgggggcgcgcgcccggctccttaaaggcgcgcgagccgagcggcgaggtgcctctgtggccgcaggcgcaggcccgggcgacagccgagacgtggagcgcgccggctcgctgcagctccgggactcaacatgcgctgctcgccgggaggcgtctggctggcgctggccgcgtcgctcctgcacggtaaagccactgcctccccgccctccactcctccgtgggatcccgggcacatcccgggcgcctctgtgcgccccgc

SEQ ID NO: 26381 - DNA, 113 bp, Homo sapiens; identical to SEQ ID NO: 9151
  chr15:39971441-39971554
  hypo

SEQ ID NO: 26382 - DNA, 103 bp, Homo sapiens
  chr15:41091052-41091155
  hypo
cgttaactcacgacttaatccttcattctggcagccgtggtgccccgccttgtgagtgtgtgtgtaagaatttggcgcttgctggctgggcgcggtggctcac

SEQ ID NO: 26383 - DNA, 185 bp, Homo sapiens
  chr15:43467742-43467927
  hypo
cgcagaatggagcttctctgagtcaagcccttacacttgggctttttggcactgtattttaaaagcacgttaatttggaaagtttagggaagcctttcagttggagtaagaggttagctgtgcgttaagaactgtagaaatagggaaagcgctggcagccaagatggccgaacaggaacagctcc

SEQ ID NO: 26384 - DNA, 464 bp, Homo sapiens; identical to SEQ ID NO: 9153
  chr15:45722474-45722938
  binary

SEQ ID NO: 26385 - DNA, 681 bp, Homo sapiens; identical to SEQ ID NO: 23085
  chr15:48469946-48470627
  hyper

SEQ ID NO: 26386 - DNA, 1460 bp, Homo sapiens
  chr15:48936649-48938109
  binary
cgaacggggtggggactaaacaaccctagcacctctaaggtgcccccaggaggtcttgccaaggagtcttccacagggagagtcatcctgcccgttgttctggatcttgaaacttgggagacccacaccaaaggagggaaccggttcctttaccctttaagcgcgtcgtgtcctccaccgcctcttctcttggcccgactggctctggtttccttcacgttcccagcctccaaattggcgtccgccccatggctcgtgtaggacgctaaaagcacggtaaatcccagggcgatctccagcagacgccctcgacgcatgatgccgagccgccaccggctcccgccgcctcttgccgcgcccggggctcggtctgcggccgccgctgcgccctgaagcgcaccgcgccgccggggtcccgctatcccgccgcccgtcccccgggccgggctcctcccgccttctccaggcgctgctcccacttcaggcggcccctgccagctgcaacacagagacaaatccccgaggcggggagactttcagggcatcgggatgctgaagcctcgcggtccccattcccaagcccaacccgtgcgccgcctgcgcgtggcgcagttaatttgggtaagggaagaccgtttggtccacagctggctggaaagcccaggcccccggcggcagcagccccggccgatccctcggcctcccgggccccgccagaagagcgcggcgcaaagtacccatatccccagcggtcctaagccccgggcgagctctctgggtttattttttttagcggcacgaattgcgcgcgatgcgcgctctgaacgccccactcctcagcctgccctctccgccaggctggaagccagccgcgccgtccccgccgactccgggcgatgccaccgccccccgaacatctgacgcggagcccggcaccaagagccccgggccaggaagctgtcaggcaggggagggccagcgccagctgtggacgttccgggacagcccctcaccccagtccctgtccctgccctcggcgcggcgcaaacgcaaaagcctccgtggccgcagctccagccccggtggccgcccgacccccgtcgggaccccggctgcacccactggagaagcggcggctccgactcccgaggaggcggcggcggctgctcccagtcgtggccgctacagccactgctcggctccgctcgcagctgtcccagctgtggctcctgtccgcttgtggcacccacagtctctgccgcggctcccgcagccccctcctttccccacctcttcaagtatcgtccgcgcagcggtttctcgcgagagaaatactttttttaaaaaaagaaagaaaaagaaaatgacaccccctccttcgtcgccctcatcaccaccccaccccccggccccatccatcctccctttccactcccctttgccagcctccgcctcggtgc

SEQ ID NO: 26387 - DNA, 92 bp, Homo sapiens
  chr15:51202468-51202560
  hypo
cgcgccgggcccccacaggcgctcgatggttgcacggattgtgtagtataccgattcacagctacaaggagtttatatcttaaaaagagcac

SEQ ID NO: 26388 - DNA, 941 bp, Homo sapiens
  chr15:53078748-53079689
  hyper
cgctccttcgatagcctcctgggtgccacaagcacctgccaggcaccatgtttgcgcctccagcgtgcgggtcccagcactcaggctccctccccctccacagtgccgtcccctgagctcggctatgtagctctccacgcttggaggtcagagggcgctcctgcggccaggtttccatggctcagaggtcgtctctgaacagaacgtgtcagtctgtccttccagggggcgacagcaggcagtggggggaggagggatattgaagtccagagcaagagcctccagggggcgggggtgggggatggggaccgagttttcccggaggggtagccttctccatttctatcttcttcccacattcccccgctccactctttggcttcagcgggcactgcctgggtaagaggccctgaagcctggctctggggtggtgtgggtgtgtgaaaaggcactaccttgggctctggagagacggagcagtcaggacgaggagcagccccttcgcccactccctccggaacctcagttgctcgcgggcagcccacgggtggagatatggtgccggtagcacaagagctagagagtggaaaaccgggggccagcgattcgctggggcgcccagcgagcctcttctcccctgactggttcccgggcgcaggctgcaggaacctgcatgaggactttgcctggggcgaacgaaggcagagctgggctggaaaacctggcagggcagagtctcagccagcgcggtgctttgggaccggtggcctgcagcgcccaaacccaaagaacgctttgggtcgcttcggggcacgaatcgcaggctggtcggcacctgccacccccagcttctcattggcaggcacgagttggaggagggggctttggcctcacgctttgattttagactgtgaaacggctcagtgcccccggctcagagc

SEQ ID NO: 26389 - DNA, 985 bp, Homo sapiens
  chr15:53079704-53080689
  hyper
cgttctccagggacgaattaatggagaacgatcagttaattaacaaaccctcattccggcttttaccttttctcttcgccaaggctcaggcctgggcgctgggctgagatggaggtggaggtggggggtgggggagtggggggggagggggcatggaccaggagtcaatcaacttggcaaccgccggccggatctcatcaaacccaggccaccctccgctgtccttagctctacctcccctcatgttctctaccctcaagggtcgccgaatcctcctgaaatccccggtggggttcgggctgggctcagctttcttctctgcctatccgcggtctcggggagccaggcgcggtgtctgcgctgcgccaaggagagcttccagctgaactcagaaacacctggggcttggggtttcgggcaggagacctctgctcctagacttgggggtcatttacacactctcatccccaaacccccctcccgcacggggattcagacgaaaatcgcgaagaggaataataaaacaaaatgcaaagtcctcagggagtcggcagcggagtcggtcccaggacatggctattgctttgcagctctcactgggaccttgggacggtcagcctccctctcctttccacagccaattccatgcgcagagagcgtcctaacccttacaactcgtctgtgctacacacccaccgcccaatggctctgaaactttttgcccatactcttagattgaggtcaccccagccagcgccaaaagaatgagcgcgggagggggtcacagcagccagttcggccaaacatcgacgctgctccggcacgctccagcccagcgcctgggatgtgtcagaggtacctgcgaggaacatttgcgtgcgattccacgcacgcgttgcatccctcttcccaaacccggatcgctgaactgagaggtggcgcagagtgtctcaccaggtgcggggatttctctccgcctcaggcc

SEQ ID NO: 26390 - DNA, 147 bp, Homo sapiens; identical to SEQ ID NO: 9160
  chr15:53489675-53489822
  hyper

SEQ ID NO: 26391 - DNA, 78 bp, Homo sapiens; identical to SEQ ID NO: 6926
  chr15:54191760-54191838
  hypo

SEQ ID NO: 26392 - DNA, 900 bp, Homo sapiens
  chr15:60286819-60287719
  hyper
cgcattgccaaatacccccttaattctgcttaacactaaaagggttttgagcaccataatgagattcttctgtctgctaattaattgacacgctcctgaatattcatatgagctagcaccaatacgttcctaattgcaccgtggaatagatctcagaggaaagtaaatcgccatagacttaattaaaataatgtattccagatccagcacggggaaagatgagacatttgccttcgagctcgctaagaaagtggcacctggttggtggaggggagagataccaaatgtcggcgcccagcctgaaataagtggcatgggacgcgcagggagggcgttcagcttcagaaagcagcggctacgctgggtccaaacccggcggctcgggaggccatagctcctaggtgcgtccgagctcctgctaccctgcgcggtgttgtcctaccggaggaagtggctgatgggcagtctaggatcccggcccctgacccagggccctctcctccctgcggtcctggtccgggtcatggtcccggggctggtctgaagtgctgtctacagagggcacttggggaaacatcgtaggtccggaaattcccagggaaagtttttgcaggagttgtggacgccgcagcagccccaactctcccaacccagcttgcgacccgagagaagtcgctcacacttctctttgggggagggcgacagttccggggaggacgcttggatcccgaaaatgacgggatccaggtcccacaaccctcaggaagcgctgcggtcttcaaaactgcgcagctaaattcctgggcgcattctccctttcttggcgagtccagtgcccgtgccggggagcattccagcccagcttacctcggcaggtagaaagcacagcatcgaggctgc

SEQ ID NO: 26393 - DNA, 620 bp, Homo sapiens; identical to SEQ ID NO: 9162
  chr15:63086996-63087616
  hypo

SEQ ID NO: 26394 - DNA, 206 bp, Homo sapiens; identical to SEQ ID NO: 9163
  chr15:65186319-65186525
  hyper

SEQ ID NO: 26395 - DNA, 67 bp, Homo sapiens; identical to SEQ ID NO: 23972
  chr15:67545420-67545487
  hypo

SEQ ID NO: 26396 - DNA, 39 bp, Homo sapiens; identical to SEQ ID NO: 9164
  chr15:71164697-71164736
  hypo

SEQ ID NO: 26397 - DNA, 384 bp, Homo sapiens; identical to SEQ ID NO: 23478
  chr15:72581447-72581831
  hypo

SEQ ID NO: 26398 - DNA, 872 bp, Homo sapiens
  chr15:74422098-74422970
  hyper
cgcggcttgggggatagtgcgtgtggggttgaccgtgtgtctgcttgagaggctgtgaagatatggggggcagatatgggagaaatgctcgggcctgaagtccccagcccaccgtgctcaagagtagcggacgttttgccaccatccttgtctgtgctactgtctgctgcagcttccgtgccccgttctcctggagcaggcaagacctggagtgaggtgcttgggtgcgctcgagagagcttccccctgctccacctgtcccgcggtgcgcgcaggccaacgcgtcgggcagtgggcttcaagcgctggtttagccacaaaagaccagaagtaaagagttccggcttaagaggctgggcagggctgcggtgggctggggaggggggtgtcccttcccagcacgccctgcagggctgtgcgttctggtgtcgggttagactagcaggcggggcgggggggttggggcggcggggcgggggagactagggcttatatcagcccagatccaggcaaaaatggtagggagggtgcggcgctctgctaacactatcaattatgcatcatgttgaacgtggcttcggggaggaggcggctagcagcggggggtgcgggagggaagggtccgcgcgagctcggctgcgcgcagctcagcgggtcccgctcgaagtctgtcggtgccaccgcctgcatttgcaaaaagagtttaaaggcaaagacacgccttccccccccacttcagccgcgcgcctttccttcccccaaattcctcaaagatggtttgtctcacgtgttgcagggcgtaaaagcggcttgcattcaattagcagcgaagctcgcgggcgctggcgggacaggcgcgtgagggtgagttc

SEQ ID NO: 26399 - DNA, 96 bp, Homo sapiens; identical to SEQ ID NO: 9165
  chr15:76558876-76558972
  hypo

SEQ ID NO: 26400 - DNA, 60 bp, Homo sapiens; identical to SEQ ID NO: 6933
  chr15:79208280-79208340
  hypo

SEQ ID NO: 26401 - DNA, 983 bp, Homo sapiens
  chr15:79383225-79384208
  binary
cgaggcgcagagccgcgcgcaggctgcaacttggtgcctcctccccctccccagacacacacacacgcacacgcacacgcacacactcaaaccctgccctccctcccctcatctccccttctctccctcggatgttaaaaagcaaatcagatcaattttcgtttaacccaatgaaaccccgaaggctcgccatcccgggagtttgcgtctttgcgccccaccgcggcgcactgtagacctggggttaagtgccagttgtcattttctcctccaaaggctcgccccccccccccactttatttctaatacgaggtggaaggaggaaggtgggtggcgaaatagagctgcaaaagcgtccagtcctagtctttgcatagtcagccgggtcacattgaattccagcatccggctgcactcccggcggcttccccagctacctgaggacagtacagggggtgagatggggtggtggttggtgaacgttggttactttattttatattattttattttgagagttgccataattaccggcgccaccccccgtgcaccctgaggtctggttggcgagccgctgctgggagttttctgcaaataccccccaaagcctgaaggcgggcttcaaacgcaggcgccggggaccatgggagccttcaaatagctgcgctggcgcaatgataccttaatgatagattttccgttcttatttttagctctcattcgcctacacagttacacggcatttatccgagaacgtcacagcgcccgcatgctgcaccgggagggcgcgcgggccgccgggcgagccgggagctggggcggggagcgcgcatcgctgtctgccgcagagggcagcgagctcgccccgacccggagcaagccgcgcctggcccgggcgctttgcagcggggatgggtgcccgcgcagccctgtgaaggaaagacaccatctttccgcacggaaactgcgtatacccctccccc

SEQ ID NO: 26402 - DNA, 787 bp, Homo sapiens
  chr15:83316286-83317073
  binary
cggtcagctcccgtctggacagacgctcgaggccgcctggaggccgcagtgcggctcggaggccccaccggccgcccccgcagggctgcggcgcctttaagcccaaaggccctgagtcacgaggaggctccctgcccccctcgccctccacccctccacgaggccccacgcccgcgggcacgtgaccgcgccccgcccgggactcgcccgcacggggcgggggatgggggtaccgcggcgccggacccggctgcgcgcggaccgttagctactgcggccgggacgcggccccgcccaggcgagcggcgggtggctcttaccagcgggaacgccatggggccggtgtggccctgcggggctgacgggctgaccggccagccggcgggcgagagacgcgcacgcacgtgggcactatttttgcagcgggccgcgcgcagccccgcaccccggcagcttatgaagctcctacgagccgctcctcggagccgccccccggccggatgcggagcacctgtgtcggccccgcccgggccctcgcctccgccccctcgcgccccgcccctcctagcaggccgagccgaggagggctccgccgcccacccggaacccggcggggactgccgccgctgctagccacagctgccccctggggggccagagacctaagcctgagcgcgccatcacctaagtgacccttgccgagtcactgtctgccctgggcctcagtttccctcttaacgaaagagggcacgatttacaagcccctgcgagcggcggcgatcgcttc

SEQ ID NO: 26403 - DNA, 878 bp, Homo sapiens
  chr15:89942592-89943470
  hyper
cgggcccacgaccccaaatgaaacatctttcactcgccccccagcagcccgggccgcgtttgaccactagtagggcagaaccactgaccggcaggcggcgctccccggggctcccggctcgagccccagggcaccgggaggagtaaggaccccgagcgggagggagacgactggggggcgcgcggcacaaagagctttttattcaaatttgtttagagtttcgcgaatttgcatgaaaaatgtgtgagaaaagccagctccggtgacctcatccgcacctgccattaacgttcaattagcggctgaatagcggccgccgacgcgacgtgcagagaatccggcctgccccgcgcagcgagggcggcgggccaggcccgggatagggtgggaccgagggagggggacgcggcgtagggccccggcctactcctctggcccggagacccaggacctcgtccgcactccaactctccgagggaacgcggggatctcaggactcacgagcccaagattgtttggagcgcgccgggagccttaggatgcctggctccctctgggcgcagaaaagggcgggcttgcctcctccccaggacggaaggtggccggaagagccccgtcccagctcagatgggcttccccgccatcttccggacaaagtgtcaagtacaagttcaagttcagggccaggcccgggggggggcgctgagccttacccggccgcctttgttctctggcataatcgctcccacgtccccctcccgggcggggcccagcagagacccccgccccgccccgccccgccgcgccccgcaggagcctcctcctcccgccggcgcggcgcctgtgccctggtcccggtgtccccgctcggtgccacc

SEQ ID NO: 26404 - DNA, 963 bp, Homo sapiens
  chr15:89949775-89950738
  hyper
cggccgcccgcacatctggcccctagacctgctcggtagaggactggctggtggatgcgcggtccaggccgtgggcactcgacccacctctattttccttcccgaggcgcccctggattaccactttcggtttgcgcttacatccgggatgtcgaatttcccagggaatcataattattttatctataatttattctaaccccaaggttccaagaaaatctgtaatgaacgttaatatctacagcctcctggtcaatctgcatcgggcgagagagccgtcgggttcttcgcagtgggtgacttcaggtccctgtgccttgtttcctatcactctgaaagaattttctccccaaaggaaatccaacttgtttgaaacaggtttctcctctctgactttctgcactggagaaaaatctggatctgcttttcgaaaagattttttttttttaagaggcatccgggcaggcctgaggagtcgggctgaaggtgcgccagccattattgcctcagacctccggacgctacgtaccccaagcacctgagctactagtggtatatcagacaagatttctgggagcagccccaggagtccctccgcccgctcccagtccgcaagcgcagaggatcctgcgctctgtcccccaaggtcttggcgtttgctgagctctctccgcgcgcgtcgaggagaggccgcctctcgtgagcaaaagctgggagttgttagagattccgcagccgctctgagggcgagatcgggtttgtcccacgacctcggcgccaggaagctgtagaaagagacagaccccaattttctccccttggagttgaaacaaaacctgaaagcccgaggttgcccgcaccgccagaggtggcgcctaggcggcgggggcgaccagagccgcgtgcccgcgcggttcccaggcctgggttctgtttcttcctattttagttagttacttagcc

SEQ ID NO: 26405 - DNA, 845 bp, Homo sapiens
  chr15:89950778-89951623
  hyper
cgccaagcctggacccacgctgagtctccgcggccgccagacctatagttgcccggctgggctcccagaggagtgaagaagggaaattcctagtaattaaaggggaggttttcccggggcgccccttggtgaagtggccttggcttccagtgaggaacaaaggactaaggtgcctgcgcgcagcgcgccctcggggcccggcgcgaccagctttcacgcctctcccagctcccacgcctctcccagctccacggcggccgcgggctttgtgagctggggccgcgcgccgcgctgcacctgcccggatttaagtaccttggcgaggcagcgcaggcggctgttctaatcgccgtctccaagtacctgctcatgaataaacaccaaccccatttatcaggtacttagcgctcattgtgaaggggaaattggcccttttctgaaattgtctatccacaacccatctgcgcagttctggttgcagaattcccctcacccttgagacacacacacacacacacacacacacacacacacacacacacactcgcaacacgaggctcctccaagctaagataaactcgcttttcttccggtaagtgcgcgattgagccgcgacaataggcggcgaggaggaggccgttgggtcaatagcctgcgtctctcccattgataggaaaagtcagtgcgcggaatgcagggccttaggaaagccctgtccggcgttccagccacaggggtcacacttgcatcaacatgcgggcacgctgccccttgggtaccccaaacattgagcaaaatattggaaaggtggaccgaggtgtctgtggtgcctgccagcattggtc

SEQ ID NO: 26406 - DNA, 969 bp, Homo sapiens
  chr15:89954212-89955181
  hyper
cgtcagatcaccacttagagcgtcttgatgcccaggctagaaggatctcggttgcaccagctttccccactgcagtttcaggttttgtcccgacagactttcagcaagcggcttagctcagccctggcgctgccttccaggaaagaggggcagcagcagcctcggctgagccgggtgcccttgtgggctatctggtgggggctcgcgggtccttgccttctctgcctggggtaggtgggaggtaggttcttgaacttcccggggcttctccctggcacactttggctgccacatcacggatggaaacgctgaggccaatgggctcaggttcgctagcagcaggcagccggccctggtgtgcccgctgtggcctgggtgctctgcatacccccgcgcgcgcttgctctgtgtggggggctggcagataggggtgttcctaggggccacgcggggggaagggggtggcggggccggtcttgcgcttcccacgctccatctgttcagttcactctggtggtctctgttccagtctggcctagggatccctggctccccacggccaagccgagaactagcgggcgcaggttgcattgtgcagactcccggggtcaggtcgcagggtcacgtgcacgcgtcgggcctcctccgggcgctcctattccagatccgccgacagagggcgccgggggcccgagaggagcatgttcgggcgcctctcccgggtccctggcgccacgctgtggggcttggtggttcagagccacacctgacaccctcacgtcccaaaccgggatagtcgcaccgacaaaaatcacaggaaggagcgcgcagttgactgtgggcgggcgggacggcggagccacttacagcgggacctgcgagggtgtgggtacgggactccccaacggaccctctagtttgtaaccgtgcgaacactggagggattcattatgtgcaccgtggaggcgc

SEQ ID NO: 26407 - DNA, 40 bp, Homo sapiens; identical to SEQ ID NO: 5978
  chr15:90016187-90016227
  hyper

SEQ ID NO: 26408 - DNA, 107 bp, Homo sapiens; identical to SEQ ID NO: 6415
  chr15:90378787-90378894
  hypo

SEQ ID NO: 26409 - DNA, 69 bp, Homo sapiens
  chr15:91185750-91185819
  hypo
cgtccgcaccgaaggcgggcccggagtgggaggctcggcctggggcggcggcaccggagagggcacctc

SEQ ID NO: 26410 - DNA, 865 bp, Homo sapiens
  chr15:91642951-91643816
  hyper
cgagaacaaagcagtcgaacagcaccatgatcgacgatactttgggggcggcgtgatcagaggattccccttcccgggaacttgcgtctagtcctctgacgcatcctagttcggagtgggtggaagggcatgtggagtccacagcgccccctcgccctaggcggggtggagacagcgagacgacgcccatgatcagctggttacaaaactcgaggaataagaagtttaatatttattggtctgcaaatccggagaccttgcggcctcactggtcctccttccctctgagctatctccacacccagccttcgatcagaaggagatttagaagcagagctgcccgcagcgaatacttttaatgcccgggccgggaagaaagcgggttaggatctgatcccgctgagtagaggacccaggagcctcccgccccgcgtgctctgtagcgcgggggcgcgctgcgcgctgcgcctgggcggctggcgggggcggcgtgggcgcggtgatgcaggtgtgacacccgccggcgcctgcctccgcccggatcgcccagctccgcgttagccggagctgcacgcggggctgccggggcggacgctgctctgcctgcatccggaggcggccgccagcggatttgccacccaggtaggggactgcgttgctcgctgcggtgcaaccgacccagccggggcgcggaccccgcgtgcgccagggctcccagactcgcctgcctgggctgaaatatacacgctcgcacagctgagtgctgttcatagtaaatggcacaaaagatcggagagtcttgaaaaaccggcgcagaaaagcaaggacttgcccgctgcctggagctgtgcgcttctttgaaagc

SEQ ID NO: 26411 - DNA, 202 bp, Homo sapiens; identical to SEQ ID NO: 9173
  chr15:96596605-96596807
  hyper

SEQ ID NO: 26412 - DNA, 496 bp, Homo sapiens
  chr16:1265061-1265557
  hypo
cgtcggttcttcaaggacaggtgtgtgtggtggggccgtcttgggttctgggggcccctcagggctctgggggctgggggcaggtgaggccgcaggctttcccacggaggtctgcagaagcaacgctgctgagccgaggcggggaccccagacgtgtgcgctgagcctccggccacacaggtggaaccagctggacctggccatcgtgctgctgtcactcatgggcatcacgctggaggagatagagatgagcgccgcgctgcccatcaaccccaccatcatccgcatcatgcgcgtgcttcgcattgcccgtggtaggtgcccgcgtgcccgccaggttctctctgcgggtggagggtgggggctcagccatgggtgggagtgaggggcggggcggccagggtccccgcgcagcagggagggtccgcccagccctgctgacgctcagctcccggccctagtgctgaagctgctgaagatggctacgggcatgcgc

SEQ ID NO: 26413 - DNA, 523 bp, Homo sapiens; identical to SEQ ID NO: 22806
  chr16:12897365-12897888
  binary

SEQ ID NO: 26414 - DNA, 364 bp, Homo sapiens
  chr16:1382824-1383188
  hyper
cgagtggagatggtgccactgcgctccaacctggttgagagctatttttgagagctttttcgagactctgtctgaaaaaaaaagggaaaaaacgcagatcgcgcccccacccagacttcgggaccagcgggttggggacaggacccatcaatgccttaacaaaccctgcaggagaccgcgggcccgctggggttccaggacagcgcagcggaggaagagcggggagccacccgggaggggctggcggggtccagtgcagaccccaggggctccgggggctctggccggctgtgaccccacaagcgccaactgggccctcaccagagccccagggacgatcgccccacagaccgtccgcgtgggc

SEQ ID NO: 26415 - DNA, 33 bp, Homo sapiens; identical to SEQ ID NO: 23990
  chr16:15738995-15739028
  hypo

SEQ ID NO: 26416 - DNA, 357 bp, Homo sapiens
  chr16:1741741-1742098
  hypo
cggggttcctatgagaggaggtctccaaagcactgcgggggtggggtggggtggggtccggtggacgtctggttgctcagtgttctgtgatcgtttctgcagggggtaaaggaagtggtatctttgacgaatcaacccccgtgcagactcgacagcacctgaacccacctggagggaagaccagcgacatttttgggtctccggtcactgccacttcacgcttggcacacccaaacaaacccaaggtatggactgcattcagacgtgacagcgcagcagcgggtatgccaggtgctctttccaaaaaggctccaaggcagatgcgacatgtttttagggagaatcatggtgggtgcc

SEQ ID NO: 26417 - DNA, 131 bp, Homo sapiens; identical to SEQ ID NO: 6426
  chr16:1753650-1753781
  hypo

SEQ ID NO: 26418 - DNA, 1182 bp, Homo sapiens
  chr16:1813299-1814481
  hypo
cgtttcaggcgtctgtccagcagggagtcgctggtcatgcctgtgccccggcggcactccaggtcccggtctgtggaaccctcagtgactgtggcagcagagcagcctctgggtcgagcaggggccagctgtggcctccaagcccaggggcatagccggtgccaggaaagccacccttcccagctgggcacccagtgccgggaaagccacccttcccagctgggcacccggtggccgggaaaaggcgaggatgggcccaggcgggcctccctgccgtgacctcccccaggacaagcctggggcactgtgggggccgctcaccctggacagagacatcacccatcattcttccactcagcgactgcacgtcctccgcccgtcgagagcagaagcgcgagcagtaccgccaggtgcgtgagcacgtgcgtaacgacgacggccgtctgcaggcctgcggctggagcctgcccgccaagtacaagcaggtgcgggcgggcgctgcggggaccgggcggggccccgcagaggcggggcgggggtaaggggcggggcgctgtggggcggggagagggcggggcagtgctagggggtgggagaggacggcgggtggggcggggcctggcaggttcctagtgagcctcctgggcaggggtctggagggtcggagaaggagccccgcggctcccacgcccccacctgcctccagtcttgaagtggctgtgccgccagaagctggcagccctacctgtctcagatttctggagggatgggtaggagccagggttcgtgcccacggcgcctccctgctccctgcagctgagtcccaacgggggccaggaggacacgcggatgaagaacgtgccggtgccggtgtactgccgccctctggtggagaaggaccccaccatgaaggtgagcccgcgaggaccccgctcaggctggctgggcgagcgggaggctggggagtgccggtgacacccgacctcggccctgcccttgcagctgtggtgtgccgcgggcgtcaacctgagcgggtggaggcccaatgaggacgacgctgggaatggagtcaagccagcgccaggccgcgatcccctgacctgcgaccgcgaaggagacggcgagcccaagagcgcccacacgtctcccgagaagaagaaggtgagcatggccgaggccacc

SEQ ID NO: 26419 - DNA, 114 bp, Homo sapiens; identical to SEQ ID NO: 25136
  chr16:18802552-18802666
  hypo

SEQ ID NO: 26420 - DNA, 208 bp, Homo sapiens
  chr16:18804320-18804528
  hypo
cgctgggtaagaaaagtcaaaacactaatgagttgtccatgaagccaactgctaagaacgcgctcaactatacgcgacatgaagacactatgcacgaagccttacttggcgagtctgaatttctattaactaagggcagagtgagggagaacaaagagctacttccgtaacattttagtatccagatagtacagcagaaacggttccc

SEQ ID NO: 26421 - DNA, 654 bp, Homo sapiens
  chr16:2028554-2029208
  hypo
cggcactttcagcggctcagcaggaccctccaggccgccgctttcttggacttcctgtggcacaacatgaagctccctgtgccggccgccgcccccaccccctgggaaacccataaaggcgcactgccctagccggtccggcctctctccagtccatcctgaacccctggaaaacccataaaggccgctctcctggccggctctgtctctctggactgcagtccagccccccaccctggccaacaccctacctagccagccagaagggcactggagctgatggtctcggccctgccacgcccatcccgcaccctggcctggcagagatccagcccgcggctccgcacgcttagacggtgggggtcatgcagaacaagctttactcagaggaacagcaaatggccccctcccatccctgctggccagggagatccgccctccccgctcctccccagccctgggatggcgcggtccatcccctcatcgggatcctcgcgctcactgctccgtcgtggggtgcggcacagagtccacgcaccctcgagggcggccctggcgccgtgggcgccgctccagggccctgcgtgtgacggtgcagcagcggctctggatggcgcccggcgaaggtcgggtgggcacggtggggggaggggc

SEQ ID NO: 26422 - DNA, 228 bp, Homo sapiens; identical to SEQ ID NO: 6427
  chr16:2042997-2043225
  hypo

SEQ ID NO: 26423 - DNA, 371 bp, Homo sapiens; identical to SEQ ID NO: 9184
  chr16:2226433-2226804
  hypo

SEQ ID NO: 26424 - DNA, 962 bp, Homo sapiens
  chr16:2230004-2230966
  hypo
cgctggcttccaccttggccaagggcgggccttcgacacccgcctcgcccttggagggaccccgaggccgctgccggccagtgccatcctccacaaaggggcctgggtctgccgactccccaggcccccggcgggcagtggccagaagtccggtgactggcccgctgagcgtgcggcgccggttcaccacctccccgccaggcccgatggcctctttgtgtttcactgaggccagcacggtggccacccggcccggctctgggctggcagggcggggagtggggtggccctcaggaggcctgcgggcagcccggcccccacccccaatggaggacagctccagcatggccgcgatgctcttcacactgccggcactacccgtgtccacgctgccggccaggtcactggcccgccggcactgtgcccggacccccagcaggccatcctcaggctcggcgtcaggcaccggctcatccgccaggttggcactagccagggccgagctggagcgcttgggtgggggcggcgggggccccttctttcggggccgcacggcaaaggactggctgcggttgacgttcttgtcggcacctgcgggcgccctcactgagtggctgcggcccacgcgccgctggaccgtggcataggggccggcagccgcaggcaccagcagctcgtcccgctccggctcgctgtcggacgccgcatagcgattcaggctgtgggcccgcttcttgggccgccccggctccgcgtcggcctcagggggcaggcacagtgtgggcacagccgtcggcacgggtgggggcgcaggccccggggcagccggccccacctcgccctccacgggctggggcagcacgtaggcaaagccgcggtgcgtcggtgactgaggcagggagcggggtgacatggggcgctctgtcggcggcagcagctgcggggtgggcttcaccttggcc

SEQ ID NO: 26425 - DNA, 948 bp, Homo sapiens; identical to SEQ ID NO: 23492
  chr16:2280815-2281763
  hypo

SEQ ID NO: 26426 - DNA, 970 bp, Homo sapiens
  chr16:22824947-22825917
  binary
cgggctgtgtgtgtccatttggcgagatgtcgagagcggggggagtgtccttgtcggtgtatctgggcccaggttaggggacttctcctccccacccccgcgtgggtgtgggggtgtgtccgggctagggcgcgtgtgcttctgtgcctgtgcgtgcgtgtgcgggtcagggtggtgggaccgcgcatcagggcagggtgcctgcgtctgcgtctgggtctgtctggtctgcatgtcggcgcgatctcgacctggattcgtgtccctggatgtcgagaggccagcgtggtgggggtgtccagcctcccggaggagtactatgccttgacaccttcgtttcaccgccccaaagctggcctggggctccgtagggagtggcctgcatggggagggcccgcgtgctgtgtttctgggaggggtaagagagtgggggcgcagggggcgggccaggtccctgggcgcggcgcgggctcgggggacccgcgcggctgacgtcaggccactccttaaatagagccggcagcgcgctccgctcggcatttcccgaagagccagatcgcggccggcgccagcgccaccgtccggtccacccgccagcccgcacagccgcgccgccgccgagcgtttcgtgagcggcgctccgaggatcaggaatggggcttcgggcgctgggcgcgctccgaacccggcgcacgtaagagcctgggagcgcccgagccgcccggctgcccggagccccatcgcctaggaccgggagatgctggaaatgcaaccgcctgttccccgaggagccgctgcccccgggaccccctggcactgtgcgcaccctggtcagcagcccccggagaagacggcgcccccaacgcccgacccgcgtggccgtggcagcgccacgcgagccctctaggcgaccgcagggccacagcagctcagccgccggtgccccctcggaaaccatgacccccggcgc

SEQ ID NO: 26427 - DNA, 1379 bp, Homo sapiens
  chr16:23847172-23848551
  binary
cgggcgccgatatgtaaagcagctggcagcgctgggcggggcctgggcgcgatgcaaatgaggagggcggggctggcccggggctccgcctccctcccccgcagctggggccagcggtgccaagcgcagctggacgagcggcagcagctgggcgagtgacagccccggctccgcgcgccgcggccgccagagccggcgcaggggaagcgcccgcggccccgggtgcagcagcggccgccgcctcccgcgcctccccggcccgcagcccgcggtcccgcggccccggggccggcacctctcgggctccggctccccgcgcgcaagatggctgacccggctgcggggccgccgccgagcgagggcgaggagagcaccgtgcgcttcgcccgcaaaggcgccctccggcagaagaacgtgcatgaggtcaagaaccacaaattcaccgcccgcttcttcaagcagcccaccttctgcagccactgcaccgacttcatctggtgagcgcgcgcgcgcagggcaccttcccgggcccccgagggcagcgccgcgccagggaccccctctccgcgccctctgcgccctccgcgccctccgcaccctgggaccccgcgtctccggactcccggctccggaccctgctgcccgggactcccggatggacagtcctgccgttgccctgtccccaccctggtcccagacgggccgccgcggggcgcctcctgccctctcctgctctcaggcgcctctagagcgcccaggggcggcgtcgcgggagcctttgctccacctgactaggagcgcgcggggtctgtgcctgccctggagggcagcgcctcgggtgctctccgacccggggttccctatctctccgcctgcttccgggcgcgaggagccctcgccccccaccccttgtttccggggggggcggcgccctgggtgtccttctctatctccctgcgggcatgggacatcctttctcactcctctgtgcctccgggcagcgccctgtgttatctcccattgcccctccccgagggcctgggttcccctttccactcctcggtcacatcactgcgggcccctttcttccccagtccctccagtagtggggcatcctttcctccttcccagtccccctcccagaggacaccaccgccgcggggtcactctcgccctccctctgaatgcgtctttatctcttctcttttcccgagggtgctcggggcatctatgggtacatctgtcgcctgccttcagcccctaccccgacggaaacgctccccactatcccgccacctggtggtcgcagcctcctctcttctgcaggagtgaaggcagatgggggttacagccgagctcccacctacccccacaaaggc

SEQ ID NO: 26428 - DNA, 713 bp, Homo sapiens; identical to SEQ ID NO: 6438
  chr16:24837143-24837856
  hypo

SEQ ID NO: 26429 - DNA, 482 bp, Homo sapiens; identical to SEQ ID NO: 6439
  chr16:2485948-2486430
  hypo

SEQ ID NO: 26430 - DNA, 368 bp, Homo sapiens; identical to SEQ ID NO: 25148
  chr16:2806210-2806578
  hypo

SEQ ID NO: 26431 - DNA, 420 bp, Homo sapiens; identical to SEQ ID NO: 24002
  chr16:29169952-29170372
  hypo

SEQ ID NO: 26432 - DNA, 223 bp, Homo sapiens
  chr16:29830886-29831109
  hypo
cggagccagaaacgggaggcccgcctggacaaggtgctgtcggacatgaagagacacaagaagctggaggagcagatccttcgtaccgggagggacctcttcagcctggactcggaggaccccagccccgccagccccccactccgatcctccgggagtagtctcttccctcggcagcggaaatactgattcccactgctcctgcctctagggtgcagtgtcc

SEQ ID NO: 26433 - DNA, 732 bp, Homo sapiens
  chr16:30017168-30017900
  hypo
cgacctcctccctgttgggggagagggacggggcagcgtggagaggcaggagtgaggagcgcgggggcctggggccgggctctgagcactgcccgggtgtgcagatgatggggggtttgcatatttgcagggactagcgagtcaggcaggaggtttgcatatgtgaatatagaactccgcagcccctcatgagcagacagacccgggtcacggagactcacaaaaataggtagtgcagggtgggggcagcccaccctgtgtaaacgtgcaacacactcgtgcgaaggttgggtactggacccggctcgatgggcctgtgccgggacactgctgtccactcaggctgaggacagagccccggccgcagggggcagctcactggtcagggtgtgccagcgctccagggctgcgtccggctgctgcaggcagtcactccagtgcttccgagcctcgcctcgggcacctggccccagggacacgccacctggggagcaggtgggcagggtcagggccacctccctgccacttgcccgccctcaacacccgcagccagctcctccctcaccaatgaagtcattggatttgccaatgtcatagtcccagacggtgacttccagggtcttggtggccagagtggagagctctatctcgtagaaaaactcctagggacaaggccggccacccgttcgtgagccagctccccagcccctccctggcctccctccatgtccc

SEQ ID NO: 26434 - DNA, 2168 bp, Homo sapiens; identical to SEQ ID NO: 23095
  chr16:3220283-3222451
  hyper

SEQ ID NO: 26435 - DNA, 937 bp, Homo sapiens; identical to SEQ ID NO: 22810
  chr16:3233501-3234438
  binary

SEQ ID NO: 26436 - DNA, 370 bp, Homo sapiens; identical to SEQ ID NO: 23096
  chr16:3237723-3238093
  hyper

SEQ ID NO: 26437 - DNA, 1770 bp, Homo sapiens; identical to SEQ ID NO: 23097
  chr16:3238154-3239924
  hyper

SEQ ID NO: 26438 - DNA, 1717 bp, Homo sapiens
  chr16:410000-411717
  hypo
cgcctctccgggcgctgccgcccccccgttggtgctcatctgtccttctgcccactatccccagcggccccgatacctgcacaccccagtgcccagcggttccccctcgagctggcaaggggacattaaatgggaggtgaggaagtgcggcccccagcgggcagctgcctttgccccggcccacctgcgcccccgcccacctgtgccctccgccgcctccctctgcttggctgtcccaagatgtctctctccactgcctaggaaccctgaggccgcggccaagttctgagcgtgtgactgtgtgtgctgggccccaggcccctttgtcgccgcggcgtctgtcgtggcaaacaaaagtgaaccggattagccacagtggattaaaagatttacgtctcagagtttacctaataacctaacaatcgtgtcaacgggagctttgaacccccagggcgcgcctgccaggccaactgagagctcaaggcctctgtgggcagcaggacgtggtcggggggaggagacgcagccacggctgtcctcacacccagctcggcccctgcgggctcctctgggcagaacctggggaaggcacggcctctagcaggaggtggaggcctttgaaagggtgcaggtgttgggaccaggtacccggcccaggcccccagccgcgtccacacacgtcgcacacggcagcaaggacgcaagcagtgtggaggtggccgcgtcggcgacgtatgggccccgtggtgctgcggtgcacgacctctgtgctgtcaccccacagtgtccgctcctgcacgtacacgcgtgcacgcgcacacacgtgcacacgcacacacacacaagcacgccccgctttgatctctaaaggagagtccattgacaagctcttaatcgcagctgcccttgcagggcctgtccctgaagtcccgagtaatgggatttggcgcttctgatccatcgggctggccgcttcccgtgtcataggtggacattttttttctttatatcgcttctgtttcttttttttttttctcctcgaaaaaatgctgcttaaacggcaccgacttgacatggcttgtctcctaaccttggagtggcggccgggacgccggcctggatcagtcgggggtctttgatgccgcctccatgtgaaacctgacgtggaagacccaccggggcggttttggggtccgaggtccgtcaggattcatcctgcctcaccctgctccctttgtctcttcccctgacccttcctcgggacacccggagagggtctgagggtgagggtgcgggcgctgcgtgtgggcttgcactcgagggtggggtgggccgagggcagggccgcagccgcgagaacaatgggcagaggaggcgcgtccacctgtccgcccggccgcctgcccggcttacctcacctgcctggctccgtgtgcctgctcacgccccaccgtcccgctgtccgccatgatgggcttggccgtccgtccgagcactttcagccactctgggaagcaggtccctgctcttggccactgtgtggctgggaggcagaagcgtgactctgggctgcagctcgggctcctgccgccgattggctgaggcagggaccagatgacgggcctcagaaccctatggtagccatggcaaccagcccctttagacaccgccacccccgagccactcctgactgctgagggagcaggcggcactgccc

SEQ ID NO: 26439 - DNA, 366 bp, Homo sapiens; identical to SEQ ID NO: 23098
  chr16:4363872-4364238
  hyper

SEQ ID NO: 26440 - DNA, 903 bp, Homo sapiens
  chr16:4377508-4378411
  hyper
cggccccgcctgccagggcgggatccttggctacctggcctggccggggactgcgggcggggggccgggtggctccgccagcgctgcagctgggggccgtctgctcgggctgcggtcgggcacacaatagcagccattgtctcggccagggtggcggggggcccgcccagcccaccctccgggtgacccccgccctgcggtgggtgggaagggcagggcccggtcccccgaagcccccgccgtcccggtggtccccgcggccgcccccgcgcgcttcctccctcgccgcagccgcttcctcccgctcgccccgctctaattagttccttttgcagctggaggagccgcgcagcggccggttccgcggccacccccaccccccaccgacaaccccagccctcgccccaacccctgggcccttgcgtgtgggggcgctgccctgggcgcatcccaggctgagtgctcgagagacgcggccctgggctctgtgcaccctccacgctgcgctgtcccaccggggggaaactgaggaacggaaggctccaccaggaggcgcagaggggcgtggggccggcgggccttgcgctgcgcccggggagcatccacggggtgcccccacctgaccgagagccggctcctgccctcgggaccccgcagtaattagcacccaggcctctggctgagcttgtccagagccaggctgtcggccttacgctggggagagccacggccacccgctcatgggcactcactcagggttccctggttgcaggcccgctgctccccgctctgggcctccgaggctttcaggagagcaggaacctagctctcgcctgcccccttcacccagccgggaacaaaagcacagagcagagcccagaactggctgctgccggtcggggc

SEQ ID NO: 26441 - DNA, 1492 bp, Homo sapiens
  chr16:49315005-49316497
  binary
cgtccccgcgcctccgcagagcccttggagaggaccgggcatcggtcttccatccatccctccttcaccagcccaatctgcacgccgcgggaggaaggaacactcacctggtcgaagtagatgatcatggtgcgattactcatctcggacggctcgtggttggtgctcctgatggcagagaaagccaccttggcgctgccagagcgcacagagatgcccagggcagtgcccgtggggtcggacgtggggttggagtcgcacaccaccaggcacttgccctccagcacgatgggctccgtctcattctgcccgcgggccgggcccgccagccacgcagcccccagcagcagcagctccaggacgcccagcatcgcgccgccggcgcccaccccgccccccacccccagggctgctcgcgccagccgccccccccgtcccagtcccgctccgaagccccctcctcagctccgtgcgcagctccgccgccgccgctctggacactacacctcttcctcgcactccgggactagcgtcccctccgcgactagcgtcccctccgcgctgtgttcccggagcccctcccgggcctcaggggtgccgcggctgcccagccgcacttggatgcatagccgctgctgctcggtcccgctgctgccgccgcctcctgcccgcacccgccgctgccgccgccgccgccgctctgaattattgatgcagccggcgctgcagccggagcgggcggagagcgcgcgccgggcacaaaggcgcggacctcggcctggccccgcccccgccgcctcccggcccgcctccctccgaggccctgcccccgccccggccgaggccacgccccccagccaatcctgacgcgccgcgctccccaccgagccaatggcggcgctgtccgcgctcggccacctgaccccgggcgccgttgttattaggcgcggcgaggcgggtggcgcgcggcagcagggttgggctctcgccgtgagtcgacgaagggagcgcgggcgcgcgcccgcgtccgcgcactgagagtcgcctcggccgctcgctttctcgactcccgcctcgcgcctcgatcctgttccgcctccctcggccctcctgcccgcccccactcgtcggccctcaggtaggaggcggcgcgccccggggtcgggagtggaatcgctggaggctgcgagtcgcctgcccgcctgtgggcgcgcccgttgggaggggagcgccccccagcgggcgcgggcgcgagggcagccggcgcgctgggcgagcctggctcagggtcccggcggccggggtgcagggcgcgtgcgcgcgcggcggggcggggcctgcgcggctctggcgggcgcacgtggtgcccgggagctgctgggcgggcactcaccgcggggactcggtgcggagccggggcgccgagtgtctccgtgtccctctgccccagccggcggccgcgatggtggagcttggcctctcgctctctccc

SEQ ID NO: 26442 - DNA, 721 bp, Homo sapiens; identical to SEQ ID NO: 25173
  chr16:56671950-56672671
  hyper

SEQ ID NO: 26443 - DNA, 201 bp, Homo sapiens
  chr16:58427283-58427484
  hypo
cggaacccaaggccatatggcttcaaatataaaattgtcccaggaacatggcttgtaatgattaatttggatatcctgtttcacctaagttttgtatagaacgatgtttattgtttggtctgtttgtttcaagttaatttttatcaaagtaatacataaccaacgttttaaaagtcaaataggccggatgcggtggctcac

SEQ ID NO: 26444 - DNA, 109 bp, Homo sapiens; identical to SEQ ID NO: 9203
  chr16:67175573-67175682
  hypo

SEQ ID NO: 26445 - DNA, 314 bp, Homo sapiens; identical to SEQ ID NO: 23500
  chr16:67313759-67314073
  hypo

SEQ ID NO: 26446 - DNA, 512 bp, Homo sapiens; identical to SEQ ID NO: 9206
  chr16:717202-717714
  hypo

SEQ ID NO: 26447 - DNA, 1204 bp, Homo sapiens; identical to SEQ ID NO: 23502
  chr16:734744-735948
  hypo

SEQ ID NO: 26448 - DNA, 794 bp, Homo sapiens; identical to SEQ ID NO: 23503
  chr16:75148493-75149287
  hypo

SEQ ID NO: 26449 - DNA, 371 bp, Homo sapiens
  chr16:77247397-77247768
  binary
cgccactctggaggccggcatttgggacccaaatccaaaggcacccagcagcaggctgcggccattgactgagcatgtactgactaagcaggcatttgccgattgcctgctgggtaccaggcactgttctaagcactggattttaaacagcgcggtcagcgacggcctcacctaggaagtggtatctgagcggagaagcgaggtagagaagcgagggggtgagccctgtgggtgtctggggaaaggtgggcctggcagaagacatgcctcatgccaaggcgggaggtgaggctgcacttcgctgtgtttgaggagacgtctggagaaggccggcgtggtagagtggaatgaggtagagtgggatgggagac

SEQ ID NO: 26450 - DNA, 1237 bp, Homo sapiens; identical to SEQ ID NO: 22811
  chr16:77822069-77823306
  binary

SEQ ID NO: 26451 - DNA, 133 bp, Homo sapiens; identical to SEQ ID NO: 9211
  chr16:78409056-78409189
  hypo

SEQ ID NO: 26452 - DNA, 583 bp, Homo sapiens
  chr16:80574541-80575124
  hyper
cggtactgtttcgtgcattttgtttggtgcattttgtccgtctccctggcacctggtgggtggtgaatcagcagtttttgaacgaataagtggttatcacattaattcgtgcctcaatgaatgaatgaatggacaaacacaggccgggagcctgacccacttccctcttccctcccgggacccactgctccaggattgggcgaacctcaggtgagcgcctgctcccctcttccgcgaaccttcgcctacggcggccgggaggcatcaggagcgcggtcagggcgaaaaagccgactcgcgagcgcgcaggcgcagccctgacgcttccgtggggccacttccttttttgtctcctagcaacggcgggtagcgttgttgacatcccgggaggctgtgccgccggcctgagcccagagtttcgcggcctccgcgatggtaaatctggggtctccgtccacgccccgccgttccaagcacgccgaccgtcaaggaccttcgcacccagcttctggggcccacccaggcacgggcggtccaggggccgcggcggaggctggtggctccaggatcttcctggaggggc

SEQ ID NO: 26453 - DNA, 815 bp, Homo sapiens
  chr16:80837324-80838139
  binary
cgcagcgccccctttcgcccccagggagcacgacacccgcaagggccacccccacgcccgagcccggagggcgtccgagctggtgcgggggcagcaggtggggggtgagggaggtggcccggggaccccggggagcggtttggcggttgtccccccgaacccccacccagcctcccccttcgcagccccccgggaccccgcctcgccccggccaggctccgctccgatcgcccgcccccctcctcccccgcgcccccggcccagccgggccgcgcaacccccgccccacacccccgccggccgcggcgcgcccccccgcattcccagcacgtccggcgccgacttttacctgtactttctgtactcgaggcggctcgtcgggcgagaaacacctccccgggaccgctacctcccccgccccggctccgcccggcttcctccttcccctccaaggccgcaaagtagatggagtaagagagtgtgtgtgcgagagaaagagaaagagggagcgggcgcgggcgccgcgggaggcggcgggcggcgggcggcgggcgggaggcgcgcccggcccccgccaccctccggccgccgccgccgccgccgcgggctcggcaactccggattgcgcccggccccggccccggcccggtccccgccgcccgccgccgccgcccgccgccgcccgctgactggggccggcccgcgcccccgcgtccccgtacctcgtaaaggtccccagaagccatgccaggctgcggaacttggctcgccggtgtgcgcgtctgctcgctcgcgccctccgtgcgtgtgcgcgc

SEQ ID NO: 26454 - DNA, 107 bp, Homo sapiens; identical to SEQ ID NO: 9216
  chr16:81361640-81361747
  hypo

SEQ ID NO: 26455 - DNA, 842 bp, Homo sapiens; identical to SEQ ID NO: 23504
  chr16:81563939-81564781
  hypo

SEQ ID NO: 26456 - DNA, 152 bp, Homo sapiens; identical to SEQ ID NO: 24025
  chr16:85033842-85033994
  hypo

SEQ ID NO: 26457 - DNA, 214 bp, Homo sapiens; identical to SEQ ID NO: 24026
  chr16:85083563-85083777
  hypo

SEQ ID NO: 26458 - DNA, 772 bp, Homo sapiens; identical to SEQ ID NO: 9221
  chr16:85590112-85590884
  binary

SEQ ID NO: 26459 - DNA, 218 bp, Homo sapiens
  chr16:85731408-85731626
  hypo
cgggagcgtcacctgaggttggatccccaaacaggatccaagtggaagtggtttattcggaatgcagtcccaggaagggaggttgagaccgggaacttgagaaggagctggttcaggttagcgagaaggtttctatggccggcaaccagggctcagttccaccgggaacctctgggcagctatgacgcctcgctcctcagtgtggcccgtggaccatc

SEQ ID NO: 26460 - DNA, 910 bp, Homo sapiens; identical to SEQ ID NO: 22812
  chr16:85932121-85933031
  binary

SEQ ID NO: 26461 - DNA, 236 bp, Homo sapiens
  chr16:88757481-88757717
  hypo
cggtgctgaggggagcccttgggcctgcggcagatgaggtgagacttgagccatcaagcagcgaggcagcgtgcgtgtgagtctgcaggccacaggcgtgttcgtgcgtgtgtccatgggcgtatgcgtgtgggaagtcgcagtagctgctctgaggtgacatggaggctgggcatcagcgggtaagtcccgggcaccaggagagggatctgtggggtccccggcatcgtcctgcc

SEQ ID NO: 26462 - DNA, 662 bp, Homo sapiens; identical to SEQ ID NO: 9226
  chr16:88898125-88898787
  hypo

SEQ ID NO: 26463 - DNA, 179 bp, Homo sapiens; identical to SEQ ID NO: 6461
  chr16:89947451-89947630
  hypo

SEQ ID NO: 26464 - DNA, 151 bp, Homo sapiens
  chr17:1082878-1083029
  hyper
cgatcccgatcctggggtcccgatctccatcctggggtcccgatcccgatcctggggtcccgcccccgcccggcacacgtactgctgtagagggtgtcgatccaggacaggcgcggcaggccccggtggctgagcggctccatcccgcggc

SEQ ID NO: 26465 - DNA, 299 bp, Homo sapiens; identical to SEQ ID NO: 6464
  chr17:1454071-1454370
  hypo

SEQ ID NO: 26466 - DNA, 208 bp, Homo sapiens; identical to SEQ ID NO: 9229
  chr17:17224346-17224554
  hypo

SEQ ID NO: 26467 - DNA, 112 bp, Homo sapiens; identical to SEQ ID NO: 7002
  chr17:19513145-19513257
  hypo

SEQ ID NO: 26468 - DNA, 51 bp, Homo sapiens; identical to SEQ ID NO: 9231
  chr17:19912429-19912480
  hyper

SEQ ID NO: 26469 - DNA, 115 bp, Homo sapiens; identical to SEQ ID NO: 6466
  chr17:2326357-2326472
  hypo

SEQ ID NO: 26470 - DNA, 166 bp, Homo sapiens; identical to SEQ ID NO: 24053
  chr17:25676867-25677033
  hypo

SEQ ID NO: 26471 - DNA, 312 bp, Homo sapiens; identical to SEQ ID NO: 23513
  chr17:27909050-27909362
  hypo

SEQ ID NO: 26472 - DNA, 643 bp, Homo sapiens
  chr17:3599052-3599695
  binary
cgggaaaaccgcgtgcacgcctgcgaattccaggaccctggagaaggacgcggcggctggcacccgccctgcccctcccccgccttcccaaaagtccgcggagaacttacacgaccaggtacgccaggatggaggcctgcagcagccggtacagcaggcccaccttcttgttcttggcgatgacatacttctcggtcttgtagtcgaacagcgacaggcagagccccttgcagcccgcctgccccatggcgcgctctcagccgggcttgcggaccgcccggcccacgtgcgctcatggggagcactcggtccctcggtccctgcgcgcccggcgcccgcctcggcccgtctgcgcccgctcagctgcagcccggggtgtccggcagggctgcggggcgcgggggcgggtcggggcggccttttattgacgcggttgagaaagcctcggctgggagctgggcggcggcgagcaccggaacctcagaccgcgaccttgccgctacctcttcttcctcctcctcctcctcctcccctgacacagtgacacccctgcaacctactccccagccaccggtctgggagcgcagccccccggatgcgcaggaccgccctgtgctgttgcccagctgaaagcagcgatcgc

SEQ ID NO: 26473 - DNA, 1435 bp, Homo sapiens
  chr17:36102393-36103828
  binary
cgcgacttttctttctctttgcttttcgtcttaagggaacacggtgggcaaaagaagggagtgcgtgtgcccgaggcttgggagccccctgtgcagtgacctaggaaccgctagcgatttcttgaaaaattactttaatcaagtccggcgctcccgggagcgggggaggaaaggcagcacccgctcgggacgggagaaaaaagcctccaggtctgtcccgcgtctccaactcggcgagggtctccggctccccagtccctctccctgccctgctggggcctggggctttggggagggaagagcggggctggggtctaaggaccctgggccgggcctggctctccgccggccgggcctgcgggtgtcggcgacccgggggctccgcgggcggctcgggcgctcacagagcccgcgtcccgcgccagagcggtgaggccgcggggccgcacggggcgcctggctgggtgcgcgctgggagcggcgagcagccccgcgcccgcgttttgatctccttcccccctctaagccgcgtttacaacttcaccaatgaataacccgcctctcttttcaacctaatcacggctctttgtgtatctttctgttgatgatttatagaaataaattaataacaccccaactccacgtgctgcagtttatgttacgtctcagctgcggccagcccggcgcggggctgggtgcggaggggcgccccaggtccttccagcgccgcgctagaaagcgggcgcctgcggccgggtgggagggcctaggccctgtggcccccggtggccggcggtgggagcctggttcatccgccaggtcctgagcgacctccccggcagccctggcgccccagccgctcctaggggccactctctcgacccctcttagcctccgcgactcacaccttccgcctcgcggaactctcttgcaggagttctctcccggtaggggagaaatcacctccgggcgggagagcgacgagggaagaacctcaaacctatgaattataccaaagtgtgtttggggaaaaaaaatctacaagttcccctgattgttttggctagagggcaaaccgccaggccctcggagcacaaattcaaatgcaaggtcatatcccaccccaaaccgccgctgcggacgtgcggccaaggctcagccccgaaatcgcggcgcttcagtgtccgaagccacgcgatgggctctgtcctaaagcggagtggcccgggagcgacgtgctgtctcagggaaccgctcggctccttagataattagtaaccagctgtcaaagtctagggcggtcggggaggacccacaaacgatcccggccctggggatacactgccagccggcctgaactcccggggagaggccgggggtgggcagcgaggtctggaaacgccctcctttctcagactgagaccagatcctctgc

SEQ ID NO: 26474 - DNA, 989 bp, Homo sapiens
  chr17:36103844-36104833
  binary
cgcgttcgcccccacaccaccgcgcttcgtttctttggccccgcgcgtgtccacccggaccctgcatggaacatgccctttgcaaatctaaacccgcgttggggatcccggataattccgggccttgcatgggcgcggctaacaagagtgcccaccagggaactcgcctcccagatcccggctccggatgccgcctgtccttcggcaaagaactgcaggtcatcatgcaggtcaatgtgtccgaggccgacatgcggctttccagacccgaggcagcgcgcaggaaaaatgcgcggcctggggcttgcagcggcgcgaggctctgctcccgggaagtcgcagcggtttcactgcacccactcgcaccttcagtcgcgtgggcaaacctcccggcaaagggctccacagctccagttctccccggcccagccccagccccgcggggaaaagcccttgggtctcggacgctggcctgggcctggggagaagaagcccggtgggccgcagggtcgtcccgctaagggattgggaagggtccgggtgttgggagagaagcagagcgccccccgggggacttctctggtgggaaacgggcttggcgagtgtggtcgggcgcagtgtcactcaggcccggggccggggctccaggggttcgggtgggtcccctccacctcgctctgcgcctacctgagcatccggtccacctccgcccgctgctccgccgcctcctcggtgttgagcgcctgcagctccttgaggatgggaggtgtgtcatagtcgtcgccgtcctcggagccctcgtcgccggacaagcggcccttggcgtggccgttggtgagagtatggaagaccggcttggtgtcgggctcggccccgctgccaggggacaggggcagcgtctccagcttcaccccgaagttcggggatggcagcaactcctccaaggcctgaaccagcacctccttggtgaccccggagctcagcagggc

SEQ ID NO: 26475 - DNA, 727 bp, Homo sapiens; identical to SEQ ID NO: 23104
  chr17:37321167-37321894
  hyper

SEQ ID NO: 26476 - DNA, 756 bp, Homo sapiens
  chr17:37782857-37783613
  binary
cgacctcgcaggcctctctgaaactcccagtaccaggaccacgaaggggttaaagccagagtcctgcctccccgctgcccctctccccctccctccccctttatcctctctgctggactccatcaataatgcagcttcaagttctggggagaccgcagggggccccccagctggctccccaggccttggctctaactcccaccctcctcccagccccaggagaacacgattctccatgctcattggccagtttcccctaaaccctccctccgagcacccgggcgccagtcccaggcggaggggacgggctggggaccccaaagctgggaccggagggtgagcccggcagaggcagagacacacgcggagaggaggagaggctgagggagggaggtggagaaggacgggagaggcagagagaggagacacgcagagacactcaggaggggagagacaccgagacgcagagacactcaggaggggagagacaccgagacgcagagacacccaggccggggagcgcgagggagcgaggcacagacctggctcagcgagcgcggggggcgagccccgagtcccgagagcctgggggcgcgcccagcccgggcgccgaccctcctcccgctcccgcgccctcccctcggcgggcacggtatttttatccgtgcgcgaacagccctcctcctcctctcgccgcacagcccgccgcctgcgcgggggagcccagcacagaccgccgccgggaccccgagtcgc

SEQ ID NO: 26477 - DNA, 215 bp, Homo sapiens; identical to SEQ ID NO: 24064
  chr17:39682514-39682729
  hypo

SEQ ID NO: 26478 - DNA, 190 bp, Homo sapiens
  chr17:40558083-40558273
  hyper
cgggtcggagatggggttgcgtaataattgcacttgggctaaaatctctgtggtcgtccaaccctgtcctgatccctttccacccgtagatgatattaaaccactacggccctcgggagacacagctccactttggaaatgggcggagcgccctctggtgccgcaaatcgcacactgcccgagccaggcc

SEQ ID NO: 26479 - DNA, 815 bp, Homo sapiens; identical to SEQ ID NO: 25238
  chr17:42091712-42092527
  binary

SEQ ID NO: 26480 - DNA, 76 bp, Homo sapiens
  chr17:42787526-42787602
  hypo
cgagactccgtctcaaaaaaaagaaaaaaaaaataccgtctacttttacttctggattgttaacagatatgccatc

SEQ ID NO: 26481 - DNA, 111 bp, Homo sapiens; identical to SEQ ID NO: 7015
  chr17:43121686-43121797
  hypo

SEQ ID NO: 26482 - DNA, 795 bp, Homo sapiens
  chr17:44928894-44929689
  hyper
cgccgcctgccccgccccacccgggtttaaagtcccgcgggcgggtggtggcggagctgcgagcttgagcggcgcgaggagatgctagagggcgcagcgccgccagcaccatgcgccccccgcccgcgctggccctggccgggctctgcctgctggcgctgcccgccgccgccgcctcctacttcgggtcagtgcccgccgcgccccccgcccgctccccggcctgcctgtctctccctcctgcgctacagctgggccaatttttccctcccgctgtccttggccccgccgaggtctcgaactcagaccctagcccggcgcgacccaacccacttcgcagtcggagttcgcgccctgagttcggtctccagcttccccggctccgaatccatcgccctgttcagtgtccgagtctctggtcgccccccagccgccgctctcctcatcccgccgggtctcggactctgcgcacgcctcggaccctggccccgtccgccccggccccgcccgttcaggcgtcagtcccgctctctgatgccctctcgggatcctcacgccggtgccctgtctgccgccatcctggcctccggcgagccgtccttgcctcggactccttccccaccctccgccttcgccctgcggagcggagaccgagagggctgggtggatgggtgggacgggctgttcccggtctcggggcagaggatcgtgcgcgtccagggagaatgggggaaacctcggacggtgagagcgccagctggagacgcaggaaggaaccgtgcgctggggaaatgc

SEQ ID NO: 26483 - DNA, 814 bp, Homo sapiens
  chr17:45330951-45331765
  hyper
cgctgacgacccggctggcaggcgggtcctcgtgggcgaggcgagggaggcggcgagagaggagcaatagtttcccaccgctccctctcaggcgcagggtctagagaagcgcgaggggatctagagaagccggaggggaggaagcgcgagtccgcggcccgccccgttgcgtcccacccaccgcgtcccctcccctcccctcccgctgcgggaaaagcggccgcgggcggcggcgcccactgtggggcgggcggagcgccgcgggaggcggacgagatgcgagcgcggccgcggccccggccgctctgggcgactgtgctggcgctgggggcgctggcgggcgttggcgtaggaggtgagtgaggctccggctcggcagcgtcgcagctgccccaggatctgcgccccggtcaagttgcggacttggagccggcaaacgcggagggctggtcccgcgcgtctgcgctgggaatgcgcgtgtcctggctggcgcggtcggagccgggagctggggaccttcctggcccggcggtggcggggctgagaggtgcctggtgcctgggagcgggtcctccgagacgccgaagccatcagccaggctgagcgccttcccggccgccgcggcgcgcacggtgcggtgggcgcatctctgagccccgcgctcacccggggctgcgcgcgtcgcgggtggtcctggtcgggccaaggacgactggcccaggagccaaggcgaggtggggcttccgggggttgttcccgcgccttggcagagggatgccgctgtagcttcctgggtgagagcgtgcgcgcgcgc

SEQ ID NO: 26484 - DNA, 1077 bp, Homo sapiens
  chr17:45810409-45811486
  binary
cgaactacagggtgcgcgcaggctctcgcttctctccaccatggggggccctgcagtactcgccaagagcgtagaatttgcctagtattagccacgagagggcggggtggggcgaggcggagcagggccgaggtggcggagtgggggggagccggagagcttcataaagccacagcaaagcgctgcgactctagtgacagcggcccgctggagaggaagcccgagagctgccgcgcgcctgccggacgagggcgtagaagccaggcgtcagagcccgggctccggtggggtcccccacccggccctcgggtcccccgccccctgctccctgcccatcccagcccacgcgaccctctcgcgcgcggaggggcgggtcctcgacggctacgggaaggtgccagcccgccccggatgggcatcgtggagccgggttgcggagacatgctgacgggcaccgagccgatgccggggagcgacgagggccgggcgcctggcgccgacccgcagcaccgctacttctacccggagccgggcgcgcaggacgcggacgagcgtcgcgggggcggcagcctggggtctccctacccggggggcgccttggtgcccgccccgccgagccgcttccttggagcctacgcctacccgccgcgaccccaggcggccggcttccccggcgcgggcgagtccttcccgccgcccgcggacgccgagggctaccagccgggcgagggctacgccgccccggacccgcgcgccgggctctacccggggccgcgtgaggactacgcgctacccgcgggactggaggtgtcggggaaactgagggtcgcgctcaacaaccacctgttgtggtccaagtttaatcagcaccagacagagatgatcatcaccaagcagggacggtgagtgcggcgcgccggcccttggggcctctgtgcccgcgccggaacaagaacgtctcgtctgtttttctggctcgacaatgcttctgactccgtgtccctcactgctttggcttcagcgtagggagacaggggaatggggttgttaggaggacagggaaagctccggaggggc

SEQ ID NO: 26485 - DNA, 555 bp, Homo sapiens; identical to SEQ ID NO: 24068
  chr17:46710955-46711510
  hyper

SEQ ID NO: 26486 - DNA, 1436 bp, Homo sapiens
  chr17:46801836-46803272
  hyper
cgagatggctcgtaccgaacctccttgccttcttcctgggtctctcgggggctggaccaatacatctgccgatgccctggccgaatggcaggcgacatcgggtcctggacccccacacgcagctcagtacccacgaggccccaggccgctggaagcctgtagctccgcggacgatgaaagcctgcccgcaggttctcctggagtggtgagcctctgtcggaagggggcgcccacgtctttttaatggtcctaacacaccagtggaataaatctctaagattccacatcttttgtttgctctgaatttattgcgagtgaaaaacagagaaaatcctcaagtttaagtttctgatagcagagtgtgggagttagagcatggggagtccagaggttccagacccccaaaggtctctaccagggccatctccgttagtggcggtggcagcccctcttgtggcctttttcctctctccaaggggtcaccccgcaccatgccgctccccctcatctatcttgccccctccccacaggcccatctgcgctgaactctcgccagttccgaagtcggcgagggagggggtttacttgcccgatcgttggtgggtttgagcttatagaggcagaggagtaagaacctgcgatattgaaagctacccacatggggcttccttgaaggaggacgtggaaggcagaaagtgacctgctctgagcggcgcatgtaaccgaggaccttaagctggaccacggggcttggacgattttttaaatcaggaaatcgacctcatcttcctcctcctcgtcctcttcccctgaacccccagtccgcatgcactcacactctttggccttttccctcagtcccgggctcctctttggtaaatagatttgtaggtgtctaagtcacgtcccaccctcactccttcccaggagaggagacagggctaggatcccacccgaccgcgggccataaacacttggctgcggcggccgccgcggggtttctaggagagctggctccgggagggaaatgtcctcgaggtagtggcggccgcggcccaccaccaactgctcgccaccgaccccactactcgccaccgacccgctgctcggagcttcggttctgcgggttgtccagacttcaggcctgtgcgctcaatcgtggagaatgcgccggcaggccccccacccccagcctaaggtgcaggaaggaccagcacgaacccgctggctttgctgcgcggccaggagatgagtcccaccgggcactgagcccaggtacaggacatcagagaatgaacacagaggcagaggccctcatgtccctctcagagtcccggctctgcaaagagcccgtctgtctccagcttccagaattccgcactgtgaatctgtctacgtggactgggaaaacagggttggcaccactctgccactcc

SEQ ID NO: 26487 - DNA, 819 bp, Homo sapiens; identical to SEQ ID NO: 24071
  chr17:46810263-46811082
  hyper

SEQ ID NO: 26488 - DNA, 903 bp, Homo sapiens
  chr17:46824276-46825179
  hyper
cgctttataattccacgatgtttgcatcattttggcttctgagaggctgcgttttgaggagacaccagaagcctgggaagttcgcttactggttctcaagtcagagtcccccttcccggggctccttctggggactccgggggagagggatctctctgtccatcctgcaactcctctcctggcatagatgccccgcacccccaccttgggccatccttatctgcctgttccccatcacgattgatcctccagggtcgccaaggctcctgctgactacaaaaacatccccaagattcccttcttgacccggttcaggcatatctctttatacttccatgtctccgtttctctatatttttactgtggaggactcagaagagagctgaggctattgtccggggaggaaaggaattcgggcaaatttgtgggtaggggcccagacccaagacccgtgtttctcctgcgtgggttggagtctgtctcaggtcgctccagggacatcaagagcccgcgccgccgagagcccgcgccgccgtccagcgggaagcagcggacccacaggggcctccagccgcctccccgctcccgccccgtgtttctcctgggcctccagctccgtggagagagctgagagttctcggcccgcgggcttcctcaccaaatccccaaaaaccgacgcaggcacagagggctgactgtgttttgagtaatgcacgcgaggcagtccaatccggcgagatggcccgaagcggggcccagcggtcgggggtgtgggtctggagagagagggtctccccacttccttcctccggctgctcggtcacccatcgactacccgggcggaagcggggcgcagaggggcgcagagggaggcattgccctccaggagtatctattcccatc

SEQ ID NO: 26489 - DNA, 967 bp, Homo sapiens
  chr17:47572986-47573953
  binary
cgggaccacgaaggagggtctagggttcccggagcgcagaggcgactctccagggtggagatgagggcaagaccggagcacggatgccggtcctcaggtaccgcagggggcggtgggggagctgggaggggtctttcaagagggggcatggggctctccgatgcccaggttcttcggaagaggacactcgaatgccgggatcccgaagggactttcccctcagcatctcggtctctggagagtcgtgggacagaaccaaggcgagagaaggagggggaactggacggggactagagatgagaggggcgagctgggctggggcggggagcccgggacgacgggatggaacaatggaggaggtcggagggactggaggcagaggggacccggcaaggacaatggggaccggccagacaatgggggggaggggcgtcggagggagaggttggggagcgggagagaggttgagaagtgggttagggagggcagaagaggggcgacggcgagggcggcagagagatggaagcagaaggaaaggagacagagcggggcgcggaccctgaagtggtcggggtcccgcctgcccgctgagggacagtgagacgagaagagagagcagaggcttggacatttccagcgcctgtccccgcgctcctgctcgcggcctctcccagtcccggaattggggctgcggatctaaggctgggaggggagtgcccacttcgccggggcgaacccgctcccggggttcccccacggccggcgggctcctccgacgcgcgtgttctcacggcttgaagcagcgcagcggatcgcgagggacggagcgggtgtgcccctacccgggctggcggtggctacgtctcggggtgcagagcgccggggcgcactaggcggggacccttcctggccgcgcgcagctctggctacgcaggcgggaggcggcaggcagggggcgctgcggggc

SEQ ID NO: 26490 - DNA, 284 bp, Homo sapiens; identical to SEQ ID NO: 9249
  chr17:48565138-48565422
  hypo

SEQ ID NO: 26491 - DNA, 822 bp, Homo sapiens; identical to SEQ ID NO: 24073
  chr17:48619111-48619933
  binary

SEQ ID NO: 26492 - DNA, 543 bp, Homo sapiens; identical to SEQ ID NO: 23106
  chr17:49021800-49022343
  hyper

SEQ ID NO: 26493 - DNA, 104 bp, Homo sapiens; identical to SEQ ID NO: 24074
  chr17:49229457-49229561
  hypo

SEQ ID NO: 26494 - DNA, 213 bp, Homo sapiens; identical to SEQ ID NO: 6474
  chr17:5269074-5269287
  hypo

SEQ ID NO: 26495 - DNA, 838 bp, Homo sapiens
  chr17:54673516-54674354
  hyper
cggaagctacggtggtacgaactgaggcaatcccttggaatcaacaaggctcacagcctccgggatcttgcaggtccgagccccgaaatcccaggccctcggccggaggtgctggggatatcagggagatttgacactggcctcccctctccccggggacctaaggaagactaagggccatggtttcggaggggtccgaatctgggtgaaaatcaccacctctggcatctgcttttgggaagagagtatgcctgtgctcgggcactttctccccttgaggggtggggaggagggagaaatcggaaccggaatctttgcgctttaagattagataggggcagaaggcacgtaacccattaaagggacgtgcaaaacatcactcccaccccaccccttaaaaagccaactccttgggaccgacgcctgactctcgcatgcgtccctccgcctcagtccccagtggcgcccgtcctcacagctccacgtgggccagcctcctgacactgctcagcgctctctttatttatcttggactccaaagtcgctctcctttgctccctccccacctccctgccacctctccgcgcctccctcccggcgttccttccaccccaccccccaccccccccaaccccccaagtccggagtcccggcgaatctatgctaattatttcaaacctgcgcctggtccccagcgcagtctcaatgcccccggccccgcccgccctgtccctccagcccggcgctttcttccctcccgacgcagcctcgatggctcctcatttcaatagcctggccccggagccgagccccctccccggcgctgcctccgtcagcc

SEQ ID NO: 26496 - DNA, 465 bp, Homo sapiens
  chr17:56326822-56327287
  binary
cgtcccctccgcctcgagcagaggctccttcccccatggggtcctgggctttggagccccggagccggcctgccgaagctcagcgaggatcgtgctggtttcaggaggaagcctgcgctgggcgccgccaacagggctctggcgcgctggctgcccgcggagtacgaggacgggctctccctgcccttcggctggacgccggggaagacgcgcaacggcttccctctcccgctggtgagggcaggccgggccggggtgaaggatgggagccagaggggacgggatgcactacccaaacacgcagtgaaaggaggaggagggatcggtgggggcagcaggggtgcgcgatggagatctgcacagacccccaccttccgctagagggcagcagagctcggagcccggagcccggccacgtggcggtcacgttctggccgccgcaggccagataccctggggtctccc

SEQ ID NO: 26497 - DNA, 151 bp, Homo sapiens
  chr17:56742993-56743144
  hypo
cgtttacctcactaaagttcctaagcattaaatgatagcaaggtacagctttaaacagtaagcaacggtaacaaccctgcaaccccaaagcattcttaagaaccaaaagaaacaatgaaaaaaaaaaataaggctgggcgcggtggctcac

SEQ ID NO: 26498 - DNA, 1406 bp, Homo sapiens
  chr17:56832961-56834367
  binary
cgggcgagtggagtgtcctttagactccgcggactcgacgggagggaccctgcaatgcttaattagaaccggttgccatggcgacagtctctaggcagcgtgggctgagctctccgtaggaataaagggtgggccgccgctggaccctgcgcgcgcccgccaccaactttccctccagatccgagaggggcggcgcgctccgcccccgggccgcgcacgtcggtgctcggcggcgcgcacgcctgcgggagccctctccaggcaacctagtgctgatcgctcgtgccggtgcggccgttaaccgcccttgccggagccctaggctcaaaagcagccccttacccttcctgggcttcccccaacccctttcccggtctgccctggggcatgagcagcgatggccggctgcatccctgaggagaaaacttaccggcgcttcctggagctattcctgggcgagtttcgcggaccgtgcggcggcggcgagccggagccggaacccgaacccgaacccgaacccgaacccgagtccgagcccgagcccgaacctgaactggtagaagctgaggcggccgaggcttcggtagaggaacccggggaggaggcggccacggtagccgcgacggaggagggggaccaggagcaagacccggagcccgaggaggaggcggcggttgagggtgaggaggaggaggagggcgcggcgacggcggcggcagccccggggcactcggccgtgccgccgccgccgccccagctgccgcctttgcccccgctcccgcgaccgctgtcagagcgcatcacccgcgaggaggtggagggcgaaagcctggacctgtgcctgcagcagctctacaaatagttaagtagctgggcttggctggtggtgggcccgcggtccccaccgcgccggcctcggacgcggctccctcggcccctcaaactgctctcttttctgctcctctcccccgcacccgcgcctgccgccgctgaaagcgcccccgctgctcggacccgggcggtcggctgagagctgcccacgcccgcctcggcccccacgcccgcctcggcccccacgcctcctacccggccttgaagccgctctcctgagccccggcgccctcccgccgggcccgggcccctcatcccctttcacctcggcccccagcttctagctccacttcacgcaacctttccctttcctgcctggaaaggtccttcctcccaggcttgagctccctcttcttcccagatcccttctttctccgggaggtttcctcccaccccagtctgtcttttcccgggctgagtgccttgttgtttggcggcagagacgcgactcctttctagactgagctgcgaggtgcctcctgcgtaactgcaacaatgatggttataccggcccc

SEQ ID NO: 26499 - DNA, 144 bp, Homo sapiens; identical to SEQ ID NO: 24075
  chr17:57297033-57297177
  hypo

SEQ ID NO: 26500 - DNA, 146 bp, Homo sapiens; identical to SEQ ID NO: 9258
  chr17:57787150-57787296
  hypo

SEQ ID NO: 26501 - DNA, 706 bp, Homo sapiens
  chr17:58212602-58213308
  hyper
cggtggcgaaagggaagggctgcagggtggagtccggcaccaagacctcccggcccggcttctagcagcacacggacgcttgagatgatttcttctgaaaacgggcagtggttgaaaaccactgcttcaaaacacagactggaggagtggtaaatactaacgaggagttttagcaatggactctgttaacagagtctggtcgcctgagaagggcctcggaggactggccaggttggagaacgatttcaactgcgtactggacgacacacagaagactgcggggagccttagcccctacccggcctgcagtgctctctggggcacacggcagccccacgacgcctttgggtttcttcgagcgctactcgcacgcaccagcgcccacacagctgcaacgccaaacgcccgccagcaccttagggccgcgggagtcccttccccaggcccgccccacacgccggccttttctgccgcttcccaagccggagccaatcagcgctcagcagcgaccggcagggacgaccaatcgacttatcctgcgttgtgctaaagacctagaaatcgagcgtggtacattcgatcgacggaacgtctgggccctagtgctaagttgggtgactgttcggtggttgtctcggggggttgcaggaagatcctgtttccttggcgtagaaggagaggttgaccccgaagagttaagattctc

SEQ ID NO: 26502 - DNA, 910 bp, Homo sapiens; identical to SEQ ID NO: 25260
  chr17:59531682-59532592
  hyper

SEQ ID NO: 26503 - DNA, 861 bp, Homo sapiens
  chr17:70113762-70114623
  hyper
cggggctgagatatttgggggacgccgctgctcaccccaccaaactttccctagggacagaaaagcgtccctaccgaaaacggatttaaacaccgtccccacttttgctaaggaagtttggatagggaggttgtggtccttaattcgccaggtaaaaggaaccccatcagctcgcatccctcacccccatcctgagcactgagtgtttgcgagaaactcgccctgcgccagcaactctgggctccggtctcagctcccgcgtagacgcggaggagagattggcggcccccgctggggaaattgagcccggcgccggtccgggacgtgcaagagggggaaagggggagatcccagacctcggtttcccgagggcttccctggggagccactcgcacctctgtgtctccgctcccggcggcagacctcgcggcgcttgctcaagagcgggtatccgaaagcacgtcccgaacacggagaagcgccctccgtctcctgcctcgtgacctgcgccctttccctccctcaccgcatcagatggaggaccctggctcctttcgcccctggcaaaatgctctagccaacactgggtcaacagccttagtttccagatctgtaacctgaacatcaggagcgggttcctttccttctacctgtgtctgaggtcctctggtcggggactgcgcgcgtcttcccaggtcagggaggaggggtcggggcgacctgagaaagacacaacgaagcgaatggagcccctgaatggggaaaggggagtggacaccaggaggcccctgcagaaatgcaggaccgatccactcgcgagctgacaatgccacgcgctagacttggcctgacggtggcaac

SEQ ID NO: 26504 - DNA, 219 bp, Homo sapiens
  chr17:72220057-72220276
  hypo
cgcaggcgagacgctaaagcagccttgtggggcggacaaagctctgagcacaaggaaggggaccaaggctgctgcaatacatggccggggctgaaataagagactcagaggacagagttctggacaggccgggaggtcacagtcgagtgcggttcccagtacagtggaagagctttgagaagtgactggtgttaaaaatcctcctgcatggccgggcgc

SEQ ID NO: 26505 - DNA, 791 bp, Homo sapiens
  chr17:72855923-72856714
  hyper
cgtggcatcaggctccccccgcgggaggagggggcgcgagcagcgagagccaccgtcacccgcggctcaaggacactcgcgatgcggcggcggcggcggcggcggcggctccgggcggggacccgcgccacgcctcctggcggccaagctgagcaccacgcacccggcgccccccgccccacgctgccccccgccggcgtccgcggctccggggcccccacccccactcccccaagctgggtcgtgaccccgagtcccgcagtggggggaccaagccagcctggcaggcggccccagtaccatcccaggcccgcccgggggccctgggcgaacccaggtgtcccggacctgcctacctgcccctggcacgctcttattcttcgggagtttagaaacaggctcaaagtcactagcaccgccaagacctggacgggctctgaaatacagccagcggaatggtaccctccccaaataagtgtctttcctcgattttcctgtggcccggggtcagggactgaactaagataacgccaccatccgagggctgggggaccgagccagaagtccccttggacgaccagggctgggaaaccgagtggacgaatggggtgggcatcagggcctggcgggaattcccgtcttgctcacccagcagctccttgcagggtcgcgggacgcacctgggggttcaggttgccgggtgcctttgctccgcgtgtccccgccctgcccgcgtaggcaggaaacaggagactcggggcttcccctccccgccgtcggggatcctgggc

SEQ ID NO: 26506 - DNA, 178 bp, Homo sapiens; identical to SEQ ID NO: 23523
  chr17:73808646-73808824
  hypo

SEQ ID NO: 26507 - DNA, 240 bp, Homo sapiens
  chr17:73811168-73811408
  hypo
cgcactcatgctggaggaaggggagcctgcccggccttccctcagggcctgagcctgacttgcctgtgctctgccctccagatctacaagtccaccaagtgcaacgacatgcagcagtcgggcagctgtccccgaggacccttctgcgcctttgcccacgtagaacgtatgctgttcccattgccccggggcagtgccctctcccacccctccctcgcctggctagctcaggcttaggcc

SEQ ID NO: 26508 - DNA, 185 bp, Homo sapiens; identical to SEQ ID NO: 6483
  chr17:74042063-74042248
  hypo

SEQ ID NO: 26509 - DNA, 136 bp, Homo sapiens; identical to SEQ ID NO: 9265
  chr17:74620111-74620247
  hyper

SEQ ID NO: 26510 - DNA, 73 bp, Homo sapiens; identical to SEQ ID NO: 6484
  chr17:7493149-7493222
  hypo

SEQ ID NO: 26511 - DNA, 940 bp, Homo sapiens
  chr17:75369050-75369990
  binary
cgcccggggaaggggaggaatctcttcccctctgggcgcccgccctcctcgccatggcccggcctccacatccgcccacatctggccgcagcggggcgcccggggggaggggctgaggccgcgtctctcgccgtcccctgggcgcgggccaggcggggaggaggggggcgctccggtcgtgtgcccaggactgtcccccagcggccactcgggccccagccccccaggcctggccttgacaggcgggcggagcagccagtgcgagacagggaggccggtgcgggtgcgggaacctgatccgcccgggaggcgggggcggggcgggggcgcagcgcgcggggaggggccggcgcccgccttcctcccccattcattcagctgagccagggggcctaggggctcctccggcggctagctctgcactgcaggagcgcgggcgcggcgccccagccagcgcgcagggcccgggccccgccgggggcgcttcctcgccgctgccctccgcgcgacccgctgcccaccagccatcatgtcggaccccgcggtcaacgcgcagctggatgggatcatttcggacttcgaaggtgggtgctgggctggctgctgcggccgcggacgtgctggagaggaccctgcgggtgggcctggcgcgggacgggggtgcgctgaggggagacgggagtgcgctgaggggagacgggacccctaatccaggcgccctcccgctgagagcgccgcgcgcccccggccccgtgcccgcgccgcctacgtgggggaccctgttaggggcacccgcgtagaccctgcgcgccctcacaggaccctgtgctcgttctgcgcactgccgcctgggtttccttccttttattgttgtttgtgtttgccaagcgacagcgacctcctcgagggctcgcgaggctgcctcggaactctccaggac

SEQ ID NO: 26512 - DNA, 148 bp, Homo sapiens; identical to SEQ ID NO: 5760
  chr17:76034983-76035131
  hypo

SEQ ID NO: 26513 - DNA, 200 bp, Homo sapiens; identical to SEQ ID NO: 9268
  chr17:7690145-7690345
  hypo

SEQ ID NO: 26514 - DNA, 553 bp, Homo sapiens
  chr17:80294440-80294993
  hypo
cgtgagccactgtgctggcggcatttgcttttctttgtaacttgattctctgggttcccttgcctttcatccttgcccacccacgtgactgcagcctgtggggcttcctcctaatgtcccgaagataactcgtcatccttgaccccgccgccacctcgggttctagtggaggatgtggcccgcctgccacccccacaggcaccgggtcctccaggcctccttgacccacttccaacccacctgggatgtctgcgcgttaccagcccagatgcctcttggagccttccacctgcaccccatctcctgtcccaacaggctgggcccctcctcccgggctggccaagccagtacctccgcaggggccgcaggtgcagcaccctctgtgggggagctagggggatcgctcctctgctctgcgcacttttatgaaagggcctctgaccctcccactgtcctgctcactctgcccgcgcacccccggccacctgggggccgccccccaaagccctcggcccgtggacagactcgcagcctcctgggagccgagccaacc

SEQ ID NO: 26515 - DNA, 175 bp, Homo sapiens; identical to SEQ ID NO: 9270
  chr17:80519712-80519887
  hypo

SEQ ID NO: 26516 - DNA, 231 bp, Homo sapiens; identical to SEQ ID NO: 23531
  chr17:80747754-80747985
  hypo

SEQ ID NO: 26517 - DNA, 823 bp, Homo sapiens
  chr17:80797982-80798805
  hypo
cgcagctacgattcatgtgtttgcacccaccgagctgctgcgggcagcctccccagcactggacccagcaagcaagttatctcgccgactcccagcgctgtctccagactcaactgtctgtgagtgcggcgtcggtgctgcctggacggccatatgtcagagggctttcgatgtgtccgcagttagaatagagattactatattcatcagaatcacacccgatgaatatttggcgtcatgataaagacatgtgagactttcctttagaacttgagcatgtgtacgcaggaggcaaacacttggattgattctcaagcgcgcataccctgggaggcacagtattcatggcgtccttgccatgaggtccagtgaggcctttgaggatctgtggaccttccaccctctaccctgctcctgagagtctctgtccctggtcctcctcaggagctgagccggcagggagggagcttatcccagagcctggctgcagggacctgccggagcttgcccgacaccaggcaccgcaagagctgcggagcagggtgtgtgggtgcgggggagggggccagctgtgcactcccgcaaaccaccctccccccactttaaattgcagaggcacttaacttgggggccagtttttacctccacacccccccaccaaaactgcttgcttgcttaatcggaggccgcaccccagttgtagcgaaggctggcatgtggtgtcggtttgaggactgggaaaggaggtgggatgagctggtgtcaggcccttggatgagcctgaggctgcagggcagaggctgcagggctgtggcatagggac

SEQ ID NO: 26518 - DNA, 212 bp, Homo sapiens; identical to SEQ ID NO: 9273
  chr17:8383605-8383817
  hypo

SEQ ID NO: 26519 - DNA, 870 bp, Homo sapiens; identical to SEQ ID NO: 22816
  chr17:8868587-8869457
  binary

SEQ ID NO: 26520 - DNA, 514 bp, Homo sapiens; identical to SEQ ID NO: 25289
  chr18:10589052-10589566
  hypo

SEQ ID NO: 26521 - DNA, 125 bp, Homo sapiens
  chr18:12375948-12376073
  hypo
cggcctgggcgaagaagcaaaaccccgtctcttaaaaaataaaaataaaaataaaaatcgtagatcggagggtctgctaccctacccaagctggtttccaactcctggagtcaagcgattctccc

SEQ ID NO: 26522 - DNA, 199 bp, Homo sapiens; identical to SEQ ID NO: 9274
  chr18:13491241-13491440
  hypo

SEQ ID NO: 26523 - DNA, 340 bp, Homo sapiens; identical to SEQ ID NO: 22817
  chr18:13823932-13824272
  binary

SEQ ID NO: 26524 - DNA, 784 bp, Homo sapiens; identical to SEQ ID NO: 23111
  chr18:13868532-13869316
  hyper

SEQ ID NO: 26525 - DNA, 126 bp, Homo sapiens
  chr18:15197980-15198106
  binary
cgggggcaaaaaggagcggcggcgggggaagaagccgcggcggccgtggaaaaagtcgcggcggcaaaaagccgcagagtagggggcgaaaagacgcaaaaagccgcggcggcaaaaagccgtgac

SEQ ID NO: 26526 - DNA, 982 bp, Homo sapiens; identical to SEQ ID NO: 23112
  chr18:18822154-18823136
  hyper

SEQ ID NO: 26527 - DNA, 646 bp, Homo sapiens
  chr18:20911034-20911680
  hypo
cgttcagcgagaggcagagccccggaacagcggtgttcactcagttaaacctcatggtctgagagagtggcaggtgtgccgttttccataattagtcacagcccctgaaggaaaagcgcgcccgtgtggggcaggaccaaaggaagaaacgcttctgcaatgctaccgggaagtctgagctcaccttctttaccttggcaccgagctgaagatctgttagaaaccctctccaaccaggactttcaggagaaacggtggccaccgcccagaataacaaggccccagcagcaaggtgtccttttcccagcaagtgaaacctgccccccgccaccacctgtagtacaggagacaccacaaagcaagaggccccagggctctgctcgggaagctgccgggcctgtttttcctcccagtggccaacaaacaggagggcaggttcagcacgttgggctctgctttctgagcgccgcaccattacagcatccacatccgatttttaaaactgaagtataacataaataccgtgtagtgtaggaggcacaggaatctcaagtacatggcttgctgagcatttatacccattagcacccacacagctgccacctggacagagacaccggcccttcccagcattgcaccaggctcc

SEQ ID NO: 26528 - DNA, 39 bp, Homo sapiens
  chr18:29521126-29521165
  hypo
cgggcgcggtggctcacgcccataatccccgcactttgc

SEQ ID NO: 26529 - DNA, 625 bp, Homo sapiens; identical to SEQ ID NO: 25296
  chr18:31739025-31739650
  hyper

SEQ ID NO: 26530 - DNA, 1823 bp, Homo sapiens; identical to SEQ ID NO: 22821
  chr18:32556625-32558448
  binary

SEQ ID NO: 26531 - DNA, 593 bp, Homo sapiens; identical to SEQ ID NO: 9281
  chr18:32621215-32621808
  hyper

SEQ ID NO: 26532 - DNA, 933 bp, Homo sapiens
  chr18:35146921-35147854
  hyper
cggcctcccccgccccggagagcgcggctggtcccccggtggctggcgggaggaaggtaggagtcgggcgcccctgcccgctcgcccgccggagggggaggaaggcgctgggcgcggtggccggtgagccagcgcgggggatggcttgatttgccctcgtctgctttacgggttcaaatagaatatatttttttaatcaccatcaaaagaataaagcccctgaatcgctatctgggttgccgccggaccgagactcgcgcggcgtgcgctgcccccgcgggtttcgttttcggcacctacagctcccgaggtgcgaggctgagtcgttcctgccgtggggaccgggggtcgagccgcccggtccggaccccgccggactccccgccaggcccactggggctggcatctcggctgcgcgggaaagggagtggcaggcgcggagccgggagcagggtccgagcggccccgcctgtaggggtgaatactggtggtgaacttggctggggtagcagattttcacgttaatgatatttacctgcaccccgtcctctctcatgtttgctttttcagggcagcctcttcgcttcagaagcctggcaaattgaaataacgcgcccgctcccccgcgggctgcggggctggggagctggggcggcggggctgagcggctggcctaacccccgccggccctcggctagccactttcgggtttcagggtttctcttttcttgccctcggattacattacgttactagaggatatgtctgcaattttaattaaagaaatgagaccccagctgcctgcaaacccaggccaaccccatttggtacaagcacaatacggagctctccagcgccggaggaggcccggaggcccgaggttcgcagccccaggccccgagtccgctcaggacgcctctctctgaggatccc

SEQ ID NO: 26533 - DNA, 1197 bp, Homo sapiens; identical to SEQ ID NO: 22822
  chr18:44335955-44337152
  binary

SEQ ID NO: 26534 - DNA, 620 bp, Homo sapiens; identical to SEQ ID NO: 23117
  chr18:44337479-44338099
  hyper

SEQ ID NO: 26535 - DNA, 1389 bp, Homo sapiens
  chr18:44772992-44774381
  binary
cgggctgctgctgccgccgccactcgccttctggggggccaggggcggcggcgggggcgggggcaggtccgagccggggtccccgagtttcccgtcttcctgcagcagcctggaggagttcaggccgagcgggaacgcgcccgcgacggccggcgcgcggtcccggctgctccccttctccgacggccctcggccctggaggaaccggccgcccccgactaaggggtcgccgagtaggacctccgtctcctcgtcctcttcctcgtcgtcgtcagggtctcgaccttcctcctcttcctcgccctcggggggcttgtggccctccacgtccacctcctgctcttcttcctcgtcgtcctcgtcctcggagctgtcctcgctggggtagcagcagctggttcccccgggagacagaaggcctcggtggtgcgggtgctgggccagagggggcggcgggggcggcggcggcggcggcggcggggccgggtggtggcgctcggaacccggctcgtcgggctgcgggggcagcagcagaagcggcgacggcggctgcggggggtggtggtggtggtggtggtggtgagggtggtgatggtggtggggatgcgtctgggccgagtggggcgcgcccgccgacgccccgtgcagcttggccaggctctccgcgtcgtccttgccgcccactggccggaaggcgctggaatggtggtagctgccaccgcccgctttgcgcccctccagaaggtgcggatggtggggcgccggaacccgggagcccgcggggccagacccggcggccgcggcccctgccccggcagctgccacagagtccgcgggcggcgtggagcccgcgctgcagtccccgccgctgccgcccgggggcgactcgaagagcgcgtcgcgagagccggcgcccccggcaggaggaggtgggccggagcccgggccgttggccactacctgcgggggctgccccggcgggggcgcggcctcggcgctcccagcagcaccgcctggctcagccaggtccaggaaggcctggcgcagcagggccgggctttcgcctagcgcgcagcctagcgccgagggcggctgaggcgggggctgcaggtaggtgggcaccgggagcccgccaggggtccgcggcggccagaacatgcagaagggcggatagaaggcgtccttgcggcccgcgggccagaagaggccggacaagccggccttgggcgccgcgcccgcgccgcctgcgcccgcgccccccagggcctcagcggcggcacccgcatcctctttcttatggcacaagctgaaggcggcggccgcggcagggaaggtgtaggggtgcgggaagagcccgccgcagcccgggaacttctgcaggacgccccc

SEQ ID NO: 26536 - DNA, 1669 bp, Homo sapiens
  chr18:47087075-47088744
  hyper
cgaggtcggaacaggatctgctggctccggctcggtttcctcgcacaggtctctccagctggatcctcgacgctagggaggaaggggcgcgggactgctgtgggggttttccctccccaggcaggggcaggacctgttccgggcgactgcagggttaagggtatcgtcttaaagagccggatcctcccggctggagcgaggctggatggcgggacgcagcctctcagcctctcgtacccgccctgcgtccgcagtggttgttggcgcagccgccccgtcggtgttccgggctcagtccccgctccccagcgccagacgcagactccgggccaagttctccctccgctcgctgctttctgccgcaggacccggatcaataaagggaaggagagccgggaggaaatgatggagaacagagagaaaggagatgcttgatttcactcgccaaggagtgagtgctcatcggcagacactgggctctggccacgcgtcttagactccaaatctcggctcactggtccctttgaggaggtcgcctggtgttcccgtagccctccaccccaccgtaggagagcgcctgccacgagctccgcgcctcgctaagtgctttgctacgtgaactcttagttttcccaacatccctaagccgccgatacattatcacccacgtattgcggacgagagaaccgcctcggagaagctggctggctcgcttggagttttgcagctagtggcggagcgagcattccgagcaggtactgtgcgatcctccagcgccggccgcagctcacagccccttagctccgccgggttattgtgcggccgcgccttctgcacctgttgcggccctcgctaggcgggaagggagggagaagaggaggacaaaggggatgaccaggtggctctcccccgacggactcccggcccagggagcggatagaccactcccagagagagtgtggctttgagccttggagaggatgctctccttctccagggatcgcctccccagcggacgcagagtttcagggaaatgtccgcctccgccacttgggatggcagtggggagaggaggatctgggtgtccggaggagggcagtgggagaaagctggagctgctggagtcgcagctgcctgcggagcgggcccgggaggaagcggggccgagcgtgcggcgtccacgcggtgagtgtgcagcgctttcattcaaactttctccagtctcggttccggcgtcagcaaggtgtgaccaatcagagcccagagacgggaataaattatgcaaatcaccatctggcgatgggtcagatgactcccatacttttaaaaactacctctataggagcgtgacagcagcgagtccttgcctcccggcggctcaggacgagggcagatctcgttctggggcaagccgttgacactcgctccctgccaccgcccgggctccgtgccgccaagttttcattttccaccttctctgcctccagtcccccagcccctggccgagagaagggtcttaccggccgggattgctggaaacaccaagaggtggtttttgttttttaaaacttctgtttcttgggagggggtgtggcggggcaggatgagcaactccgttcctctgctctgtttctggagcctctgctattgctttgctgcggggagcccc

SEQ ID NO: 26537 - DNA, 800 bp, Homo sapiens; identical to SEQ ID NO: 23121
  chr18:47339411-47340211
  hyper

SEQ ID NO: 26538 - DNA, 1388 bp, Homo sapiens; identical to SEQ ID NO: 23122
  chr18:55104759-55106147
  hyper

SEQ ID NO: 26539 - DNA, 790 bp, Homo sapiens
  chr18:5895458-5896248
  binary
cggccggactggcggctgttgctaagagaccggagccatgacacagggaaattgcggcagggtggcggtcggggcccgcccggctcggcggagtcggggggcgcccccgcccccgccccccgccccaccccctcctccggcgcccccccccacgccgccggccttccccgctcccccgcgtcctccgccgcccgccgcccgtcccttcggaagcgccgattcctcggggaggaggaggcgtgaggggaggcggcggaggcagccggcacggggcgctcgggccgcggggcagggggcgcggggtgcctcctcggcctcggctctccccgccccggggcgccccgagaccgccgcctgcctccgcgggcagctttgttcttctttcctccaactacctgtctgagccgcgggccccagaggccccaaagagaggcccggagggtctccccagcagcatccgaggggcgctctcggggagctaggggccagagtccgcggtccctccgtgcctgcctccctcccctcgtgcctcggtcttttgttgcctctactcctcggcacggcgcagcctgggctctcttccccctcccgcttgggagtttgcagtgtggacgctcggcaagcacagtaagttgtcccccagcgaactcgggcccgggcggagtggagccgcccccgccgggacgggcgcaccgcgggacgcttggaagcctctgccagatgcgctcgcgctccagccccgccgggctttgtgaccagcctgaccgggacccggcagctggggctcctc

SEQ ID NO: 26540 - DNA, 128 bp, Homo sapiens; identical to SEQ ID NO: 7066
  chr18:60609821-60609949
  hypo

SEQ ID NO: 26541 - DNA, 650 bp, Homo sapiens; identical to SEQ ID NO: 24119
  chr18:60985398-60986048
  hyper

SEQ ID NO: 26542 - DNA, 74 bp, Homo sapiens; identical to SEQ ID NO: 9296
  chr18:635725-635799
  hypo

SEQ ID NO: 26543 - DNA, 283 bp, Homo sapiens; identical to SEQ ID NO: 23126
  chr18:75362799-75363082
  hyper

SEQ ID NO: 26544 - DNA, 113 bp, Homo sapiens; identical to SEQ ID NO: 9297
  chr18:9196896-9197009
  hypo

SEQ ID NO: 26545 - DNA, 81 bp, Homo sapiens; identical to SEQ ID NO: 7073
  chr18:9514129-9514210
  hypo

SEQ ID NO: 26546 - DNA, 1173 bp, Homo sapiens; identical to SEQ ID NO: 25316
  chr19:1004547-1005720
  hypo

SEQ ID NO: 26547 - DNA, 865 bp, Homo sapiens; identical to SEQ ID NO: 24127
  chr19:10397603-10398468
  hyper

SEQ ID NO: 26548 - DNA, 1478 bp, Homo sapiens
  chr19:10530654-10532132
  binary
cgacactgaaaacacagacaaccctcggaagaggccacgtgcgcgcacatcccgccccgggcccgcaccatcactatcctccgacgcacagacaggagatcccacacactctgccgccgcccgctgcaggtaccgcgccggtggcactaggaccactcctcaaaaactgccccccgccaggggtagcggcgaggacacgccaacaccggactccgccctcgccatgatggaccgactgactgacactctggcaaccagtccggtgtctgcttccagatcggattaaccgtttaactccttcgtgcctgtgcgcgccgcggccaagcagggtgctttgaagacagacgagttccagcgccccctcccagcccggagcggggatctgcgtgggcgggaagggcccccctccttaggtagctgccccccgctggcccggacggaggaggaggggggcggcgctgacagccgcggcgggcggggggcggggaggggcgggacggggcggaggagccggggctggcgccgagcgggccgcggaacgcggagcgcggagcgcggagagcgccgccgggcactgagcagagctccaggcgccgaaaggaagctgcagagcccggcccgggggcgattggcccgcagcgcccccgggtctgtccccggggcgccatggccctaccgcggccgggcgcacccgcggggccctgggctcgctggcttgcgcgcagctgagcggggtgtaggttggaagggccagggccccctggggcgcaagtgggggccggcgccatggaacccccgaccgtcccctcggaaaggagcctgtctctgtcactgcccgggccccgggagggccaggccaccctgaagcctcccccgcagcacctgtggcggcagcctcggacccccatccgtatccagcagcgcggctactccgacagcgcggagcgcgccgagcgggagcggcagccgcaccggcccatagagcgcgccgatgccatggacaccagcgaccggcccggcctgcgcacgacccgcatgtcctggccctcgtccttccatggcactggcaccggcagcggcggcgcgggcggaggcagcagcaggcggtaagactccccgcggcggatgcgcgcggaacggatgggcgcgcagggaggaggcaactcgagctgccggccgcagggggcgctaggatgcgggtggggtcggtttggctggcgggggcggagggaattcggctgcgggggcgtctgggacctggcccctggttgtgcgctctacgggaggcttcctgctgaagcccatcctggggtccatttagggggcgccacgctgcgcgtggtgttaacgaggtctgggttggggaagggggctgcacacttaggggtctgtattcttggtgacagtgcagaacagctgctaagctgggaaccacttggagggaccttcctgggggcactatactgagggctagattc

SEQ ID NO: 26549 - DNA, 292 bp, Homo sapiens; identical to SEQ ID NO: 22824
  chr19:10691764-10692056
  binary

SEQ ID NO: 26550 - DNA, 257 bp, Homo sapiens; identical to SEQ ID NO: 23542
  chr19:11003007-11003264
  hypo

SEQ ID NO: 26551 - DNA, 319 bp, Homo sapiens; identical to SEQ ID NO: 9304
  chr19:1128115-1128434
  hypo

SEQ ID NO: 26552 - DNA, 705 bp, Homo sapiens; identical to SEQ ID NO: 23128
  chr19:11805261-11805966
  hyper

SEQ ID NO: 26553 - DNA, 608 bp, Homo sapiens; identical to SEQ ID NO: 9307
  chr19:11877720-11878328
  hyper

SEQ ID NO: 26554 - DNA, 785 bp, Homo sapiens; identical to SEQ ID NO: 23129
  chr19:11909173-11909958
  hyper

SEQ ID NO: 26555 - DNA, 941 bp, Homo sapiens; identical to SEQ ID NO: 22825
  chr19:11959378-11960319
  binary

SEQ ID NO: 26556 - DNA, 935 bp, Homo sapiens
  chr19:11998456-11999391
  hyper
cgcccttggaaaagctgtggtcagaatccgtctgtctggctctgcagggcccgatacccagggcttccgctgtcactcagacatggggggcggggcctagcattccatccaatcagaggcattgtggcgggtccctgcccactgttcctccagacactgagggggtcgcattccttacctcacctttgtccctgcgcgggctgcggctgggatccggtctttccagccccgagagggacctggttcctctgcccaggcttctgtcactctgtcacctacgctatgccctgctgtagtcacaggaggtgtagagaggaccccgggacatctgaaagccaggaaatggtgcgtgtctggggccgggtgtcgtgagacgggggaggggctgcctggaccgaccggaaccgactgtggcgagaccctggctttcctgcgggcgactttgggatctgggaccgagtcctcctggagccgctcggccctcggtcccctcgactgctcggtgtggctgggccggtagccgggacaccaggcgtcctgtctcgtctctgcgcggcgactgcggttccagagccctctatgggcagctccgcgcccgcagccacgcgtctacccagattgtgcgggggccacgggagggtcatgtgggtgatcccgactcgggtgtggggttcgtgcttgggaggagcagcggtctgtggggcccccagtgtccactttttctcctgttaaaaattaaactgaggaacgttaacaaagagttcatttgagcaaacagcgattcacgaatgagacacacccagtcctggcttgtggtttgtcaacggaaaaagccaaactatgtaaaataaagaagtttattcggagccgaataggagagaccttggccgagggaaaaacaaccccaagaagcctggagtaagtggtcccgaggc

SEQ ID NO: 26557 - DNA, 617 bp, Homo sapiens; identical to SEQ ID NO: 23130
  chr19:12075748-12076365
  hyper

SEQ ID NO: 26558 - DNA, 776 bp, Homo sapiens
  chr19:12098300-12099076
  hyper
cggctggaatagcagcgaccggctctgcagcgccctgttacccggggcttctgctgtcactcagggctgagggggcggggtaggatgccctatccaatcggggtgctggggcggggccctgccaactgtttaatccgccggaaggagggcgcagcattgccggtcttctcattgcctggctgctagaggaaacccgaagtcgggattctttctttcctgctctgagagggaccaggtccctcctccgtagcttttgtctctctattgcctgcgccgtgtcctggactgctcacgggagttctgcaggagacgccggaatatctggaagctgaaaaatggtgagtgtgcggagccggaaaccccgaggtgggtttgggggttaggggacggtctagtcagaaccgcggaatcggaacgcgggcctccatgttgcgactcgggggtctgaggcccgagttcccctggcgcagctcagccctgggtccccttggcctcagggtgggtctgggcggcagtcgggaccccaggcgtcctgtcgtccctgctcggcgactgggacccctgccccggagctctctctggggagctctgcgcccgcagccgcgcgtctccccaaattgtgcggaagtcgtggagggaatcccgcctcgtgtgtggggttcccagtcgcacgtttcttctgttaaaaattaaactgagacactgttaacaagtaaagagtattttgggtaaacagccaatcatgaaggagaaacaccgggtcatgacttgttaac

SEQ ID NO: 26559 - DNA, 988 bp, Homo sapiens; identical to SEQ ID NO: 23131
  chr19:12163025-12164013
  hyper

SEQ ID NO: 26560 - DNA, 689 bp, Homo sapiens
  chr19:12175460-12176149
  hyper
cggggcctggcgctccacccaatcagagtcgccggggtggggcccggccaactgtttatccgcgggtcacattgccgttcgcctcagtctttggcccctcccgccgggtgaggttggcaccccgtttttcctgctctgagagggaccggttgccaccgccatacttctgtcgccctgtcgtctgtgttgtgactgctttggacgtgggagtcacctgaaagccaggaaatggtgagtgtgagcccccgctgggagtcccgagacttgggggagggtaggcggaggctggttggaactggctggaaccggctgtgccgggacccggacctccccgcggcgactcgaggtctggggcccgagccccgctggcgcagctcggccttcggtccattcggccgccgggtgcggctgggccggcagccgggacccctgggcgccctgtctcgtcgccgcgcggcgactgcggccccagcccgggagccctctctggacagctccgcgcccgcagcccggagcctctccatattgtgcggggccacgggagggtcatgggggcaatcccgccttgggtgtggggctcgtgcgggaggagctgcgctgtgaggccctcagtgccccctttctcctgttaaaacttaaacaggcccggtgctgggaatagaggcgtgagccaccgcgcctggcctagc

SEQ ID NO: 26561 - DNA, 644 bp, Homo sapiens; identical to SEQ ID NO: 23132
  chr19:12203028-12203672
  hyper

SEQ ID NO: 26562 - DNA, 443 bp, Homo sapiens; identical to SEQ ID NO: 9316
  chr19:12250823-12251266
  hyper

SEQ ID NO: 26563 - DNA, 655 bp, Homo sapiens; identical to SEQ ID NO: 23543
  chr19:1226490-1227145
  hypo

SEQ ID NO: 26564 - DNA, 678 bp, Homo sapiens; identical to SEQ ID NO: 23133
  chr19:12551198-12551876
  hyper

SEQ ID NO: 26565 - DNA, 779 bp, Homo sapiens
  chr19:12595013-12595792
  binary
cggtcgtgggtttgagatctggcttcccatacacttggaaaccttgagaaacgagtcctcccttgggaagaaaagagggactgaggaccccacacaacactgctcctcccacgcacgaaccccacgaccgagacgggattccctccatgaccctcccgtgccccagcacaatctggggagacgcgaggctgcgggctcggagctgcccagagagggctccgggactggggccgcagtcgccgcgcagggacttgacaagacgtccggggtcccggctgccggcccagccccatcctgcggccaaagagaccgagggccgagctgcgccaggaggactcgggtccacagacccgggagacaacggcggggaggcctgggtcccaccacagccagatccggccggtttcaacccgcccctctctcccatctcaagacccccagccccgcacacttaccatttcccagactctgggatgtcctggtgttctgtttacctctcccgcggccagcacaggtcctacctccacctgaggcccttcctccacctgagggccttctggggtgaggagaccccagagcggagcgcagcggctggtagccacgccctcgccgtttgcgcagcgcccctccgcccgccttcccggcggcgcccctgattggacattgcactcttggacccgccttcgttgcctgagtgacagctagtagggaagtcgcgtctctaagcaacctgcattcgtccggggtcaggaatctgttcccctgccacggatatttgc

SEQ ID NO: 26566 - DNA, 224 bp, Homo sapiens; identical to SEQ ID NO: 9323
  chr19:12721448-12721672
  hyper

SEQ ID NO: 26567 - DNA, 82 bp, Homo sapiens
  chr19:14244894-14244976
  hypo
cgtgagccaccgcgctcggccacaaccatttttaaatgcaaggaacacaaacaggctgattgaaacctgatctcctgccgtc

SEQ ID NO: 26568 - DNA, 112 bp, Homo sapiens; identical to SEQ ID NO: 9324
  chr19:14815869-14815981
  hypo

SEQ ID NO: 26569 - DNA, 690 bp, Homo sapiens
  chr19:15271811-15272501
  hypo
cgggggccgctcctgcggggagacgggggtccctgggttgagcagctggggtcccggcgccagtggcagcaggaacgaggggcctggaggggcaggtgggggcagccgggcccaatcgaggggcacagccacagggttcagcaggcccaggctgagtacacatcctccagggggctggcgccctagacccgcccggcctgggccaccaagctgtgccagagacactgcagtggcagtggcagctgcatagggcccctcaagggggaagccaccaggggaagcagggggcccaccgaaaggccgcggggagtccagcgagtccacgggcgacagcgtgaccgagctgtcagccagggggcccgggcaggccagcgtcagcttcttgccccgcccccggggcccctgcggccccagccccgccttcccggggggcctcctgctcttcttggaccccgactgtgccgctttgaggccagggaggaaggcccctggaggacagagcagaggccccaggccgtggggaccgggggggctgcggggcccactgggttgatccagcaagcgcacgatgtcctggtgcagtctctcctgggctacgtcccgcggcagcctgtccaggtggtcggtgatctcacggttggcaaagtggtccaacagcagcttggcagcctcatagctgccctcgcgggc

SEQ ID NO: 26570 - DNA, 359 bp, Homo sapiens
  chr19:1775063-1775422
  hyper
cgggcggcgtgcgcctcctgcctctccccggccggccacacggtggcgctgtgtcccgctcgcccgcccgcccgccgctcgcccgcagcctgcaagcgcaaggaacaggagcagcagaaggagcgcgccctgcagcccaagaagcagcgcctggtgttcaccgacctgcagcgacgcacgctgatcgccatcttcaaggagaacaagcggccgtccaaggagatgcaggtcaccatctcgcagcagctcggcttggagctcaacaccgtcagcaacttcttcatgaacgcgcggcgccgctgcatgaaccgctgggctgaggagcccagcacggcccccgggggccccgccggcgccac

SEQ ID NO: 26571 - DNA, 803 bp, Homo sapiens; identical to SEQ ID NO: 9326
  chr19:17837853-17838656
  hypo

SEQ ID NO: 26572 - DNA, 618 bp, Homo sapiens; identical to SEQ ID NO: 25345
  chr19:17958343-17958961
  hyper

SEQ ID NO: 26573 - DNA, 793 bp, Homo sapiens
  chr19:18054252-18055045
  hypo
cggggccgggcttttcggggcaaggctgcgcccaaggccccctgacgctcatgtccacccccagcgtggcggaggaggcggccgaccggcacccagaaagacgcatgcgggcagccttcacagcctttgaggaagcccagctgccgcggctcaaacaagagaaccccaacatgcggctgtcgcagctgaaacagctgctcaagaaggagtggctccgctctcctgacaaccccatgaaccagcgggccgtgcccttcaatgcccccaagtgagcccagaacttggggagccagttcacccacgggtggtccaggtcacgactctgcacgcccttaggccaggtcagctgcgagggtcacagagcgttccgggggccaaggcgccgggccccggggccatgctcttatcaccagccacccgtcctcccgccagagggtccctgccccgagtgacaccccatcccctcccatcccccggcgcgtgtgtgtagagcctcagggctgagtgcccaataaaggtggcggcaaggctgcggtgaggcacttgaagcctaagtgagtgggtggggagaggcgggcgaagaatggggagaaggaacagctttggggacctgctgtgaaccgcactgggatcatagctagaaaagacaagagcccccaacagcgcgctccttcctgctgccagctgtgcttcatcggctcctgccagcacccctccttggctgtgccacttgtccagtgaggcacctgctccactgtctcctgcacacgcttagagaggtggaggtggaggc

SEQ ID NO: 26574 - DNA, 111 bp, Homo sapiens
  chr19:18335258-18335369
  hyper
cggtccaagtatgaccgggtctgagttgggtctgatcacgtcgaattggacttggtcacgaagagtttgttcgatgagttcgggagaattcggctacgtccgattgagctc

SEQ ID NO: 26575 - DNA, 262 bp, Homo sapiens
  chr19:18335414-18335676
  hyper
cgctcggtctgcttcgaacaagtccgggtgacgctcgggccgggtcgggcatgttcggtcacgtccggctacatgagggctagttcgggcatctccgactaagaccggccgcgctcggcctgttccgtccgactccagcgggtttagcagcaccgggatgaaccccacggccagccgaaggggcggggcttcttaacccttccctggcccgtctggggtgcgccgtgggcgctgtggtgcaatgggagacgctcttaggggc

SEQ ID NO: 26576 - DNA, 183 bp, Homo sapiens
  chr19:18880002-18880185
  binary
cgaggccagtccaagaggcggcagcccgttgggcacagcgcctggggcccagggctgggggctgcagctcagaccattggacttttctgcctagggccggctcaggcagacaaaggctgggctttaaccctgtacccacaaaccttcctgactgtccagaccacctgcttgctccagcggcgc

SEQ ID NO: 26577 - DNA, 306 bp, Homo sapiens; identical to SEQ ID NO: 6515
  chr19:1977026-1977332
  hypo

SEQ ID NO: 26578 - DNA, 1111 bp, Homo sapiens; identical to SEQ ID NO: 22826
  chr19:1978023-1979134
  binary

SEQ ID NO: 26579 - DNA, 776 bp, Homo sapiens; identical to SEQ ID NO: 22827
  chr19:19843315-19844091
  binary

SEQ ID NO: 26580 - DNA, 243 bp, Homo sapiens; identical to SEQ ID NO: 9333
  chr19:19887245-19887488
  hyper

SEQ ID NO: 26581 - DNA, 287 bp, Homo sapiens
  chr19:19932106-19932393
  hyper
cgaccttcccgtggcccctgaacaatctgggaaagacctgtgggtgcagagctgcccggagagggttccacgccagggcacagtcactgcgcagggaaaagacaggacaccccggggacccgctgtcaacgcagccgccatgttatggctggggcggagctgggcaatgagaacttggagcgcagattgtggagctgactgccgggaggcctgagttctgccactgccacagccacagccacttcctccccagttccaaccagcccctctccctctctcgggatgtc

SEQ ID NO: 26582 - DNA, 773 bp, Homo sapiens; identical to SEQ ID NO: 23135
  chr19:19976556-19977329
  hyper

SEQ ID NO: 26583 - DNA, 118 bp, Homo sapiens; identical to SEQ ID NO: 6029
  chr19:20011652-20011770
  hyper

SEQ ID NO: 26584 - DNA, 291 bp, Homo sapiens; identical to SEQ ID NO: 23137
  chr19:20011910-20012201
  hyper

SEQ ID NO: 26585 - DNA, 845 bp, Homo sapiens
  chr19:20149660-20150505
  hyper
cggctggacccccaaccacaaaccgtggctgggtgctctctgagcataaatcactgttaacttcaataagttttcaacattttaaaggtgactcccatagtttttaaacaggagaaggaaaagactgaggacccccgggatcacagcacttcccacgcacaaaccacacacggggtctggactctgccctgaggacgcttccattgtccccgcagtcggggcagacgcaagaacgcgcgcggctcttcccagggtgggctccgggcgggaagcgggagaacggaacgggatgcccgcccagggtcccggctgctggcccacctcgcatcctgtgcccggaggtgatcgacggccgagctgtgcctgccggggactccagtccgcagactccggagctgacagctgggaggccccagtcccgtcactgccggttccggccggtttcaaccagccctgcccccacctcgggatgcgcggcctggcacactcaccatttttcggcttccgggatgtcgtggagtcttagctctggatctcacagcatctgcaagtcagagggcaacagaggctgcgacagtcaccgggaactactagagcagaggatactaagcaatgaagatggaccctgagctctggctggagcgagacaaaggccccgccagctccaggacaccgccccctctaccttggctgcgcacctgattggacagttcccactctagcgcccatgattggatacagttccatgccccgccccctcaggtcatgagtgacaggaggcgtgatctgagaatgtgttgaataaggcaagagttacaggtttttcctgaacccttttctggcgc

SEQ ID NO: 26586 - DNA, 949 bp, Homo sapiens
  chr19:20162601-20163550
  binary
cgatcccagacccttgagggtctgtgagaaatcaaactttcggcactttggaagtcaggaaaccagcacgttgggggaggcgggatcacagttacttgctgagacaagctgccctggctacgttcactcccgtcaggtaggagaggttaaagaacaggaaggctccccctccgcagggcggaactgctctgaaggcatggaggagcgacgctgaaggtggaggcttcgcccaccatgccgggagctaaaatttcttaaccaatgccggccagcgatggcagggctgcgggactacaatcccagcgcgcacagggatcagggactgtgcgcatcactggaagaagcggcagaacggcgcgcgcctcgctgagctttctgggagatgtagtctcatggcaactcccagccttttggccacaaggctacgggacctacaatcccagcctgtaccaggatcgggagcagttcgcagcactagaggaaggggcagggcggtgcgcgccgcgcctgatatgctgggagctgtagtctcttcacggtttttagccaatgagtaggtagcttcagaactacaatcccagtatgcatgggggcggtgcgtagtcctggaggtaggggctgagaggtgtggacttaccggtgtccaaagcattgctagcagccaattccatgccgccccgttgccagggagagtgaatacagctagggacgtgaagggtaggtctgggctgggcattgaggagggtattaggctaggaagtatacctcacctttgtccaaatcgggtggttcggcctcctctcattggccctatgcagctgggttgcctctctcacccgcacccaagggtctttccagagtgttgcgtcatttccagcccagggagctgccttctttcctaaactgcaatggaaactgtcctgatgtctgagacaatgtccgttgtgcc

SEQ ID NO: 26587 - DNA, 76 bp, Homo sapiens; identical to SEQ ID NO: 9339
  chr19:21512126-21512202
  hyper

SEQ ID NO: 26588 - DNA, 120 bp, Homo sapiens; identical to SEQ ID NO: 9340
  chr19:21541712-21541832
  hyper

SEQ ID NO: 26589 - DNA, 173 bp, Homo sapiens; identical to SEQ ID NO: 9341
  chr19:21542078-21542251
  hyper

SEQ ID NO: 26590 - DNA, 309 bp, Homo sapiens; identical to SEQ ID NO: 9342
  chr19:21579832-21580141
  hyper

SEQ ID NO: 26591 - DNA, 114 bp, Homo sapiens
  chr19:21580223-21580337
  hyper
cgtaagttggcggctgcgccaacagccggggccccgggcgtcctgtctcttccctgcactgtgactgtgccctgcctggagtcctctctggcagttctgcacccgcagcgccgc

SEQ ID NO: 26592 - DNA, 159 bp, Homo sapiens; identical to SEQ ID NO: 9344
  chr19:21688303-21688462
  hyper

SEQ ID NO: 26593 - DNA, 179 bp, Homo sapiens
  chr19:21688738-21688917
  hyper
cgactgtgctgacagccgggccccgggcgtcctgtcttccctccgcagtgactgtgcctgacgtgtagccctgtctggggagctctgcacgcgcaattccgcagtctctcccagattgtgcaagaaccatgggaggggcgtcaggtgagaatagtgactcgggatgcgggttcatgagc

SEQ ID NO: 26594 - DNA, 293 bp, Homo sapiens; identical to SEQ ID NO: 23138
  chr19:22018435-22018728
  hyper

SEQ ID NO: 26595 - DNA, 272 bp, Homo sapiens; identical to SEQ ID NO: 23139
  chr19:22018891-22019163
  hyper

SEQ ID NO: 26596 - DNA, 630 bp, Homo sapiens
  chr19:22034394-22035024
  hyper
cgcagctcctcctgcgcacacaccgagtcgggattctgccccgatcatccgccgggcatccctgaacaatctgggaaatactcggggctgctggtgcagagctgaccagagagctccagacagggtaccgcgcaggaatggggcgggacgcgggaggctcggctgcgggcccagccgccatcttgcggccagaggggcctggggcggagctgcgccagcgaccaggactcaggagcggactgtgaggaggccggtcccgccactttcacagcctgctctcccctctcgggatgcctaaccccgcacactcaccatttcccagcttccaggatgtccgggcatcttagctgtgcgtctcccaggacttgcagatcacagggtaacggaggctgcgacaaagtcaccggggattcccgagttggagaacgcggaaaagcagaggcgggtcccaaggtctagcgggagctggagacaaaggccccgccaaaagccggaagccacggccccctctccaactgcgcgtctgattgggtggttcccacgccagcgccactgattggataaagctccaggacccaccctccctagcgtttgcgcattttatggacagggaaacaggctcaagtaggc

SEQ ID NO: 26597 - DNA, 89 bp, Homo sapiens; identical to SEQ ID NO: 6517
  chr19:2204172-2204261
  hypo

SEQ ID NO: 26598 - DNA, 267 bp, Homo sapiens
  chr19:2273763-2274030
  binary
cgccgtgttactggccgcccctagggacctgcagcgccgttcggggcagcagcacttccggcggggtcgtggcctggagcgcttccgggtctgcaaccccgccgtctgcccggccgcagcgccacctgccggccgcatccgggagcgccacccggaaaatcagggccaggcctggccgggaaaccggctggaaagaggaggaaaggaggaactcgaaaagattgtagacttggcgagcgggccggggggatattcagccgtctgagc

SEQ ID NO: 26599 - DNA, 102 bp, Homo sapiens; identical to SEQ ID NO: 9349
  chr19:23432614-23432716
  hyper

SEQ ID NO: 26600 - DNA, 581 bp, Homo sapiens; identical to SEQ ID NO: 23140
  chr19:23432833-23433414
  hyper

SEQ ID NO: 26601 - DNA, 587 bp, Homo sapiens; identical to SEQ ID NO: 23141
  chr19:23456510-23457097
  hyper

SEQ ID NO: 26602 - DNA, 120 bp, Homo sapiens; identical to SEQ ID NO: 23142
  chr19:23577711-23577831
  hyper

SEQ ID NO: 26603 - DNA, 137 bp, Homo sapiens; identical to SEQ ID NO: 23143
  chr19:23577972-23578109
  hyper

SEQ ID NO: 26604 - DNA, 68 bp, Homo sapiens; identical to SEQ ID NO: 6037
  chr19:23578240-23578308
  hyper

SEQ ID NO: 26605 - DNA, 558 bp, Homo sapiens; identical to SEQ ID NO: 25355
  chr19:23598378-23598936
  hyper

SEQ ID NO: 26606 - DNA, 702 bp, Homo sapiens; identical to SEQ ID NO: 6038
  chr19:24216103-24216805
  hyper

SEQ ID NO: 26607 - DNA, 151 bp, Homo sapiens
  chr19:24216915-24217066
  hyper
cgcctggctagttttgtatttctagtagagaagtggttttgccatggtggaagctggtctggaactcaagtgatccgcccgcctcggcctgaccgggaaatagaagcctgaactcagtgactcaagctaaggatagtttagttctgccggc

SEQ ID NO: 26608 - DNA, 601 bp, Homo sapiens; identical to SEQ ID NO: 6039
  chr19:2461998-2462599
  hyper

SEQ ID NO: 26609 - DNA, 561 bp, Homo sapiens; identical to SEQ ID NO: 22828
  chr19:2702445-2703006
  binary

SEQ ID NO: 26610 - DNA, 770 bp, Homo sapiens; identical to SEQ ID NO: 6041
  chr19:28284358-28285128
  hyper

SEQ ID NO: 26611 - DNA, 992 bp, Homo sapiens
  chr19:30017414-30018406
  binary
cggagccgatccgagcccacgcggccgccgcctctccgctcccgggcccccgccgccaccgcgccccccgcgggagatggaacagcggaaccggctcggtgccctcggatacctgccgcctctgctgctgcatgccctgctgctcttcgtggccgacggtgagcgcgggaactttgctgccgctgtggactcgggggggtctttgctggggccgccaccgagaagaagaagaaagagaacgaaccgggaagcttcgcggtctccagcaatcccgctgtgcagcctgggcccggaggggtagggagaggcgagcggcgaagggtcgccgcagcagcagcgccgcgcccgagtcgttcccagtcccgccggggccccggctgcggaaaggatgcctgcggggagcgggagtaggcgcgccccagccaggctctggcggtgcggccaggggcgggggagaagcacgagtcgcccctgccgccccgccccatccggagggaagcagtaggcagccgatggccggtccctgcctcggccctgcagccgcttccccgaactttgctagcccctccggccgtgcgccagggagcagctgcggggtggggggcacaaggccagccagccagagaccgactgcctcgctttaggttgccccaggcccccgacctacagctggtcacgcctctctctctctccccacccccagctgcattcacagaagtccccaaagatgtgacagtacgggagggagacgacatcgaaatgccctgcgcgttccgggccagcggagccacctcgtattcgctggagattcagtggtggtacctcaaggagccaccccgggagctgctgcacgagctggcgctcagcgtgccgggcgcccggagcaaggtaacccgccgcccacgcggtaccggcgcgcgcccggctcgcgcccggggcggcgaaggctaacccagggagggaagcagcgggcttcactcgcgcagggcgcc

SEQ ID NO: 26612 - DNA, 1378 bp, Homo sapiens
  chr19:30019101-30020479
  binary
cggcaggtgtgcaccagggcagccacccgttggtcaggcaccatgctagctccaaagcccgcttcctcctgggaaactcttggaaagccggacgtcctttgtgccctcaacccccatcccccgggcggtttcggtcctagcctgccggaggagggtgcccttgcctaaaggcggatccgagttcccctagccagaaggccgcgagcctcacgtctctctctccctctttgcattttaggtaacaaataaggatgcaactaaaatcagcgtaagtgtggagcccagcgcgggccgcgggagaccccttctggccgcctcgggtcccgcagctccctcccttagcaagccgcggcggccgcgcatgtggggccgcgcaagtagggcagcgatcgcagccttgcatcggtggctgctcggcgtgtccgggcgccatctgtcgccggttgcagggtcgggttctcttttgtgtaaatcaagggtccaaggcttgagtcccctaattcggctcggcgctgacctgtaaaactccccttggtcggactgcgcgcttagggcctctcgcgcctgccagcctccgctctgcgggcattcctcctagcaccgggagcgcgcggctgctcgccctcgccgcgaccgtggcgccagcttcccgccccctctgccccgccctgagcatctgctctgcgccctccgctgcaaccctttatcctccgcctggattgcgggtctgggtgcggggtgttgcaggcttgcaggggacggggtagggggtggttgtgccaggctgcgaggggcccgggtcatggggttgctaactctgggaggagatgcgcccaagcttcccacctggagcgtagaaaggcctggagatgacgaagcctcctcgtgggctcggttcagaggtgagggctccctgggtgtttgttgagagccgtagagcagtacttcccgaagtccccaccggggcgcaggggaggagcacttcgctggggggcttctggagatcccgcggaaaggcgggttggtagcaggtggccagggagccaggcagcagcctcagcgttgcttgccttcttaagaaagcacagtgttagctgtaaagggcggggtccggtgacagggtggctttccttaggaagcgattcgggcaggccctccgtgctccgggaggtgaggagggccggctggggcgggactgtcggttggagcgcgtcggggcgggaaagacgtggggaagttaaggaacaaggaatccagcctggggtttcctgaaggtgcaggagggaggaaggagaggtggactctgcccttctgaagcgccagctacgggaagacaagcagtgttggtttgtatgggcggggcagatgcaaggtgggc

SEQ ID NO: 26613 - DNA, 187 bp, Homo sapiens; identical to SEQ ID NO: 9363
  chr19:30155060-30155247
  hypo

SEQ ID NO: 26614 - DNA, 653 bp, Homo sapiens
  chr19:30713408-30714061
  hyper
cgcgccgggaggtctccccggggacccccactcagcttgctcaggtcctggaggcatgcagagggcgtcggcgccgacagggggagccggagagccccctgcccggccgtctgcggggctcaggcggggcttggcctccgatgagcgcgctgtctctgcccggtgggtcccaccccgcccggccacgcaaagccgtggcagccccctcgcggcagcgcgccccaggcgaagcaccccgggccaccgggagcgcggccctcccgagacgcacgggctccgaggccgcagaagccttgggcctccaggcctggaaggggctcccctggcctggaggccatgggcccggcccagaccggccagacaccgccagggacccccagaacgacgccaggacgcgcgccgggctccgtgcctcccacggcccaggcgaggccggcggctcgagggttaaaaggcgacccccattctgtaggggagaaagtgccttttctccaagtccatatggtcacttcctttcgacctgctcggccctgctcgcctctttgtccgctctgtcacttataaagaatcacttgacttacaataacaggttcaaaagacgacggagtataatcagttgatccacgaagaattggaataaagaacaccccacc

SEQ ID NO: 26615 - DNA, 3424 bp, Homo sapiens
  chr19:30716181-30719605
  binary
cgcaagacctatctagttgctgtgaattatgccagggcgacaatggagagcgtttttaatggtacaatgcatttcacctaccagatagggggaggccgagccggggatggggatgtctgctggggctgggtgatgagtatcaatgaacggggcgattctgaaaagaggctgatgaaaatcgagcccgccctgccccggctgggctgggaacagttcgcagggctctgccgagtgggcgagtgaggcgcgcgagcagggcgcccgtcccccctcagccccggaaaatgatcaagtcaatcgtgtgggcatgtttcattattcattgaacacaatcttttacaacgctccgtttacgtgcccgagtttgctcctgacgcccgcgtttcaatgtttaaggtaaggaaaacaaaggtgggggggggatcgcggggcgcggcgcggtgcggggggcgcggcgcgggggggcggcggcgggtgggggggcagcttcggcgtccgggaggtggcaaagtgagtttggactcttggcgcggcccccccgtcccctccccctccccatctcggcgaggcctgccgcccggttccttctcgccccatcgcgattaaaaaatacggtctaattaaatatccgtggctgtgacgttggcgagagaagctgtcagcgggtggggggtggggggaaagaagaggaaaaccgagccggcggctgcggccgggcatcgtatggcgctagagaacttcggcggcgagcgggacctgcgcctgggccgccgcctccccgcccgcggtcccgggaccgttactttgaaaaggagtcccgaggcctggcgcccggcgcgcgatcgggaccccgcgtccagctccggggacccggccggcgccccccacccgcgagcggcccgcgagccactctcaggccccgggaaactttcaagagggtctggggggtggggggagtaaaaaggggagggggtaggctggggccgcggaaacttctgctcaagtgactttccccattttctcctctgcctgggacgggggttcgccttgcgctctttctctggtccgcgctcactgcggggttccggcccctccgcccgtggagagagggtaatttgcaaccttttttttttttcaattaaagttagctgatgcttacaatgtgtcaaacttgcgggcgccgagagccgctgagatctgccattttgtgattgcatcggcctcctgtgccccgggagcctggccaggctgaggccggagagttggtttcagggctgaggtgccagggtccgaacccgcgaccccaggaaaggccgtggcgcctgcaagcgcaggcggcgcccgcagcacctgccccagccgggcctcggcctgggggcccagccgggggccaaagaggaaataaataaataaataagtaacaggttatggagggaaaagagccggccagtcccaggctggagaaatgaggccaatcagagcgaggaagtgcgggcgtgggggctctggaaggcagaggagaggcagggcttgcgcggcgtctgggaagagtgcaatctggggggacgcctcccgtccccccagcgcagatgcatgactggggtaggaatgatctttgctgataagcctttttctgtttgcttcaagacattatttttcgaagatgaattgaggaaaacagtcgtaggcgagactcggggtgtattttaggcaaaaaaaaaaaagttagggttgggggagagctttcctttgatgagtaggaaagtgtccagatctcgacgcgcccatctgttgcagttttgcaaataatttaaaatatagatatctccatatagacggatgtatgtgaagtggaggaaggtcgaaacgcggggaagttagggaaaaagaaagaaaaagggctgggcagagagagacctgtgttgctcactcttcactctgcggagtgaactccggcagggctttctttggggacaggtggaaagttaagtcccccccttttcacttctgtattgtgagtggttcctactgtgtgcctgttggagaacatgtccaccgttcccgagttaggtggaggattggaatgttggggggcggggagcgttggagttgaggacgcagtggccaggggctgggggccgagaaagagcagggcggggtctcagccccgcgtgcgggtggcagcggcggccgggttttgtttgccagatattgttatgtctaacgggtgcctcgccggagacgtgatttgtcagccgccttcgttttcactttagcagaaaatacggcagctgcgaggtgtcccggcctgcggggctcgggcacccggtgcgtcctgggggctgggtcgtgtgcgcgggtgggagccggcggccggcggggccggggcgaggggcgagcgggaggggcggagtgagcgagcgcgcggtacggccctccggttcctcctgcgccttctcccggcagccgccgccgccgccgccgccgctgtgcaatttagcagaaatccgacaggggccgcgtttgctgagcgcatccggcggccgggcagcccgagcgggccgccgggcctggtcggccggtgtagaggcgcggagggggccggcggaggggaccggcggggatgggcgcgggaagcacgcctgaccagagcacgcgccgttccccaaccctggtgtccccggcgagttgggcagccccgcgcgccctgaccttgacgccccagtctccagccagggcttaggtgaacttggggtggggtgtgcgtgcgtgcgtgtgtatgtgcgtgcgtgtgtgtgtgtggaaggggtggtgagactgggaacgcgctgttttctttcccagtttgatactagcaactggatttttactttaagaccggctttgctctctgctggggttgggagggggggcgatcttttcccatcactcacatctttgttcattgttcactgagtggaaggcaggcgacttaaagagacgaaagagaggaaaaaggggtgagagacggagagaggaaaaagaggggggcggccagaagagggaaggagaggcgtggggacagggcccccgcccccgccggggtcgggtttgatggtgaaatagtaaacccacgcacggagggtcgccaggaaagtggacattaccgctttaattaacttcgagatgctccggcggcgggacctggcgtagccgtgacgcgcccccataaatctgcccggcccggggctgctccgagaactcgtacagtagcggcgtcagatccatcccgcgcctcccagtccggagtccatttgcataattggattttttttttttgcctccttctttctccctgaaacttgtttgaaaacccaagtgaaaaccgcgacgatctgcacactcaaaagcaagtgccaagtaagtgccctgcggtggcctcggc

SEQ ID NO: 26616 - DNA, 114 bp, Homo sapiens; identical to SEQ ID NO: 24151
  chr19:32835126-32835240
  hypo

SEQ ID NO: 26617 - DNA, 1016 bp, Homo sapiens; identical to SEQ ID NO: 9365
  chr19:3490855-3491871
  hypo

SEQ ID NO: 26618 - DNA, 52 bp, Homo sapiens; identical to SEQ ID NO: 9366
  chr19:34963061-34963113
  hypo

SEQ ID NO: 26619 - DNA, 522 bp, Homo sapiens; identical to SEQ ID NO: 24157
  chr19:35615970-35616492
  hypo

SEQ ID NO: 26620 - DNA, 147 bp, Homo sapiens
  chr19:3571360-3571507
  hypo
cgtgagccactgcgcccggcccatggcggataatattctgttgtaaggatatatcccgtcatcgatccatgcatcattagcagacgtttgagttgttttcactttttggctattatgaatcacgctgctaccgacgcttgtgtacac

SEQ ID NO: 26621 - DNA, 494 bp, Homo sapiens
  chr19:3576049-3576543
  hypo
cgtggggcacagtcccgtgggttgggcgggggaaagatacatagccagacaggagtgaagggggctcactcggtacagcgatgggggatgcccagacgcggggcactcaagtggggagctggagccggctgagcagcgctgacctagggtgcagggcgtggtccctggaggcctgggaggctgaccctgcccttcccctcccccgccagaagactcgagctctgggctcatgaacactctcctgaatggacacaaggtaagcgaccttcttcctctcaaagcacctgggggagaaaggtctggaggcttctagaaccctgagtcagagccagtgctcgcccagatgtgtgcaagcaggggcggtgccactgcaccgtgggatcgctgttgattgtactcccaccggggtgtcccaggagaccctcctaggcttggggcacacccagagagcgtggctgcctcctaccaccagtaaattgccaccttgtcccttc

SEQ ID NO: 26622 - DNA, 566 bp, Homo sapiens; identical to SEQ ID NO: 9369
  chr19:36592549-36593115
  hypo

SEQ ID NO: 26623 - DNA, 856 bp, Homo sapiens; identical to SEQ ID NO: 22832
  chr19:36909065-36909921
  binary

SEQ ID NO: 26624 - DNA, 209 bp, Homo sapiens; identical to SEQ ID NO: 9370
  chr19:36980725-36980934
  hyper

SEQ ID NO: 26625 - DNA, 742 bp, Homo sapiens; identical to SEQ ID NO: 23148
  chr19:37095957-37096699
  hyper

SEQ ID NO: 26626 - DNA, 877 bp, Homo sapiens
  chr19:37157317-37158194
  hyper
cgtaaataaatgagatttacacaaatagccattcacaatcatggtcacagtcacctacaaaccccatttacacaaatgatcaggcacacaatcacactgtcactaaagcacacccacgcaccaggtcgctgtcccaacagtaacacacagcccaaagagaaaccctacttcctcacgcattcaaaacacacccacctaagggctgatcccgcactcagaggcctaaaactatagacattcccttccgcggcactggtgagccaggatttcttaccttcagcattctcagggaaggctctggtccaagctctgattcggattccaagcgaagccacacgcccagctcttccttctccaccggcccgggacatccttacctgcctctacccggagaccattcctgcgaggctcctaccggaagtagctgtggacagcagtgtcctctgggaaatgcagtccgaggggagagcgcctggggtggagcgggtgtgttccgccgggctccgggatgcacttgcgcagtttcacccgaggctggagtgacgccaacctgttaatgttcgttttcggattctggacttcgggttccgctgaggacggatttcggaataggcacagtggctgccccgaacccctcaaggcggcctccgcgggctgtggctgaagataattttcggcgggcgcggactaacccggcttccctttgtggagttgtggtgagaaaggtgttttgttgtgcgcgtgtccgaaggtgactccggaggagaaggtggatatgaactgacggtgagggtgtagcgcgtgagatttgtatgtgaaacgatttaaaaaaaaattttttttttggccgggcgcggtggctcacgccaaggcgggc

SEQ ID NO: 26627 - DNA, 1071 bp, Homo sapiens
  chr19:37263336-37264407
  binary
cgcacacaaggtactgcacagacacgcaaagtcacacacccaccccgggacacgcagtccaaccacacagtcaccggttcttcacatccgcacgcacaacgagggtcgtccaggacacacacacccactccgggcgcgcacagtcacaagcgcccacctgatcacccagagtcagcaccacacagccacagtcacagaccacggagacccacggcagccatcgcgatcacacacgcaaactcctctcctcagccctccacacacaaaaggaccggagccggattcctcaccctcagcattctctggttccgctcggggccagcctagccaagttcctcaggactccaaggcgcggcggcagctaaatcggcacagcaaacggtcccgccacctggctaagaggaagccaaaatctcgcgagacgtggcgtcggcctgcgggatcctctgggaaatgtagtccagagcccgactgcgggcttccctatgcctctcatttccaagcctggcttgtttccttttaccgctcctctccaacgaggatcgcagagccctcatgccgagcggctcgctatggggccggctcgcccgctagagtggtcaggcctgattatccctggcagctctgttatctggggtaagacacaggaaaacgtgcttccggttctcggcggaagtagccccgaacggtagaaccgatgggaaatgtagtccagggcagaaaagcggtcaacccagccacgatgcgagccaaaggattcttggctccaagcctggtcctggctgttagtttggaactcatgcacccagatgctaactcgccctcagaatgcagaggggatgaaacactgaccggacaattcaatctgtatatgggtgagtccagggctcagtctgcattgcgcggaaaatgaaggtgaaggtggaggtgggacctgatggtctcgtcccggatagggttgaagaagtgggagaaaaggaatcaaaatcgtggatgggataagattgtgcgcgaatgctctctgggagcggatcgtggccgacgagggcccgaagatgctgccttgtgatc

SEQ ID NO: 26628 - DNA, 604 bp, Homo sapiens; identical to SEQ ID NO: 23149
  chr19:37288206-37288810
  hyper

SEQ ID NO: 26629 - DNA, 190 bp, Homo sapiens
  chr19:37328817-37329007
  hyper
cgaaggactatgcctgtcactcaacgcaaagctcaattctttgtttttggccccatagcggctgctatcaccacctttacgaacgtggtcacgcacaacgcgacgcagtcataatcacgtacatacagtcacatttaaatagtccattagggtcacacacagcgcctgtcaacgtcgtgtgcgcgtgcgc

SEQ ID NO: 26630 - DNA, 523 bp, Homo sapiens; identical to SEQ ID NO: 23151
  chr19:37340738-37341261
  hyper

SEQ ID NO: 26631 - DNA, 847 bp, Homo sapiens; identical to SEQ ID NO: 23152
  chr19:37341484-37342331
  hyper

SEQ ID NO: 26632 - DNA, 1029 bp, Homo sapiens
  chr19:37406731-37407760
  hyper
cgtgatcctcctgcctcggcctcccaaacacaacctccacctttcaggccgctccgcccgcaggggcccaaggcgccagctccccatcggtcttcggtatcctcacctaagccctttccagtcatcccggatgggaacttgcagacctgagccagttctcctggggaccaaaatatctcacctcccagatctaagggtcccgccaggagtgacgaaacgttcgaattcctgcgagaaaagtggcaggccaccaggccctctgggaaatgtagtccagagcgggacccacgccgattcctgtcagctcctcgcctgggcccacccgaaacggctgctccctcaactctcaacatccagccgagcctcggagttgcgggtcgccgtagcgctgcgcaatggagatgagcctcccggggaacccggcccaagcctcaccctcacacaggaaagcagatgtgttctggccggaagttgagtggggccgcggggcctgctgggaggtgttgtcctcggaaacgtcgctggcgcggagggatggttcggcgctttaggcgtctgtcacagacctatctgcgggtcgccttcacccagcatctcagaaactgcgcgcgggatgaacattcgggtgtttccggcaggtgacgctgccgagtccccgcagcagggggcgagcaagggactcgcggttgacgggacacggatcctctaaggcccagagtgtcccgagtagcggcagtggggagtgctcagggtacgctaatggtgagtggttgcagttgatgggacaaaaaactgtgatgggagttagtgtgggtgtgtggttgtgtgtgtgagtgtgacggcacgaataatctgatggggtgattgtgatatttggttgcgcgggattatgatgaaatgtgtgatatgtgtgtgattatgattaaggctgtagcgagtgtgaacgtggcgaagtgtgcgtgattgtaatatgtctagtagttcttgtcttgagctggcttttctgtagcatttggcacagttggtaac

SEQ ID NO: 26633 - DNA, 742 bp, Homo sapiens; identical to SEQ ID NO: 22833
  chr19:37568994-37569736
  binary

SEQ ID NO: 26634 - DNA, 187 bp, Homo sapiens; identical to SEQ ID NO: 9377
  chr19:37708883-37709070
  hyper

SEQ ID NO: 26635 - DNA, 1004 bp, Homo sapiens
  chr19:37957588-37958592
  hyper
cgctggcacaaacgccaagtctcacacatctacacccacaagcacaccctaccttgtatccacagtttttcattcattcaagatcccactgtcatgcacgtttgcacgcaggttcatactgaaagataaaagggaaagcgcctccacgaaatccgcttacggacacgatcccggggccacactcagccagacgaatgtctggcaaatgacagtcacttcacgccagactctcacagtccttcacacgccactcccactgcctcagggaaccacaagcacaggcatcgccccgcccggcgtcctcctccaaagattggggcaccaggaccgcgggcccccactcccacccagcacaaagagtccggcgctcagagctagcggtttcccgaggactcaccaccaagcccgcggacacaggccccgattccacacttaacgctgccaaagtggcagagccggcgcgggctgggacagaggcggcactgaggccggcgctgtcggtggctgagagcgccacaagtctcggtccgttacaccaggggcgacgcttcccagaggcccccgcggctcacccgggcgggactggcttcactgtttgcgcgtcctgagaagcagaccacggtgttccagggctcacagctccgcgcaggggagctcagcctaggttttgcacgagcggcctcccgcgagcccagctctgagagattgggagcgcaacttggtgctgagaagaatcgaatcgttccgctgcttcctgcgccgaactacatttcccagaggccttcgcggccctacttccccgaccccacctgcaaaaaggcacttccttcttacagtcggctggagctgcaggttcgcaaggtccgtgaaggaagcccggctcagtgtgtttagttccgtctttttgggtctctacctgaggctagaatacagcggggtgaaggtggtgagagctccagggccagtgaaggccgggtcagctggagccttaaggtcctgacagc

SEQ ID NO: 26636 - DNA, 1035 bp, Homo sapiens
  chr19:37959780-37960815
  binary
cgctcccctcccaatttttttcgggtatccagcacaattctaggaattcgcctcccacccattttgagtagacgcgccactagcgcgttcccacgcacaaaccttttccctgcggccaacctgcgattctcaactccccgccctggttgctaagggaggcgcgcagagcgcttgtgcctgcgcacttccacaccagcccgtgtagtgtgacgctgggccccgtccctgtgaccgggccaggctcggagctgcagggaatccggactttcgggctctctggaaggccggggagaggccagtgtgggaggacctggtggggaggaggccgtgttacaaaccctgcgcggagctgcaccgctgctgccagacactgcgacgccgcgaccttttctactccggactacgtttcccagcggaccccgcgggagttgggccggcggcccctttgtgtcctccgggggcggaggcagctgaggcgcttctttccgggcccgtaagggctgggttccatccaactaagggtagcggtgagacccgagtgcagattccccgagccttcggggcaggaaggagatcttccaccagttctgttctgcaggtcgggagtgggctgaggagtggcgtgtgggtctccggaagctcgtcgcaggccatctgtgtgactccggtgcgagtggaggttggtaccgttcagtgcgaggctgtcaccccgtgtgcctgtccacgtcctgtgtgactgggtgcgaggaagtcaatggcaccgtggaatgtgaggctgtgagttgaggcgggagcgggcgactgttcgctgcaccttgttgggccgatacccgcggcttctttgtgactgggttgtgagattgtcgcttgtgatagataccctggtggctgagccttgccggtatgggaaagggtgcccgtgtgaggcagtccatacccatggcctctgactgtggcgtgggtaagacggtggttggcactgtagtttttcagactctgattatgtgggggattgagtgagagactgtgtgccac

SEQ ID NO: 26637 - DNA, 740 bp, Homo sapiens; identical to SEQ ID NO: 22835
  chr19:38182720-38183460
  binary

SEQ ID NO: 26638 - DNA, 907 bp, Homo sapiens; identical to SEQ ID NO: 22836
  chr19:38210032-38210939
  binary

SEQ ID NO: 26639 - DNA, 804 bp, Homo sapiens
  chr19:38701113-38701917
  hyper
cgccccccacccgtcgcccacatctcagtctctctcccagtgcccgtgtctagataccctcctgccctcccttagcgcctctctttccaccttatcgccaccgctgatttgccccacatccaggacacggagccccctggagatgtctgggtctgggatgacacctcctgacacccccgttccccaccccagcctcaggaggggccaacccaccgtcctcttcccagcccttcccttcccccggcccggctcccgcctccctcccggctgcgcccgctgcagctgcagcagcccgttgccagggcaaccacagctggctgggcgggagcccctccaccccatcccccttctcctcctttctggcaaagcagggcggagctgggacaaagccggggagaggcagggtgcaggcaggggaagaaggaggtggatggaggtaggggctggctggtcgcctcacccccaacaaggcccgtcgacccccggtcctccttcttggtgatgccccaaaccagacgggagaacgaggcagtcgtgggcagaggggtcaggcccagtttaatacacagaacaagttaattcacagcagaggcaggcaatagaggagactcggtgacaagtgagggggcactcctggattaggggacatccccccaaaacccaccacctcccccacctgcagtctcagtttcccttttttaaaacccgaacaacaaacacacacaaccacaagaaacaaccacgccccctcactcccccaaaatggccagcgaggggggcgggggccgccaggcctggcggggc

SEQ ID NO: 26640 - DNA, 792 bp, Homo sapiens
  chr19:38719834-38720626
  binary
cgagctttcagccccggccggggcaggcccggcacctccggagaccctgagggagagatggaggagagggaaacccctacccccactctgggtggggaaacggcctccgccacccccagcccgcgccgcattccttcactgacagcgacaaagaagaggcgcccccgcgaccctggaggggctcccgcccccaaccccagggggcgacagggggtggggacccccggggcaagggttcgcgctgggggcccccattcaactacggtccgcgcgctgcgtccccctcctcagccccagggcgggcgggggaagggctcctggtgggggggtctggacagggggcggggacggcagggacactcacgacttgagcgggttctgaatggcggtggccatggcccgctcggctgggccgcctccggcccggggcgccgctgccgccgcgcgcgggcccagcccggcctgcgccgcccgctctgccgcccagcgcgctacgatttcattcattcttggggctgcggcgcgagcggagcggggcgggccgggggcggggctcagccaatccccgcgcctcccagcgcacgacgggacgtggagtctaggggcgcgcggcggcgcccgagggcgcccctgcccggactacacgtcccagggggcgtcaggaggaccgcgctcccattggctgctggggatacagggaggggcggggctccccccagagcatctttcctccctccctgggagtgctcggtctccaactcgggatctccaccctccaggcaccgcgggcgc

SEQ ID NO: 26641 - DNA, 246 bp, Homo sapiens; identical to SEQ ID NO: 6520
  chr19:39277459-39277705
  hypo

SEQ ID NO: 26642 - DNA, 86 bp, Homo sapiens; identical to SEQ ID NO: 7107
  chr19:39289891-39289977
  hypo

SEQ ID NO: 26643 - DNA, 116 bp, Homo sapiens; identical to SEQ ID NO: 23558
  chr19:39329516-39329632
  hypo

SEQ ID NO: 26644 - DNA, 275 bp, Homo sapiens
  chr19:39329962-39330237
  hypo
cgtgtgtgatctatggatggctgtgtctacagtcacaaggtaaaatactccttcagctgggttacaacagagcagtgccggctctggagccaggcagtctggctctgagtcctgcttcacataaaggctatgtgaacctgggcgcgttatttaagccccgtcctccacttcccctgtccatctcattaaggattaatgtgagaaattacacaggtcactacatgtaaagcatctttaacagtgcctggtaactaacaacacttcacctgtgttac

SEQ ID NO: 26645 - DNA, 571 bp, Homo sapiens; identical to SEQ ID NO: 8246
  chr19:4094519-4095090
  hypo

SEQ ID NO: 26646 - DNA, 121 bp, Homo sapiens; identical to SEQ ID NO: 9389
  chr19:42498155-42498276
  hyper

SEQ ID NO: 26647 - DNA, 497 bp, Homo sapiens; identical to SEQ ID NO: 23157
  chr19:44488115-44488612
  hyper

SEQ ID NO: 26648 - DNA, 429 bp, Homo sapiens; identical to SEQ ID NO: 23158
  chr19:44529393-44529822
  hyper

SEQ ID NO: 26649 - DNA, 501 bp, Homo sapiens; identical to SEQ ID NO: 23159
  chr19:44711530-44712031
  hyper

SEQ ID NO: 26650 - DNA, 283 bp, Homo sapiens
  chr19:4555911-4556194
  hypo
cggcctggggaaaagccatggccagcggaggtcgggcgagcagaggcctggaggttggacctggggcgcagggagtctgaagactcacgctgtagttggcgcacaccgggttgaaggcgttggaaccgcacacaaagagcgtggactcgtcccgaaggagcagcacctttacgaagtttcgacactcgccctgaggtggggacaggaggaagcggggagcgcgatgtgggcgtggtcatggtgatgggcgtggccagaacctgagttgtgtgggtggagggcc

SEQ ID NO: 26651 - DNA, 84 bp, Homo sapiens; identical to SEQ ID NO: 9393
  chr19:45903713-45903797
  hypo

SEQ ID NO: 26652 - DNA, 186 bp, Homo sapiens
  chr19:45931075-45931261
  hyper
cggggcctctctgctccgccagaacccagcgggggcaggaccccctagaaggcggcccattccccgctcccgattcatttccttgaagcagaagtgcggtaaagggcccgccgcctgcgatcagtggaattctgaatcggttaacgttagttaagagcgaggggaaaaaattgccctgggttctac

SEQ ID NO: 26653 - DNA, 247 bp, Homo sapiens; identical to SEQ ID NO: 23160
  chr19:46929939-46930186
  hyper

SEQ ID NO: 26654 - DNA, 73 bp, Homo sapiens
  chr19:4725494-4725567
  hypo
cgcgcccgaccccaactacactgtaaaagagctttctgaaaagaaaaactgtgtgtgtatgtgtttaccttcc

SEQ ID NO: 26655 - DNA, 168 bp, Homo sapiens; identical to SEQ ID NO: 6522
  chr19:47482472-47482640
  hypo

SEQ ID NO: 26656 - DNA, 406 bp, Homo sapiens
  chr19:47523577-47523983
  binary
cgagtgtcgggtcaatcctgggggcgtcctggggcagaggctgcggcggctgcgtccggggctggggctcgcgcgccggggtcttcagggaggaagttgtggtcgtggggatgtggcggtccgaacacgtggcgccatcccgagaggctggggggatccctgggcaggacacaggatgggggtccctgccctctgccccctgcctccttagcccagccgggaaaacagggtgcagatccggggagtcagacaccggggatgggcttggggggcgggtcctcggggcagagggctccgggggctggggcgtgcgtgcctggcccgggaggcgcccgccccccgcccggcttgggcatgcttggcacgcagcgcgcgggccggttcgatccgtatgcgcgccgcgtgc

SEQ ID NO: 26657 - DNA, 196 bp, Homo sapiens; identical to SEQ ID NO: 9398
  chr19:49014625-49014821
  binary

SEQ ID NO: 26658 - DNA, 513 bp, Homo sapiens; identical to SEQ ID NO: 23561
  chr19:49971410-49971923
  hypo

SEQ ID NO: 26659 - DNA, 84 bp, Homo sapiens
  chr19:50030843-50030927
  hypo
cgcgcccggccttttttcttttctttcgttctttttgtttatttttgttttgttttgttttgtttggtatagaagtgttggaac

SEQ ID NO: 26660 - DNA, 712 bp, Homo sapiens; identical to SEQ ID NO: 22840
  chr19:50553779-50554491
  binary

SEQ ID NO: 26661 - DNA, 1280 bp, Homo sapiens
  chr19:51161233-51162513
  hyper
cgacacccgcagcccgaggaggattttacccacctggaggtgctgcaagccctggaggcccagttaccaggggccatggagagcgggcgcgtgagcagcatccgctttgagaacatgaacgtcatctgtgggactgctgggcgccggaaccggtgagtaagcggcgggggcggggcctggagcgagcgggaggggcggggcccggggcgaccgggtaagagcgtggttggttttagagcgctgagggacgtggccaagagtgaaagcatgaatgggcggggcccggggcgactagataagagcgtggttggtgtaagggtgctgaggggcgggccccggagccactagataagagcgtggttggtgtaagggtgttgtgaggcggggcgacagtggagtgacagcttgggggggcggggccaggagggactagataagagcgagattggtgcagagccactgaggggcggggccaagagtgagcgcggttggaggtaaggtccggtgagatcagagagaaggagggatctcgagtgagtaggggcccgagtttgagtgacccagtagtgaccgggatagaggtctgagcctggaaaggcagctgtgagggggtggaagagactgagcacatagtaggtgtggggccaggggtgatagggtggggacaggcctggagtgcctagggtagagcgcagcctgcagtcgccagtggagggtcgggcctttgggcggtttgagatggagcctcgacagacagtgattaggacgcagaaccaggctaagagagcgtaaggagcctagagcgacccaggcgagagggcagggctggaggggagtttagggacggagcgatggtccgctggaccagggcctgtaaacgactccagggaccaggcagggactcttcgacgatcaaagccagggctgaaacgacctgcgagttccttttccgtccccaccccccttacaggtggctcatcgcggtcacggacttccagacgcgctcgcgcttgctgcgctccgggctcagtccccgcgggcttgcgcaccagatcgtgcgccacgacgacctcctgctgggcgactaccgcctgcacctgcgccgctccctggtccggcggcgcatgctcgaggccctgggggcggagccgaacgaggaggcctgacgcccgggcgggccccggcagcgcttgcgcaccgccccgcgggctggggccacccacccggagccccggaggacagggggcgttgccttcccaggaaggaggcggggccggctc

SEQ ID NO: 26662 - DNA, 328 bp, Homo sapiens
  chr19:51197452-51197780
  hyper
cgcacacacacgcacgcggctgcaggcagtcacacacacgcacatcgacacagccacactgacacacgcaccgtcgcacagtgacacgcagcggaaaaagaggaggggaggggaagccgggggcgggatgcgtgtgtgatggaggggggatgactgtgaatgggagagaggggtatgaatggggggacttgccaacaccgtgaagaggtgtggggatgtggggatcagagggacaggggcctgggatgtaggcggatgcgggtaagccacggtggctccccacagggagggctccggggaatgggggcgctaagggcggcagaaaggc

SEQ ID NO: 26663 - DNA, 244 bp, Homo sapiens
  chr19:51925116-51925360
  hyper
cgcaggtgcggcgtgaggaccgcgtcctgaggagggaggggcgagggccagggtcctggagaggatggagagcccacgagtggctgcagctgagaccccgagggagcccaggaggttttgtcggaagaagggcgatctggaccttccctgaccagcgtctttgtgtcctttgagctccggacctggtcctgggttcctcccacctcgggctgtgctgcagttcaggacgccgcccccagggggc

SEQ ID NO: 26664 - DNA, 79 bp, Homo sapiens
  chr19:52077623-52077702
  hypo
cgttcttaaaagaaaaattgaaacatacaagtttaggtggggcacagtggctcatgcactttgggaggccgaggcgggc

SEQ ID NO: 26665 - DNA, 810 bp, Homo sapiens; identical to SEQ ID NO: 22841
  chr19:52531282-52532092
  binary

SEQ ID NO: 26666 - DNA, 675 bp, Homo sapiens; identical to SEQ ID NO: 23162
  chr19:52839404-52840079
  hyper

SEQ ID NO: 26667 - DNA, 807 bp, Homo sapiens
  chr19:53030704-53031511
  binary
cgctctcgcctccacaacctaaaaacagagacgctaggagagaggctgaaagacgcgcaagtcccgccccggccccgccccggccccgccctctgccggttctaaagggcaaggtctcagcgcctcgcgccccgccgctacctcgcccaggccccgcccacctcctcccacctcccgcccaggcctggcttccgtcctgcgcgcggagattaacgcaaacccggaagcggatcgggtggagtgaaggtcacgtcgccatggtgagttttgctctgtgttgcattaagtctccgcttcccaggtccccgccgcttctgtccctgggacgtggggtccccacagacctggaaattctcgcccgtcttccttcgcccagagcaaattgagacagcccagtgagaggccgggtgtcgcttcctttcgggtttaaagtcgtctggaggctggtcccgtcccgggtctgtctgctatagggcaatgtatacactttctattgcgtagtttttctgctcaaaaccttcttctgactcttccctcctcgcgctatttaaagtcttcacccacgaggtggattcttgcccggggcgcacctcccagccacccctcgtcggcccctggagcgtcgcgccgcagccccagtcccagggaggccgcgtcctctgcctggtcctgggatcttgcagaccccatccttctcccaaggcgccgtcccccctcctcccacctccctactcgtgccagagcctgcggctccccaggtctctcctccgcagtcaccgcttccattgaacccacactgggaaggac

SEQ ID NO: 26668 - DNA, 892 bp, Homo sapiens; identical to SEQ ID NO: 23165
  chr19:53140914-53141806
  hyper

SEQ ID NO: 26669 - DNA, 833 bp, Homo sapiens; identical to SEQ ID NO: 22842
  chr19:53237625-53238458
  binary

SEQ ID NO: 26670 - DNA, 721 bp, Homo sapiens
  chr19:53465713-53466434
  hyper
cggccaccctggggctgcggggctgcaacgctgcgctccaggggccgactagagcgaggctgggaagcgctcttgcccagggcaagaatccagctccgggtgaggacttgaaacagcgcgaggcgggaggacgcgtcagaaagggttttgctaaggaaagtttcgcgacaggaggtgtctgcacggccccactgcagaaagaccggggacgggaccagcctcagggcaactttaaactcaaaaggaagcgactcacggactctcacccggacgtttcaatttgctctgggttgagaaaagaggggccggaacctgcaggtctgtggggaccccacgtcccctatatagcagcaccagacaactaggaaacgcacacgccgccgtgcaactttcagtccacgccatccgcttccgggtctgtgccaatcggcgcaggacagaagcgggacctgggccagatccccgagaggtgggcggggcctgggcgaggccggggcggggtgcaaaggacaaggggcccggcgcggaagagaagagtcttgggctgggaggagtccgcgggggcgggaaaggggcggggcctgagcttttctccatctcgctctccgcgcctctgttttcaaggttttagaggtgaaacccgccagtgaggctggagcagctcagcagtcagggaaatagtacctccctgagaagtcgccgtgtggcggtaattggatcc

SEQ ID NO: 26671 - DNA, 1149 bp, Homo sapiens; identical to SEQ ID NO: 22844
  chr19:53606073-53607222
  binary

SEQ ID NO: 26672 - DNA, 716 bp, Homo sapiens
  chr19:53696029-53696745
  binary
cgggcacctccccaacgcgggctcaggggaaacggtgactgcgaaggggaggcctagggagcagcagggcccggcacgaggaggagggaggtggggggcgacggcgccttaggagaggggtggggtatgcaggatcccaggaccaggcagaggcgcggcctccccgggactggggctgcggcgctaacgctccagtagctgactagggcgaggttaggggacggtaaaatcctgcacccacttcgcagatgaggacttcacagggcgcaggtcagtaaagggttttaagcaggaaacggcgcaggaaaggaggtgtctgcatggtctgaaggccgaaagaccgcgggcaggaccagcctgtgtgattttaacccaaagcgatgcgacccccagagtctcgcggcaaagtctgaatttacatggaatggagggagccgtgcggggactttaagggctatacgaacccccggacatcgggtacggaggagcaggggactccgaaacgcaggtttaatctagatagagggaaactcacgcggcgactaacagccttcactccaagagatctgcttccgggtttgcaagaaactgcccgcgcagtaggcaaaggggcgggttgcggtggggaaaggccaggcgttgggagggactgagagcatagggtgggcggggccggggcggggcctgaaccctggaggcggaggttgcaatgagcc

SEQ ID NO: 26673 - DNA, 605 bp, Homo sapiens
  chr19:53700110-53700715
  hyper
cgcaggctcccacccgccttccttaggtccctcccggccccgccccctgcctgtccaggccccgccccacccttcgcgttttctccccagcccactccctgtgccggtcacgccccgcctaggccccgcccctaggccacctcagtcccctccggccccgccccctgccggtctctccctggccaggccccgccccttccccgcccccagaccgcccagtctccgctgcgagcggttttctgtagacccggaagcggatcgcggggagtgaaggctgcgccgccgagcctgagtttcgctctctctagattaaatctgcgcttcgcagtcccccttcttccatcccccgggtctggaggggtccctacagatcttaaaatgaccacaccgcgccctccaccccaggtaaattctgacgttgctgtgagaatgcggagatcgctttccctttgggttaaagtcgctctaagcctacttcctgaatctggtctttctgctttgcgctaggtaaacatggcctttcgtgtcttttgctgcctaaaatcctttaccgatttttcttcccgccacgcgggagggcacttttttttttaagacggagtctc

SEQ ID NO: 26674 - DNA, 820 bp, Homo sapiens
  chr19:53868337-53869157
  hyper
cgaggaagggagccctgcgggagggggtgttactttgtcgcccaggctggcctggacccccaggttcagcgatcctcccgccctgcttcctgagtagatgggacctcaggctcccgcgcccgcgtccgcatccttgctgtgtttatccggcaggtggtgacctcactcctcgctggcctgagcactccgtccagcatcccaggcggtggctttagggaagtctctgcagctgagcacagggtggactctccctccggagtgaatggagaatagaaagggagaggatttctattctattctctgggccgtcagcatgacattgtaagttctgcccaagcagggctttgcatttcacattctactttgcatccgcgtttcagacaattccagggcttttgaatcatggatcggccttcctggccatctcgcctccaaaacccaaaaacagaggcggtgggagggaggctgagagacgcacagatcccgccccagcccagccccgccccgccctctgccggtactaaagggcaaggtctctccgcctctacccctacctggcccaggccccgcccacctcctcgcaggccccgcccaggcctggcttctgtccttccccgctcagacgcgcgcaaacccggaagcagatcgcgtggagtgaaggtccctcagcggcgcgtgagtttcgctccatcttgtatgaagtctgctcttcccaggtccccggcgcttctgtccctgggacgtggggtccctacagacctggaaattctcacccgtcttccttcgcccagagcaaattgagacgtccccgtgagagccc

SEQ ID NO: 26675 - DNA, 578 bp, Homo sapiens; identical to SEQ ID NO: 9419
  chr19:54385484-54386062
  binary

SEQ ID NO: 26676 - DNA, 424 bp, Homo sapiens
  chr19:54409948-54410372
  hyper
cgtctcccacagtgtggccgcagcggcgagaactttgacaagttcttcacgcgggcggcgccagcgctgacccctccagaccgcctagtcctggccagcatcgaccaggccgatttccagggcttcacctacgtgaaccccgacttcgtgcacccggatgcccgcagccccaccagcccagtgcctgtgcccgtcatgtaatctcacccgccgccactaggtgtccccaacgtcccctccgccgtgccggcggcagccccacttcacccccaacttcaccaccccctgtcccattctagatcctgcaccccagcattccagctctgcccccgcgggttctagacgcccctcccaagcgttcctggccttctgaactccatacagcctctacagccgtcccgcgttcaagacttgagcggagccc

SEQ ID NO: 26677 - DNA, 793 bp, Homo sapiens
  chr19:54411124-54411917
  binary
cgtggacagtgcacagcgagagaggggcacggagatcactgagagtgccaggtggcgacccccgcgcagagacccagcgcgtccgtgttcaccagagcagccacgcaagctcacatgcacccccaggctcagacaccggggagaagtccttcccaagcggggagatcacagtctggcctcttcttgagagacctagagacctgatcagaggaagagacccccacgccagagcaaccaaaaacagccagaacccgagagcctaggaatcggcgacggaggcacacggcaggcagacgcgccttctgggcctctttcccttgacccacttgagagtctggggagtgccggggaccgtgcagatggactacatttccccgcaggcctcgcggcagacccttcccccaagtgcggctccttgccgccagggctgatgggaaatgtagtctccggtcagggccagaccagtggagcggtgtgccttgtctgtgtgtttggaggggactgagccccaaagcttcgcagtcttccttgcggacccgggcacgtcttcttccctgcagtctcctgggtttccatgacccggtccgggtggatgctggggctgcccctctctccctcatcaccgccgcgacacccccatccagtgcccgcaggccccagcccccgctccgaccctcggcgggcggcctgcccctttaagagtggccccgctgacatcacggcggggggggggggtggcccggctcctggctccgcggcggctgcaggacccgactccgctctgcgcccgccc

SEQ ID NO: 26678 - DNA, 581 bp, Homo sapiens
  chr19:54412564-54413145
  binary
cggctccgtccgccgagtgaggccgcggccgcggggggtggggggtgggaggccgggagggggccgggacgccgggctccggggcgggggcggggggcgcgggcaccggcgaccccggtggcggcggcggcggccgggggaagcctcggggccggtcatgcggctgcggggcccgcggcccggagcgtccgcccagccctgagcgaggtgagcgctagcggagggtcctgggaggaagaaggggcgcccctcgaggtggctgcgagccgggtttggggcaacaagggacccgagtggctccaggggtggtgagatcctggcggtcgggacgcccgaattcgagcggctatgggggatgcagggacacctgggcctggcgatcccggaggacggggtccgagggtcccggagtgggaaactgcactcctcgcgtccgagtcgcagcgagcgtgggctggggagggcagaggccgggtccctgaggaaggcgaggtacggggcgagggcggaggacccaggcccggccagagcaggatgtgggtctggaaaggggtcccagaaagggggagttacggtctccc

SEQ ID NO: 26679 - DNA, 1134 bp, Homo sapiens
  chr19:55690206-55691340
  hyper
cgacccgggatcccagccggattttccagcccgcctgcccgagtacacccgtccgaatcccgcccctcggaatcctggccaggctttctctctgctcggccccccacccccgggtcttgctcacctgggccgtggctgatgcgactggagtcgggaggcgtgtcgggcgatggaggccccggggttgggggctccgggaacatggtggcggggtcctggagtcttttctgcagagacactcaagcaccctagtcccccattcccaccccagacgtcctttgagccccacgcacaacaaagaactccaactcccatgaggcctttgcgcgaacagccgcgcagaaaccggacagccaccgcgagtcatgctgggagttgtagtatcagcctccccgcacttgagagggggtgtccaggacctagttccatcctaaagggataccctcttcctccacggccccacaggcatcccgctgacttctgcctcgtcctcgcccctccgcagggtctgaaccggaagcgggcgaaggcagacgtgggaaccagcagaccgcgttgcccagagcaacagccgggctcctctcaagcggggtgagagcaaagctggttgcccgggcaacgggttgttgccaggacaacgggcggggctgacgcacagacgcggagtcccggcggggcaggctcgctccggggcccaccggtgcctgggaaccccccaatagcccgactgggatcctgaggtcccgcgaggtggggagcgggcagcctgtggtccgagcgcccacagccgactgctccctccgcacctggtcctgggagctgagacgcaggttccctcttccctctccccaattttgctggagggcgggtcgggggctgcccggtgcctgtgctgagccccctcatccttcttggcctgttggtctctccacgcatccgtgctgctctcgtgaccgcctcggtctccacgctgcctcttgaccccacataggcgtcttccctgtgtctgcctccccaacccgcctgtctctcttccctatcgcctggcctctgtctccagggtctctccctctcccctccgcctgcgccccactccccgccctcggctctttgtcttctccatacctgtctcgc

SEQ ID NO: 26680 - DNA, 431 bp, Homo sapiens
  chr19:55952665-55953096
  hyper
cgtacactccagtctcacgcgcagcccgcataatttaaaaaatggacagatggcatcacgcccgagctcaggaccctgcagtggccccatcacacttaggataaacccgggcccgcctacttctcctcacctcctgctgcccaccgccgccagctgcacgggcgcttccctgccctgcaggccaccgagggcctttgcacgcggttcccctgcccaaaacctctcgcccacagatctctgcgtggttcgctccctcccttcgggtctccgttcagaggccttttcggatcacttcctctaatccagcgccctctctctcaacactttccgctgattttcttcacagcagtcatctaaaattacactgcacatgcttacggactgggccactgatagttaatgagcccttaccgtgtgccaggaccctgcac

SEQ ID NO: 26681 - DNA, 134 bp, Homo sapiens; identical to SEQ ID NO: 6067
  chr19:56112791-56112925
  binary

SEQ ID NO: 26682 - DNA, 171 bp, Homo sapiens; identical to SEQ ID NO: 6525
  chr19:56807013-56807184
  hypo

SEQ ID NO: 26683 - DNA, 600 bp, Homo sapiens; identical to SEQ ID NO: 22846
  chr19:56879394-56879994
  binary

SEQ ID NO: 26684 - DNA, 828 bp, Homo sapiens; identical to SEQ ID NO: 22847
  chr19:56904526-56905354
  binary

SEQ ID NO: 26685 - DNA, 806 bp, Homo sapiens; identical to SEQ ID NO: 22848
  chr19:56915147-56915953
  binary

SEQ ID NO: 26686 - DNA, 935 bp, Homo sapiens
  chr19:57078365-57079300
  hyper
cgcgtaggccccgcccgcgccccaagccccgccctgtcatggttttcctctccagagggtagccgctacgccttaccgactgcgtttcagtgctgtcccactgctcctgcacaccccacgcctgcgaccctacccaccacggacaggcgctcctgcgagctggaagccagttctctgcgtcctgagcctggcagctgcatctgaacactcggagcctggcgatggcttccagaaacccctgcgccgtgggtcgcttcagtgaaggggcctgtacttcggcgacccagactccgggctgagaggcctcctaatccaaccaggaggaccaggagaggcccaaaaggggacacagggcagtgaccgccaggcttggagaggagccgctcctggcaaagccagcgccctatttctgaacgccgcctccgttccggactacacttcccaggggctattgcagcggaggacacgcccacttccggaaaggacccaaagccgggcgagtgcacgtcccgccggttgctgaggagaagggaggtctgggcggggcagcggccgaggctggactggggcgcggcgggggcggtgtcctggttcctgtgtgggcggcgggcgtgagcgtgcgcgtgtggcctggtggctgtgagtgcccatacgtggtgagcgtgcggtgctgtgctgaggaggggcgagcgcgcgcggggatggcggcccggtgtgtgactgtccggtgcgtggccgcgaatctgcgcctgcgtgcatggcccggcggcgtgcggaaggcggtgtgtgttggaatgagtgaagcactttaagtggccaagagcaggaaacccggccggaggaggcttaccccgttctcccctgtatcgactgcgtagagcccagtgtgggcaaagtcctagagcccggggaagttgcccgggcggggcagcctc

SEQ ID NO: 26687 - DNA, 378 bp, Homo sapiens
  chr19:57276614-57276992
  hyper
cgggtgccgggatgtagtgcgcctgcacgccgtctccagactacaactcccagaatgcgcggcgccccgagcgtatttccgcttccggtggcgttttagcgggagatccgagcgtctcggctggtggaaggggcgaggagctttgcagttgtgtgcgagtgtgtacaggtgagtttgtccgtacgcgtgattaagtgtgtgcgtgtgatcaagtgtgggggcgagtgttgcgtgagcaaacctgtgagagggtgagagtccgtccgtgtaggtgagggagctagcaagagtgtgagcgagtgcgaatgtccctacaagtgtgggcgcgtgatgtgtttgaaggtgtgtttgttcgagagggtgtgtgttggggtcaac

SEQ ID NO: 26688 - DNA, 538 bp, Homo sapiens
  chr19:57751590-57752128
  hyper
cggaggggaaataatgcaaggtggaagtcagagtccggagcctggtccagggtctctgcactggccctgaccctggcaaatgtccctgactcctggggctcgatttcctccggccaagaatggacggtctcgcgcttggtccctggcctccgagttgtgcccccaggacagaggcaggtctgagccgggctgtaggcccgctgcgacttttacaccgaggcctgccggctcaggatctgtcccctttgcaggtggtttgtagagaaaaactacattaactacaaggcattgccaggtgcgacggcgggccctggggccaatgatggtccaggacaggggcgtttcctgtgggttgcgaagcttggggcgggacttccggcatttggatgggacgtaatttgggagcgacggttccgtccacgccggctctagggagggggcggtgttccgtggccgcctccctggcggcgctggggaaatgagcaggtaggaggccgacagcgacctccgcgtctcggagcgaaccgtgagcctcccc

SEQ ID NO: 26689 - DNA, 834 bp, Homo sapiens; identical to SEQ ID NO: 23171
  chr19:57862401-57863235
  hyper

SEQ ID NO: 26690 - DNA, 883 bp, Homo sapiens; identical to SEQ ID NO: 23172
  chr19:57874412-57875295
  hyper

SEQ ID NO: 26691 - DNA, 793 bp, Homo sapiens
  chr19:5789558-5790351
  hypo
cgggcctcaggtgggccccagcgaagcggcaggtcacgccgtaggggcaccggccgaaggtctcgaagagcacgcagcgggggcccaggtcggccggcttggtctccaggtagcgccccacgtcgtgcagaaagcggcagcgatcaccgaagaaacacttagcagccgactcctgcgaggaaacagggaagcagtgagggaggacagggagaccccggggcagcccagcagccagggttcaaactctagatcacccctcctggctcttgtgtccctgagcaagtcaggcacctcaccgtgcctctgcatctccatttatacaatgagaacaatgacaagccctacaatgtatcccgaggagaatgaagacggaatggcatcagagcaagctcactgctcgttgctgaaggcccaggagctttctaacaattacccgctgccaggaaacacaccctgctcctgcctgccccggcaggaatgctcacgtggccgcacttgcctggattagggagggacacagcctgttcttgtcgtagttcgtgggcttcacatggggccggcccttgttttgtccccgggccctcttctgagtctgtagctgctccccgggctctgctgcctcctccgtctgcccgtccgccgtctgtccatcctccagtcggatccgcttagcctcaggctcagccagctcattgccagcagggtctcctacctcggtttcccggcaagtcttctcctgccctttggcttccaggaattggtgaaactgctccttggtggtgaggtatctgcc

SEQ ID NO: 26692 - DNA, 472 bp, Homo sapiens; identical to SEQ ID NO: 23173
  chr19:57998890-57999362
  hyper

SEQ ID NO: 26693 - DNA, 465 bp, Homo sapiens; identical to SEQ ID NO: 23174
  chr19:58011085-58011550
  hyper

SEQ ID NO: 26694 - DNA, 706 bp, Homo sapiens; identical to SEQ ID NO: 22850
  chr19:58038572-58039278
  binary

SEQ ID NO: 26695 - DNA, 957 bp, Homo sapiens
  chr19:58070535-58071492
  binary
cggaaacaacatcctgagcgacgtccccggaccgtgctgtgcactgagacggacacacacacatcacccagggagccgttcaagcttcctcaaccccgggggggggaagagtaaatatttctactttgcgcgcgcaaaaatgaaggacgaggacagtaacgggacttgttcaaggtcgcaggcccgagaaaggacatggttggaagagccacgaggaggactgcggtcgctcctctcacctgtgaggggttccgggaccctaaaagccctatttcataccacaacgccgcgcaccccagaaacggggacgctccccacgccaccgcgggcctgcattccggacccgggaccgcgcgacccccttctaggcctctaagaagcaacggcagggactgcactgaggacgaccctgaaacgccgtccttccgctcgtcgggcccgggacactgaggccgggtggccgcggggagccgagccagtctgctcacctgcgctgcgtccttcgtctccgccatccgaccgttggcaggacgaggccgcgtggggcagctcccacgggctcaaaaccctaccccgggtcctacaacggtgcggaggtgagccccagtcgccctaccatccttcccagcacagttctgagagcgcggaccaacacgccccaccacaaacgtccacgccagcgaggccggaagtcccgcccctgtgtcgcggtcgcctgccacgccttttcctgcgccggcccactgccttctaggtaatgtagtcttgtcccgtaagaggccaggcttggctctttttccttttttattatgcacaccatgtttctgtatatctcagatgatcttagcggagcaagtgtacacactggattgtaaatttttaaaacttcctattattcggatgcctcaacgtccctacaagcaggctgtgagcactcgcccaggcacccaggtaaac

SEQ ID NO: 26696 - DNA, 81 bp, Homo sapiens; identical to SEQ ID NO: 9437
  chr19:58090396-58090477
  hyper

SEQ ID NO: 26697 - DNA, 912 bp, Homo sapiens
  chr19:58094913-58095825
  hyper
cgtctcggccccgcctcccgcctctgggtacagtcaaagggctcaggtcagagcaggagcagccgggggcgcggcccccacgtggcctcccgggacacgtgcccacagcgcgacacctaagtcgctcctttcacagaatagccttggccccggcacggcctcgaacgccttgaccccgcaagggaggggcacgaggctcctttgctcccgcaggagcgtcgaatacgtatggaatacgcgtcggtgtggatctggcctcagcttcctgagcctgaatcaatgcttctaatcacgtgggcgctcagccgcgacgggaccacagaaatcgaccagcggcctgtttaaggagcgacaaggcccagccctctcctgcattgtggcgacgccatttccctgcgcccccagcgcggccgcttggcttttgtttgaggtgacgctgggcggcagcatccttccctcagccctggggaccagcggggactacagaacccagaaggttttgtctccagccgcagggatgctgagccaatccgcgctgagaaaagggtcgtttccgctttgggaccaatgggtcggggagggacttccggtatcacttcagtggcggtcatttttgcagcgcttgggtgcatccagaccgtcagagctttgggagcgctttgtttggcgacagtcggaaggcgcgaggggaggggtcctcccgctgaacagtgggggttctaagggtcggcggcggcggggttgacggctttgcctaggtccctccgcccgtagctgtcgggtcccggccccgctctgcccacagactccgatggctgcggccgcgctgagggccccgactcaggtgagcgctgcctctactgggcctcaccctccatccccaaattagtgccttcttgggtcactacggtc

SEQ ID NO: 26698 - DNA, 790 bp, Homo sapiens; identical to SEQ ID NO: 22851
  chr19:58125385-58126175
  binary

SEQ ID NO: 26699 - DNA, 797 bp, Homo sapiens; identical to SEQ ID NO: 23176
  chr19:58144201-58144998
  hyper

SEQ ID NO: 26700 - DNA, 787 bp, Homo sapiens
  chr19:58193143-58193930
  hyper
cgaagtcgccatttccctgcacggggcacagcacctcagaatacaagttcgcagaggtcaaagcagtggacacactccgaagagctccgtggagttttggaaactacattatccagagtgcagagcgcaaaacggcggcggagttgagccaatgacagcccaggatagcaacacttccgcgcacgcgcagcgcgacgggccggaacttccggcgtcctcctcgtggcggtcattttggcctctgtcctgtttgtccagcccgccagtttctgcagtggaggtcgcgactgagggacgggacagagaagtcgcgaaagtgggccagaggttctgcgacaccacctcgggtgagctgcgccaggcccgggatagggactgttgtgttcgaatgcccgccccggtcggccgccgctccccgcctagtccacggagctcaatggcggcagtcgcgctgagggactcggctcaggtgagttgtgcgtcctccgggtctcgcctacctcccccagcagaagccttaaggcccagtgagggatgcctgctcacagccctgcagcccaggccccagtaccctggacaagaaggcgcttgtggattggacccgtttgtgacgcccagtgtgtacggaaatgtgacgggcagttgactggcgcgtgcagaacttggagctgcgactaagctgggggggattcaggagcctggggtccgtctcgggtctgcaggaacatagagtgaggcagagttgcacctgacgaatttgacgattctgaggacactggcagccttc

SEQ ID NO: 26701 - DNA, 881 bp, Homo sapiens; identical to SEQ ID NO: 22852
  chr19:58238341-58239222
  binary

SEQ ID NO: 26702 - DNA, 627 bp, Homo sapiens; identical to SEQ ID NO: 6077
  chr19:58258088-58258715
  hyper

SEQ ID NO: 26703 - DNA, 781 bp, Homo sapiens; identical to SEQ ID NO: 23178
  chr19:58280766-58281547
  hyper

SEQ ID NO: 26704 - DNA, 911 bp, Homo sapiens
  chr19:58458447-58459358
  hyper
cgtagatttcataaccctttacagccaagggaaacgtagaaagagccaggcctcagagaagagcatctatggcggtattagatgggctcaagccaccccgtagccccatgcctggccttggagccgggtgccctcgcaatggctgtgtcacctctgtgccccagggctcagtggcgcctctcatcaggggctccttgccagtcgcgccctcccttccctagcacaccaggtgttggaaacgggagcccctccggcgagcccccgtgtcctgtcctgggcagcagggccgcgagcaagcgccctcgggggtgctaggactagcgtggggagggcggggaaggcccagaggacgcggcacatacctgggccggggccgtcagctcggccgccgccatctgactctgtgagcggagcggggccagagaggatgtccttattccgggccgggcctgggtaccctgggcgccgccgagcctcagccacgcctctgtgcagcggggaagactcctctcgcgccttctcagtcagtcacggatgatgctgacccagcgctccggggctttctaccaagtaatcagtccagacaaatgccaaaacgaccgccacaaggaggacaacggaagtcccgccgcgaccgcgcgtgcgcttacggaaacaccacctttcggaggcctcattggctgaaggtcgccgtcgcccaacgcaggccattctgggtaatgttcccacaggcgcacggcgggagagtgagggtcgcctccacctccttccggaagtaaaggccaaacccctgtagggggcgctgggaaatggacactccaggttggggcggaggcgaggcttcgttctttcttaaaggagacgtacccaggtttctaccgattgctgtctgccagtgtttgtttggagac

SEQ ID NO: 26705 - DNA, 1067 bp, Homo sapiens
  chr19:58694209-58695276
  binary
cgcgacttccgtcttccagtccccctccttccccaaaagttgcgtggactctagccccgcctcctacattctccccgccctccctgtccccgcccctccacccagatggacggccagttaggcccgccccctgcacttccggccctacccgcccttcctcttcccaagggacgtcataattaatcccgcccccaccgccacccaaccaagcatcacccattccagcacttccggcctgacccctgtccagcgcctttcctttctccagcttctgctctgccccaagagtggtcgccttcgtggcagggcacgactctctcccagctcgggtcgccgcccacattagtgtggggccctgcggcctagcgtccctcaccagaggcctccccttgcctagctggaccgccgagggacatcgacgagtatcctcctcctgctgtccccggcttcgcctgccgcccctaaccggccagtcaagatggccgccgctgggtgaggcaagctggcgcgccgcgggggcgtctgggagttgtagttcgggacggcgggctgacgcacttcgccgccggccgacgggcgccattgtgcggcgcgcgccgggtgagtgccgcgcgaaacctgcgtccgtcgggggctgcgctgggcgggtccagaaccgttagttgggggcgagcgcggcctctgcattttccgccgagctcgggtaccctgagccggccgtgcctgcagtcctcccgccgctctgtgggatggggtcggtgacccggaaccccgaggggagacagtgctttcggggcgccgcggtggagagaacagatcgcctccggaagcgtggggtctgggccagggaggcgatcccctccgatgcgcgggacagaggaggctcggtgtcctctcggggaggggaaaactggtcctatccagtcctgtgggagtcctatgactcactctgggcgttttccagtttgggtggacttgtcatttcccgctgagggagccgttcctgggcggaggctgcggtagctccccagcggacaccttaagcctctccctcccctcccaacttc

SEQ ID NO: 26706 - DNA, 1058 bp, Homo sapiens
  chr19:58951083-58952141
  binary
cggaatcccagcgggtgagggcctggggcacactccacttacctgcgccgggcccatcagcaacgctggcaaccccattagaacctgtgggctgggcagggccataacaggaggcccagggctagccctgccgctgggccgaaccctcacacttccgctgggtgacggtcgcactcaggacctgtcttcccaaatgcaaaatgcgcgcaaggcctctgggcaccgcagggacgaaggctgggtatggagaccctggagacgcgtggcgctggctccactttcgggaacaccttggctcataaaagcagagtaattagccgggcactatggtgcgtgtgaaggcgcggtgacggtccctgcacccactcccgtgccctggtgtggctccagaggcctgctgtagcccaacccaccagcagcaaaatgaggaccgcaatggcggcgccggaagtcccgcctctcaatgacagctcggacttgccactggtccgagctttcattggctcaaggatccccgccgtctatgacgctatttccctatgcccgtcacgctactgctaggtcgttgccaaggtgattgaggaatggcgtttattgcgtcgctgctcaggcaacgcaaactacattatccagaaggaccctcgcggtgcctcagggctggccattggcagccgaggagacaggcacttccgggcggagtgtaagacgctggccaatcacagcctggcagcgggacttccgtcgtcgtcctcggaccatcactttggcatttctcgattttgtctgcttctgaagggaccgcgttgtcaggcgagggacggaatcttggaggctccctgggcccatggaaacaggagcgaggaaggcacgagagtcggggaagttccgccttcttgacatacaagcgcccccaccgcggcgaatatcgcccctgagcccagtgttcgccccccacaacaccgcaccccccttccccaccctgtgccttagataaagccggcccagtgggaccctcaggttgcaccgcgcggaggtgtccgcggctctcgggagtcgtc

SEQ ID NO: 26707 - DNA, 746 bp, Homo sapiens; identical to SEQ ID NO: 24202
  chr19:813406-814152
  binary

SEQ ID NO: 26708 - DNA, 437 bp, Homo sapiens; identical to SEQ ID NO: 24203
  chr19:814406-814843
  binary

SEQ ID NO: 26709 - DNA, 119 bp, Homo sapiens; identical to SEQ ID NO: 9452
  chr19:874809-874928
  hypo

SEQ ID NO: 26710 - DNA, 1431 bp, Homo sapiens; identical to SEQ ID NO: 24205
  chr19:883424-884855
  hypo

SEQ ID NO: 26711 - DNA, 112 bp, Homo sapiens; identical to SEQ ID NO: 9455
  chr19:8942745-8942857
  hyper

SEQ ID NO: 26712 - DNA, 123 bp, Homo sapiens; identical to SEQ ID NO: 7160
  chr2:10047588-10047711
  hypo

SEQ ID NO: 26713 - DNA, 939 bp, Homo sapiens; identical to SEQ ID NO: 23179
  chr2:100938223-100939162
  hyper

SEQ ID NO: 26714 - DNA, 850 bp, Homo sapiens
  chr2:101033445-101034295
  binary
cgcaccgaagctgcacatgctccttcttccctgccttcctctgcatgctccttggacccaagctgaaccctttcttcctctctccatctacaattacaaacgcaaattctcagccaaggatgaaagaagtaaattgtaggctcgcacaatatcaataattccgcgggtcacagcatcccgcacaaggacgccttcttattgcataattaacgcgaggaaggctcttcccgctactcccgcgaactagggaggtcttcaagtcgccaaaacacaccgggatgtggctcgccaggacaaaacccgcgggttccccggtttttccgtgcgccccgcggcggggagaggggcccaggcgctgaaacccacccgcctgcgcgtccccgagctcaccctactggagcggcgctcgtccgggtccttaggctcctcccctggccctgggggcgccgcgcgggtcgggcttcgccgggcctgtgggcgaagcgcgcggggtcctgggagctcgggaggcccgccccaccttgccccgaggcctccgcgccgcggcccgtcgggtcccgggatgtggcggcggcggcagcggaagtaaggaagacgcccggcgcgctagaccggctttgggggccagaacgccggcaccgcctcacgcggccccctcgcgcctatccggccgtgcgcgccgcctgcccgcgcgcgtccccgccgccgtccccggccgtgcgcgttccagcgggtcgcggggagtggggaggggcgcggccgcgggaccccaggcccggatcccgagtctccctttctgccgctgcaaaagcgttctttctgaccgagacctgcggccggaacaagtccc

SEQ ID NO: 26715 - DNA, 177 bp, Homo sapiens
  chr2:10151694-10151871
  binary
cgggtcaggtggacagtattggcgtgcgtacgggcgggtcagatggacaggatcgcgtacgggcgggtcaggtggacagtattggcgtgcatacgggcaggtcagatggacaggatcgcgtacaggcgggtcaggtggacaggcatgcgtacaggcgggtcaggtggacaggcgtgc

SEQ ID NO: 26716 - DNA, 125 bp, Homo sapiens; identical to SEQ ID NO: 24211
  chr2:10151899-10152024
  binary

SEQ ID NO: 26717 - DNA, 166 bp, Homo sapiens; identical to SEQ ID NO: 7161
  chr2:10152421-10152587
  binary

SEQ ID NO: 26718 - DNA, 530 bp, Homo sapiens; identical to SEQ ID NO: 24213
  chr2:10152958-10153488
  hypo

SEQ ID NO: 26719 - DNA, 645 bp, Homo sapiens; identical to SEQ ID NO: 24214
  chr2:10153562-10154207
  hypo

SEQ ID NO: 26720 - DNA, 146 bp, Homo sapiens; identical to SEQ ID NO: 24215
  chr2:10154879-10155025
  hypo

SEQ ID NO: 26721 - DNA, 384 bp, Homo sapiens; identical to SEQ ID NO: 24217
  chr2:10156251-10156635
  hypo

SEQ ID NO: 26722 - DNA, 752 bp, Homo sapiens
  chr2:105460811-105461563
  binary
cgggatccgccacatgcccctcgaccctctcccaagagaaggaccctatttgacaaacaataacagagcagtaactcttgcaatctgcccacacctttgggggtggctggggagagggtgatacacgttcacacaccgcttgctaaatgcagtggcgagaggagggagcagcgtctacatgaagcgaacttttcaagcgcagagccctgactcccaggcgcgggggctcaccgggaggggcccgggcgagagagcgcgtgggtgcgtgagtgcctgtgtgcgcccgccctttgcttgctcggggtgtccgcctttgtcccccgccgcgggcctccacggtgggatctgcgcgcggccggtgggcagccctcgacccggggcgcgtccacagcgcccacccgcggcccccaaacacctcgagagcagatcttaggggttaaccaggcaccgacctgaggcgccctgcagctgccaaaagctcgaccggaaacctagaacatgggacccaattcatcggttttcctcgtccatacatgcatccatccatccctgcatgcgtacatgcatgcaatacaaatcccgggacgccggcacggagagctgcgcctcgcccttgctgcgggctgagagcgggtacccccccttccagctcttcctcctcccgcgcagccgcggccccctccccgaaggaagaacagctcaattacgaagaggagccaaggaacgaaatcccaggctcagaggcgcccgcc

SEQ ID NO: 26723 - DNA, 1245 bp, Homo sapiens
  chr2:105468467-105469712
  binary
cggcaggaaaggaaaacacggggtgctggcaccgactattcaaacgtctgcacctggagatctcagattgattcaatgaaatctgtgttccatcttttatatatacatatacgcatacgtaaatataaaaagcaacctttgggggccgcagaggaaaaaaatccgttctgtttggggtttggttaccaccgcctttggtatctataccttggcaataatggctttgctaaaacctacctacgatggtatctcacccggcaagcaggagctggacaagagcctacataaattctacgcgtctagtgttaatcttgagatcacgcgggggctgcctggctgcggctgggcaggagaactcctgctttcactgagttcacttaactgcgctcggcagaggcacgatacagcgggagagaagggcaggcccgttcacattttaatcggagcgcaccggcggccgctcctcggctgcgtcctgggctgccgctcgggctcgggactgccagatgcaggctctggctgggggcggcgggcgcaagcgggcgcacccgcagctaggggtgcggggtgcacgcacacgcacgctcattaagagccatgtatttattgaatgtccgagttgggttagttcattggaaatccccgaggagggctcaatttgcccttgttttcgttgccactttctcttttttcttggttcgctgaggttcctctgtgcagcgtttccgcttggccgcgtccccccaccccaccccaccccacccccgcttctctcgcctaccgggtgcactccccctcccatcccccttaactctttcagctgggttagagctgagaaagcatttgtcgccgccagccccatccaccacgcaaatccatctgagacagaaaggaaagaaaaaaaagcaccaccatgcctaagaatagagagcgagcaaacccccccaccgctaatcacacacacacacacacacacacacacacacacacacgaggaagcggtggagcagagaagggcgcggctagccgatcccggttctttcgcccggctcctgctgccacagggaattcctaaagccattggggtcgaatacacttacgatgaatctatgggggaaggtcggactgattgcttttcaaatacatcgcacggctccgctgaccggcaccctccaaactcacaagggcacgcacgctacttgcacgaatcccagaggagggaggagggaggaagggagggagagc

SEQ ID NO: 26724 - DNA, 1466 bp, Homo sapiens
  chr2:105469747-105471213
  binary
cggcggcagcgagcggtccgtctcgcacgcgcgggcaccgcgctggtcctgggctgcaggtttcccagatgatggcatccgagaacttaaacaaagggggctgccgccggcgcgcaacggctgcggaaagttgcggtggcggatttccaaggagcgtggccacgaccagagctcttggcgatgcgagcccccgcttcccacccccgccgatcagagaagggggccggctggtgaagggaagaggaaactttgaaaccactggggacacatctgtctataggtattagcttgaatggtacatccgtgccgcgcgctttacaaatctctggcggggcgggggtaagggggtgagcaacccgacgcgtactaggtggggtgggcaggttgctatttttcatgtttcccccttcgttttccttctgattctcttcccccctctcgtccctccctcccttttatctcccctttcttccccccgcccagacctattgcgaacgcccagagccgccgagggaacgccaacgtctgggccggacactaagagttaagatgtggcggagggggcggcgggggaggggcggggaggggaaagtggtgagggggagggaggctggaggacgacagatttccagcttctacgacgctctgcctaaattaaaaagcaaccaatcggaacggccggaaggggggcctcgcgtcctgagccagtcattccgagcctgccaatcacccagcgggtagccaatcagcgggggccctggtgctcgacttccttgtatttgggaaagtgtggtggtgggtgcgcgctcgcggcggagggtaaacattcgacagtccccgctctgagagggagggacagagagcgaactgtcagatcggagcgagagcgggcgcccgagagagggagagagagagagggagggagaggaaaagtgagagagggaaagagagcgcgaacgagggcgcagagcgagctcctgctgcaactctgctccagcacggccagcgccagcgcccgccgtcggtgcactctacgagccgtgcagcgtgcccactggagttgttgtgtatcaaggatcgatcccctatatgcacacacacacctccacctccaccaatgcactcttcttcctcctccttctccagacaactgctgggaaaaaaataaaacaccaaccccaaccgtcagcaacaaggtaacagagcgattcgacatcattttttttcctgttcaattttttccttgttatatttgtttcctaatttctgcccaaaaggaaagatgtcgcatcagactgtgactgttgcgaggagaatgaaaaaggactcttgtttcagaggcaaccaagagctccggcaatagcaacttcagagaaatgcaccatcgcaagaagttttcctaggacagaacaaaacttgaaacgagaggaccagagggggagagcaggagccagcctcccctctcc

SEQ ID NO: 26725 - DNA, 969 bp, Homo sapiens
  chr2:105488741-105489710
  hyper
cggcctcttcgggacaacatttgaaaccacattttatcaacatcatcaaagaccagagcacacacttcgggctctgagctctggagcccgcttcttgcagaaaaccgggtatgggggaagggctgcaggggcgagaaatcctgcttccaactgcgatttcagctttcttatggaaatgaacgcgacggcccgttcgccccgagcctccctcccgttcccagcccctcttcagcttaccctttcctcccgctaacccccgccctcccggtccccgagttcccgcggcggccaggctggtggggacgcactcgctctgcgcccgggtctcggcgcgcgcggaaacccaggccgcgggctcccctccgccccgccggcccgcgtgcagcattaaatattcatagggatgctactttcttaaaggagaacctaccgcgcgggaaagttcacagccaaggagaggcacaaaagaaggtctccgcgctggttctcaagggcgaggagacgcatcccttcttgacagtgcgcctccagactggcattaaggagaggactagggaatgggatcacctatcgtcaagtcacttattttagaggggtttggagaagaggtgaacttggtggtggagagaaagcgcgctccctaatcacctgttaaacagttattttaaaattagctgtcgcatctgacgccctagggtccccaagggccttttcataagggagtctgtttaacttcactggctttgggagcgagaaagtttgccctttgtttctggaaacacgcccacgcagtacgcttaggtaaccttacactgaacaatttccttggagcggctaaaaccgcaacaaccaaacttgcacctgcgccattctcttaaaaacagggcagcggctgtgagcgctgggccggtaagtaagggcagagaaaggggctgtcgtgtgcgtcccagctctccgacccgcacgtcc

SEQ ID NO: 26726 - DNA, 353 bp, Homo sapiens
  chr2:106016109-106016462
  hypo
cgggaaaaccaaagtgagctgggagcgtgcctcccacattccaagcccgggccctctgcgtgacgctgacgctgggtagggacagatggcactgttcagcattgtcgcagggagagcacaggttgagcccatccctgggagagggtgcgtcgtgatggaaacatttgctcctgagcaggtaaccggtccacttgcagaaaccggtggacgatgagtaggtggaccacaaaggcgtcctcggcactttgggggcaggtgtattatttttaacattcggggcagctcataggaatacatcctccagagaaggcgggaagaactccgtgattgctttcttttaattgatactctcc

SEQ ID NO: 26727 - DNA, 1446 bp, Homo sapiens; identical to SEQ ID NO: 23182
  chr2:118981062-118982508
  hyper

SEQ ID NO: 26728 - DNA, 947 bp, Homo sapiens
  chr2:119606881-119607828
  hyper
cgaaagaatccccctacctccagttttccagaaaagtcacagagggttaggctaggaggaacatgcaactaaacccacaacaagccgaaccaccaccacagtagctgaagtttctcaaaagggctggtggagagcaggaatttatattgctcaccgcatcttgggagcaggcgagggtcccccgatttccggggctgagttcccggctagacttgcgctgcagcctaggggagaaaacctctctccctaacgctgcgctgcagtcttctctaccttcccaagccgcctccaaccccaccttggagtctcccgagtcctcttcagtagcacacccaagggctccccgaaatctccaggcgcccccaccccttctccccgaaatgggggtgggattttatttatatttaagttcgcaaaattgaaatctttatcccgcaagcaagcgtgggtacttaattaaattctaattaggacactatcaatatcctatttagctgcgtagcttttgtgcgccgcggtccctttcagcgcggtaaatagggtctcgacgccttatctcgcctgcaggagacgcctcgagaagggctgcggaagataatttataggttttaattactcttcattccgcctgatcagcttggcgttcatcacaggcctgtgaataaaaccctggtcaaaagctctgtcacatcgcgctggcaagacgcttaatcaaagtgagcggccccgcgcgccgcgcggcccggctcctccacgtaatttccagccagctgataaagccagctgaataatacggcggccctttggagacaccatttacagaaatgactttattgacggcttaacgtcggtaattcattttacctttcatgtagtggagcccggatttgttacagtaatgggatgataaatgcacccgcggcccacgagctcgagctggattaggc

SEQ ID NO: 26729 - DNA, 533 bp, Homo sapiens; identical to SEQ ID NO: 23567
  chr2:120005222-120005755
  hypo

SEQ ID NO: 26730 - DNA, 590 bp, Homo sapiens; identical to SEQ ID NO: 23568
  chr2:120979888-120980478
  hypo

SEQ ID NO: 26731 - DNA, 971 bp, Homo sapiens
  chr2:121493478-121494449
  hyper
cgaggcagcacggctccgcggactttttttcaaactcccatcaatgagacttcgaggaggagcgggcggcggcggcggctgcgactgcgaacgcggaggaaggccaggagccgcaggaggagccggaggaaagagcttgggccgcgcggcgcgccgcagcctcggggagccgcctgctcgccggcggtaggggctgcgcggcgcccgcccgcctctcggtcccctctcttgcctggcccgccccgccccggctggctggagccccggcacaaggcagccagccgagggtcgccgcgccagccaaggtgggatgggggcccacagccaccgcccggcgcccgagaggccacctgcgtgctagaggcaaacttttgtctctctcggtaaagttgcattggccttcttttgcttgcttttcgtgacgaagcgcctcccacctcggccaagcgcgggccgactgggatgctgcgccgtctcggggggtccctcggccgggtaccggcgcctaggccttgggatcggggccctgggcttcgggggactagaggctagtaggcgcgaccccgcctggggctctggacgagcagggcggggacgtaaggagagtcctggggcttggagctcgtggccagaggtcgatgttgcaccctctccctacctgggggagagcaccactcttctcggggtgcacagcgagccggcctccgcgcgccggcgggggtctgttttttcagggggtggagggtgggatcggaggctgggatgctccgaagctgccgtaggtgggcatgggagcgtgtctgcgggcgtactgagcgcggaggggctgcagccagccacttgagaacttcgaactccacttctccgcgctgcgcgtcccggagccctgcctttctttcttccttcctcaatccttcctccccctcgcccggcccggccgccccctccccctctgctgggctctcctcctc

SEQ ID NO: 26732 - DNA, 286 bp, Homo sapiens
  chr2:122104584-122104870
  hypo
cgtatcagcccaggtaacactatacataccttgctccctgtgagctgtgcaaggtgaggtttcaggtcttctccgattacggaataaattgccactaagcaaaacacgctggccttacgcacactactttcggtgttgtcataaccctagagagccagaagggaacacgaaaaggaaaccagatcaaagattcattccatagccaacatctcatcaacgtttccacaaatgccctcagagttcaaccttggacttgtcagtaacaaccaggatagacctcagcccc

SEQ ID NO: 26733 - DNA, 843 bp, Homo sapiens
  chr2:124782548-124783391
  hyper
cgtctgtcttgcaactcctattagcatccttcgacagcggcctttgaaaatctcctttaaatttcaatacctctactcgtttcccaaatggggggaagggaagagaaagccggggggtagagagaatttccttcccctttccctcccaggtagccaaagcgcaccgcagcggcttggcttcctggaggaaaagcgcccgagcggggcaaagacccgcccaggctgctcttataggcgagcgcggggcgggcctggctgggggcggtgccgcgcggccccgctcgcctataaggagctgtccgccacccgggtgctgattccagctctcgcgcccgacgaggtggatttggctgtccaccgagctccggcgcctgtcgttctaattgggtttggatttgcaccgttaaggaggggggaagagaaggaagaggcgggcgaggaaggcgagtccagctagcggctgttgcggggaccgtagccccagctgcagctccgaagaatcccccgccacggtttcggtggagcgtctgggcacgggatggagtgaaagagcgagtgcctctccaagcgggggtgggagggggtcaggctgtgcagaggagagagacagcgagaagaagccgcggctggctactgcgaatttgggattcgattgggagggaccgctcactcgggggaaatggattctttaccacggctgaccagcgttttgactttgctgttctctggcttgtggcatttaggattaacagcgacaaactgtgagtacgaggagctgggggcgggaaggtgaggtggaaaacgatcgcattcagaaagacaatcaactatctaagcgtactc

SEQ ID NO: 26734 - DNA, 776 bp, Homo sapiens
  chr2:127534409-127535185
  binary
cgggcaccttcgggcttagggatcccttggagggaagcccgccgggaagctgaagacagtggtcaccgccctcggtcattacttcccgggacccggaccctaaccctgcgccacatctccacccgcccccagccgtgtcctggctgcgcagctggaaaggttgagcagctcactgctgtccctctgttcggccttggacacatcgcctgaactcctgggcgcctctgctgttaagtgggggacagcactatttactggggaggaaaactccaggaatgtggaccctggggccacgcaggggttgggaagtgaagggcagggaacgcgggcggcgcccggggtctgcgggtaggcaggcggcctggccgcggaggcttccccgagtcctgcgccttcctagagagggaggggctcatatcggctggcacagccaccacgggtaccgaaacttggggacgtgcccgaccatgcctcctccggtggcccgggggccaccccgcattgcttagaagtctcgcttcccgttcctcctctctggttcagctcattactcttccggtgaccctgggtatgccacgcttattctccaggcctcagtttccccatctgtgctgtgaggagtggaaggaacgggatgactaggagccttttaagaccgagtattcgaggttctttccggccccgcggagccaggaggtgccagccgagatgcgcgtgccgcgcgcgccctccagtgcccggttcccgcttctgcacggtcctcgctgggcaagggc

SEQ ID NO: 26735 - DNA, 166 bp, Homo sapiens
  chr2:127643937-127644103
  hyper
cgtggccgaccctcccagccccctaaccccggtcgggcccatcacccagagccccaaacgcaccctcgcggcgcttcagcggggtgggcgtggtctggtcgacccggtggtgccgccccacagcgccccctcgcgtgcgccagccagctcggcctcagctccccgc

SEQ ID NO: 26736 - DNA, 572 bp, Homo sapiens; identical to SEQ ID NO: 23183
  chr2:127782995-127783567
  hyper

SEQ ID NO: 26737 - DNA, 164 bp, Homo sapiens; identical to SEQ ID NO: 9472
  chr2:128127780-128127944
  hypo

SEQ ID NO: 26738 - DNA, 105 bp, Homo sapiens; identical to SEQ ID NO: 9473
  chr2:128459397-128459502
  binary

SEQ ID NO: 26739 - DNA, 829 bp, Homo sapiens
  chr2:131792026-131792855
  hyper
cggacgctgcggtcagtgaagaggggcccctcagggtggatcgctcccaccggagtttaaatcctgcctccgccatccctgcattcctgcgcgattttatgactgagcagaatccctaacctttcagagccacgtttactcatctgtgaagtgggggcctgcggccagtccttgtaaggaatcagagtccctggcccatccctccccaaagcgccggtgccaggcgttttggcctctgtatctctgaaacgaggaggtcccggggcatccccgagcgcccccgtggccatctgtgccactggccagcccagggccaggactgctgtgccggcgtggagattcccgaccctttccaaggaggtgccaagggcgcagcgcagcgcacgcccgagccgccgcggtccctctgagcctctccagcccgccgccgccgccgcccccgcccgcacagccggcttggttgccagggttgccagggcttggggcctgggaggcgccgcgcgcacggcgccggcttcgcgggaggagccccaggcccgcgagcgcaggcgccccgcctctccccgggcgctgcgggccaccggctcggccctgtgcggcgggatctcggggccgcacggagcgggaggccgggcgccatggcgagggccccgcagccccggcgcggccccgcggcgcccgggaacgccctgcgcgccctgctgcgctgcaacctgccccccggcgcccagcgcgtggtggtctccgccgtgctggcgctcctggttctcatcaacgtcgtactgatcttcctgctggccttccgctgagcggccgcgcagggcgccgc

SEQ ID NO: 26740 - DNA, 3442 bp, Homo sapiens
  chr2:136873862-136877304
  binary
cggcgtggggggtggggtgggtgctgctaggaggggcagtgattaactttttgtaagaagtttttcgcccagggagggaagaggggagaagggaggatcacggggggagggcgggggcgttgcaaagactcattctcctaaagcgcaaaaacttaattttcccacgcctgcctaaatacaaaccattctgggcttcaagcaacttgtagtgggtaaagagaatgcggtcttaaaacgaaggcccttcggtgcttggggtatattgggcgggagtgtcagaaaatgaacaaacggcacctcctcccccaagcgggcgctcctccggtgtgtgggtctcttgccatcctcgtgtttatcacttggcgcgtttgggacgttagggagcggggcattttcctgggtggagaaggtaacggggtctgcacccgtggtcctcgccccaagtttcatttcctcactctcccgggtggcttcccattaccccgccactgatccagttaacccggccggaggtgggcagctggaagcctccaggcggtgggcacgcggggggccgggtcgtccagccccgggccgccgcggctgcccactacacccacgccaaccgcccgcaagcagcgctgcaggggctccgctgggcgacacgccaggctctgtcccacagggtgctggggagcgactgggcggctccgccgcgagcgtctttgaattgcgcgccgctgcaggaaaccaaaaactccctagcaagagggtttcaaaaggtttctggaaaccaccgacggttaaacatcacaactggactcggagagagccaaacggtttccccacttgcacctgccagtcttcgcggcggcgacctggcagcccaggtgcggtcttaaccgcccccgcccctcaccccgtacccgctcctatccccggagcgcaaatctcagggctggcagctgcgcggtgtcaaaggggaggtcaaaccactccgctgacctctgcacgaccccaaactctcgaactgcaggacccactcgcggccgtggggaagaggcgcgcttcggacggcgggaaggttttccccctcaaacccaaagcgcgcgggcggatcaactcctagctgctgccaccactcgatcccctcagaggatcggcgcggtgggtccacccgcctctcccgccctctgcctactgtgctgggagactggcacagctccgtcggccgcacagagtttaacaaacacgcacccagtgtcaagaacagtcaccaggcgcttaaccccgaagttaaagcgggcgcaatctcctcctgggaactcagcccaggcacgccgccctccgcctctaaattcagacaatgtaactcgctccaagacatccccgcttccccaaggaagagaccggtggtctgagtcccgaggcagcgcgcacgccttctctgcacttgtgcacagaatgttcttacgtttgcaaacagcgtgcaagccgccgcgcgcggcgggactcaagggggagacacatgcagccactggaacgctctttccagtcgtttctcctcgactcacagagaaaaagattccaatcctgctccccccccacccacccgcactatataggcatggtcaagaaaactcctttcggtgacccttttttggagtacgggtacctccaatgtcctggccgcttctgcccgctcggagaggggctgcgctctaagttcaaacgtttgtacatttatgacaaagcaggttgaaactggacttacactgatcccctccatggtaaccgctggttctccagatgcggtggctactggagcactcaggccctcggcgtcactttgctacctgctgccgcagccaacaaactgaagtttctggccgcggccggacttttataaaaacacgctccgagcgcggcgcatgcgccgctggggcggggagggagaaggcggggtgggggagaggggcagacgcgaggaaggagggcgcaggggcggggcggagaggtgcgcggcttgggaagcccaggggaccctgctgtttgcgggtggtcggtagtgagtccggagccggacaggacctcccagaggcatttcctaagtttgagggaagcgggatgcgcctgaagacaggtgggaagcgcgggctaggaacgcgtctctctgtggcgcgtccatccttgctaaagtggatggaattccagacctgggaatgctacagtagagacactgaggcccagggaaggggagtgacttgctggagtaacccaaccagtaggcggcaatgctggaagtagggccaagcttccaacgccattccccgcgctttcagcagacgcagcccattcaggaggtaaaaggagtaaagatccttccttcggaggatgtagctatacttgcacattcacagcatcactagggtcaggtgcagataattaggagatactttcagaagaaggtaggatttggcataattctggagactgatcagatgtagatatgtattgctcagtaatttcataatagcggtaaccaattcgcgaatagtgctttattatcctaaaagtatgctttattataagagtaatttagcgaccagtactttttgtaacagatcactaggaacttgcacagaatcactcattcattctcacaacaccgtgtgggtattaccatcacagagatgcatttagtccgatatttatagaaggacgaactgcgtgccacgcactgttctaggcgttggggatccagcgtgaaccagacaaggcccgcattcggagaaaccagcaaataagcccggagagatgaaatgccagggatgggcagggattccaagccgggcttgaacccaggtcttcggtccccatactcggcgtcttccacgattttgagcagaggacaagctttggcacgaatcagaaattaggttgaagaactgggcggggcggagtgggggtgggggtcagacgtttaaagcgatctcagactggctgaggtttgcagtgggcgcgcagacagtgctttccccctcgcgccacttccctccggcgcggagactgggtggggcgggggagcgagtgtggggcggggccgagaaactgcgtccgcaggcggggtggccgctgcggagatagctgggaccgaggcgcgtgcgtcgcgacacggaccccagaggcccccaccccgaaatggtcccgaggagagggattgcccagactgcactctacacacgatccctcttttctatatcaaaagaggaaacatttcagtctggagtgttccagaggtagttcggaggcagggaaccttttctctacagagcatgactttccccctttgtctgggacccctccctaatgttggtggttaaaggttctcatctactctgcactttcactgacacaggaaagatgatatccgggccgggagatgggactctcagaaacgaac

SEQ ID NO: 26741 - DNA, 1293 bp, Homo sapiens
  chr2:145273332-145274625
  binary
cgcacacacacgcgtacacacacacaaaacctagagagagagagagagagagagaaaagcatcatttgtctctaatcaaaattctctcgtctttgtgttttgctccttccagcacctcacactgcgcccccagccgccccctccccgcgccgcgcagctctggggcaggccgggggcgcgcacaattgtcttctctagaggaaagttgctccaagtgggcccgggcggtccccgcgaggcgcgggctggggctgcggaggccgggaggccgggtgggcgctgcgtcccagcgcctgcctcgggagcgtctacgcggccccgcgccgggtgatcgggctgagagcgaggggagcgagaagtttcctttccgagtctgggctggcgctcgttcgcttgtttgttttcgggggttggtttctttctttttaaactcagttatcctccgtcagctcccccacccccccccggcaccctcgctagtccccagccctctcccctcccccaggcgccttccgcgctcttgccaatcacttttctcttttattcccacgattttgtttggggtaatacctagggggtctctctctcactctcttcctctctctctgtttctctctgtccccccgcgtcccttctctggctgtctccaaaacggacctaccaaactctcacccccccctttaatatcccacctctgatctgcgtgtgcccctcgaacccccatctcctttctccttcctccttcctgactcagcctggataacgggctcctccagaccatgtagaaactgccgggaaaagtctcgctgcgccctgcgactccttcagtccccggcctgggggcagagcctgctggagaggagtcatccgtccccgagccatcatcgaccccaccggaccccgcgcggggccggccgactccctcccaccccggggtctgggcgcgatgggccgggccccgctgcccgcggaccgttacttggcgcaccgagaagcggccgggcgactccggcaagaaactttaagcctcgctgaggcgcagacccggttcccctctcctgccttcgcagtctctctgccacccccgcccccgccccgggatcctgcgcgatccagcgcctgggcccccgccctgccccaggcggacgctcccgaagcccggccggagacccggcgggccgggcgcgagcggagcgggaggcggaggcggagggagggcggaggcaggggctcgaggggggcagcggggctgggggcgcggggccccggccggacccccgcgctcggaccccc

SEQ ID NO: 26742 - DNA, 1051 bp, Homo sapiens; identical to SEQ ID NO: 25433
  chr2:145281217-145282268
  binary

SEQ ID NO: 26743 - DNA, 2098 bp, Homo sapiens
  chr2:149632592-149634690
  binary
cggttccggcttgggcagccagaccggacttgcaggctcttggaggtcgcatcctgtccttcccccggcaggtagagtgactacaagtcccgggatgcgcagcgctcggagtcgggcgggggccgggcggacctctacggtgacgtcaccgtcccggggcgggccaggggagggcggggcggaggggcgggtctcaaggcggcagagcgcgctggtgctgatgcaggatggctgagcgcgcaggagcccgggaggtctgagccgggcgaggctcgctccctgcgcatcgcctcctccgcccgccgcgtggtcgcgggcaggtgggccggggggcgctgggcaggggcggggcagggccagggcaggccggtctgcagccggaggggccggagcggagaagctgcccaccttcccgggctcggagcggccggggctgctcagccggccgggctcgcgatgacctgctgagaagcgtcgtcggaggctgcaggaggcggcctagctgtgggcggtgcagctcgcggcctcctccctcgtcgttcccggccccggccccccacccatccccgtgccccctccctaccgccggccgagatggcggatccagccgaatgcagcatcaaagtgatgtgccggttccggcccctcaacgaagcggagatcctccgcggggacaaattcatccccaaatttaaaggcgatgagaccgtggtgatcggggtaagtggctggggcgtctgccttccctgctgctccgcgccgcagctgggcgccccgacgccccagacgcagcggaggtgtttaggccgccccctcggacattcccgcggggctggcctctcgggtggacctgaccagagacccctcgccccgcgcactatggttccctcccgggcgggtggagaggcggccgggagcggcgggccgggcgggggtggcgggggtggggatggggggcgaagacgggctcggcgccgccattgttcgccgggtgggggcccgggtgggcccattgttccccacgctcgcctcgccgcgtgggtagtgtgttcgggtgaccctcaagccgggtgcccaggccccctttaaagtgtgagctctgcaacccgcaaatgcttctgggcatcaatcaattcgatttaccaaacgccttgcctcttcttctcacgaccctagcaaaaaagaaagaaaaaggggtacaggaaaatttctagtcgcgtctcggagctcccgcggcagtgtagacgcggctccccgcggtgttacacctggctccgcgcgcggaaggcggagggttgggggagtactggtggcctcggtgtcccctggaggcctggtgtgtctcccgcttcctctcacgcctggctgccctggatgtggagtcccggcttgatccctcccctctgggatgacctccctcccatgtctgcagaccctctgatgcgcctcacgctgggtggagaggaggctgtgtccacatctgtggggcgagggggctcagagcgcagtagccccctgtgccaagagcagaagttacttcgtgcggctcggacccccctccctctctatctcccttccccaccttttctcccccaccccctccccctacttagctccctctctgcagctggggctgctggtagggggagggaacaccaatggattgtagttcttaaaggaatctgtcagatgaaacaaaccagctcggtcccccgccccttccccgcccgctgtccgtagcgtgtgtggctgatggtgccccctttgtatgcgagccgcgtggggagggaccgagttaatgggagcctcccggtccccgctgacacgttcctggcagcctgctccaggctgctgatgcagccttcccgtccccagcattgattaagtgatgtcatcctgatcactgagcatgctccgactaaccccctcctccccttcctccagtggctggtgtatttaggtcaagtgattgacaggtgacagtttaccgagggtattgcaggagtccgcctggcctttctcaagcgccagaggccgacgttttccagcccgggcggtccccagcatctttgccaaggttgtctgccgcagtcgcagc

SEQ ID NO: 26744 - DNA, 669 bp, Homo sapiens; identical to SEQ ID NO: 23186
  chr2:149645382-149646051
  hyper

SEQ ID NO: 26745 - DNA, 968 bp, Homo sapiens
  chr2:155554232-155555200
  binary
cgcctggaaggagggcacagcgccaaggaacccacgagcccccgctcgagtcattctgtgctctgtgcgccaaggatctttctggcagggacagcgcggtgccctcagggaggtgcggagcttgggggacctgcattggcgcccatcgtggtacaccaggaaaagtgggaacgaggaaaacagccgtgagcgcagagtgcgaggccaggctgccgctaccgcccgctgcgccgcctcctgccctctcccgctgggtgagtgcccaggcttcgcgcactgccgtgtctcagctgagcgcgggggcggcctgcgggcccttgagggtccgccggagggccccggtggcgcccgcggaaactcggcggtcgggggacgccaggcggacaggtctctggagtccggaacccgggaatctgagcccggagggcgtgggtagggggcgttgcaccagtgcccggcagacatgcctttgggcgggattttggctaaaagataggagacaggtgcgccgggggtgcggggagcggtcccagggggcgggagattggggagcggcggggaggggggagggtctggtccaggcaggtaaaggcagcttcttaggcagccagcgagttggcaggtgggttgggactcgcttgtcaactcattaattttaagcagtcagtttgggggtactgcaggataatcaggagggccgtggggagtcaagaggtgacccgggatgccggtggtggggaaagaaaagaggagcctctggaagcttggaggcaaaattgcgcttgggttcctgttccttgcatccctcctggcttgagtgcgggagaacactttttaaagactcaccttggaaagaaggcctccgtcccaggggagaaggagaggcgtctgcagggggcagagaccgcagctacctgccgggtgcgccccccacccaggagcgctcgcttcgccccctttcctccccc

SEQ ID NO: 26746 - DNA, 709 bp, Homo sapiens; identical to SEQ ID NO: 25435
  chr2:162283380-162284089
  hyper

SEQ ID NO: 26747 - DNA, 854 bp, Homo sapiens
  chr2:162930102-162930956
  binary
cgttagaagagggagaccgcgggctgggggtgggggtggcgtctggagtgcgccagttggagttctctaaggcgggtgcccttgaacttgtgccttcagagcacattagcgttggtttctctacccctgcccgggttcgggcgtgcgttctgtgagtggctctccgggacattcaaagctcgacgccagggtcctagcagaagccagggtccgaaagctaagcgagagctctgggacgtcccttcacctgtcagagggtggccttggggcttccgcctaaggggagtccctggtccggtttcgccagcttttgggccatttggggagtttggcgaagaggtccccacagctcgccccggggacgtacgtggcgcggcactcaccttcatcgtcggcgtctcctcggaagtgagcgttcagagaaggagcgcaggcagaagtcaccgcgggcggcggagacgcgcgtcctgcaccgctgctccgggcggtggagtcactcgccgctggcaagtttcggccccgagttaaacattagtgagcgccgagcccgctgggtataaaggcgccgcgggcaggctgcagggcaggcggcgcgggagcaggcgcgcgtggcgcggggcactggcatcccggccggggggagcccgcgagggccccctgagggcggtgtagggcgctgggcggcagccggggcgcagagtgcggggcccggaggagccgtgggggaggggaaagggcgcgcggcctcggatgcgcagaccctgggccggcgactcggggaccctgctccctcttagctaaaaatgacgtcggcgttcagctcctccaacctcacgtggacaggcgagggaacc

SEQ ID NO: 26748 - DNA, 205 bp, Homo sapiens; identical to SEQ ID NO: 6095
  chr2:165873413-165873618
  hyper

SEQ ID NO: 26749 - DNA, 837 bp, Homo sapiens
  chr2:168148871-168149708
  binary
cgtttatttggagggaagacggggaaggtccactctgcctacaactccgacatttctccgtgtgcctctttgctagctggggacacttcgtggctgattactatgaggagtggttcgaagcctaagaagtagtactcttttcagctgccaaagggagaaggacgggggcgctgtctggtgactgttcgcgtgattccttcaaggcggcgaccacctcctgggattcgctctccagccgcgccgttcgtactcgggtcccgcgacccctccccgctcccccctcgccccagcgatgccaagacgctgaaccgcagggacgaggctctggggacaaagtcaccccgcggcgccctttcctgccaagccgcgggctcctggcggtcagaaagcgccccaggcccacccctgcgggcccggctttccctcctcacctaaggctccggggccacgagtcccccatcctgcgcccctcccgcgcctcccccatcccaaaccccagcagcgtcgctgcctctcccggaaacaagcccgctgagcaaaggcggaggaaaaccttgggccttccgctctgattggtctccccccgccgagcggggcgaggcagcgattggctgccgggcgttgtcagtcgccgaggccagagccatcgccggggaagcgcagccgggctcgggtgcttcggctgccgccgcggctgctcggctagtgcagctgggcgagctcgcgcgggcgccgccgccgcctctgctgctgcccaccccgccgcgccgccggcgctgccggtcttgcaggcggccgccggggaggggcggccgagagagcggagcacgaggaggc

SEQ ID NO: 26750 - DNA, 834 bp, Homo sapiens; identical to SEQ ID NO: 22867
  chr2:168150217-168151051
  binary

SEQ ID NO: 26751 - DNA, 289 bp, Homo sapiens
  chr2:170336166-170336455
  hyper
cgccgccgtgcgcgttagggacccgcgggcggagactgcacctccgcagctcgcggccctggtgagggtgggaggcttgcgccggtcgtccgcgcctcgagagacctcaggctggttgggccactgtggccctctcgaggccggcgccgcggcaagagcgcatcggcattacacagttttggtcccatgcgacctccggttcccccatcctggcccgcgggacggatcaggaatgtgaacctgagcacgaccggggccacccggggcttagcgtcccgtatacacccac

SEQ ID NO: 26752 - DNA, 98 bp, Homo sapiens; identical to SEQ ID NO: 6535
  chr2:171815760-171815858
  hypo

SEQ ID NO: 26753 - DNA, 909 bp, Homo sapiens
  chr2:172949817-172950726
  hyper
cgaactgagtggcagcgacgagaagcggtcccgggtgtccggtgttagggaccgctgaagggtggggacagtggtaggggggcggcggcgcggagccgctggttggttcctggggaggaaagcgcgcgagggaggcgggaggccgatgagccgcgggccgcaggggccccggcgcagacgccgcagcccattgtgcttcctgcccggcgcgctctgttgcagaggagccccggccgggaagtgtggatgcgtcttacccgaggccgggccgcctcgcccgctctagtccagcggagcccgagcgcctcggaccaatccccagtgattatgcaagacagcggaccaatcagctccgccagctcatgaatatttatgaccttcgctgagtcaaagctttgaaccgagtttggggagctcagcagcatcatgcttagacttttcaaagagacaaactccattttcttatgaatggaaagtgaaaacccctgttccgcttaaattgggttccttcctgtcctgagaaacatagagacccccaaaagggaagcagaggagagaaagtcccacacccagaccccgcgagaagagatgaccatgaccaccatgccagaaagtctcaacagccccgtgtcgggcaaggcggtgtttatggagtttgggccgcccaaccagcaaatgtctccttctcccatgtcccacgggcactactccatgcactgtttacactcggcgggccattcgcagcccgacggcgcctacagctcagcctcgtccttctcccgaccgctgggctacccctacgtcaactcggtcagcagccacgcatccagcccctacatcagttcggtgcagtcctacccgggcagcgccagcctcgcccagagccgcctggaggacccaggtacgtgc

SEQ ID NO: 26754 - DNA, 820 bp, Homo sapiens; identical to SEQ ID NO: 23189
  chr2:173099596-173100416
  hyper

SEQ ID NO: 26755 - DNA, 862 bp, Homo sapiens
  chr2:175191592-175192454
  hyper
cgtggaattgagctggaccgatgattccgcgagctctgtaattatgcacacactgaaatcttcaccgttgacttaagttacttggcgctgcgagggctggggccctgcatattgattaaatgcagcctctatttacctaaacaataaatgtagagattagcaacgttcacttgatcacaataatgggattgacaattaaggggcaatgcatcccagatgtagcggaacctatgggctgcgtgcagcaggcagagggcttctcagagaggggcgctgggcagttgcggcggcggaggtagtgcagagcaggaagcagcgcggaagcacagcgggaggcggagggggacgcccagcctcgtcaaggtcttcggccaccccgcccgggaggctcgaaactggctttggggtacctgaatgcctcgactcccagggagacatcgggagctcggagccactctccctgtggcgatggcacctgcctcaaggccgtctcgcttgctgatgcctggccgggaaggaggatggacgccgctggcatgtgccctggtaagtgtgtctgtttgtcatcagtgtacattctgcatgtggcagcagggcgagggggaggcgcacgtgtctaaagtgcacggagccttcctctacccctatgtatatacccttcagtcaatgttccaagaagcgggtcagggcggagggtatccatctggactctggaagggcgtgggtttgacatcggtaggtgtgacaggaaagtccagcctgtcagagttgggctctacagtggccgaaatcaagaaaggatggacgtgtcggcccagggctggcctgtttccggatatgtcacgggggtgcctcgttcctc

SEQ ID NO: 26756 - DNA, 844 bp, Homo sapiens
  chr2:175193104-175193948
  hyper
cgactgtgggaggaggaggttaaacaaagggaatcctcctcctctgggacgggtgaagtgcgtttgtcttctccttgcaggctctggaaaaactggcaggaatttccttgtcgtgagaagatggacgagtgtgtctgcagccgaggagacaactacaaacagactttgggcagggaaggcgggcgggcgggggtgggggtgggggcgggggcctgctttgatcgctccagctctgttgtaattttgtcttcgccagatagattagctggaaccgccagccctagcttggagttccgttccacggagtaccctccctccccacccccagcgtcatctcgcgcctggagccgggtcgccgctccttccgaagtctcgctggaaacttcaagggctgatggttctgtgttcttgacgtaattaggaggccacgcagctctccaacactccgttaaacaaatatgtaagtcgtcctccccctctctggggacagactctagggaaggaggcagctgggcccgctccgggtggtgtccttggctagcggagtggcgtcgctgtgaccttccgccgcccctcggggccttggtctttctaagctctttcttaggaagcggagagaggggcagaaaacgtgcacctcgccacccaccggacaagccgagaggaccttgtctttgcttgaaaagttttctagataaatcgctcgggtggttctaagctatgacgaactagaggctgggcccggttcttctccagaacagcgtgtggatgtaaaggagatgaaatcgtcctcccccactgctttctttttcttccccatataaatcagtcatataattcattc

SEQ ID NO: 26757 - DNA, 946 bp, Homo sapiens
  chr2:175198369-175199315
  hyper
cgcccacgtgtggcctggtcctccgccctcccgggtgaaagtcctggagagatttctcgggcgcgtccgtgaaagcagggcactaatggggagcctacctcttaaaacagcgcacttgccctacggacgagcctctaggccctggtggtctggaatgggagtgggttggagctgggacaagaaaactccactccaggatgaaacgcgacatgcaaatcttcaccgggttaaacaaacagccgagcaagctgcagcttcagcggaggtggaggtgggggcggacgccgctcgcgccggtctctgtttccaaagttgttacagtgagaaaataagcggcttcgtgcagcgtgttgtatgggctgatgcctcccacccccatgccagcccacagcaaaacccggcagataatcagcacatcccactgtttagtcatatttgacaactgggttaacctggtatctaagcgctggcgaaaccgtacaaagggtgccctcaattaccaccagaagcctctagcgtgagtggcacttgtattaccccccgggtcagaggccagagcgacaattaggaagtcacttacaccgctggggggaaatggcgggatgcagcaggctccaggccctcccaacaaatctgtggatgtagatctgtacagagaggcctatttcgctcctctcggaggagctgtcccttcgcgccccctccccagtataactgtgagagtgaaattgaatctagtggaataaggaattgggtagaagacacacgaaaatgataaaaatcacaagcaagaatgatagatacaagctgaagttgtgttctgtaggcaaaagcctggacacacaaagtgagggctcacatttccgtctccacttgggccctgctggtgcgggctgtgtctgggtgtctcctcccctcctgcctcctttcctacaagtggggagtc

SEQ ID NO: 26758 - DNA, 808 bp, Homo sapiens
  chr2:175207996-175208804
  hyper
cgctggagtgtatagaaatatgtatgaggtaaatacatacagacatgcctcccccatatattgttgatgtaaatatagactgtgtgtttgcatctccagttaaggaaagggtttcagaatgtccgtggggacacgtccctccagggccggctgtcgaggacccggaaaaccacagcccctaagagttccagattttccaagacccttatactctcttcctgtagaatttcatactgggggttttgcattgttttgcaggcatgtaaccatttctgggtgattcatttatctataaaggaaatgcaaagtggcagggtgtctgccccagtccgcattctgcttgcagattgctgacgaaagttgatatcttcatgtttgtcccaggagcttcataaagcgccctcttcacctgtggagcccgagcgaccagaaaaattcgctcgctttcctaactgctgaaggcgagtccggcccgcgcgggggactgcgcccgaggcccggcaagcttaggcggggactagcagggccctcggcgggcgggcccccagcgaaaaggcctgagaattgcttctggggggtggcttgggccaacgggggcgagggagccgcgcagagggcaggccccgacccttccccgccgcaccttgtgggtcgggtgttgggcggcctcctggcgcgggaggcgcatctgctaggaagggtgtgcgctccccccttctcggcctccccatttcggtttggggtgttttcgcaaggttgccagacggtgcatccagaaggaaaccaccagagcacgcaggggggcgtc

SEQ ID NO: 26759 - DNA, 914 bp, Homo sapiens; identical to SEQ ID NO: 25440
  chr2:175547140-175548054
  hyper

SEQ ID NO: 26760 - DNA, 1482 bp, Homo sapiens
  chr2:176944127-176945609
  binary
cggctttgtccttcccggggaaggcggccacatccctacccgccttgctcctgaacgtagtaaacaatctcacaaacaaccaccgctgcccacgctctccatccgtcctcccggccttatcagacctccgttctcccgcactcttcgggcagggtccctaataagctcaggctgaaagaacgtttgccacctcccccaccctcgttgaaagaaaaggaagaaaaacagcagcagcgagaaacctccggggcgactcctcccccgcccccaagcaccagcgcacagcatccccctctgtctttgttgtggttctccgttgcttcgggccacgccgttcagccaagcaacccggacctgagagtgcacagccaggactagcttagggggcgaggggttggtctttgggaaaccaagcgctcaggacagaggtggaaagtgggtcccgggagccagaaaagagagagaagggcagacggctgggtggcaaatacaaaaatagaaataatttagggggatgcccgccaggcttttgcgcctgctccttctcccccaattcggagcaggttcccttcggcctcccgcgccccggggcgccccctggcggcagcggcagcagcgggcaacgcgcggagggctcagggggcgcacaggggactcccgggcacactcagagaggcgggcgcggccccctggcggtggcgacgtagttatctggtgagcggagcctcgtccctctggtccggcgggctcacggccgtcttactaagcaccgcggccgagtagggcaggaagccgctctcggaacgcggcgccgccgcgctgcagccgaagtccgagcctcccccggccccggcgcccccgccgccgccgccaccaccaccaccgccgccgccaccgccaccccgggaacccagggctgcggcagctgctgccgcggctgccgccgccgactgactgctgtggcaactgaggcacgagcagggtgcagagccgccgctggggggcgcgccggccgccgccgccgaggaggccgcagccgctgcggctgccgcggctgccgcggcagaggccgcgctgttgagccccgcggcggccgcgggagcctggtagagaccagggtggcggaagctacacagcagctccggccgagagtaggggtgcgagagggcgcggaaggtgtccagtggccggatggaagtagcgaagggcgacgaagccgcggccgccgcgcctgaggctgcagccgcggccgccgccgccgtgacgcccacgtgcgggtagtagtgcagcggcacgtgcgagtggaaggggtagggcaggcttccggtggcggccgcgtgcgtcatcatgtaggtgtagaagctggggtcggctgggtgcggccaggacatggccaggcgctgccgcttgtccttcatgcgccggttctggaaccacacctgcggggagagacgcgccgcagcctgggttagggagcgcccc

SEQ ID NO: 26761 - DNA, 593 bp, Homo sapiens
  chr2:176963173-176963766
  hyper
cgattgcgttccccagagccacccaattggtcgccataactcacacaataaagtggcagcgcggcggtcagtcttgccctccggcggcgcctgtgtggtctcagtgcaggagcccgcgatctaaccaattccagcttggctcggagaccgagggtcctgctgcaggctgagactggcgccggtcaccgggtctcccagggtcttgggatcagaggcaggaggggaggacccctagtcctctggccggactaggcaagagggccagcgacggggtctgagcacaccgctcccggctaagaactgctgcctttcccacttccctgtttgtcagacccgtgaactccctatccccggcacccctgggggcgctgaggcaaggaactctgctagccagctgcctccgaacgcccgctgttccccggccaggtggttctggctcttctgcctttccacacccagtcgggggagttcgtcctgctttgccctccacttggtggatggggacacctcggagttctggtttgcagtgtgtagtcctggagaggactcctgaagataaaaggaatgtagcctttggccacgattggtggatc

SEQ ID NO: 26762 - DNA, 381 bp, Homo sapiens; identical to SEQ ID NO: 23190
  chr2:176975945-176976326
  hyper

SEQ ID NO: 26763 - DNA, 963 bp, Homo sapiens
  chr2:176987449-176988412
  hyper
cggtggctcgggcgccggcggggagctgctcggcggcggacagtgtaatgttgggtgggagtgcgggacgcctcaaaatgtcttccagtggcaccctcagcaactactacgtggactcgcttataggccatgagggcgacgaggtgttcgcggcgcgcttcgggccgccggggccaggcgcgcagggccggcctgcaggtgtggctgatggcccggccgccaccgccgccgagttcgcctcgtgtagttttgcccccagatcggccgtgttctctgcctcgtggtccgcggtgccctcccagcccccggcagcggcggcgatgagcggcctctaccacccgtacgttcccccgccgcccctggccgcctctgcctccgagcccggccgctacgtgcgctcctggatggagccgctgcccggcttcccgggcggtgcgggcggtggcggtggtggtggaggcggcggtccgggccgcggtcccagccctggccccagcggcccagccaacgggcgccactacgggattaagcctgaaacccgagcggccccggcccccgccacggccgcctccaccacctcctcctcctccacttccttatcctcctcctccaaacggactgagtgctccgtggcccgggagtcccaggggagcagcggccccgagttctcgtgcaactcgttcctgcaggagaaggcggcagcggcgacggggggaaccgggcctggggcagggatcggggccgcgactgggacgggcggctcgtcggagccctcagcttgcagcgaccacccgatcccaggctgttcgctgaaggaggaggagaagcagcattcgcagccgcagcagcagcaacttgacccaagtaagtgcaaaagaaattgccccctgatttattgctgaaacctgtaaggctcgaatgtgcaaaactgatagttttactaacctataaaaacgtctagac

SEQ ID NO: 26764 - DNA, 953 bp, Homo sapiens; identical to SEQ ID NO: 25441
  chr2:177001081-177002034
  hyper

SEQ ID NO: 26765 - DNA, 724 bp, Homo sapiens
  chr2:17719692-17720416
  binary
cgcatttaggacgcaaacagcgctgcagtgcaaatggaactttaaaaaatctgcccgcccacgtagacaaagctactttacaaaagcgcacgcgtcgatatcaatcgtaccctacaacagagcatggtttaaagtatcagtgtacattttttcctaaacacaagttgcaagtaagttatctaaaatcgaacaccgccacgaaagagacctccagggtgcaataaataggtatatctcgttgaagtggagaaatggcatcatgaccctttgggttgatgcagattacagtgcggaggctgttctcgagagagaaactagaactcagcgtaaaatgctgtagtaggggaaatcgaccaaagacgagattttgaaagccttttgaaagtcgtttttctagctaaaaagaaaaagtgacttattcaggactgactccccctgccagtcccaggaaacaggagcagcccggcgcgcccgggagccccgcagcgcagtgcgcactgcggctccagagcgaagggctggcgcccgccagattctaaacgtgctcggctgccgcagcccgccggggccgcgcgccgtggtccgcgcgactccgcgctccgggtttccgcggtcaccagcactggcggaagagccctgccgagaggggacagccgcgggcggtgtcccgggagtcccgagagcgcgctccccctttgcgcaaccttcccgaggcgtcctgccc

SEQ ID NO: 26766 - DNA, 745 bp, Homo sapiens
  chr2:17721363-17722108
  hyper
cggctcccagtactcctagcagaagaccctctgatgaaatggcccatgacaaaatgaccaccataaccgttccttcagtaagccaggtagacgtgctcacagcttgctgggaagtcttctttcggagatttctgcagttttctccttcaccttacagcctaacaaagggtgggccgggggtcggctaggacagaaagcagcgggaaaagcggctccacgtgttccatctctggcctcggccttcagcccccaggttcggtaaccactgggcgtggcgagtccgggtaacccgcagtccctcgcgcccgtccaggtgcgggttgctccggtagccggactcccttttcctatatactttccttttgagcttttgctaaaatctggagacgtggaatccacccgcggaaactccgagcccctccgactgagcatgcgccatcgccaggcggcttttggtcacaggctcccgagttctcctagctggggctgcggagctggggggagggaagagaggaaaggggagggggtgcctggagaggcggaggctcgcgcgcctgcgcatccagctccagggaccctaggttttctatgggattcccaatctgcagcagagatttacccgagcgtgttgcggcagcggctgggcttgcaaggcgcgatccaagagggatttaagcagcccagagctccagagaaaaagagagcgagagagaaccacacacagagacggcttaagcgtttaccc

SEQ ID NO: 26767 - DNA, 1262 bp, Homo sapiens
  chr2:18058929-18060191
  hyper
cgtatgctgcgggtaggaacccagggaacactgggcgccttagcttggagcagctggctccgaggaattgttccacgtctgcacaacttaaaaatctgcagtttgggggcgggagggggagcgcgggggtgggtcccgaagcgtcccatttctcctcctggctgttaactgagcgctctcgctcagtgcagcgaggccagcgatgccttctggaccacacgctgtcctcgccgaggtcctggtttgttcctcaacgtcggctgaaggcatcgtcccctgacttcctcttccattcgtccttccgaaaggggacccgactggttcctcttctacatatgaggcgcatctgcttggtgcaaatgtccaagcacctcttctgactcggtgagtggaggaataagacaaagcatcttgttctgcactgtgcctgagtcttcaggcagcgggaccgatggcaaacattggcaggaactggagctatatgtactctccttcgcactttgttttaaaacaagtttgggcctcgcgatttcctgaggaaatccaggcaaattagcaaagtgtcgcttgggccgcgactttagaaaggcggttgccccagccgccggggccgcgggggaggtcatctttttcccgcagggccacggcgcttccggcccaggagggcgcgcaggtgggaggcgcggggcgcgctcctggtcccacccggacagcgcctgccgctccggggtgactctgcacttgggcctgggcgggggcgcgcggccggcagggcagcatctaggtctatgggtctgtccgcctgtctggcggtcggagccccgcagtcctcagccgcccgcgccctcggcccggggcgcccggctgcgggcccgaagcgaggggctggcggagctgcgaccaatggggcggcggccgagcggcgggccccgccccgtcccgtccggccccgccccgcccgcagctcccgggagcctcgctctagcggggcgggaccgacggacagaccggccgacgcgggccaccccgctctcctcgccgccgcggcggcaggcgcggggccgcgccgcgaggcctgatccctgcagcgcgggcaggcggcgtcgcagagcggagctagctggatgcgtccggactcctgcaggtacctggctggcgtccccacctccctgcgcgctccggagacttctccgggcgaccctgcaactttaccgcgccttcccccaccttttgctgccccagtctcctgtggtccaggtcgc

SEQ ID NO: 26768 - DNA, 1776 bp, Homo sapiens; identical to SEQ ID NO: 22868
  chr2:182321353-182323129
  binary

SEQ ID NO: 26769 - DNA, 376 bp, Homo sapiens; identical to SEQ ID NO: 23192
  chr2:182818959-182819335
  hyper

SEQ ID NO: 26770 - DNA, 990 bp, Homo sapiens
  chr2:193059466-193060456
  binary
cgtccgctgagaagctgcgccggagacgcgggaagctgctgccataaggagggagctctgggaagccggaggacaggaggagacgggagtccaggggcagacgagtggagcccgaggaggcagggtggagggagagtcaaggcgccccgcagcccggcagccgcctctcgagctctgccgcccgcatccctctggcgtttgggaagcagcaggtcctcagcccgcccggggtcacgtgggaagaggcagtcgggctctgattggtggagcaggatgcaggtcccgggagggaggggtcgacgaggaggtgcaaggatgcaaggaggaggcggccgcggaagccacagatgggctcgctcgccaggcgctggcccgagtggggctaggcggggatggctcaaatgagaagctcgggcttcagggtgggctacccgcacactcatataccattcgcctcactctccgctccaggacgccccctaccgaaggcggggtccggactagcgcccctcttccgcgcgtgaccccgggccgcgagtgcgggccgcggctgggtggcgtctctccgagctggagatggtgggggcggaggtgtcagaggagcagcagcagcagggcagagaggggcgagtcggcgcgggagagggcgtcctgctggcgaccggcgctccagcgtgcgggagcgcgccgcctaggctgtagggggatgcaggctgggaatgtcgcggcggagaggccagggacgtttctctagggatttacaggaaagagggtgagaggcgatggtgttagaaccgctcttgccgacctggaagcaacagcagcatctcccacaagagcgtgcaaccccaaggctgctcgccgaggcagctcagccatcccggcaggcgctctccttccttctctcttctcccctctctcctcccaggccccccgcagctccgacccagcccaagcgttcgcaggtttgaatccctctcctcatcaccc

SEQ ID NO: 26771 - DNA, 517 bp, Homo sapiens
  chr2:208029816-208030333
  hyper
cgtggtccctgtcagcaatcgctcctaacaccccaaaccaccttcccacccggctcctccgaaccccagaagttcggcaggtctctgataggggacagcaaacccgacaacgtgtgcgcagggatgtgtgttggcgactgaaacgcaggcagctcgcaccggctgctcagctcggcactctacgaggttaggggtgggtggagaggtaagcgcagatgactgtttcagaaaacattttcaacaacagacagccaaaaaggaagaaaaaaaagtcaaacaaacaaacaaaaatttcaacccagagcccacaccaacgcagcccctgcgtctccgccgccaccacacgatttacacaagtaatttaaatcattcacctgctgccaggtctcctccagggatggtaaagctgagaagtagccggtgtcgtggacaagttgtagctcctggaatatactataactagccaacacgtccatgctgctgctgccgggcaaaacgggaggcgaaaccctccccc

SEQ ID NO: 26772 - DNA, 901 bp, Homo sapiens
  chr2:208031094-208031995
  hyper
cggccgcccggcggccgggcagcgcgagcgcaagggacagggagggtcgtggcgacactcgcgccagctcccgggacggctgggctcgggctggtcgccgacctccgaccctccactagatgcctggcagagcccggcgcgtccggagcccgcgcccctcagagggaaggggtcgcgcgtcgccgcggcggccctgaggctgacggtcgggaggtgaaaggccggagtgcggggtcaggacgcctcctggagggggcgcggcgcagggggccgcggggaagccgccgagggcgcggagcgggaaggaaggacagtggccaccccgcctccgcctgggcacggggcagggacccgcgcgaggcggtgccggggaggtcctcacgtactcaaaaacaagcagaaaaggcatccagggccccttcccgaactccccacgggctgccagggtgcagagaagaagcgcctgaggaggaagtgccacacaatgggagagaacaaaggggagcggagcgagaccgcggcctgcgcccgccccccgcttgcgcacagtccccgccccgccccgcgggcgccgccgccgccgccctccctcccgcgcctccttctgaccccgagcgagagacctggtcgggagtccggcggctagagttgattgcaaggggcctgttgctcgactgtgcgttaaagaggctagagggagcctaggtagacgtggggcgcaagctggagccggcagcttgcgagggggcctttacgtgatgaggctcaccatggggtctccagcgaggtgtctgcagagcttcgatggtgagaggaggaactcgatttctcgttttctggagttgggatgtagacatagagagatctgttacatctgagatgaaaaccctgcacaattcac

SEQ ID NO: 26773 - DNA, 845 bp, Homo sapiens; identical to SEQ ID NO: 22871
  chr2:21022197-21023042
  binary

SEQ ID NO: 26774 - DNA, 760 bp, Homo sapiens
  chr2:219735917-219736677
  binary
cgctggaattgctccagccacagcaaggcctttggacgcatcctgcaacagggtcagtgtggggagggggcggaagtggggctgctttctccctgctgtgggacccgaggagaggagaactggttcgctgaagttgcctgagccccacttccccctcacatgtgtctgggcaccctgcaaggaccctgcctcccaggcccctggggcagccctcccgccgcaggtttcaggtcccaggccccagctgaccgccccagcccgcgctgattgcacctgtctgcattcacagacattcgggagacggccttcgtgttcgccatcactgcggccggcgccagccacgccgtcacgcaggcctgttctatgggcgagctgctgcagtgcggctgccaggcgccccgcgggcgggcccctccccggccctccggcctgcccggcacccccggaccccctggccccgcgggctccccggaaggcagcgccgcctgggagtggggaggctgcggcgacgacgtggacttcggggacgagaagtcgaggctctttatggacgcgcggcacaagcggggacgcggagacatccgcgcgttggtgcaactgcacaacaacgaggcgggcaggctggtgcgtacgggcaggatggagtgagtgtgtgcggaaatgtgagtgtgcgcgcaggagtgtgcttgaggaagtgttggcaggagtgagggtgtgtaggtggaggggggcgttaatgtgtgggggagtgcgcacgggc

SEQ ID NO: 26775 - DNA, 846 bp, Homo sapiens
  chr2:220348591-220349437
  binary
cggagccccggggccggcaccgccgagcgggggcgcccctcgagatccccgtggccaggcttggggcccgtaggctacaggagtctccttccctgtctgccctcagcgaggcccagccatccagccctgcacggcccagcgcccccaaacccagtacccctaagtctgcagaaccttctgccaccacacctagtgatgctccgcagccccccgcaccccagcctgcccaagacaaggctccagagcccaggccagaaccagtccgagcctccaagcctgcaccacccccccaggccctgcaaaccctagcgctgcccctcacaccctatgctcagatcattcagtccctccagctgtcaggccacgcccagggcccctcgcagggccctgccgcgccgccttcagagcccaagccccacgctgctgtctttgccagggtggcctccccacctccgggagcccccgagaagcgcgtgccctcagccgggggtcccccggtgctagccgagaaagcccgagttcccacggtgccccccaggccaggcagcagtctcagtagcagcatcgaaaacttggagtcggaggccgtgttcgaggccaagttcaagcgcagccgcgagtcgcccctgtcgctggggctgcggctgctgagccgttcgcgctcggaggagcgcggccccttccgtggggccgaggaggaggatggcatataccggcccagcccggcggggaccccgctggagctggtgcgacggcctgagcgctcacgctcggtgcaggacctcagggctgtcggagagcctggcctcgtccgccgcctctcgctgtcactgtcccagcggctgc

SEQ ID NO: 26776 - DNA, 980 bp, Homo sapiens
  chr2:223169440-223170420
  hyper
cgacacagaaacccatcgaaaggggccaccgagacccgttgattagctggagggagcatgcggcagaagtgcagacccctcgctaacccgccaacctccaagagccctcttgcagaaagctgcccggctccccacggtggccctgcgcgcgcaccatcctcgcggtctcgcttcttcgccccggaaaactctatgaggggcaccccagcctcagccgggttaagacaagtagccccaagaggaaggagcctcagagagcctttcttcctgttcttcttcgtcttcttttttttctaaacgaaatctaatactatctggctgcaaaaatatattatcaccggctctcagcctaagagactaacatttggatatgtaggaaatgtaatctgcatggctaattgattctcagcgtatcagtttaaaggataaagatcgatatctacatgatggatattgtattaataggggcataaataaaggtcgaagagtcgttaccaaaacctttgaagccgcttttcggctctcgggccctccacgcggccagtgggtctctcccacctccccgcccccagctgctgctgggcagggagcatttgcttccccctccaacccgggaccagggtggaggagtctatggttaaagcgaaagtgtttcactgcggcaacgctggggaaaggaggttcttttttcctgggctgcagcaggtggacagtaaggcccgagaaaatgtaatattttaacaaaacgcaccactccccgaaacacacgtatacgacccacacagggacacaaacaaccacacatgtacacacacacacacacacacacactcacacacacacaatcacgcagggcggggagggttctcagcgttccctgagcgccctttggccttagagacagggaataaattcttctttccatccctcggccccctcccagagggcagcgacgaaagccctggccgagcacaaggatc

SEQ ID NO: 26777 - DNA, 754 bp, Homo sapiens
  chr2:228028714-228029468
  hyper
cgccttacctgtggggacgcccgcagcgccaggagctgccgccttgccaccccacgggacgcgcacctccagccccaatccacccgcgccccgctgcctcttcgcggcgctctcgcagccaagcccggcggccgcaagttggaggcgggctggaggcggggaacgcggaccgccgcgggcgcggggaacaagcggggcctcccgagtgcagacgcccggcgcgcctcccgcttaatctgggcagggccgctggccactccctccaccctgcgcagccacctccccaccgcgcagccacctccccaccgcacacccccaaacgccccacctccgaccgcaccccacttccccgcctgggcccccggaccttgggagcatcacctccttaaccccttaccctggatccgcgcccacctgcccctcaggcgcccagccctttctcgcctcctgggcacgatgcccgggtagaagggacactgcctggtaagttgggagggagggggtatgagggcgggacctgagccacgtcttccctcccttgaagccacaaccaaaaagcctgggtggggagggacgaaccgcgcgaccgagccctacaaaacccgccccggccgagtggcgaggcgagctttccagccgggctcccagagccgcgctgcgcaggagacgcggtggcctgagagcctgagggtccccggactcgcccaggctctgagcgcgcgcccaccatgagcgcccggaccgcccccaggcc

SEQ ID NO: 26778 - DNA, 51 bp, Homo sapiens; identical to SEQ ID NO: 9508
  chr2:232651379-232651430
  hyper

SEQ ID NO: 26779 - DNA, 774 bp, Homo sapiens
  chr2:232790030-232790804
  binary
cggctcgcgcgcctccgaaggccggctgggcggcgggcggtcccgggccgggctggggctgggcgtcgggtgggccgtactcaccgccgccagggggcgccgcactaacatcccaggccgctcatggagccgattcggtccagcttgaggccgaagcagcccttggacaagcccttcttgttggctcctttgtatttgcgcgcgttggggtgctcttgcagaaggcgagcccacgctgcccgcgacttggtgtccacgcgcaggtcccggagcagtcgcgaccggtcgcccttgagattggcgcccccgcccccgggagccttgtcgcccttcttctgaccgccgcccgcagcctgcggctcggccagctcctctgccggcggggttcgcgggacctgtccgaggaaagagcgggcaggtgaagggacacgcggctgcagcacgggggactctgatgctccagccccacgcgcccgccggcgcggggtgtccctcccaagcccagagccgcccccaccgatgccggccagcttggccccgcatccacctgccacgcggccgccttcgccgctccctccggaagccccctgccctccctttgctgctcgccgggcaggccacactggggtagggggctgcgcatgggccgatgttctccggaggctggagaagtggacccccgaatccgcgcttcgagggctccccggctctcgcccacgcgcatctcggaggagacagccgcctgccttccctctctcctgggtcctgcgcgcc

SEQ ID NO: 26780 - DNA, 226 bp, Homo sapiens; identical to SEQ ID NO: 9510
  chr2:238617178-238617404
  binary

SEQ ID NO: 26781 - DNA, 158 bp, Homo sapiens; identical to SEQ ID NO: 9511
  chr2:238625990-238626148
  hypo

SEQ ID NO: 26782 - DNA, 82 bp, Homo sapiens; identical to SEQ ID NO: 9512
  chr2:242269474-242269556
  binary

SEQ ID NO: 26783 - DNA, 86 bp, Homo sapiens
  chr2:27069899-27069985
  hyper
cggatcgccggggagcccggggagggagggattctgcagctgcagcttggaggtccttgatgctgcattttaacgcgcatcgcaac

SEQ ID NO: 26784 - DNA, 862 bp, Homo sapiens
  chr2:27070281-27071143
  binary
cgctctggacagggaagcacccgcgtggcgctgggcaaaatcttctcagtggagagaacgcactccgggttcgagacctccccgggtgcagatgcgaactgcggtggccccaagtggccgtccactttgttcatgagaacagttttcctataacgcccacccggccctttgcatcccgcaatcccgcgggcgtcggagcgggtcttggcgcgaaccaggcggcctcggcggggtcctgcggcggagggcagcgcggccgcagcccgggagaggcggccgcggcattgtttcagcccctggggtgggatccagctgggggaggggaggcggggtgtcctccggaaccgcccccggccctccctggggacccgtgcctcagcgcgtccaggctttgtggtgtcctgagtcgccatggaaacccgagggaacgcggagccgggtgctaggggggtcggtgagttctccggccgcgccctccgtccgctctcggaccccggccctgcagcagggcctgccgggagttgtagtccccaggcggcggcggcgcgcggcgccaaggatgcgggacgccgcctgtccccgcctccccttaacctgctagctgaggtggggagcggcgggaggagccggccgcgcggtgattggcggaggccgctcccagcccccgacacgcgcccctcccccgctccccactctggactcccgcgctgggcgcgctgaggcggcccccgagcgagcgcgcgtgcagccgccgccgccccgagcacccgcagctccggcgccgcggcgagacggagacggaccgagccacgggcccccgcggccgcagcatctcggaggagtgggtgatggcaggggggtc

SEQ ID NO: 26785 - DNA, 855 bp, Homo sapiens; identical to SEQ ID NO: 24259
  chr2:30453530-30454385
  binary

SEQ ID NO: 26786 - DNA, 771 bp, Homo sapiens
  chr2:31360210-31360981
  binary
cgccaataccaaggcgtctgtttttacaggctctttcgtggtgttctgggcacattcaacttccaatgcagctgagagggtcgggaacagttagagaacaggggtggcagccgcccgggaggctgcaaggcgctcgcccgcaacgcacaggcgcgcgcggcgcacccggcctccggcctccccaggtcgggcctggcagctgcgggaaggaggtcagcgcagccgccacacttcgcccgggcgctggcccgacccgaccgccggcgactctctggcagcgcccggagaccgccagcccctgggccgcccgtccgcagagccccctccgccccgggaccctcgcgcgcagctcaagttgggagccccgctccgcaggcgagcgcgcgcccaccacccacacccactgccactcatgcacaccgcgggtccggagatgcccccgagcgttttaaaatccagaaacatcacatggtagccacatccggcggctgttacctgctcgcagcacccagaccctcgccctggtttcccgggagcccgcaaacccggcacgcgggctgcgcgccctcccgcaagccaccgctcagcgccagcgcgccggcaagccgcctaccttaggggtctgcacttcaggtcccgtcggcacctccaacttcctcttggttacccagaagaacagcagcaccgtgatccagagcaccccgaagactggcagaaccagccgacgagtcaggcgccgcatggtcccctttgccgcttcctctccgcggc

SEQ ID NO: 26787 - DNA, 425 bp, Homo sapiens; identical to SEQ ID NO: 7209
  chr2:319186-319611
  hypo

SEQ ID NO: 26788 - DNA, 34 bp, Homo sapiens; identical to SEQ ID NO: 9516
  chr2:32367753-32367787
  hypo

SEQ ID NO: 26789 - DNA, 314 bp, Homo sapiens; identical to SEQ ID NO: 9517
  chr2:3582036-3582350
  hypo

SEQ ID NO: 26790 - DNA, 226 bp, Homo sapiens; identical to SEQ ID NO: 9518
  chr2:39186687-39186913
  hypo

SEQ ID NO: 26791 - DNA, 119 bp, Homo sapiens
  chr2:39188224-39188343
  hypo
cgtttctatgttgagaatatggaacacggtgcgccagcctactccacttcttcccggcagcattcttgcttgtagctagggaggaggcaagttgccctagctcaaggtagactcgctgc

SEQ ID NO: 26792 - DNA, 670 bp, Homo sapiens; identical to SEQ ID NO: 23197
  chr2:40678194-40678864
  hyper

SEQ ID NO: 26793 - DNA, 761 bp, Homo sapiens; identical to SEQ ID NO: 22874
  chr2:40678936-40679697
  binary

SEQ ID NO: 26794 - DNA, 277 bp, Homo sapiens
  chr2:45172149-45172426
  hyper
cggccaccccaaaggaccccgacgccaacagacagtcaaacgctgatgttgcgggcagaaaacataaaagaggtgacaattgtatactttctaggacaagcacggcttctcctttcggttcccatggacccggcaccccacctgcatgacgatttatttgtatctgggaaaatattctctctagttaaaaatgatttaaagagtcgactatacaaaaatcaatcaccaccacgaggacaagagggcaaaagcaaaacagacaaaaagaaaaaaaatc

SEQ ID NO: 26795 - DNA, 2459 bp, Homo sapiens; identical to SEQ ID NO: 22876
  chr2:47796765-47799224
  binary

SEQ ID NO: 26796 - DNA, 564 bp, Homo sapiens
  chr2:60706396-60706960
  hypo
cgtggggactcagcctatggacacctggcctctgcgggcacagcggccacacaccacggtgggacccggagaccattttttgttttgagtctctctaagactgcttgggaaatgaggtctctcaggtctagcatttccacgcagtcccaaccatgaggctgaccagaggccaccaacgtcaagctctctcaggtctactaggaacaggaaagaataactctcccttaacaagcccctcaggctgaaatccttttgcttccagggcctcaaccttctactgctgggtagaaagccccctctgtcaccggcccacagatctcagctgccatcgcactcaaaccctgtcaggcggtggagagtgtggacggcaggctgacgcggtttcaaagaggccgaccaggcaagaaccgtcctgtactcctgccccagctctaatgcaataaaatgtcttttatcaatgtaattcaaggcaaagagtcaagggtctgtcaccattttaaagaggcttattacatggccacaaaaatttgcctcaggctcaaacctggcatgtaaggtatcagc

SEQ ID NO: 26797 - DNA, 1067 bp, Homo sapiens; identical to SEQ ID NO: 22877
  chr2:60783811-60784878
  binary

SEQ ID NO: 26798 - DNA, 605 bp, Homo sapiens; identical to SEQ ID NO: 23199
  chr2:60796723-60797328
  hyper

SEQ ID NO: 26799 - DNA, 91 bp, Homo sapiens; identical to SEQ ID NO: 9524
  chr2:61505030-61505121
  hypo

SEQ ID NO: 26800 - DNA, 1493 bp, Homo sapiens; identical to SEQ ID NO: 24272
  chr2:63274985-63276478
  hyper

SEQ ID NO: 26801 - DNA, 92 bp, Homo sapiens; identical to SEQ ID NO: 9525
  chr2:64538788-64538880
  hypo

SEQ ID NO: 26802 - DNA, 123 bp, Homo sapiens; identical to SEQ ID NO: 7218
  chr2:69928507-69928630
  hypo

SEQ ID NO: 26803 - DNA, 814 bp, Homo sapiens
  chr2:73518220-73519034
  hyper
cgcgcgagaccgccttggcgctgccccagcctgtctctgggggttatagaggaaggcgtggggcgtgtgccagttacaaaagactgtcttgaatcccagggtagtgcctattcactgggtggtctcagaagacttcccccaaagcgcggctgacaagggtgacagcgcctggaccgcgggaactgtccgcggagctggtgctgaatagggcgtgtgcggcgggcgcttcaaggaaactggaagcgggaccggaggccggccctcgggcgtgcgaggaggagttggaagaagagcggggaggggaacggcccggaactcgtgcgcgccgaacggcggcgccccaacccataaacccatctcttgctcagagagaagcgaaggagaggcccagcgagtaaaagccgaggcccttgagccgctcctcggcgcgcgccttctgcttgaggtgcaccttgctgtgccgtttcttctcatcgctgcgcgcgaagcggcggccgcacacgtcgcaagcaaaaggcttctcgccggtgtgggtgcgcacgtgcgtggtgaggtggtcgctgcggctgaagttgcggaggcagatgcggcactggaagggtttgtggcccgtgtggatgcgcaggtggcgattgagctcgtcggagcgcgcaaagctccgcacacaactctccaccgggcaagcgaaggccttggcgtgcggccgcgggcagaagcagcgcgtgctgcatttgccgccgcggcgccccttgcgtcgcgccttggcctgggggaaaggggtgggcggcggcggcggcacgggtggtgcagccac

SEQ ID NO: 26804 - DNA, 982 bp, Homo sapiens
  chr2:73520107-73521089
  binary
cgctccgataaccgcacaggttcctgcggaggcgctggcggcccagtgtgggtgggaatgggggtgcgcaccccaggactcctaagcttcccatcgcccctattctcatagctccaatgtcccagtccctcctggttctcaggtatggtgcgcccccgcgctgcgccgtcgtcgtctgagcacccctgctcgccctccttacctccagggtagccggtggccgcgggagcgtccctggcaggcagccggggcaattcagcgctgggttcggcgcaacagccttcagtggacttgacgaggagcgcgtcgggttcggaaaactcgctaaggtggagcatggcgcggcgccggctgtggggcgcccggggcctcgcccgctgggcttgggggcgcgcgggtggcggggaggctggcggtaggggttccccgcagcgcacagacctaggcgcccgggctcctggcttcgggcactcacctctgggaaaggagtcggggagccgcggcgccctcgctcgcccgcaccggcctcgggcggcggctcctcgcctctccaaagcgctgccgggctcccccagcccacagcccccccacttatatagctgcggcggcgctggctccgggcttccgactccccgggccactgccattttgggaggccccggccctgccgccgtgacgtaaatgcccaaacatggacacaggatgtgtgccggggactcccgaaaaggaaagctcgagctgtgacgttgttgttgtcgccgccgccgccaggctcgcgccgctgcgtgcgcgcgcgctccccaggcgtggagcgctggggccgcggatgcgccagtctggggcgctgcgcctcaccgggccgaccgtccggtagatgcgcttcccacctggaggcagaggccgaggggcagcaggggaggaccgtgttgggtttgaatctgccctctgccactaactagcttgacactcagtcccccttaac

SEQ ID NO: 26805 - DNA, 788 bp, Homo sapiens; identical to SEQ ID NO: 22878
  chr2:74781700-74782488
  binary

SEQ ID NO: 26806 - DNA, 64 bp, Homo sapiens; identical to SEQ ID NO: 9530
  chr2:86914559-86914623
  hypo

SEQ ID NO: 26807 - DNA, 46 bp, Homo sapiens; identical to SEQ ID NO: 6541
  chr2:8868792-8868838
  hypo

SEQ ID NO: 26808 - DNA, 866 bp, Homo sapiens
  chr2:88751286-88752152
  binary
cgctcccacccgcagcctggacaagaagactcctggcagatcttccagccgcacaccgacccctgcgccggcccttgcgacccgcgtccgccctccccggctgggaagcacctgccagcggccctcacctgggtcgtcctcgtcgcggggcaccttcttgaagcagtcgttgagcgacaggttgtggcggatggagttctgccagccggccttgctgcgctggtagaaggggaagctatcggcgacgaactggtagatgtggctgagagtgagtttgcgctcgggcgcgctctgaatggccatggcgatgagcgccgaatacgagtagggcggccgcaccatcttcatcaggtcctcgcggctggccatggacagccagcccagctccccgggccccgcgggcgcggcgggcgaggcgggcgcggcgggcgcgggctgcgcgaagggccgctgagagcagccgaagtgccggcggcaggcggtggctgcagaaagggcccggccgcggccccggggggcggcggcggcggcggagcgcccaggtacgcggcggcggctgcggcggcggcggagggcgggcctcccacgccgggcccgttgagccacaggtaggggttggcggcggcggccggcggcgcggcgtagtcggccagcccgtaaggcgccctggctgccgggggggcgcccggggcggcggcggtggcggcgggcgggggcaggccgggctgcgaatacactccgaagttgtcgccgcagtagagggccatgtcggcggccgtgggcggctgcggcgcggccgcggcgaggggcgagcggggctggtctcgccgctcgggcgagagcatccctttgggggccaaccctgc

SEQ ID NO: 26809 - DNA, 317 bp, Homo sapiens
  chr2:8978041-8978358
  hypo
cggatccaggagcgagacctctgcctttcgcggggcctgtagttcacactccttccaggtctcccagcacctcccctcacctccttcagcctccacattcctaggccttgctgccaacaagcgtcaatcttgatttttgaaaaggtccaaggatgattacgacgtgcgtaggttgcgaaccatcgaaaagcacccaccaatgtgtcaacctggcaactcaggaaaaagccaataaggagcctgacttcatcagaagttggtgcggggtggggacaatggctcactcctgtaatcccagcattttgggaggccaagac

SEQ ID NO: 26810 - DNA, 140 bp, Homo sapiens; identical to SEQ ID NO: 9533
  chr2:91635538-91635678
  hyper

SEQ ID NO: 26811 - DNA, 608 bp, Homo sapiens; identical to SEQ ID NO: 25497
  chr2:97193030-97193638
  hyper

SEQ ID NO: 26812 - DNA, 836 bp, Homo sapiens; identical to SEQ ID NO: 25503
  chr20:1783711-1784547
  binary

SEQ ID NO: 26813 - DNA, 1469 bp, Homo sapiens
  chr20:20344267-20345736
  hyper
cgggagaagagggaaaggcggaggagagaggaacggcggtggggggggaggagcacccgccaaccccatagcaagaacgctcgccagggtagaaagtatgcccttgtggaccccaggagtctggctgcctcttcgtcctcctgcggcaggcgaggcggggtgcaggtgtgagtggggtgggaggaaggggaaaggatcggggtcgccgcagcctttctggtcagtttcgctgggttttgtcagttccgtttgagaccgaggcgcacggactagcggccgccagcacctcacaggtggaggacacctcttgcgccccaaggtcaatgtcatcccgatgggtcccgtgccgtcctgactctccctgacctaattctttggttatgactttctcaccttctgggcttcgcctctgccagctttcgccgacgtcgcccttcccgccgcccgcccgggccttcctacccgctctcctccctccctggcccgacggtcccactgaggcaaaaacaaacagccctgagggcacttcaaggagcgtgcagtggccccgacggtactctcggggggataaaagaggtggccagccacgccgtcggcccccggccgaataatgggcgcgcagcagattgccagggggcacttgaaactcgaggggagggaaatacttgagcgcggtccctccccgcgaggacgcacgacgcagcctcgcggatcgtcccttgttcgctctctttcatgcactctccttttgtgtggaattatctaaacgggagatccctggcagctttatgctaatgcgccgaacaaaggcaacggcccgcgggcgggaggcccggaaggtgcctggggccgggccgggcggggtggcggccaggcgggctgcgcgtgtctctcgcgtgcccctgggactgacacaacaacccctcattcctgcaaatacaaagcctctcaccggctcgggtcgggcgcacccggcgcagggaggcgctggtccctccgggcggcgggcactgcagcggtaacgcacggttcctgccggttgtggctcgggggactgagggccgggagtgggggcttctgtgaagccagaagagaagtctgcagcagagtggtgatgaggggcgctgacacctcacccccaacgccgacgtctccaaacgcgataccctctgcggggtgagaatgcgggcccgcccggctcctcccgtgaggccagggcctcctgttctcctagacaccccaaggagccaactcctccgcagaagttccccgcttctgctcttatttccaagcttcgcgctttctacaaactccctgttgccttgactttgatttccagccgtggtgagggtcagagtgaaccccggcgcgctccccgacggcatccccgcacaccaggataggagaaattggagggcctggggcctcgggctccgcagtcgtcggaggaagaacccaccgcggggtcc

SEQ ID NO: 26814 - DNA, 1487 bp, Homo sapiens
  chr20:20347544-20349031
  binary
cggctccgtgggggctgcgcccagacaggcagcccctttatttcgcagcgccttgattggagcccttgatttagcatctgatgtcaaccggcaaacaaaatgcccgctcggaatgaaaatgcatgaggccgcgcggggaggagaaagccaacttcactggggcgcacgaggccgaccgcgcgtttcgggcttcggccaactcgacccggattaaccgagccttggaccacgcggaagctccgggcggcctgggtcgggccccgccaaagatgccattcccaagcctccaagaacccaaaagttcagaaattcacgttcctctgggaacccagcccagcccgcccgcgctccaatcccgcgctttcgggagactgagaaggccgtgccaattccttctcaaactcgaaagaaaccttctctagccccgtgggcgcgcggaggctgcgagcacaaacatcgccctcggccactgccagaaggccgggccccctgtccacacttggaaccccggggaacccttttgcttggcctcttgggtccagcggcccatccgtccaaggtccgggcggaggccgtccggaccctgctgctctctcggattcttgtttatttcccaaacaccacgcggagccactgcgcctccgcaacgatctcccccgcaccgccccggcgcgcccccgcccccacccaatcagcgcgcacaacttccccctcggctccggctcgcggattgaaccctcctgacatatttggggccattcttctcctttgttgctattttgctagcgacccgcgggtaatccccgcgcgggaggggggcgtgcattgtcgcgctgatggacgggcccatttggcggctccgcgccccccggaggagagacacaaagcccaggcacgtgcgcctccccatagagaagcagcagaccgtgaagggaggcggggccgggcgtgtgcctggaccgggcggggcggcggcgccgggcggggcgaccaggggcgcgcgcgggggccccgcgccctcaggtacatctgccgcacctaccgggcgacccccgagtcccggcccccttttggccgccccatcgccctcccaccctgccaggctgaggagctgcggacgcgctgattggctccaggggaagcgggaggcgagaacaatggccccctccccccgttaaaagggagcggctgccgggcccggggacagggacgcgcgtgcagggcgcagagctgggccgagccgtcgccggcgccacgcgagtcccgcagccgccgcgcccgggcaatgggccgggggcactgagggccgccggggccgagcgcggaggggggaccgagccagtgccgtgccctcgggccgcgccaacatgccccgcggcttcctggtgaagcgcagcaagaagtccacgcccgtttcctaccgggtccgcggcggcgaggacggcgaccgcgcactgctgctctcgcccagctgcgggggcgcccgc

SEQ ID NO: 26815 - DNA, 1499 bp, Homo sapiens
  chr20:20349033-20350532
  binary
cgagcccccggcgccgagcccggtccccgggccgctgccgccgccgccgcccgcggagcgcgcccatgcagcgctcgccgccgcgcttgcctgcgcgcctgggccgcagccacccccgcagggcccgcgggccgcgcacttcggcaaccccgaggctgcgcaccccgcgccgctctacagtcccacgcggcccgtgagccgcgagcacgagaagcacaagtacttcgaacgcagcttcaacctgggctcgccggtctcggccgagtccttccccacgcccgccgcgctgctcggagggggcggcggcggcggcgcgagcggagctggcggaggcggcacctgcggcggcgacccgctgctcttcgcgcccgccgagctcaagatgggcacggcgttctcggctggcgccgaggcggcccgcggcccgggccccggccccccactgccccctgccgccgccctgcggcccccgggaaagcggcccccgccccctaccgccgcggagccgcccgccaaggcagtcaaggccccgggcgccaagaagcccaaggccatccgcaagctgcacttcgaggacgaggtgaccacgtcgcccgtgctggggctcaagatcaaggagggcccggtggaggcgccgcggggccgcgcggggggcgcggcgcggccgctgggcgagttcatctgccagctgtgcaaggaggagtacgccgacccgttcgcgctggcgcagcacaaatgctcgcgcatcgtgcgtgtggagtaccgctgtcccgagtgcgccaaggtcttcagctgcccggccaacctggcctcgcaccgccgctggcacaaaccgcggcccgcgcccgccgccgcccgcgcgccggagccagaagcagcagccagggctgaggcgcgggaggcacccggcggcggcagcgaccgggacacgccgagccccggcggcgtgtccgagtcgggctccgaggacgggctctacgagtgccatcactgcgccaagaagttccgccgccaggcctacctacgcaagcacctgctggcgcaccaccaggcgctgcaggccaagggcgcgccgctagcgcccccggccgaggacctactggccttgtaccccgggcccgacgagaaggcgccccaggaggcggccggcgacggcgagggggccggcgtgctgggcctgagtgcgtccgccgagtgccacctgtgcccagtgtgcggagagtcgttcgccagcaagggcgctcaggagcgccacctgcgcctgctgcacgccgcccaggtgttcccctgcaagtactgcccggccaccttctacagctcgcccggccttacgcggcacatcaacaagtgccacccatccgaaaacagacaggtgatcctcctgcaggtgcccgtgcgcccggcctgctagagcgcgccctccaccccggcccccgaactgtgccttcgcttggagacccacaaagagagtgcgccctgcactccccgaacccgagtcc

SEQ ID NO: 26816 - DNA, 2331 bp, Homo sapiens; identical to SEQ ID NO: 25505
  chr20:21080357-21082688
  hyper

SEQ ID NO: 26817 - DNA, 1300 bp, Homo sapiens
  chr20:21085683-21086983
  binary
cggccactgcacctggagcccgaagcaccggacaccaggcgcgccgttctggcgctctgcagggcctctctgggtgaaggaaagcgggcagcctgggttcagcccaccgggtcccctttcgaatgccatttcccagctgaaaatccagccagcacagcctggacgccgagccctctggagccctggtcaggacgctttaattttcaccctcccgctctgggtctgaacaacccccccgtcccccgccccccaccccaaggtgttgtttcctagggtcttctggggacatccctacctgtcgagggcctgccctcctcgggctaaaagttcagcccttcgacagagccatggaataagaggcgactctccctgtgtcccgcaagtggtttctcgaggtacccctctgaggctgcagcccccggagcagacctggctctgcatagcagcaaaagcaaccgcctacctgggccggggcaggactgtgccgcggcggcagggacagtgtgagcgccgccggccccctcacccggcgagggccctgcgctcacacttcttccaggggaaggagtggccacgcctgagcccccctaaacgacctcttcaggagaaaagagtgccggccaggagtccctccagtaacctcagtttagatcgggttttcgcgcctcccctaggaatccggctggaaaccccggagactctgcgcctagagttttgcgggcgtctctctgcctccccgcagcttccggctctcgcaggcttcatccactccctcttcccccggacctgcctgaaccccgccgagcactaggcaaggccgggctctgcgggctggggaaaagaaggggcttggggtggcccaacccgaccgccacctcggcccggcctgcggggaaaccccacaaagtcaaggcgcggggcggggtcggggggatgggatccagagagagactcagaggggcgccccttccccccaggggtctccgaatcctagggactctctaagcccccgtggcagagaaaagaggaatttttaaaaacaaatcttcccttgcctgaggccattttccagccttccacgcgcctttgccggggaaagagtcgatgactcgccctgctcatcggctcagaccagagctaccctgagcccacacctctcctcctctctgcaagacatcccttccgccacccccagtcccgccgtcctcccctctccagacccactgaccttgggaaggcgcagacccaccgctcgccaagcctcgccccgcactgtgcacgggaagagggggctccgcgc

SEQ ID NO: 26818 - DNA, 854 bp, Homo sapiens
  chr20:21485932-21486786
  hyper
cgcggagacatctcgagtcccgcaggtgtctgagctgcgctgcgcgccccagccgggaagccttttcttatccaaccgcgccgccccgcggaaagcctgggtactgcagacgccctcaccggcccaccgacagctggttttgaagcgggggcttagaaaagtaaaggggacagtgtttggagccacgatgcctttgatgtgaggcggttccacccaacaatcaacgaatcaagctggaactgcaggccctacttttgttggggggaggaccttaaggaatgtcacccccttgtcccctaccctctgccccacgcccagcctctcagaaggcaccaggcgtgagtagagtgcgaggcgtccacaccctcgtgtcccttccattcccggacacctttgcaccctagccgaggcctcagcacggagtgagggttgcctggggtgccctgctgtgtgtggggcgttcttgcctcccgggccctgaccccacggtctgggtcggcgaggcgtctctccctggcgtctggactgtgcgcctgccccgcttccaggcgacgaacggcaggagccgggggtccggcgggacccggatccagggcgggcggaaggcgagggtctctccttcccggaacccccgccccggaaacctgcaaccaaaccgggtccctcctccgcatcgctcccgcgctcccgggccgcctccccacgcgggcacccactctccgggccctcgcagcaccgccctctccgcgtccacccgcgcggccgacgccgccaggggccctgagatcgcggagacagcgcgccctggcgcctggtggggccctcccagtggccagagcgctcctggaccagtc

SEQ ID NO: 26819 - DNA, 984 bp, Homo sapiens
  chr20:21686507-21687491
  binary
cgggcgccctccctctatgcctctcacgcggcggcggcggcgcccaagctctcccggactgcgccgggcccagccccggccaccccggccaccccggcgccaggcagctggccggcccgctcgctatgggtaaggggcgggcgacaggcagggctcgggagggctgatgaggtgggtcgggtccgcctgcctcccttccctctcgtccgctttccctgggcgacccagtcctgggtcctggagaagctgcattctcctctgatccccagccttcagggggcagttgagcaagtctgggaagggagtgttccaagtagacgcgctaaaagtcgcgaaagggcacggagggctacaatgcgccgcgctccactccgcggctcctctgcgcccttgcccactccaagccagacccaggcggtttgcccttggactccgagctgtctggggacccacaggtcacctttggaagtgcgcctgggtgcagtccctcgctccgcgtggggacccttggctaacccgccgggtgttttctccccctccggctcactcttgtctggcgcatccgcagagcagacgtatggcgaggtgaaccagctgggcggtgtgttcgtcaacggccgccccctgcccaacgccatccgcttgcgcattgtggagctggcgcagctgggcatccgaccctgtgacatcagtcggcagctccgcgtatcccacggctgcgtgagcaagatcctggcgcgctacaacgagaccggctccattctgcccggggccatcggggggagcaagccccgcgtcaccactcccaacgtggtcaagcacatccgggactacaagcaaggagaccctggcatctttgcctgggagatccgcgaccggctgctggccgacggcgtctgtgacaagtacaatgtgccttcggtgagctccatcagccgcatcctgcgcaacaagatcggcagcctggcgcagcccggaccgtac

SEQ ID NO: 26820 - DNA, 831 bp, Homo sapiens
  chr20:22565361-22566192
  hyper
cgcggagcggacaagtgccgcagtgacgtgggaggctggtgatatagcgcggcgcgctggcgcgggcctccaatccccagacccggggcagcccatttgaataatcagctcacacctaggtgagaggtagccgcagccggcgctccgcacctgcccctcagcgcctgccgtccgccccaccgccgcggcgccccgcactcctgggcgggccaggggagcgggctgggcgggcgatcgggcacgcgggatccctggtcgagccccctttcctcccgggtccacagcgagtcccctgaggaaggagggacctgggaggaaaccaccctctggggcggctccggcctccagcccccgccccgtctcatcgcgccgggcgcccggtgcgcctgtcggagggcgcgtccagcctcagtgcccggcagatccctatgaaagccggatttatttatgccgggtttcttcgctctcagtgctcattctctgtcaaaacagcaagtccatgacagccaatttgcaaagcgctgtcctatttagaaaaactacgtacacacctttaactcgcccgctgctgctcctgcgaggcccctccctgttacagttcagacccggaacggcctcgggagaagcgcggggcgcacggtctggccgcctcggctctccgactcctcagacaccggccgccagggacccgcagtggggcggccggcgcctggcgcaagcagcccctctagcagcggccgacggttgggaggctgagatttgtctctgatattcaggccggcgtgtttcaaggttacttttcagtcacaaccgaggtgcccacagcatttc

SEQ ID NO: 26821 - DNA, 488 bp, Homo sapiens; identical to SEQ ID NO: 23207
  chr20:22567354-22567842
  hyper

SEQ ID NO: 26822 - DNA, 160 bp, Homo sapiens; identical to SEQ ID NO: 25508
  chr20:2668754-2668914
  hyper

SEQ ID NO: 26823 - DNA, 650 bp, Homo sapiens
  chr20:3052452-3053102
  hyper
cggggagggagggacccgcagccacaggggcgcgccccgctccggcctcgcctgagaactccaggagctgagcggattttgacgccccgcccttgaccgcggtcgaggcccccacggcgccccagcgcgtctcagccccgctgtcccgcccgaactccgaaccccggaccccagcatccttgcccggcgcaccccggccggcctcgcagggtcctccgagcgagtccccagcgccgccccggctcccgctcaccccgcccgtccccgcagtgcctcccctgcggccccgggggcaaaggccgctgcttcgggcccaatatctgctgcgcggaagagctgggctgcttcgtgggcaccgccgaagcgctgcgctgccaggaggagaactacctgccgtcgccctgccagtccggccagaaggcgtgcgggagcgggggccgctgcgcggtcttgggcctctgctgcagcccgggtgagcggggcaaggcgctccggggccagggggaggcgggcgggggtgcggccgggattcccctgactccacctcttcctccagacggctgccacgccgaccctgcctgcgacgcggaagccaccttctcccagcgctgaaacttgatggctccgaacaccctcgaagcgcgccactc

SEQ ID NO: 26824 - DNA, 1727 bp, Homo sapiens
  chr20:30639044-30640771
  binary
cgactcctcccctcccccgaccacctcccccagcttgggagtcctctgagctgccaggaagccagggtggttccttcgggcagggaactttgcatggccatggtggttccttcgagagaggaactttgcatggtgtctgaatggagcaggcctgcggaagagaaaccgctgaccacagacctgcctggaagtctcgggccgcggagttggggagggccgggccagaagggaggggtcggagtggtggggaaaagagatcacgatgcttccggggtagggtaaggcctttccagggtgggttggaatctttgaagactgtggcaggaatcccttgataggtggggttaggatctctgaagggcagggttggaatctttggaccggcggtatagacccctgggtattaaaactcttaggcggcgggaggttagatcgcgcaggagcaggagcggtattggaaccctggggtttgtgttctaaatcttagggcagggttagaatccactgaagtgagagttcggatccttccactgggcagattagaatctttgggggcaagttgagtttaaaaatccttcagaggtgggattaaaaatcctttggcggggcggggttagtatcttgggagccttggagcgggtgctggggttcttagacgggcgggttcgaatccctaggagtgggatttgggatcctttggagactggggtaggacgctgggcggtgggatggggaggtgttagggaaagtggagcggaagggatgggggttcgcatccttggtggacgcgttagaagcctcctatggatggtgctaatattttttttctcttcgtggagggtttgggatccttcttgcaggagacggaggttatgaccctcggggagccggttaggatcctggggtggcgtctgaatcttcggggaggtgttaggacacttggggcggagttagcctcgctcagggcgcggctaaggcgcccagatggcctgcgggcgccaccacgtccctggtcccagctcgggagcacatcagaggcttagaggcgagtgggaagggactcagacagtgcaggacgagaaacgcccgcggcaccaaagcccctcagagcgtcgcccccgcctctagttctagaaagtcagtttcccggcactggcaccccggaacctcaggggctgccgagctgggggggcgctcaagctgcgaggatccgggctgcccgcgagacgaggagcgggcgcccaggtgagtgccgcgcacaggggaccgggaatacccggcccgcgaggggtcccaggaggcggagggagcccaggagcctggggagggctggctacgggtgcggctgggggcagcgaggggagacggaacgtcgggggagccgcgggtagcccgggggatgaggggtcgacagcgagtggagggtgccctagggaggggcggcactgttgcggactgctggattcccggggaaggggacgctcgggcccgtgcagtgactttatccaccacttctctgggccgtccaggttccccttcttgggggggggcggggattttttttttaatttaaaaaagaaaaagaaggaagggatggggcttcacagaacccgggaaggggaaggcccttacggttcccggtgggggccgggtcacgccgggttggcagccagcttggggaagggggtagttgggcggaggcgtgacgtgcgagccacacccaggcc

SEQ ID NO: 26825 - DNA, 570 bp, Homo sapiens
  chr20:30946060-30946630
  binary
cgactcccaggcgccctttcggtttgtttttgttcaaaaaaaaaaaaccccacactccccctcctcactcttcacacacactcacacacacccacggcagacacgcacgcacccgggcgccgaagggaaagccgcgtctcgccctcccgccccgccgtcggtcctgtctcagtccctcagcagagcgggaaagcggaggccggagccgtgacctctgaccccgtggttatgcggagccgccgcattccttagcgatcgcggggcagccgccgctgccgccgtgggcgactgacgcagcgcgggcgcgtggagccgccgccgcccctcccccaccgccgctctcgcgccagccggtccccgcgtgcccgccccttctccccggccgcacccgagacctcgcgcgccgccgctgccacgcgccccccccaccgccgccgccgccccagccccgcgccaccgccccagcccgcccagcccggaggtcccgcgtggagctgccgccgccgccggggagaaggatgaaggacaaacagaagaagaagaaggagcgcacgtgggccgaggccgcgc

SEQ ID NO: 26826 - DNA, 155 bp, Homo sapiens; identical to SEQ ID NO: 9548
  chr20:31334709-31334864
  hypo

SEQ ID NO: 26827 - DNA, 427 bp, Homo sapiens
  chr20:3202068-3202495
  hypo
cgctgtcatagtagccggcatctggcttgtccacggagttcagggtacttagcttcctattaggagaaaacgttttctgtctatctttctttctgtctatctttcaaagtagcctcattgttcttcagtgatgtcccaatttgtcccgggtgtggctggcgagggcgcgtggccccggaggtgctggtggtcctgtgggtccatgcctcctccctgtgtgtgagggaagagctgccccgctctgctttttattgtattcagcaaacatttgcaggtgctgtaggggccttgcaactacattttgcgtaagttgggtcaaatcaaattcacagactcaccaaactcatactggccactgccctcctcgtgcttgtcctctggacccagttacacacctgtcccccctttcctgtggcagggccggatc

SEQ ID NO: 26828 - DNA, 161 bp, Homo sapiens; identical to SEQ ID NO: 7242
  chr20:36802873-36803034
  hypo

SEQ ID NO: 26829 - DNA, 1309 bp, Homo sapiens
  chr20:37434609-37435918
  binary
cgggtaccgagagcgctaggtccgggagtcgggctggaatgggggcgttctccccggcctcgcaattccttgacgaggccaggggagggggcgcattggcaggttgttggctgcggccgtcgtagaccgatcttggggcggggaggtggggtcctcggtctgttctggactcatggggccgccgtctgccgggggtgcaatgccgggcggcgggagccacagcggacaccaaacaacccccccccgcgcactctcccggccgggcatggtggtgccgccccctcgcgtggcggggcttggtcctggcgggcagcggcagggcgcagagagcgctcctgcccgggcgggaaagatccccaaggcaggcgcctccacctgcagacccgccccgcctcaggatccggctgacagcaccagccagcccggggagaccccgcgagtggtagttccccgggaggggcgcgcccggcctctcccagggccccgtgcgccggcggctgggtcccccgcgccaggagcgctcccctctgggcgactccggctcatcgattccggcccagaggagcgcccccgggcgccgaggatgggcggagacgtgcagccgcccctgagaggtcgcccagaggggtctccccaaggtcacccggagtgcccaggctgagctgcccagaccgccccgggtggagagccgggaggcaggcgctcgctgccctcctccttcccccatgtagactcccttcctccgctcccccaccccggcccggcctccagcttcactggagatgctgatgatgcagctcccagcccttggaggataattgagcctgggagagctttgaatctggccctcctgagaccccagggctgcgccgctgccgcgcgccaggcctgggtcccggtgctcccgggcacctcaggagcggagggagagggatgtggcttcatcagcgcttctaggaaccgaaaaccgagctgcctgcgcgcccatgtgattgcatttcacataaagggcccctgttttcactgtcagaagagccccccagctctccgcggctctggacaccaggtgccgcctctgaatcaccctctgtggaggacccggggcccggaggtacaggcgccctttcccgcagggctctccctggaaagggcctgccgatggcggcctcagtccgcaggggtacttccctgtgtaccctgccatttcctgcggctggtgaagcaccggagaaaaaccgtccatctaggaggcctcctccaaggctggtaataaagcttcttagcccagccagcgactagctgtctactc

SEQ ID NO: 26830 - DNA, 110 bp, Homo sapiens; identical to SEQ ID NO: 6547
  chr20:37657005-37657115
  hypo

SEQ ID NO: 26831 - DNA, 124 bp, Homo sapiens; identical to SEQ ID NO: 25523
  chr20:3820920-3821044
  hypo

SEQ ID NO: 26832 - DNA, 253 bp, Homo sapiens
  chr20:40321474-40321727
  binary
cgtctcggaacagttggctgcacaggtcacgtgacgcgcccctagcccggctctatttggctgcaagagcgctctgtcgcctgcctcggactctgtttcccagaagtcttcctggaaactacatttcgcagggggctttgcggcgcctacttcctcctggctgattagatgggactggtgccgttggccggacgtttttgggagcttcacaggctgatggggaagggcgaaacctgctcgattaaaacaaccc

SEQ ID NO: 26833 - DNA, 957 bp, Homo sapiens
  chr20:42543097-42544054
  hyper
cgcacccacgccgcggggcggggactagcgccgcctcaaatatttagggcaagggagtgtcccacttctggggaggggtgccgttcgggcttctctcctcaccgtgggtggcgaaaggcgggacggaaaagcgccgtctggacaggcgcgcccccctcagggatgcagggccgggcgggggacccggcggcggcccagcccggaggaaggacctccacgccccggcccgggcccccgggcccccggccctaggcagcgcccgaggccggaacaatagcgcgcgcgggcggggcgggggcgggggcggggcgctcctctgggcaccgcccccggcccgccccccgcgctcgcagtcccgctcgcacactggctcccacccgccgcccgcccaggcactgcccgcgggagccgccgccgccgccgccgcgcccgccatggacgtccgcctgtacccctcggcgcccgcggtgggcgcgcggcccggggccgagccggccggcctggcgcacctggactattaccacggcggcaaggtaggcgggggcgggcgggggtccccggcgggcggggccggagtcacctggcagctcgggactcaggcgctcccggggtcacacggggccgcgcacatcagccccgccgacgggcacgggcggctcacatcgatcccctcgcggccacgctcacgccctgagttgttgggatcgcgggcagaagtcatcccgacagccacccgtgcgacgacacagtggcccctcactcgcgtccccctgacagcctcgcagtcattcacaagccgtcacagtgacccacagccacacgcaggcggccaggcactgcttacacggtcccgccgtcccacgcaagtcaccctgacagtcacttatacacaacgacacgcaaccactcacccgcaaacagcctcaccgccacagacgagtcacccacagacgctcc

SEQ ID NO: 26834 - DNA, 55 bp, Homo sapiens; identical to SEQ ID NO: 7245
  chr20:42833281-42833336
  hypo

SEQ ID NO: 26835 - DNA, 135 bp, Homo sapiens; identical to SEQ ID NO: 9554
  chr20:43104449-43104584
  hyper

SEQ ID NO: 26836 - DNA, 78 bp, Homo sapiens
  chr20:44602349-44602427
  hypo
cggaaactcttgtctcaaacaaacaaacaaaaagtcctaaggagaagacctattaataaggagaaaaggtccgggctc

SEQ ID NO: 26837 - DNA, 321 bp, Homo sapiens
  chr20:44650187-44650508
  hyper
cgggtggcactggggagcccagggcctcccagcgaagtggccagattcaggaacccttcgcacagcgggcactaggaccctgcgcggcgccgcgtctcgcggggggcgggcgggcggagggggttgggggatccgctctttctccctcctagagcctggttgcagccacttgtgcgatcccggaccttgccgcggccgcctggctcctttccgcgccatgagccgcaggttcacggtcacctcgctgccccccgcagggcccgccagaagccctgacccagagtcccgccggcattcggtcgcagacccccgccacctccc

SEQ ID NO: 26838 - DNA, 1252 bp, Homo sapiens; identical to SEQ ID NO: 24312
  chr20:47443693-47444945
  binary

SEQ ID NO: 26839 - DNA, 876 bp, Homo sapiens
  chr20:47934774-47935650
  binary
cgaggaggggtcgggtctgggagcctccgcccccaactcaaggcaggctacacaagatctgtctccgttggcgtcccggtacctagcttgagcccgaccatgggcatgcgtggcgtggcgcgaatcctgtccctgtcgctcgtcctggccgcggtggccacgggggcctgggagcgggggccgctgggcgtgctcttgccctggcagggctccgccgcgctgggccgctgctgtcctggccgtgacccgatgtttgtcgcccgcgggcccccgcgctgcttctgcgaccaagcgtgcggcgcggcgcggcgcgggactgctgcgcagactatacgcgggtctgcccaggtgcacccggggaaaggcaaggcactagcggaacgctcggagcggaggggagctggggcgggggatgagcggaggaagggagcccagcacctagggggctctgggcttggaggggtcacacgagccgagggcggggcgcggcgcttggggactggaagggtgcgccgcggggcagacgggacgtgcagggggtcgcgcgggcaaggagggacgcagacactcaggacctaaaggggaagcactggctgtggagctgcgagccgagaaagacgcgcaggttatgaacctgggtgcgttcatctcgggggacctgaaggagagggactcgtggagagttgaggggtgtttcggaggaggggcgcaaggactgctcacaggacttgaagggcggcaggaaggtggaggattcggcccaggtgcgggacgcaggcggtggaagggaaatgagcacaagaggcgcaggcaggaaggagagcgcctggtgcgagagaggaaggagcgcacccagtaagcggtgtcgggggggtc

SEQ ID NO: 26840 - DNA, 940 bp, Homo sapiens
  chr20:4803013-4803953
  binary
cgaaaaacacgttctaggcgccgggattccagatacctgggaaatagagtgcacgcagctgttgagaggcctcgcgcttggcttctcctatcactgaggcgcagaggtgctgtggacagcccagacccacacggcgcccgaggtgaaacagaaccctcagtctccctatgaggccactggcactctcggctgtccccagagctctccgacttagagctgaatgcaaagtaagcgctcgaaatgcagaagtagccggggccgcccacggcacctgcctcgctcggggcgagagaagacgccaggctgaggtcccagcgacctcaggcaccagctccgaaggagggcggggagaccgcaaaggggaagtgcccggagggccaacggcccccgcgcaccctgcgcccctctgaagcgcgccgcctccccgcgccggggactgggacctgcctctggggaatccgcctagaagacggcggcggactggggtcgggcactctccagggctgtcaggccctccccagccctgcacctgccgcgccgccccacctcgccaggaagtctcagagaccccggggatggggtgggagcgccttcccatcgcgggctcaaaaagaaggaaggacgcccccaggggtcgtagaaggaggactagctccaagccacaactttcttcggacccaaggcaggccggctggggctccgcgcctacacggcccctggcgggggtccgcgcgccccgggagccccgcggctcggggaggaaagaggagacaagagacaggcgaggattacggggctgacccagccggggtagggaccatcgtggaaaaactttggcgaggtggggggacgcggaaagagagcggcccgcgccctgcaccttgcgccgggcatcccgcgccagtgcctcgctcccagtgccccgcgccccgcgccccgc

SEQ ID NO: 26841 - DNA, 420 bp, Homo sapiens
  chr20:48184254-48184674
  hyper
cggtcctcacctgaaaccccctcctaggtccctgccgtcgcgctaagggccagactcggacttgtcgcggtgggcgattcgccccgggggacctaccggaccccgcaccttcccaccttgcaccttcttggcagggggagcacggcctggccccctcacccacgtgcggggccccgggactcccacctccgagggtctcgccttgcccgggatactggagcgggactcgggccgggccggccgcgggctccgagacccttgggctgcagcccgggcgggagccgccccctttgtctggcggggccgagcggagcaggacactcaccgcgtgcggcggcggctcagtagcagcagcagcaacagtgcggccaggaggccgaggagcgcggcccaagccatcgcggggctggcggggctggc

SEQ ID NO: 26842 - DNA, 174 bp, Homo sapiens; identical to SEQ ID NO: 7251
  chr20:52374073-52374247
  hypo

SEQ ID NO: 26843 - DNA, 47 bp, Homo sapiens
  chr20:52484682-52484729
  hypo
cgctaatatttacgactagaacattctttattgttggtggctgtccc

SEQ ID NO: 26844 - DNA, 1472 bp, Homo sapiens
  chr20:55199913-55201385
  hyper
cgtaccgcttgtcatatacatatgtaaagataatttaaaaccctagggtatacccttttcaaatgcagagtttatagtttccaaggggaggagggcaggggaggagtaaccaggacctttcctgccagtcttccaatcgcgatagctcgttttggctgtgaatttccccccttcccctccccctcccgttaattaaataaacgctggaagcgtgtgtttaccgcacacgactcggccctcggggaactctttttctacgtctctcctactcttaaactcctcaactcacagagggttggagagctggcaccatgagcttccagttcctacgggtgagaaaagaggtgtctgtgtggagggcaggtgcgaccccgggggctagcagagaggagaggctgcgggaggactcgctgcgaagggcgaggggtggcgctgggtgggacgggcgcctggggccgtgcagggtggctcctgggtgctgcccgggctgcctgtcgcccagtactggcgcaggaagacgggtccgcgcagcgtctggcaacagtggcctgctccacgcctggaggcgaccaagttctgagttaaaggcgccgggcttagccgggaagtgtatggcgacccagaacacggagcggagaaggcctcaggggacacgaggctaccgccttagtcctcgggcctgcgctccgagcggttagggtgcgtacggatgggctccgggatgttagtggagaggtgacaggagtctaccatcccacggccaagcgtgtgaggcctccggcgggcgggggtcccccccggggcagggcagggggagagtcaggcatgtctctaacgggctccctagtagaaccgctaggaaagtggccttcaaccctaggcacctttgtggctttcaggtagttgggcgactaaaaattcacttttgcctgctgtgaaatgggacaggtggttgtcaggttagagactgtgcccacgaagtctcgtttggcgggccgggactgacgtggacccgggccctcctcggaagcttgggaacctgtgagcccctcagctcctcgcctcactttgcctgtttgaaaaaaggagttgtttgagaggaagagttaaggctcaaaaggttctaaacgaagagcatgcggcctgacgcggagcgcaaagaagcgagcagtgaactgaatctggtgggactgagaccagaggcgtctgtatgcggcggccgcttcgcgccctattaaagcaatctgttatttacgataatcatttttgtaattattttggagtggctgtgacttgatgtctgtggtgccccagggcatgcccttactggacatagatacttcagggtgccctttgacgccagtgtcggtccagtgggtgccagtgccgcgaagggagggtggcgggcgtgaatgccccctcctcctgggtttgccgcaggccccggcctttccaccttgcttgatcctggc

SEQ ID NO: 26845 - DNA, 999 bp, Homo sapiens
  chr20:55201892-55202891
  hyper
cgcagtccgcgtcttcacgtgggcaaggggcggggacgttggagggaggctgtcttggatgctggagccttcggttcccggctctgctgagcagaaaagttgaagtcaaggaagggttgaggcttcctcacaagggcgcgcgcgtgcctgggtgccggcccagaagccgagaatgtgcgtattggggaagggtctcccgtgccgagaagacagaggatttgttctagctgccttccgtacagagggcgcggaggttgcgctccagttcgaacgcttacccattggaaagagggcagcgccggggtccagggaagctccttgggaatgaatggcctttgccaagcggttccggatcctctgggtcctttgggcccacggcacggtgctgcgcgagccctcagtgcccatcggctcccttcgcctcctgcgtagacgctcccaggcggggaggcatatcggttcctccgggcagctttggctagtgttgctgtgggaaaggagagccagggcctgggatgggggatgagcaccttcttgcccattccgggccccagcgtgcaggaggtaaacttgccagcacagacaagacagcttgttcaagctgcacctcaggccgggtcagagaataaaaccgagggctagaaggcccagaatgtcggacagcccagcggcacccgtcagggagtcccaggcgcccgaaagaggcgccgcacctctggcgagtctaggacccatcttcctggacctgtgctctggagtgcctgcgggcctgggtctaatttctgcttctggcaggtgtccccctcccccgccgctaataccaggagcgctgcttctgcggtaacttattttacccccagaagcctgttttgggaccgaagtgtcagggtcctgtgtgtctttttatgcactgttctccttagtgcaaagccctgcagatatgcttggccgaaaagtctcagtggtttcaacttccagattttgttcccgcgtccggtc

SEQ ID NO: 26846 - DNA, 535 bp, Homo sapiens; identical to SEQ ID NO: 9559
  chr20:55964187-55964722
  hyper

SEQ ID NO: 26847 - DNA, 381 bp, Homo sapiens
  chr20:56772009-56772390
  hypo
cggagtgtcccactggcctgaagcttagcacaaccacactgagctggtcaccttcacctctagccccgctggcccatccatcttaccaccaccccgtcaccggggccacctctcctgggcctcctcctctcccactccaccccgtcaccggggccacctctcctgggcctcctcctctcccactctgccccgtcaccggggccacctcttctggccctcctctcccactccgccccgtcaccggggccacctctcctggccctccgcctctccctcgcttcttttctccttgctaggtcagcagatctttgaggacggagccaggctcacacttctgtggcactgatgctgtcccaccagcacaccgtcgtaagcattcac

SEQ ID NO: 26848 - DNA, 431 bp, Homo sapiens; identical to SEQ ID NO: 9561
  chr20:56784811-56785242
  binary

SEQ ID NO: 26849 - DNA, 307 bp, Homo sapiens; identical to SEQ ID NO: 9562
  chr20:56941603-56941910
  hypo

SEQ ID NO: 26850 - DNA, 280 bp, Homo sapiens; identical to SEQ ID NO: 23579
  chr20:57268860-57269140
  hypo

SEQ ID NO: 26851 - DNA, 327 bp, Homo sapiens; identical to SEQ ID NO: 9564
  chr20:57797949-57798276
  binary

SEQ ID NO: 26852 - DNA, 748 bp, Homo sapiens
  chr20:57875361-57876109
  binary
cgcgcgtgtgcgtgtgtgcgcgcgctctcgtggccttccggcagctggcagctgtcccggcccccaccccaccctaccccaccccacccagccgcgccacgccacgccgcccccgcccctcgctgtcctgggtgcgcctcgggccgctgcgctcctggccagctccccccagcgcctgggaggcgacccccagtgcgcccgggttcaaaggcccggcgaggcagttccagcccctctggggggcggggaggcgacgggggtggtgcagaagccagaaaagcccgagccacagccggccagctccgcgcagggatgggcagcgcgctctgaaagtttatgaccgccgcagccaactcctggccggagctggagacgcagcgagcgatcggccggcctcgaacccccacagctggagggcgaggccagctgtacccggccccagtgccctttcgcggccacaagcggccgtcctcctggtccggtgctccggcgcctgatctaggttcatggagccggggctgtggctccttttcgggctcacagtgacctccgccgcaggtaagcgcacggggcggcgcgcctctcctggcgcgagcgcacacaaaaggacccagggcgggggacccgaggcgcggagaagatgtgcgtcgcggggagcaaactcttgcctgggctctgcactcgtgaagacgcctgggggagggctggggagcagaagcggcgcgcaacgactacccgcacgggctcc

SEQ ID NO: 26853 - DNA, 273 bp, Homo sapiens; identical to SEQ ID NO: 22884
  chr20:57978801-57979074
  binary

SEQ ID NO: 26854 - DNA, 354 bp, Homo sapiens; identical to SEQ ID NO: 9568
  chr20:58507061-58507415
  hypo

SEQ ID NO: 26855 - DNA, 596 bp, Homo sapiens
  chr20:58507727-58508323
  hypo
cgggaaaaaaaacaacaaaaaaaaaccacgctgccgtattcgcagatgctcggccagcctggagcccggtccagaaaaggccgcacgtggagccacgtgtcgcgcattgagccgccgcgggacgcatcaggcccagctgcgcggaggggctggcggcctcaaccgcaaggagaggccgcaggtggggacggcgggagggagagaagggactgaaggcgccgagcaggaggaaggttttgcgcgcactcccttcttccctaagtggaaccggcagtggcaacaacgaggccgaaggcgaagtccctgctcccaccgccggcacggtgacccttttcccagggtcacccccgaaccaacaaagcacacacacacccgagatgcgccccaggccgcagcgccaaccccccttcagatgtcccggagacaggcgagcagcggtccccagggctcccgtcgccaccgcttctcccgcacccctcagcctcctcgggccggcgacgcgcgcagccccaggcctgctccccgctcgccaagcgcaccgccccgcgcctcagccaccttgaccgagtcgcccacgcgcgggggcggctccgagc

SEQ ID NO: 26856 - DNA, 474 bp, Homo sapiens; identical to SEQ ID NO: 22885
  chr20:58514041-58514515
  binary

SEQ ID NO: 26857 - DNA, 709 bp, Homo sapiens
  chr20:60781114-60781823
  hypo
cgtgaaatgccctctagtcaaaaagccaaagacagccacacgcgcccaggctctgcacagttgggcccaccaccctctcgtgcacgcactttccacacttcacgttagccgccgtcgcccccccgccctaagctcctggagaacagagacctcgtttgtctgtatgcagtgcccgggtcggcgctggccccgggatggaggcctgaagggcagacatgctgaggcaaccggagcgtctcatcagtgaacacacgtgccggggacctgtcctggtgccgctaaagaggctgcagagccgcggggtgcggcagtgcttggcgggggcggggtgcagctctgcgtgcatggcgtccacctggggaccgcaggtgtcaagccggggagagccagtgccaggaggtcacacacgatggttccctctacagagtgttccagaaacgatgaggagaatggattggcggtcctcgggctgaggagggcgggagggtggaggtagccgtggacacaaaagggccatgccagggtcctcagaccatcaccctgtgtgttggcggtggggccacgagtctgcacgtgcgaaagaatcctgttggcttagtgtttcaggctgggaagatgaccggctctgaaggtggagggtggtgatgggagagccactgaaccgcacacttcagatagctcaagtggtgaactttatgtttatcaccac

SEQ ID NO: 26858 - DNA, 386 bp, Homo sapiens
  chr20:60794658-60795044
  hyper
cgggtcccctggtggggcgtgtgcctgcgggagccacccaggtccgtgttccagtccccgctggcccggccacgctgggcgcccctgggtccccagcggccaggggctggggatttaccgacgaggaagtcggagatggcgaggttgagcaggaagaagttgttctgggtgcggaggctcgagtcggccacgaaggcgagcatgaccagcgcgttgcccagcaccgtggccacgatgagcagcgccatgagcgcggccagcaccgcggtccaggctgccgagaagccgcgcgccccgcccgccgccgccgcctcgcccgccagcgcccccgaagcgttcagcggcccgtcgggcggcgcgcgctccatggccccgcaggctcacgc

SEQ ID NO: 26859 - DNA, 64 bp, Homo sapiens; identical to SEQ ID NO: 7258
  chr20:60842033-60842097
  hypo

SEQ ID NO: 26860 - DNA, 871 bp, Homo sapiens; identical to SEQ ID NO: 24326
  chr20:61287746-61288617
  hypo

SEQ ID NO: 26861 - DNA, 925 bp, Homo sapiens
  chr20:62733396-62734321
  binary
cggtttccttccgtgtgcaaaggggaccgcagaaccctctttgtggggttgtgggggaaggctggggcgcccgggagggtcccgggtcgcgtccgacctcaggaaggcggggcttcagcagcggcctcggaccctccctccagggggcgctgtgggctcacgcgggcccagccttgggccccggggcgctgcggcgggaaccgcggtgactagcggggtcttaaagcgggtggcggggccgggctctcctgggaccaggagcccagagcgtggagacgtggcgggctgagccgctcagtgcggcccctgccccgcgcccaccccgccccgtgtcaggaggtccgcggagcgggaggacccgcctcccggggagagctcgcccgcccctccctcccggctggccgcggggcggtctgcagaccctttggccgtgccggatctgcctggtccccggggagaagacgctgaggatcccattgctggtctgtggatggggacaggagacgcccgaggtaagaaggggtccgggttctttggaggaatcctggttggcgccttctctgcagcagagacgcccggctggggccggagggcaaactgggggcagggtgggagacctcggccctgagggctgtaggggctcttgcctgggcgctccttaagctcccccgccccctccgccccccaccccgcggtgctcactctcagtcctgccttgcgcacattcccacgcccgggcctctcctgcccgcccctcgttgttcacttgctcattacgcctcacacctggctctgccgcgggcttggagcgggtgtctgggaaacacagtctcacttgtctcctcaaggggctccggggcaccgtaacagcgtgcagagcgcagtcaggctgccgtgctgctgctttgcgaggtgtgactgcagc

SEQ ID NO: 26862 - DNA, 383 bp, Homo sapiens
  chr20:656952-657335
  hyper
cgaggggaacggagggaaagcggtcccgagcaggcggggttcaggcacatggggccgcagggaaggggatgcagaggaaagagtgcgcactggccagcggccaccctcccgcctccagtcctctccctctcccccagttctgaagtggccagggtggacgctcagctttcactagagtaagtctcccctcccccctgctcgggctcccactggagccccctgttgggtttggggttcaactttcttcttccagaactggtggggggagcaagtcccccacgccgatgcctggccttgctcggttggtcctgttccggtgcctagctcaggcgggcgctgcaagaggaagtgaaaatcgtccagtaattaattttcctgctgcc

SEQ ID NO: 26863 - DNA, 850 bp, Homo sapiens
  chr20:708554-709404
  binary
cgggagccaccgcgcccggcgggatattatatttccataaggccctccgggggcctgggaacggactggtgcttgcgtgcggggcttttccactggttcccttccgtactcgggcttcccccgctgttgttactccctcaacgggaacacaactccaccgccgcctccgggacacacccccgccgcgtgggccggggtccgggacgcgcgctcagctcggccccgcgggggcggcgcaggagggaagggggtgcggaccccggaggcgccgcaggaagccctcgcccacccttcccggccgggccgggtccgcagctgacggtgggggtggggagcagacgggcggggcgccggccggcttgggggtcccctggtcccgtccagggggctcgggccgactccgggccagctgcggaggcgggggaggggaccccgctttccatggcagtgccgaggcggcgcgcacaaaggcgccgcgatcagcgcttcatcggttcgagtcaattatctgaggcgcggaggcggcgggcggggcgaggcgattccccggtggggctgcggagcgcggcgccgagactcagaggagggggcgctggggaagcggcttctccgtctcctgctccgccccgggcttcgtggcgaggcgccgtcgccccctggtggggcctcatccattcctcgctcactcgctcgttcacctttttctcaaccttacagcgggtggctctacggtacgagctgagggtgaagtgctgagaacagggcaagcgggccgtacctttaaatgccctgtcgggagctgggcccctctgagtggccaacctcaccaggaaagggcgctcagcctcgc

SEQ ID NO: 26864 - DNA, 139 bp, Homo sapiens; identical to SEQ ID NO: 24334
  chr21:19274771-19274910
  hypo

SEQ ID NO: 26865 - DNA, 1443 bp, Homo sapiens
  chr21:27011435-27012878
  binary
cgagtcttgattgcttttttttttctcgagttcgaggcggagcccgcgaaccccatctcctcagagcgccaccccctcagcttcgcccgttgggcagaattttccaaatatctccacccctaggctgaaaagccagaaagaagttttgagccaacgaggggaagaaaggagttggggcaaaacaggaggcgtttccctacccgcatacatccccgtccccgagacacccaatccccccacccccagcctgcccgcgcctcccgcccccagctcctcgccctggggacagctggcagccccgcgcggaccagacacaaagccgatcaatcccggaggcgtgggggcggagggacgacccgccggggctttcccgggcgctgctctcctcctgctgccccctcgctaggacccggcggacgcctcgtctggttttcacgccctctagcccctacccccacacccccaaaacagaacagacccccatccctgggctggaggacccgcctcttggcagccagctgagaaggcgccccggggagggggaaactgacatcccatctagagccgtccctcctcttcctcccctcccgactctctgctcctttcccgccccagaagttcaagggcccccggcctcctgcgctcctgccgccgggaccctcgacctcctcagagcagccggctgccgccccgggaagatggcgaggaggagccgccaccgcctcctcctgctgctgctgcgctacctggtggtcgccctgggctgtaagttgctcgggttcctctacccttcctgcctggaccagcctgcccccaccctccagccccccacggggcgctggctgacagtgtctgggcggctctgggccgaggtcgccgcggggcgtctgaccttgcgcccaggcgagcgggaaacccagggtgcccgcgagcggacgctgggagcaagggagcgcgaggtcgtgggtttcttgtgaattgcgtctgattttgtcagttctagatacagaaaattaagggttcccactagcaggttctcatctgtttgcaaagttggggtaagttttcagacagagggacgtgattcgaatgcaaaactcactacccactggtaagatgctaagaccccaagaaagatggcatcactgggaggcgggcgccggccacactttgagtccccggggagggggcagcgtccgcgtggtctgggctctgtagcgtcccagctgagccggcgatatgcagcgcacttgtggggcggaggtggagggaattcgtggctgctgagccagaattacttttatcctctccacctgcacatctacattcacttagagaagtctggtctggggactctagccagctgctctgtcctcaggggacatccaacgggacgattgttagaaagattcagaagccacatgatccagtagctggggagac

SEQ ID NO: 26866 - DNA, 954 bp, Homo sapiens
  chr21:34443630-34444584
  binary
cgctctcacccagcacatctctctccttgtccctggagttgcgcgcttcgcggggccgatgtagaacttagggcgccttgccgtggttggcgcgccccgggtgcagcgagaggccatccccgagcgctacctccccggagcggagcacgccggctcccagtactaggggctgcgctcgagcagtggcgggggcggaggggtggttcttttccttctcctccgccagaggccacgggcgcccttgttcccgccggccaggtcctatcaaaggaggctgccggaactcaagaggcagaaaaagaccagttaggcggtgcagacggtctgggacgtggcagacggacggaccctcggcggacaggtggtcggcgtcggggtgcggtgggtaggggcgaggacaacgcagggtgcgctgggttgggacgtgggtccacttttgtagaccagctgtttggagagctgtatttaagactcgcgtatccagtgttttgtcgcagagagttttcgctcttaaatcctgggggtttcttagaaagcaacttagaactcgagattcacctttcgtttccctttccccaaaagtagcgtaaccaacatttaagcttgcttaaaaacgaaaaccaaccgccttgcatccagtgttcccgatttactaaaataggtaaccaggcgtctcacagtcgccgtcctgtcaagagcgctaatgaacgttctcattaacacgcaggagtaccgggagccctgaaccgcccgctgctcggcggatcccagctgcggtggcgacggcgggaaggcgctttccgctgttcctcagcgggccgggcccttgaccagcgcggcccgcaggtcttccttctcgccgtcttgcagttgaagagctacatacgtagtcagtttcgatttgttacagacgttaacaaattcctttacccaaggttatgctatgacctttcc

SEQ ID NO: 26867 - DNA, 246 bp, Homo sapiens; identical to SEQ ID NO: 9586
  chr21:38603108-38603354
  hypo

SEQ ID NO: 26868 - DNA, 349 bp, Homo sapiens
  chr21:38918381-38918730
  hypo
cgtggatatgatgagcggttatgcgggctctgcttcttgccacctacttgcaggttgaaggatgtgcctattccacatcgctgatggggcatccgagctttccttggaggtgggcagctctttcggggttggtacccatcaggtgctgtggccagaactcagattcggagtctaaattcatactcacactctatacacctggattgagatcacagtattattattttcacaatcgaactgagcaaagatacggcagccactgaagactcactgtgaggtgcgtctaagggagaaaccatgggctgttgccgaagatctgggagaaaaagtgtggaaaaggcaaaaccgc

SEQ ID NO: 26869 - DNA, 749 bp, Homo sapiens; identical to SEQ ID NO: 9589
  chr21:40316188-40316937
  hypo

SEQ ID NO: 26870 - DNA, 66 bp, Homo sapiens; identical to SEQ ID NO: 9590
  chr21:45736431-45736497
  hypo

SEQ ID NO: 26871 - DNA, 731 bp, Homo sapiens; identical to SEQ ID NO: 6556
  chr21:47832850-47833581
  hypo

SEQ ID NO: 26872 - DNA, 651 bp, Homo sapiens; identical to SEQ ID NO: 24371
  chr22:19706042-19706693
  binary

SEQ ID NO: 26873 - DNA, 151 bp, Homo sapiens; identical to SEQ ID NO: 25577
  chr22:21153882-21154033
  hypo

SEQ ID NO: 26874 - DNA, 733 bp, Homo sapiens; identical to SEQ ID NO: 24373
  chr22:21319178-21319911
  hyper

SEQ ID NO: 26875 - DNA, 557 bp, Homo sapiens
  chr22:21368234-21368791
  hyper
cgccccgcagagggctacgtgccctgctggacagaggtctcctgcctcctcggcggcgccagcccacctcccacaacccctgcgggagaagcccccaaggggaggagacgggcctggcccctgccccgagcaccttccgtctctaggtcggagtctgaatcggccttgggaccctgcttggcttcggggacccctgcaagacgtccacaggccgccgtcgcctcttcctcctgctttttatcctccccagacctctggcaggaaccgctcatcgttacgcccctttcgcagcctcagaccctgaggcggagaccgcttggcgcctcacttagagcgcgacccggggatgtgggcggagtctgcggctgcgctgaccaatcgagtgtggcgtccatcgactggcgtctgccacggcaattagcgacgcgctcccccgcggcggtcgccccggcaacccagtgctgtaggttgccgtagaaaccgtggctctcctgcgctgaggctcctcgcctgagaggataaactgcacgcgccacgggctatgcactgggctgggc

SEQ ID NO: 26876 - DNA, 301 bp, Homo sapiens
  chr22:21982786-21983087
  hypo
cgtcgagggcgcaaagctgcacgccatcctgggcaagctgggcccgcagcgtgggcgcggtgaggacgcgcagctcatgcagccgctcccaagagcaagagaaagcgtcggggccttcaccgcagccgccggtgggaggcacactggggtagccggggtgcgccatcagctcggctgtcagggtgtggcccgctagggtaccttccaggacccgcgccagggccccggacacgcggtgagcggacatgtgccggccgcaagtgctcaggcccacgaaggcgtctgtccacctgtggggggc

SEQ ID NO: 26877 - DNA, 192 bp, Homo sapiens; identical to SEQ ID NO: 6559
  chr22:22324565-22324757
  hypo

SEQ ID NO: 26878 - DNA, 821 bp, Homo sapiens; identical to SEQ ID NO: 22889
  chr22:22862472-22863293
  binary

SEQ ID NO: 26879 - DNA, 31 bp, Homo sapiens; identical to SEQ ID NO: 9599
  chr22:24819665-24819696
  binary

SEQ ID NO: 26880 - DNA, 646 bp, Homo sapiens
  chr22:24819901-24820547
  binary
cgggagccggcgtgcgagcggcaggtcagccggggtgctaggtctggcgtgcggggtcctgggtgccgggtccggggtgcggggtgccgggggtccggggctggtggccgggcggcgtggggccgtcgggggtgcggggccgggaggactgggaggctggggttctgctcccctcagggttcctttcccgccgccccgagaccagttccccggcgcggggtccgagtcctgccccgcggcggctgccggcactgcctgtgaagggcccaggcacagtcacgtcccaggcgcagttgcggcgccgcgtgcgggaccctccgagctgtcccaaactgcaccggaaggcgcgcaggggtaggcggggagggaaggcaagtgcggcggccggcgcggcgcggggtgcggagccgcaggtagcgggcggggagcgtccgtccgtcagtccgtccgtccgtccatgcgccgcagaccggccccgcgcgctcgcatgaaccttcgcgagctcctccagcagggatggaccgggggcgcagaggcgcttcctgaggggtggcgggccgggccccggggcgagggagattccccaggtggaggagccgggcggagaccggttccccgggaaggtgaggcgcgggcagagataccc

SEQ ID NO: 26881 - DNA, 64 bp, Homo sapiens; identical to SEQ ID NO: 9602
  chr22:26999530-26999594
  hypo

SEQ ID NO: 26882 - DNA, 782 bp, Homo sapiens; identical to SEQ ID NO: 25585
  chr22:27053098-27053880
  hyper

SEQ ID NO: 26883 - DNA, 125 bp, Homo sapiens
  chr22:29167694-29167819
  hypo
cggtgggctaattgttatttttttgttgttgagatagggtcaagctagacctaggatggactcctggcctcaagcgattctcccacctcccacctccgacctcccaaagtgatgggatcacaggc

SEQ ID NO: 26884 - DNA, 1044 bp, Homo sapiens; identical to SEQ ID NO: 23589
  chr22:29445607-29446651
  hypo

SEQ ID NO: 26885 - DNA, 212 bp, Homo sapiens; identical to SEQ ID NO: 23215
  chr22:29550509-29550721
  hyper

SEQ ID NO: 26886 - DNA, 86 bp, Homo sapiens; identical to SEQ ID NO: 6560
  chr22:29587127-29587213
  hypo

SEQ ID NO: 26887 - DNA, 224 bp, Homo sapiens; identical to SEQ ID NO: 9607
  chr22:33192959-33193183
  hyper

SEQ ID NO: 26888 - DNA, 612 bp, Homo sapiens
  chr22:33453892-33454504
  binary
cggcgcagagcagaggtccggccgctgcggttcctggtttcccgcaagctcttccccgggccgggcgctgggtggaggcagtcttaggatccacagtcttgcgcgcccccggctcccgggcccggcagacggcccccgcacgccgatctgtctgtcccagggaccggcccagggccccggcagcggcagcctggggagacaccgtggtgcgcggctccttgcctccctccctgcccctccgtgcgcccgcatcccgcggacacagagccggagctccaggggacgcagcccgacgcgagaacgcaccagcagcccccgctcgaggtggggtctcccggctgtcagaaaccccacaaagtctactttgcggcgccgcgccgcttaccgtgcgagccgccaggaactcggcgcccggtggtgcctcggcgcggcgcccgccagtcgatccgctccgggtcccgggagctcagcctctgcccctcaacgcgcgcgagcgcccccgcccggcggcccggcctccccgcgccgcggcgccccattggctcgggcaacgaggcccccggacggccccgcccacccgcgcccactccctcgcccacgcctctccccaac

SEQ ID NO: 26889 - DNA, 316 bp, Homo sapiens
  chr22:35420072-35420388
  hyper
cgagggcacggacacggtagaatcccaggtggaagaaggcaaagtgggcgggaggggagaacttgcatgttttaacctttttcctgcacccaaccccgccatccggacgccaagcttccagtcaaacctgagaccacagctccccctggcggtcagcgcgagcccgcaccgcggctctcctgtgctcacgcagccctgcgcggcggaggtggctggaaatgaatttagcgtcagcacagttatttaaattgttttaattaatcacagattgagcagtaaatgaaccactaagtggagagagcgcgcgggagcaagc

SEQ ID NO: 26890 - DNA, 850 bp, Homo sapiens; identical to SEQ ID NO: 22891
  chr22:36901811-36902661
  binary

SEQ ID NO: 26891 - DNA, 524 bp, Homo sapiens
  chr22:38694460-38694984
  hypo
cggtgtaggcagcaatcagggcagcagggggcgccgccagcaccacccatgccctgctgcgggcacccaggagggaccccaggtgaagccagatcctccttgttccgacgggagacagcgccctgcctggccctgctgcccatggtggcacaagctgtcagcacggatgaggctggagggctctgggaccccagtgaggtcaaccacactgtccagctcgtacctcccgtctgtcgggagcccctcccgccaccagctcactctggccctctgagtcagggccttccccatccagtcccccaagcccgccttggcctccaggtgactcacgaatttcagcatgttccagtcaaagacgtagtcataggagaagccctgccggtggaagaggttgcggaagagctgacgtaggtaagagtagtcgggcttgtcgtcaaaccgcagggagcggcagaagttgaggtatgttgagaattcggctggagggtgttgcagaggatagagaaggccactgtgaggcccac

SEQ ID NO: 26892 - DNA, 317 bp, Homo sapiens; identical to SEQ ID NO: 9612
  chr22:40804031-40804348
  hypo

SEQ ID NO: 26893 - DNA, 553 bp, Homo sapiens; identical to SEQ ID NO: 24382
  chr22:41634408-41634961
  hypo

SEQ ID NO: 26894 - DNA, 366 bp, Homo sapiens; identical to SEQ ID NO: 9614
  chr22:41639303-41639669
  hypo

SEQ ID NO: 26895 - DNA, 143 bp, Homo sapiens; identical to SEQ ID NO: 9615
  chr22:41669366-41669509
  hypo

SEQ ID NO: 26896 - DNA, 105 bp, Homo sapiens
  chr22:41839279-41839384
  hypo
cgcgcgcgcatgtgtctgcctgctctaatgtcagaagcgaaggaagatttttttccccccctcgagacagtcttgctctgtagcccagagctggagtgcaatggc

SEQ ID NO: 26897 - DNA, 450 bp, Homo sapiens; identical to SEQ ID NO: 23217
  chr22:42353588-42354038
  hyper

SEQ ID NO: 26898 - DNA, 197 bp, Homo sapiens; identical to SEQ ID NO: 23594
  chr22:42395143-42395340
  hypo

SEQ ID NO: 26899 - DNA, 281 bp, Homo sapiens; identical to SEQ ID NO: 23595
  chr22:42667137-42667418
  hypo

SEQ ID NO: 26900 - DNA, 112 bp, Homo sapiens; identical to SEQ ID NO: 25600
  chr22:42995235-42995347
  hypo

SEQ ID NO: 26901 - DNA, 122 bp, Homo sapiens
  chr22:42995599-42995721
  hypo
cgagatgtcgtctcaaaacaaaaaaaacaacaggttctattcaacacgacctctcccacctgcctgatcagacacgcagtgtaagaaaacatgaaatgccataccatgtggtggagaaagcc

SEQ ID NO: 26902 - DNA, 551 bp, Homo sapiens; identical to SEQ ID NO: 23596
  chr22:43570061-43570612
  hypo

SEQ ID NO: 26903 - DNA, 965 bp, Homo sapiens
  chr22:44419824-44420789
  binary
cggccacgttcgtgtgacctgattctctccggctttcaggacgtcctgaggctgcacccacgtggcaatggtgtctgtcgcgctgtcgcctggatccggcaccactagcggagccgagcagagcccagggctccaacgcgtagggaaaaggctgcgccgctcccggggtggccccacgccccttctctgagcttgagcggcggcgcgggacggggacggctctggccgggaccagcaggcctcgggcatccgggacgccggggccgcgctccaggccaggggcgggggcgggaccggggcgggggccggcggcggggccgcgccctcggcctctccccggggcgaccgggcggctccacacgcgctgcgcccgccgccggccccacgcgcggcccatgtcctccgcgccgcgctcgcccaccccgcggccccgcaggatgaagaaggacgagtcgttcctgggcaagctgggcggcaccctggccaggaagcggagggcgcgcgagggtgagtgcgcgcccgcgcccgccgacccccggggacctgcccggcggtgcccgccctcggccctagagccccacgaggccgcccccgccctcccccacgcaccccgcccggcccacgcggctgcgcgaccttcgggacaggccaggcctttgacccaggacccgtaaacaacggccgggacctggcgcgtggggccgcggtggcctccggagtctgccaaacgcgcgtgcgggcgcctgcgcggcggggacctcgggccaccgtgcggggcccgcgcctgctctgcctgccgggtgttcagctcttccctgggccagcggcatagccagccgcgcggggtgaccgttcattccatgagcagtgacgctcacgtgtgcagggcactctgggcagacacggcctgggggacccactactgggtgttgcgcgggcgccctgcagggtgcggggctcagggc

SEQ ID NO: 26904 - DNA, 116 bp, Homo sapiens; identical to SEQ ID NO: 9624
  chr22:45123856-45123972
  hypo

SEQ ID NO: 26905 - DNA, 733 bp, Homo sapiens; identical to SEQ ID NO: 23597
  chr22:45593240-45593973
  hypo

SEQ ID NO: 26906 - DNA, 567 bp, Homo sapiens; identical to SEQ ID NO: 6572
  chr22:45808579-45809146
  hypo

SEQ ID NO: 26907 - DNA, 745 bp, Homo sapiens
  chr22:46929258-46930003
  hypo
cgctgatccccggtcttgaacttgggagaaccgcaggcctgctcccaggaaaatgctgacggaagcggcgcggtgcctctccccctcgctgggcctaggccgggcgcccacccccagcatccaaccggcggcaacaaatccttgcagagttgcccgggcccggcccaattgcgccccggcatgccaggcggagcccttggcgggttcctgaggctctccaggaggcccatcaggagctactcctcccaccccgacggccactcaccagacacagacacctccatgagcgcctccagcggccggttgttgtccaggtcgcggctgagctgcagttcgcccgtggcggggtccagcagcaacaggcgcagctcgttgccctgcacgaaggtgtagttgaggctgtctgacacgtcggggtcatgggccgggatgcagccgatcacgccggtggggaaactgttggacttgttggtgacatagttgttgaagaggatctggaagtcgggcagcacaggcgggttgtcattctggtccacgagaaggatgtgcaccgtggctcggctcaccagcggagccgacgtggcctgcaccaccagcacatactcccgccggacctcaaagtccagctccaccatggcacgcaggtccccgttgagcaggtccagctggaagaaatgccgcatgtccccttccacaatctgatacatgatctgggcattagggccttcatcagggtcgttagcac

SEQ ID NO: 26908 - DNA, 758 bp, Homo sapiens
  chr22:46931438-46932196
  hypo
cgggggccggcccccatcctgggccttaatgctcagcgagtatttctggacatcctcgaaatccaaggggttgatcacatccaggatcccgctcagcgagtgcaggtagaactggccggccacgttcccgctgaggatgctgtagtgaatggccgcgttctggccctggtcccggtccgtggcctgcactcgcagcacagccgtgttgagccccacgtcctcgggcacctggaccacgtagttctgctcgctgaactgggggtagttgtcgttctcgtcctccacctcgatgtacacggtggccgtggcactgagcgggcccggattgcgcccctggtcgttggcctccaccaggagctggtactcggccgcctcctcccggtccagcaccgcccgtgtgctcaccacgccagagctctcgttgagctggaagacgtcccacgcgccccccaacacgcggtaacgcaagttggcgttgatgggcgagtcgcggtcgctggcgcggatggtcagcacctcgtagcccacctccaggttctcccgcacgcgctcgcggtactccgactgctcgaagaccgggctgtggtcgttggtgtctttgaccaagacagtgatgtaggtggtggccgagcgcggcggcgtactgtagtccacggctttcaccctgaggacgtgcgtctccttggtctcgcggtccagtacgctgtccgtgctcacggcgcccgtggcagagtcgattcggaagtagccccgggagc

SEQ ID NO: 26909 - DNA, 359 bp, Homo sapiens; identical to SEQ ID NO: 6573
  chr22:46979972-46980331
  hypo

SEQ ID NO: 26910 - DNA, 832 bp, Homo sapiens; identical to SEQ ID NO: 23600
  chr22:47022417-47023249
  hypo

SEQ ID NO: 26911 - DNA, 263 bp, Homo sapiens; identical to SEQ ID NO: 9636
  chr22:47054031-47054294
  hypo

SEQ ID NO: 26912 - DNA, 272 bp, Homo sapiens
  chr22:47327916-47328188
  hypo
cgaggaatgccttattctgatgttacgcggtttctttcctggctcatgcatgcccccatttgtgcgtttatagaaagtgtaagtcctgtgctagtcagagcaagactctgtcagtgaagacgatggtgactagtggcgggttcaccgtgtcagacactgcgctaagcaggtcattacatgatcacctggaattcttaaatgccctctggcgacaccaccatacatgactgttgtgactcccccaggttgcccgtcaaggccgtgctgtgacc

SEQ ID NO: 26913 - DNA, 350 bp, Homo sapiens; identical to SEQ ID NO: 9638
  chr22:47436589-47436939
  hypo

SEQ ID NO: 26914 - DNA, 425 bp, Homo sapiens; identical to SEQ ID NO: 22892
  chr22:50170525-50170950
  binary

SEQ ID NO: 26915 - DNA, 210 bp, Homo sapiens; identical to SEQ ID NO: 23602
  chr22:50177139-50177349
  hypo

SEQ ID NO: 26916 - DNA, 774 bp, Homo sapiens
  chr22:50623263-50624037
  binary
cgccagcgccaggtcagccaagaacccggggtcgtggaggaggaaggaagtcgtgggcccgggatgcgcggccggaccattgcaggagagcggggcaggcggacggcgcagcagcttgcgggcagcgagtcgtctgcatgcggcggcgaagcgcccgggcccccgtccgcgccggtgcccgcagcgcgcagcaacttggccgccgggtcccggccgccccggtagaggctgggtacagcgagggggccgggcgcccgggcaggacgggcgcggcgggtggggcctggccgtctccccctgccctcggggccgaacacgcacagcgagagtctagcgtcggcgtggctgcggccagccgggtccccctggaggcctccggacgatcggaagtgactgagcgtccgggtccgtgaggccgggggtcggcccgccctaagactcccacctggtcccggttctccgtccgctaggctggccgcggggcccctggggcccgaccttcccggggtgccccaacctgcggcaaggccgaggtcccgctgaggcatgagtcccgggtcggggaccgctctgggccgacccccggaggacggactaggccgatccccagagggaagggggccaggccgaggccatggcagcgcgttccctgatcccgtgttctcggctcctcgcgtcccactatcggctgtccctttcgtgcgggactgacggctcacagaacagttacatttcaatatcattcgactgaaaaccatcctgtggacgccgtgc

SEQ ID NO: 26917 - DNA, 152 bp, Homo sapiens; identical to SEQ ID NO: 9643
  chr22:50873262-50873414
  hypo

SEQ ID NO: 26918 - DNA, 828 bp, Homo sapiens; identical to SEQ ID NO: 24389
  chr22:50899033-50899861
  hypo

SEQ ID NO: 26919 - DNA, 1005 bp, Homo sapiens; identical to SEQ ID NO: 23604
  chr22:50942715-50943720
  hypo

SEQ ID NO: 26920 - DNA, 858 bp, Homo sapiens; identical to SEQ ID NO: 25619
  chr3:10206343-10207201
  hyper

SEQ ID NO: 26921 - DNA, 238 bp, Homo sapiens; identical to SEQ ID NO: 9648
  chr3:106959642-106959880
  hyper

SEQ ID NO: 26922 - DNA, 319 bp, Homo sapiens
  chr3:107148769-107149088
  hyper
cgcccaggctgggaggcccaagtcccggcagctgctgcggtggacttagaggcagcagctcctgcttctgccccaaacgttcagtgtagtcggattcccggggacagcagggcagtctgcgcgcacatccccggggcatcgcaggacacctgctgccccctatcggtggtgagaacaataacccgaacccggttggaatcaactggaagaggccttttgaaaaaaagaatattccaggactacgcagtagccagacgactctctaagaacatgggtttccgcagtcagctccgactgcctcgttttaatgcagtttttc

SEQ ID NO: 26923 - DNA, 364 bp, Homo sapiens; identical to SEQ ID NO: 23220
  chr3:115231437-115231801
  hyper

SEQ ID NO: 26924 - DNA, 871 bp, Homo sapiens; identical to SEQ ID NO: 23222
  chr3:117715822-117716693
  hyper

SEQ ID NO: 26925 - DNA, 406 bp, Homo sapiens
  chr3:119421803-119422209
  hyper
cggccccgccccgcggcctcctccctcctccttgccccgccccctatccctgcgcgccggcggccgttaccatagcgacgtgcacgcagtagccaggcctgacccgctggtcccttgctggcgggaggaaagaggcggcaccatgagccacgcagtaaccatcgaggagccccaggcccagccgcaggtgtctcaaactcggtaccgggagaggtcgcgggctgggagccacatctcctccaatcgagcgtatgattttctgtacggtaaggaccgccgcagaccttcctccgcgtccgtcgcctcctaggccaggtgggctcccagatggtgggacctggccaggggcatggcgaacgaaacacgaccctctggactgacctcttgcccacggttgtccttggtc

SEQ ID NO: 26926 - DNA, 1275 bp, Homo sapiens
  chr3:120626737-120628012
  binary
cgacccccagcatactggccaataccgctgtcaatcaaatacctcacctacttctctaaattcccccctcccactgtcattggctttaccttcggcctatccacagatttcttctgccctggagaccacagaacttaccctatcgaatctaggattggcgccgaagctactcccgccctttgacgtccccgggcaccccgcccccttcacctcccagctttgccggggaagaagcagggcggggcaagctaggggccggcccgggggcggggcctgcctcccacggcgggagggcggagcctgctctggagcctgactgctcggttaggacctcggagagcgccaggcgccgcgaccagagggcccagagaagcggccggagcccgcctacctcggccccctcagcttcccgggctggcaggcggctagaggcgtctgaggaaggtgcctaagtcctgggtcagatagtcatccctctgggacgccgccgccgctgccgccgtccagctgtggctccctcgcacctgtgtgtgtctgtgtgagtgtgtgtgtgtgtttgagagagagagagacagagagagacagagacagagagcgagcgcaccagcgcgcgaatgcccgtgtgagggtgtttgtgtgtgttctggctgggagcgcgaatgcctcggcgtgaggtgtttgtgtgttcgcgcgcccgcgggcgggcgagagccccgcgcctcagcgctgggcctgggggagggacagcgggagcggcggctctgcgcgcccagcaggctgaggcgggactcgggccgcagccgtcgccgccaccgcttcacgtcccccgagagcggctgccgtgcagcggggagagcggacggcgggcgggcgaacaggcgggagagcgcggcggcggctgcgggcagaggtggagggaggggagcaggagatggggagaggggggaaagaggacgcggggagggagatgagggggaggtgagggggaggcggagggacaagtggaaacagacggtgtcgccgttctcctcctccccccctccccggcagctgttgctgtgggtcactcgcagatgttttggggtccgggctgctgggggatggggactagaaaaagtacccccctccccgcctttcatagtgacaaaaaaggaagcgttgaagctgatgggggaagagcccggaaggtggtggcagagtaaataccggctcccccaacgtcgtttttctgaaaataaaatactctgagccgaacgtttcgaagaaggaaagtcc

SEQ ID NO: 26927 - DNA, 185 bp, Homo sapiens; identical to SEQ ID NO: 7332
  chr3:128737561-128737746
  hypo

SEQ ID NO: 26928 - DNA, 1269 bp, Homo sapiens; identical to SEQ ID NO: 22894
  chr3:129693123-129694392
  binary

SEQ ID NO: 26929 - DNA, 412 bp, Homo sapiens; identical to SEQ ID NO: 22895
  chr3:130064466-130064878
  binary

SEQ ID NO: 26930 - DNA, 216 bp, Homo sapiens; identical to SEQ ID NO: 7334
  chr3:130424529-130424745
  hypo

SEQ ID NO: 26931 - DNA, 769 bp, Homo sapiens
  chr3:131753369-131754138
  hyper
cgccccaggaacacaggaatgaagagttggcatttacttacctgggtgtgccaatctcgaagagtggagagagaattcagcccgggacgaggtctgtcccgcccccaggatgcaaaatccggctttgaagtggaggtggttggtgtggtagttttgtactgatgtaaggggcgtcgcacctccttcccctctcgtcctccgaggtcagtttagcaacagcggctgggaaaggtgctgagagcagagttcggtctctccggaaaccctgactccattctcggtgatgggggtgggggaagagggtgaaaatgttggagatgtcaggtcggctctcagttaactcggagagtaaagaggagggtactgagaaaagagggagggagtggagtggagcgagggaggaaggaaaggagggtggcagaaagagaaggggacgagcgggtggcggggagatggcagcttctcacagagagatttccaccttctgacgaatcccatgcacccagcaacccggcaagagactggttccgaaacctccgcgcgagcgccccctgggggttgctgacggagacgagcattgccccgggaacccgagctcaggccccgcccaggccttggcggcggcgctctccgtggtcctgccgcgcccgcagtctgggctttctgctcagctttgtcgctcaactgagctcctggggacacttgatttagatctccaagtgcttggtctccatctccactctagggtggagcggtcgtatcgcggcgc

SEQ ID NO: 26932 - DNA, 1011 bp, Homo sapiens
  chr3:132756962-132757973
  binary
cgaaaacagagaccctttgtgcccgcctcgcacccgctctgctaggtagcaaccgaacccccagagacatcggagcgggcgctgccgagggcaatttggtgattggctggtctcaccacgtgaccggcgctgagccttccgtgcgaccggattggctgtcgcggacgctgacggacaaggccggggcgggccagagcctggtcggaggggcgcgcgcgggggcccgaggggcgaaggcgcgagtgcgcgagagcgcgtgcgcgagcggtggggctttctcctgagccgtcggagggagccggagcgcttctcccgaggtaagcggcgctccggggcgtccccccagtccttcccatgctgggtcccggcaagcgggttaggctgggctgggcggggctcggggaggtgtggggtcagcttgccccgggagcccagcttcagggaggatgcagccccggttgccttggtttcccttttcctatcctctcaggcaccttcccatcctccccactgcgtgacgggtctgcccgaggggagttgcccacctggcagccctgcctccgcctttgtttcccgcctggagggttgctggcatgaaccccctccccaggtggagggtgcgggtgatggggcgcgggcgtcaggagcgctggacctgggctggggccgaggaggaggtggctttaatgcagggggacctgtcacatggggaaacgaagaagaagaaatgtagtgtcactttggccagcccgagggactcgaactaatcctgcggccgcgagcggagccgaattcctagcgcagctgtgcgaagagccctcctgcctaggtgccggcggcctcgccggggacggagcctccgtgctgcccgggaggttgctctgccggctggacctggcggttttcaccccagagttgcagcgaaattgaacgctttgagcctgctggaggaatccagagattggttcaggggctatttttttttttaagcagttgggcaccggtggagcc

SEQ ID NO: 26933 - DNA, 775 bp, Homo sapiens
  chr3:134513748-134514523
  binary
cgaaggctcgtttgatcatttaaagcggatccagtcctgggtgggatgtaagggcacgaggcctccccagctccttcgctgggcaccctatggggggacagggtgagttgggcgggccgctgcggttctccgagagcaccacgagggggagcccggacccctcctagcgccttccgagccctcccgcacagccttgcaagcaaaagtttttcttaaactaacaatgccagtgtaaggaggtgctcgcgcctgattggccgggggaattttgcaggtttgattccttgattggacaggaggtgttaggggtggggagagagctgatggtgggggatcccgctccctcccgcgtcagtctggccggctccgtcctcccgtaggctccgctgtagctagcaatgtgacaccaggacgcactcgctctcgcgcgctctcccaggctcgttctccctcgccctctctctctcacacacgcacgcacacacccacctctcccataaacacacacacacacatgcacacccacacccacgcgcgcccgcaccgccccacgcgcacacactcctgcccacgcccacgcagcgctccgggaagtccggtccgggcgagagcgcgaaaggataccgagaagccacccgcggagagcgcagcggcgccctgggacgcggcgctctcccggcgctgctgcctcggcttggtctcggcctgcgggccgtcggccggcgatggccctggattatctactactgctcctcctggcatccgcagtggctgc

SEQ ID NO: 26934 - DNA, 136 bp, Homo sapiens
  chr3:136582936-136583072
  hypo
cgtctcaaaaaaataaataaaatgtgtatttatttttctaggcattatcctttgtccaggtttctgcagtgctttcaggtccatctaaataaaatttgaaacctacgtgtaatgttggccgggctcggtggctcac

SEQ ID NO: 26935 - DNA, 454 bp, Homo sapiens; identical to SEQ ID NO: 23225
  chr3:136751341-136751795
  hyper

SEQ ID NO: 26936 - DNA, 961 bp, Homo sapiens
  chr3:137479995-137480956
  hyper
cgcatcctggacgctctgcgccctggagggagacgaaaggcccggagagaagcagattaggtcggtgcccttagaggcctcttccttcacttccgggaaacagcggcggttccctgacaaaatccctgttgctcgggggttcggacgccttgctaaggctggcacgcagcggaccttgagtagctgcgctgtgtactgaacgtgtgcacagcttctccaggcaaatgtgcaagcggaaagacctcatccaagcgttatctccagccctggaggagaatgaactggtagcctggggccaaacttcaggccgtggacaaagcaggaggagtatttaggcaacctctgtcctaatgcttgttctggttgtgaccgaagttgctgactctcctcaggggtcacgtctccaggacgtgctacccggtggtttagacccgtcagggaggcacagcgtgaagggacagcgcagcgcagtagaggcacctgctggagacagcaccaggccagaccccaggatcacgggaactcctgctcccgccacagctctaaagagtgttgaataaaccggtggtcaccggtactgcgtaaggggtgtgcgtggctttgcagttcgcctaggagacaagctgatgcacggcctggaaggtgcagccctcatccctgcgttccctccccgcgcggagttcctgtctcaaggccaagacgcgcagcgctgatgctggccccttcctaggtcagtgcagctggaccaggcaatcggggtctccgaaacgtcggggggtcagctggcgccctgcccaccatcgaacgcccttcgtatcactccgctcctcattgcgaattggactgcgcattggctgcgacccaaggctgaacacaagaagcttggagaggagctcgggcgtttgaggagaaggaaatatgaggaattgcaggaaggcgctcgcctgcccgaactgcctcc

SEQ ID NO: 26937 - DNA, 817 bp, Homo sapiens
  chr3:137483857-137484674
  hyper
cgacctcggcgcaagcccaagaacctgctcaagaaggacaggtatgtcttccccttgccctacctgggcgacacggacccgctcaaggcggctggcctgcccgtgggggcctccgacggcctcctgagcgcgcccgagaaagcccgggccttcttgccgccggcctcggcgccctactccctgctggaccccgcgcagtttagctcgagcgccatccagaagatgggcgaagtgccccacaccttggctaccggcgctctgccctacgcgtccaccctgggctaccagaacggcgccttcggcagcctcagctgccccagccagcacacgcacacgcacccgtcccccaccaaccctggctacgtggtgccctgtaactgtaccgcctggtctgcctccaccctgcagccccccgtcgcctacatcctcttcccaggcatgaccaagactggcatagacccttattcgtcagcccacgctacggccatgtaacccccagcccggcccggacctgaggcgtggtctgaaagccgggtctgcaccctgtcctctgagcctagccccggcctgcagacgcctccggggtcagccctgccgctgtcccttacaccacccagacttttcctctctcttccagggggaagggtggggcgtcctcccggacccaaggcgcagacaggtaccggaaacttgcaaacgttatgtcagctacacagctgcccctatcccgactctcccaaaacaaatctccgactgtaccccctttggacaaaaaagtaggcagttttgctttatttatatccccttcactctcctc

SEQ ID NO: 26938 - DNA, 531 bp, Homo sapiens
  chr3:137485076-137485607
  hyper
cgatgtcttggaaatgtacctagaaggattttacctcgttgctctgttcatttgttgaacaaagacgttttgaataaagacaatctgtcattgtaaaaaagtaacctttgatgtgcctaaaatctgaagtcaggagccaggttggagggactggaaagtcgggtgcggggaggctgaaagtgcatagagcgactttaagcagtgatggctggtggctgccccccgttggcccagcttggtggtctgcgggttgggtgtagaagggcctagagcttcggatccgtccggaatgcgccctggagattgctttttgcctttagaggctagacaaaggtatcgttccctgggacttcactctctcctcccattcttcccaaaagggtcaggccacttcaaggaatgaatgaactaagtcaaaggccgacccagaccgctgagatctgggtgagtttactttttaaaaaaccaaacgctgaaggagcagggagaagcaccgagtctcctgggaaccagttgcgcgctgaacacccc

SEQ ID NO: 26939 - DNA, 450 bp, Homo sapiens
  chr3:137485846-137486296
  hyper
cgacattgtcatggctcaggcaaggagtttttaaaaatcgtaaaaaatcaaataaaagcacagcccatgacgttaaacaaggaaaagagtccttttctttcccctccgggtgaatgttttcttgaagattattgtctttcctgagaaaggaccctccgatgttatccagcaaaactctttggaatttgttctcaaaatcgaagggtgctttccacccttggtcttggagtctcaccccaaaagccgcgctcacgcgtggttttccttaatttgcgtgcttttcccactggctttgatatgctgtggggtgggaggtggggcagcctagaggtttgtgggctttctgctgctgttgagagatttgtacgcttgcctccgctgtttccaaaggagtcggtggctcgaagtgcacgggaaacgttgtcaacagacaccaaagccgaaacccgc

SEQ ID NO: 26940 - DNA, 953 bp, Homo sapiens
  chr3:137487318-137488271
  hyper
cgtttccttccttctcagactggccttccccagccatctgccctccttagacctggtcccaacctctgcccccacccccatccccgcaagagcctgcctcagctttgcctccgtcgccccgagggctgcggagcgtccgccgaggtgcgcggccgcgactcgccctaacaaacagccaaaatcctgctcgtcacgccgctgacaggggccgattactgactttgaagtcaggcgcagacaaaaagaaatcccctggggggtgtgggggggcagcagtccctgtcaaacctgtttgctcacaactgtctctttctttcaagaaaatcattaaagcaaacctgtagggagaggagcgccccgcccgcccggagtggagaagagccgcttctcccgagcgcgcgtcgcgcagcaaagagcagccaagagttgccctggacagactcctggcatccggagaacctgaactccggcgctgcaaggggcgcccgtggccctgcaggaggaggttctgcagatccctctgcgttaggcacgcgtccggtagccagggagccccagacttctctcgcttagcaacctgggcctccttcgagcggggttggcagggagggcccggacctctcgcctgaggctcccattgcttccccgggacccttctccccgccaaaagtgacccaaatacatgccgcgttcagcgccgtcgctcctctgctgggtgttccctaggacagcagagacctgaacagcatgctgctggggtggcagccatctgcgccggcgcggcaggagcagagttgtttgggttttacctaggtttgctttcttaaaccttggctgccatctggctcaggggtacactggctacatcttcagagagatgtggaattcttgacccctttccgcctctggcctccctcattccgagaactccgtcagcctttcatgcacttctc

SEQ ID NO: 26941 - DNA, 1489 bp, Homo sapiens; identical to SEQ ID NO: 23228
  chr3:138657617-138659106
  hyper

SEQ ID NO: 26942 - DNA, 1358 bp, Homo sapiens
  chr3:139653822-139655180
  binary
cggtcccgactgggcagggggacctggacagggccccggagcgtggagacggctgaggaaagttgggggtcggggccttggggcggggagcgcggaacccggcgccgatgcccgcgttcatgaatatgcacgagccacctccctccctccgtgacgtcacgggccgtcccggggtgagcgcctgagccgctccgggtccgcgccagtgagcgcggctgctgccggcgagctagcggcgcagcggcgggaacccgaggccgagcgccgcggcggcagcgctagaagcgcacccatcgggcacggcgaggcggcccacggtgcggcaggcaccgggaggcgagagccggcgcggacagtaggcggcggctgcagctcgttggcggctgctgcgaggatgctgcctgggcggctgtgctgggtgccgctcctgctggcgctgggcgtggggagcggcagcggcggtggcggggacagccggcagcgccgcctcctcgcggctaaaggtgggtgctggggaagtttgctcttctcccaggagggaggcagggcaggcttgagggtgaaagcggcaaggacctaggctcaagctggatttgcccaccctcccttgccgcagcttctttggcctctgtgcgccctggattcccgaagtcagttccctgcgcagcggaccagagaggtccacccgcggacgtcaactcaacccctgggcggggtccgggggctgagcagaaggcgaggtctggggagtacggacaactttgagggctgtctgtgccggggtgggagcgcagtgggtgagtttcgagctctggcccagggacggctagagcagggcgctggcgcgccgtggggacaagcaggtgtctgctcctgcctgggggaaggatcagcggcggtgctttcaaggagggagccgagctgtgacttgtctcccagctcggggatggagtggaaacttgtaggctccagggaaggccccgctgacactcctcaagctcccccagggcgtctctgactccccggggaacgtgtaccctccgggtaggcggcggggtccggaagaagcgcgggatgtgaggctccccgctgcctttcctactccgctctgactaccgaggaccgaggagcctaacctggcaccactcccctgcccaccctgttcctttgaagagcttgacctccccgcgcctcccgcccggaaggaagctagatccaagcgaacgcctggctctgtcaggcgagcctggaagccggcgaaccccggactttgacagctgcctgggagcgtcgggagctctggggtggggggccgggtctgaaacaggaggtcacgtgcttgcagggggtggggaggc

SEQ ID NO: 26943 - DNA, 713 bp, Homo sapiens
  chr3:140771249-140771962
  hyper
cgtaggtagacatgtgctgggcacacaggaaacactcaatcatatgttagctagtattattattagctttgcgagcccaagcttgttatccaactttccgaagctgcagcagttccgtcgtccgtgtaatggggacaataattcctgggggtctgttcgtccggggtattcggagaggtggaagtaaagcacgggtcacgcaataggcaccggtggctgttgttaccgtttattcctgactctggggcagtgaggctggtcgcctggcccgagagcgactcagggaccagtcctggccttgcttgaatacaaacttgtctatgctcgggaagggagggggttgggagctcaggaaaccctaggcgcagggctctgggaaggagggagggggtcagagacttgagcgcggcaaatgtgtccgccctggtcgctctgtacgcgccaggggctccaagccagaaggggacgccgagcccccgacctctgactggcgggagaaccgggggagtggctgctcccgccggcccatggccaagcgcagacggctgccggcaggaaggagaggagggcacttttctgtaccgctgtcgcgagaaggtggagagttctcagttctggagtcaggcttgggttcgaatctgtctccaccaccagctcgcggtgtgaccttgggcaagttctctaacctccccccgcttggtttcctcttctgc

SEQ ID NO: 26944 - DNA, 147 bp, Homo sapiens; identical to SEQ ID NO: 9663
  chr3:141622422-141622569
  hypo

SEQ ID NO: 26945 - DNA, 2468 bp, Homo sapiens; identical to SEQ ID NO: 25634
  chr3:142837817-142840285
  binary

SEQ ID NO: 26946 - DNA, 216 bp, Homo sapiens; identical to SEQ ID NO: 6583
  chr3:148804777-148804993
  hypo

SEQ ID NO: 26947 - DNA, 77 bp, Homo sapiens; identical to SEQ ID NO: 7342
  chr3:150187009-150187086
  hypo

SEQ ID NO: 26948 - DNA, 911 bp, Homo sapiens
  chr3:150802802-150803713
  binary
cgtgggttcaaattccgactcgtttcgtggctttcggcaagtgagtggtcctctctgagctggctcaatttctccatccataaaaagggtacagtaagaccgtggaaggttgtaaggaccagagattctgactatcaagatcctggcacgtagcgaaggctccataaatggcagccatcattcttggccaagtgcgggcgcattctcccgggcacgcctcccgcggggtccctcaggacaggccgagcccgcctccgcggctccggtctcgcagagctcgcgccaggtggcccagcatcttggtgcccgcgccccgaagcgaggagcgagggcgggttggatgaccaaggtctgccctggaggatcaccccccccgccccttccacgctcccggcgcaggtgaggttttcggcccaggccacggggaccgcgacctctggggaggtcgaggcggagggtgcagcggggggcttggagcagggctccagagggcgctccctccctcgcccaggttcaccccagggccagcctcggcgccggggcccgcgggctgcgcgctctgcggctgcgaaaacccggagaggcggattggagcgcgctcaccgcgctctcagccaactcctccgcggtccggccgccgagctgggcatgctcagtgcggacgccgcgccgccgtccgccaactcggaagctcgcgctcccgggccgtgggggcgagaacgccggcggcgagccggcgtcgctcgccgcccccagacagtggcaaacttcgcggcgttcccggagctcgtccgggcgaggcagataccgcacaaataaaatcaaatccaagtcccccatcccaacccgaatgatggaggctgcggcggccggagtgaccccgccgccgccagccccagcccgctagccgc

SEQ ID NO: 26949 - DNA, 1420 bp, Homo sapiens
  chr3:152552403-152553823
  hyper
cggtcccggcaaagctagacgctctgcaatgacaggcgttcccagctagggactcctggctgcttggagcttgaaaacacctggcgtggttctcgagggccctagaggctcctgctacggactggtcggctctggggttgtaggcagaaggctctaagcggtcggaagggtttcctgtgtgtcagcaacttcactttgccgagatagctggcggaagagggaaggagcgctcgcgggccaatcgcctgccagcagccaccttggagcgcacccctctccctcgccgccgactccggtagcagcgtgccggcagaggctgaacacactcggcctcggcggagacctgctccccagaagacgcctcctgcttcccactgcgccctggaggacgcgggctggctgctgggcgagctcggcggaggcacgcccctcgcctccccgcggagtgcggactcgccccggtgcccaaactccgcccaccctctagggagctccgctctcccgcctaaccccggcactccggacagagctgggcctggggaaggggttcctgaactacgcggacgccgaacgggacgcgctgcagaagcgcacgagtctgcggccacgcgcgctccgatggctgccaggagctgagctcagggtgggcggaggaagcggttagacgccccgaaactgagctgcacgtttctaaggtagggaggaggaagatgcccccaattaagttgatctttgagccaaggaggctggggagcagcctccccaagctagagccctgcagagcgagtttcccttgacctcgctgcgcctctggcgcgctctgcagcgcggacccgcggcccctcgggaaagcgcagtcggaaagttatccgcggcggttccctgcgcgccctgttgtgtaagctcggcgttgccagcggacggagaagttgctggcttgcccgatagcccagttcggtggcggcccggggcggatttcatggcccgcggcgaacgcggggccagagctggcgtgggcgagcccctgcgcgccccctcccgcggggatccagttcgcctgctcccttccgctcgctggcttttccgatgcttgctgcgcccctggccgccgctgccctctcgccgcctcctacccctcggagccgccgcctaagtcgaggaggagagaatgaccgaggtgctgtggccggctgtccccaacgggacggacgctgccttcctggccggtccgggttcgtcctgggggaacagcacggtcgcctccactgccgccgtctcctcgtcgttcaaatgcgccttgaccaagacgggcttccagttttactacctgccggctgtctacatcttggtattcatcatcggcttcctgggcaacagcgtggccatctggatgttcgtcttccacatgaagccctggagc

SEQ ID NO: 26950 - DNA, 32 bp, Homo sapiens; identical to SEQ ID NO: 9668
  chr3:152878837-152878869
  hyper

SEQ ID NO: 26951 - DNA, 245 bp, Homo sapiens
  chr3:152879611-152879856
  hyper
cggggctgagtgaatggcgtccttgggcctttgataacgggagttggcaagaccacagcctactccatccctgaggcggcccgccgcgcccacgtgcttctcgcagagccgccgcccttgtccaccactcccacagctgtaaaataaagcggcctgcatgcttcctacagcgctttcctcgctcccatatacgcacacacaccccatcttccagccagttcctaactcgcgccactccccaaatc

SEQ ID NO: 26952 - DNA, 1056 bp, Homo sapiens; identical to SEQ ID NO: 23233
  chr3:154797121-154798177
  hyper

SEQ ID NO: 26953 - DNA, 838 bp, Homo sapiens; identical to SEQ ID NO: 24412
  chr3:157812151-157812989
  hyper

SEQ ID NO: 26954 - DNA, 841 bp, Homo sapiens
  chr3:164912922-164913763
  hyper
cgctgcatcattcattttctgaagagctttgagccgtctatagagccttttctaatctgctgtcgtcaggcgaaacgcacaatggtctgtttagaaacggaaaattattaaaagctcaagcctttttccttctacctcttacaacaccagcgagcattccactgggggaggggtccttcgctccgccacctggcctatttgttggagttacttacgatgtcttcacccagaaaagaggtccgagggtatgttagtctccggtacccctccttccaccaacgtccttacacctaactgatccaattcaaaactgcaacaaacccctagcacctgtgagcgtacagaatacaccgcggccaaactcgatgtgctctacaatgcacatcctacatacgagaaatactggtttcaattaggcgaagtaggaaaggatggcggcgagtacctatggtgcagagcgctcaggatctccgaggtttgctgcgaggggctacccagcaggaggggcaaactctctgcgaagctgaattgtatccatcatactgtagccttgtagcttctcctcttctggccaccaactttccgaaaggctaccgaatcacgcttgtaatccgtttaaatgtttccacctttgagacttgcagggaaatggtcgctgcataccaatgggagagcggggcgcgcacctagcgcggcgatgccagcgacagggagctcacgaccacagctccctatgccctcgatggttggtaggcaggcaggcagagtgagtgtcccaggactaggttcctttgatttaaaatctcggtgctctggatcagtggagagcttcgttgttccc

SEQ ID NO: 26955 - DNA, 1895 bp, Homo sapiens
  chr3:16553609-16555504
  binary
cgtaacccctctctggggtttggtgacatctggggtcacttgaacttcgttgggattcagctgttcagagatacaaattaggaatcccggcagcagagaggccctacccacaggcccagaggtcgctcacattacacccggcttccttcctggcaaggccttaacttatcctgagatgacacacgatggcaggggttggaagatgcctagtctagttgagcgcccagctcctgaaacagctgtaccgactacaagggttccagcacatgagttgctggaaactggggtgaccactgacagagattgagccagactttttttttaaaaaagtacttcttgtttgtttgttttaagcccccgaagaaactcactgacaccacccagcgtccctagggatcacccataaccacacagggcagctgagggcaagcacagagtcacagacagacagcagggagcgtgcctggttctacaaccttggcctccacgcggttcttgctgccaaaggcagcgacaccggaggtgaagggcaccagccctggcctaggactggggtgcgcgtgcctgacaacggggcttcccgaaatacacaaccacctcctcctcgcccagacccatatccatcctggcgtcccttgagtctagagaagtgggttaagacaagggaagaaaatcccttacagaagaggagatccccgttttcagtgctggggactctcggcacccgcgtccctgtgcttctggtggttccggcgcttcctcggagcgcgcggcatgtctgctcctacacgtccagcacctctgtccccagagcaaacccacctcccagggcacacgcagaggggcagtcaggcaccgcctccaccctgccccacccaggccgcgcgcaccccggaaacctggactccgcgaccagctccctcctgttcttttccgaggaccccagcggcagtgtgtcctggacccacctgtagcctccaagctcccccacctctgcgtccttcctaggcgcttctgagcctgcagagcctacgacccccaacaggctgctccgaagtgcctctccctacatcgctccaggaatgactcccctacacccgttccccgcaaaaaaaagttggcccaagatccaggcgtcccaaggatcagcccaggtccccatccgacgcgggccagggggtgctgctctggcagctccggagccccggcaaagagcaacctgcagggaggcgccacgcgcggttcccactacccgccagagacccggtccatggggccaaacggaggggcctgtgccggtcgacaccccaagccctgtcgcgccccccccgccgcctaccgtatgggaccggcggaggagaaggcgcggtcgcgggctccctgaggcagcgtgttccgtcccgggaggaaagtttgtgccatacagaggaggcggcgcggggaggacttgggcgccggtgggtggaggcgtgggcggtggcgccgcgtggtcgtgtgtctgtccctccggcgatcggtgcgtctgtccctcgccggagcccgcggccgccgcgctctcgctcgctgcgcccagcgcccggcgcgctccggctccagccccgacgcgcccccgccgccgccgccgcgcgtccgccggctacacttcctcttcctctgaactcatgtgcaaaatatgctacgctgcatcttcagggaaagcctcgcggcccctgacagcagccgctggagcggtgggcccgcccagctctccccgcgccccctcggagttccgcccggtcacctccacgcggccgagctgcaagcgaccctggcagcctcagaacccaggggtcaggggctcatcgatcctccctcccagcccctcctaatcaaggttgtgtgctgtcaggaagagc

SEQ ID NO: 26956 - DNA, 123 bp, Homo sapiens; identical to SEQ ID NO: 9674
  chr3:168608983-168609106
  hypo

SEQ ID NO: 26957 - DNA, 225 bp, Homo sapiens
  chr3:168960241-168960466
  hyper
cgctgataacgctcctgcctgctattctccaaggagccggctgctggaagactgctccgaacctcatccccttggtgctcctgatgcgggcgatcctccgactgctcggcgccaaccacaacatgctacccaccgtgagagagcaggacgcgggctgctctagtcaggacttatcgtctatcatactgattgacgaaaccaagagtgagcagaaaaaataaacac

SEQ ID NO: 26958 - DNA, 1376 bp, Homo sapiens
  chr3:169378540-169379916
  hyper
cgccacgcgctactcgggggaaggaaatcgcgctttaaaatacaaaaatctgtagttttaatatgatttcctttattacccagattgtaactgaagaattgcaacgcagcgcttctgtctgggaaaggcagctgcggcagcaacagctggagtagtgcaagcgggaatctgaggctcagtaaaagtttgtaagagttgagatctagctatcagaaagcggcagcggcatccttagagaccctggggacaaaataaatgggtctcccaccagttgaatgacaagtatcatcagatcggaaacgaggctcagtttctggatgctgagtggactgtgcgtgcgggaatattttaagacggcatcgtatgtcttgcttggcaattaaaatagttgaaaaagttgctcaagaaaattcgaagggttttgtgttctgctttcacttcagaagttatcgggcagtgagttgcggcgcgaagccttaagctttcacttcacaacttaggcatggttgaaaagggctacccacccccacccaccatcccactcccgccaactcccccccccacacacacactctctctctctcccaacctttagtccaaatcgaagcccgcaaacctcaagtatatgtacatttatttcccttcagatgaaaataaagacatcggcctcatttaaaagcaaacagggaaaacagttccaccggcgccctttgacactgtagcagcgagtgtaaagaacaacacccaaaagagaaacagatggactgatgacccaaagagccctatatttaggttgatttctcagacccaggggaaaggaaatgtatcggggagtgtacgagtgcttgggtgaggactgcacaaagcactggaaaggcgcctgggatgacagcatctcgcggggctacaccgccgactccaatgcccgcgaagccgagcctgctgaggtgccgccgacttcccgggctgctgcagggacgcagtgagcaaggaggcgtggatacgatacctaccgtatttggttctaatgtgcgagggtcgcgcggggggagactgggatttcactggggagaagcatcccacccatctccgatctctcatttctgcgttccgtaaacaacacaattagagagttttgttttcggcgagtgcgagtgtgggagagagaaccgcggcctgtccactcccgaggcagctccagccccgcctattgacacctcaaggaagagcgctcccagccgctccggggctcagtgtccctgagtccccttcaactcgaagtagaagcatttggacaaacgcagtcctgtcgtctacagtcctggcggagcatcacaccgtgtgggaaagtgtgggccccgccggcaaagccaggc

SEQ ID NO: 26959 - DNA, 820 bp, Homo sapiens; identical to SEQ ID NO: 24414
  chr3:169539913-169540733
  hypo

SEQ ID NO: 26960 - DNA, 869 bp, Homo sapiens
  chr3:170626349-170627218
  binary
cgcctttcgtctgcgcacccgcgctggtcccctacagcagcggcgccggcagcggcggtggcggccgcggcagttccaagagacggggcggggccgccacactttccacaccccagcctccccgcccttacccgcccccactcagccctatttccgggataggccccggagcgtcacaggcaccgccctctcgggctaccattggctaccagattcccgaggctccgcccagtcacgtgaagagcgccctggcaaccccacgtgctgcggattagtgcacttccggcgtggagcgcactttcagcagtctggttgccgagggtgagctcgctggcagaggaacttgcgccttccaactcttaggtttgttgcgttcgggtcgcagtcgactttaatgggaaccaagcaaagcacccaatggcccctgccatcaggtgcgtggcagttatcacatgacgatcgtcagaactcgcgaggcgcgcagattcagcgagtgccagtgtggctggctgtgaagcgaactttgggttcgagcttctggttcagcttgcagcctttcttggggttcgaacctcctcctggtccttaaagaagaattcaggtgcagtattttattacccagctcggcaccgcaggtcctgaggaccccccattcaccccttggtgagatttttggcagcgactgccgccggatgcccctgtagagtcagcactgctccctggggtgggaactcccgaagcgtccgccagctaacaagccagcagtgaaatgaattaacccacttctcacaccaaaggctgttgggaagttgtggaggcgaagggtgtctgactcctacggcattgtgggtccagagaggtgttctgcc

SEQ ID NO: 26961 - DNA, 755 bp, Homo sapiens
  chr3:172167148-172167903
  hyper
cggggtgccgaggttggtcagggagggaacaggagaaaggaaaaaggcagggttggaggtgtgtggaggcggcaagtgaagaagaggctgtgaggctggcgcgtcgagagtgtgcaggaaacattttttgaggcataactgagagagatcagccatttagtagccgtattcccttgggcaaggtcttcaacctcctgagcattacgtctttttctttgaattgcaatgatttgtgcggaccactgggggtgatatcaagtgtcagggaccaccggaggcactcaataaatagaagacgcgttgctgttgagaagtagaagctgtgccggtgggaacaggtcaaaggccacccctacactagcaaggtgaccctctggacgcggtctgtgcgtctcctgctcagagccagaaatcagcacccgaaggcatgagactgccagttgccagcgaattcacaaatccgaccggcccctcccggcccaccgacctcgggaccgccccaggaacatattcagcactgtggccagcgccacatccatcctaccgcaaagcgccgctggaggaatggcttccctgtcactcccaccgtttttaacttgcgcttctaacgcctcagtcctaccccacggaggagcagggcagactcccacgaagcacaggccggcgttagtcactgccttgaccatacacatcggcgctcacccgatgagataccacgtactgtgtatgagagagtatccccctcagttgaatgc

SEQ ID NO: 26962 - DNA, 97 bp, Homo sapiens; identical to SEQ ID NO: 9679
  chr3:179377859-179377956
  hypo

SEQ ID NO: 26963 - DNA, 1266 bp, Homo sapiens; identical to SEQ ID NO: 22898
  chr3:179754092-179755358
  binary

SEQ ID NO: 26964 - DNA, 561 bp, Homo sapiens
  chr3:180319831-180320392
  hyper
cgtagtctcgctcggtttcgcgagatcgaggctgagctccgccgcgccgccgtgggggcgaccccagaacacttccgggtgtaactggttgtgctgtctgtgtacttccggcagcctccagacagtttcttccgcttcctgtaccacccggctcaagtagcggacacggaacagggaactatcagcccgtcggcctccgggccctgcattctctagccatggaccgggaccttttgcggcagtcgctaaattgccacgggtcgtctttgctctctctacttcggagcgaacagcaggacaatccacacttccgtagcctcctggggtcggccgccgagccagcccggggcccgccgccccagcacccgttgcagggcaggtaatgagacgttggtgccactgcgccacggaagaggggacgcagctctggcagccactaccgcagccccgggtttgcgtctagaggaagtggagccgcggccgtgagcacaggacgatcgcgcgctggtgtcttgggctgggtggacggggggcgctcctgggttgtgcaatgcgggatgc

SEQ ID NO: 26965 - DNA, 924 bp, Homo sapiens; identical to SEQ ID NO: 22899
  chr3:180397104-180398028
  binary

SEQ ID NO: 26966 - DNA, 596 bp, Homo sapiens; identical to SEQ ID NO: 23240
  chr3:181419943-181420539
  hyper

SEQ ID NO: 26967 - DNA, 945 bp, Homo sapiens
  chr3:181421426-181422371
  hyper
cgaattctatggaaaagacaggcaagcgggattccagccacagcacccccaccttttgctctaccaaaaggcttgtccccattacagaaataatatagtcggtgctagttttgtgaacccgcgccaaccgataaggtaagaaacggtgcgctgacagccgaggtccgaaggctgctcagtggttcccgcagcccgtggggtagggaggccaaagccagcaaaatgttggaggcgacgccagaaagagagtatatgcctgctattcggaagtgatgtcgaacgtgcaatagcagagtcctggagatttccaccccgttccgcacccagggatcccagcctgtggggtagcaggttgttgggtgaaggcaggagggagaagccgcacctggctgagggcgggtgggcgtgccgggagcgagtgcccaactttctagggcccatggagaaagcataacccctagttgaggaaagagagctaaacaagtgggtggcccaggcctgggaatgccacccagctctcccgacgcagtgttatttctgtggtcccagggggccccagcacctgcccgaatcccactccccaaggccgccagcaggaaggcagcccctccatctttgagggctgaggagggggcagcgagtgacttgattccttagtagcagggaaaaccgcagcggctggcaacgggccgcgtttctccgcggcggcaaagcgccctttaggggcggggcgggcatttttggtctcctgtcccagcgtccaggcctgagcccgcgcgggttggctgggcgccctgctttgtaagtaaccaatcttgctggattctgaggactatccaggcggatgggcccacttagcttaggcccactgagaccctgccaactcctcagacccttttccccttcatccctcacacctttcatgatgaacccaggaaagaaccc

SEQ ID NO: 26968 - DNA, 1337 bp, Homo sapiens
  chr3:181440800-181442137
  hyper
cgttttacatttgttgaagcccaggccttggtgcctcaagttttaaatggaattactcaaggggggcacactactagacaaactattctagccaattccttcatccccgacccagtccctactcctctctgcccccgcccacttcgccacttcttagtcccggatctgaacattttagctgaaagagggaggggtgaggaaagggccaggacagttccctcagtgccaccactgcgggcaaggacagttccctcagtgccaccactgcgcctggagagatccccgcggccctgccgctggctgattctcccctgtgccttgacttgctgaaacatctctctggggaaaattactccctacttgcttacatgtgtgtattaaaaaacacatgtagccatacacatgtttcatcacggcaacaaaaaatatcaacattctagccccaggagcaaaacgtatcaatcattcgcctaaatattgttcagtagatgggggcgggaataggtagacctcctaggagagcggtcacaagtcccctctcctccgcatggacaccaggaatgcggggtctggcggtgctgggcgcagggcgagaagatttgatgtgcagggtaagtaaaggacaagttatttaaaacctcaacacaggaaaagatggtaagagtgctgtgtagccctttgcttgcttgtgactacgagtcgctaggtggcccgcgtttagagtatgcctacggcgcctactaacgtctagacctaggagaggcgtctcccgcccctcgacccacagccagccgccacttgatagctaacgcgtcttccggccggtacacacccacaattaatctttcttattaaagcctccattctgtacccatggggcgactcaaacctatttagatttccgtggttggctgcacaaatttaagtgggcaacgagttataaacctaataacagaggacgagagagggtgatttgagtagagaagacgcaagattcactagggtcgtgaagatgctgcgggccttgcccaccacggcatctacctcggggtgcacgccaggctctgagaaaggtagtgaacctcacaatcacactcaccacacacaacatgcgtacacacacttgcactcctaccccctttgctcacaggtacacttgtgtggaaattgcctcttccgtagttcttataaactcctcccagacaggcagaattctcagagcatcggaaccagggaacttgcagggaaccagggaaggtttgcactgtttgggattaattgagaataattaacactggagccgttaatcaccactttgctgctctctccctcctttc

SEQ ID NO: 26969 - DNA, 909 bp, Homo sapiens; identical to SEQ ID NO: 24418
  chr3:181444664-181445573
  hyper

SEQ ID NO: 26970 - DNA, 809 bp, Homo sapiens; identical to SEQ ID NO: 5819
  chr3:183165024-183165833
  binary

SEQ ID NO: 26971 - DNA, 117 bp, Homo sapiens; identical to SEQ ID NO: 9687
  chr3:183275024-183275141
  hypo

SEQ ID NO: 26972 - DNA, 140 bp, Homo sapiens; identical to SEQ ID NO: 9688
  chr3:183419820-183419960
  hypo

SEQ ID NO: 26973 - DNA, 313 bp, Homo sapiens
  chr3:183643336-183643649
  hypo
cggtacctgtccctgggccagcaccataatcctatcggagcctagaaccgtgtgcaggcgatgggcaatggtcagcatggtacagtctgcaaatgcttctcggatggtctcttgaatcaataagtctgtctctgtgtccatggcagctgtggcttcatctaaaatcagaatctgccagagaagcagaggagaaagaaactcgattaaattcctttagcattctggttaatctagattttactaaaatgtatttcatttaagttttacactatctattgttttcttttctttcttttttttttttttttgagac

SEQ ID NO: 26974 - DNA, 939 bp, Homo sapiens; identical to SEQ ID NO: 9690
  chr3:184278877-184279816
  binary

SEQ ID NO: 26975 - DNA, 801 bp, Homo sapiens
  chr3:184321783-184322584
  binary
cgttcagtagtcggacctgggccacggagggcacagcggccactctttctgagaggcagaggtcggtgggctccaccctcccactccgagccggcctgaccctcggtgcaggcggaaggggggccgcggggagcggaggacggtgccgaggcctcgctgctgctgcagcgcccccgccccgcgtcgcctcccagccctggctcccagtgctccgggcttgctgacggtacagggtggacagccccgagacattttcatcagatctcgtctcccgcagcccagcgctgctgccgggggtcggacagggccgatcccagcacccctcccccgagccctggctgggcgagaaaccgagatggtggctgcagaaaccggagcccccgcgccggggcgaccgcgaggggccgaggcctttgagagcgctgccgccccttgccaaggtcaatcaaaccctcccacgctccggaggcgcgcgctgcgtgctctaggcagcggggattggggccggaggggcgcgtcccggcggggccgggcgagggtgggtggggggtctggcctggggggcgcctcccgccccctcttggggaaggtgctcggagactcccgggccctgggcggagagtgtggggaggctgggctaaaggcagagacccaggccgagggctctgacccacccaagaggaaatagctactaattagggacgggacgtttttatgctaatatgcacctggctgggcttttctggaggctgagaaagtgtggagtggaagggaagaagttccggagagcgggaaacttcc

SEQ ID NO: 26976 - DNA, 72 bp, Homo sapiens
  chr3:185271311-185271383
  hypo
cgagagtgcttgcaacactaactcaggcttctagtggtctgatgagcttaaaaatcaattaataagccgggc

SEQ ID NO: 26977 - DNA, 1571 bp, Homo sapiens; identical to SEQ ID NO: 22901
  chr3:186078710-186080281
  binary

SEQ ID NO: 26978 - DNA, 2866 bp, Homo sapiens; identical to SEQ ID NO: 24424
  chr3:187455297-187458163
  binary

SEQ ID NO: 26979 - DNA, 1442 bp, Homo sapiens
  chr3:192126754-192128196
  binary
cggttacccggagtctgggtaggggcgcggggcgggggcagctgtttccagctgcggtgagagcaactcccggccagcagcactgcaaagagagcgggaggcgagggaggggggagggcgcgagggagggagggagatcctcgagggccaagcacccctcggggagaaaccagcgagaggcgatctgcggggtcccaagagtgggcgctctttctctttccgcttgctttccggcacgagacgggcacagttggtgattatttagggaatcctaaatctggaatgactcagtagtttaaataagccccctcaaaaggcagcgatgccgaaggtgtcctctccagctcggcgcccacacgcctttaactggagctccccgccatggtccacccggggccgccgcaccgagctggtctccgcacaggctcagagggagcgagggaagggagggaaggaaggggcgccctggcgggctcgggatcaggtcatcgccgcgctgctgcccgtgccccctaggctcgcgcgccccggcagtcagcagctcacaggcagcagatcagatggggattacccgccggacgcaaggccgatcactcagtcccgcgccgcccatcccggccgaggaaggaagtgacccgcgcgctgcgaatacccgcgcgtccgctcgggtggggcgggggctggctgcaggcgatgttggctcgcggcggctgaggctcctggccggagctgcccaccatggtctggcgccaggggcgcaggcggggcccctaggcctcctggggctacctcgcgaggcagccgagggcgcaacccgggcgcttggggccggaggcggaatcaggggccggggccaggaggcaggtgcaggcggctgccaactcgcccaacttgctgcgcgggtggccgctcagagccgcgggcttgcggggcgccccccgccgccgcgccgccgcctccccaggcccgggagggggcgctcagggtggagtcccattcatgggctgaggctctgggcgcgcggagccgccgccgcccctccggctggctcagctggagtgctagctccgcaggaaactcggggcccgggcgagagccaccgagatggcaggtgggacgcagagcccgcggcagccagagttcctcccgcacggcccgccgacccacggaagagcgaaagagcgcccaggtggggccgagctgggggccgggcccctggagcgctgggaagcacagcgcgctctagtcaggttccctttcctggagccctccgcttccagactcccttctttcctccctccctcccgccacccctctccctcctctctgtgtcttctgtctctccccttttctcctctctacgcaatcctacgtgattgaggtttggatgagaaattctcagaggcagagcgagggaactgcagcttgggtctgctccgtcc

SEQ ID NO: 26980 - DNA, 962 bp, Homo sapiens; identical to SEQ ID NO: 22903
  chr3:192232553-192233515
  binary

SEQ ID NO: 26981 - DNA, 175 bp, Homo sapiens; identical to SEQ ID NO: 24426
  chr3:193922622-193922797
  hypo

SEQ ID NO: 26982 - DNA, 63 bp, Homo sapiens; identical to SEQ ID NO: 9698
  chr3:195093160-195093223
  hypo

SEQ ID NO: 26983 - DNA, 188 bp, Homo sapiens
  chr3:195648737-195648925
  hypo
cgtcacccaggaacacggctctgatcaaggaattcaagaacccaacagaaaaatacagaacagaaactactgcgataaagctctaataccttgattggagtgacagttactcttacatttttcaaaattcataaagtttacatttaagatctgttgcggggcgagggggcgaagcgggggagagcatc

SEQ ID NO: 26984 - DNA, 473 bp, Homo sapiens; identical to SEQ ID NO: 9699
  chr3:195750601-195751074
  hypo

SEQ ID NO: 26985 - DNA, 139 bp, Homo sapiens; identical to SEQ ID NO: 23608
  chr3:195834909-195835048
  hypo

SEQ ID NO: 26986 - DNA, 295 bp, Homo sapiens; identical to SEQ ID NO: 25655
  chr3:196069909-196070204
  hypo

SEQ ID NO: 26987 - DNA, 93 bp, Homo sapiens; identical to SEQ ID NO: 9700
  chr3:196434743-196434836
  hypo

SEQ ID NO: 26988 - DNA, 211 bp, Homo sapiens; identical to SEQ ID NO: 9701
  chr3:197023975-197024186
  hyper

SEQ ID NO: 26989 - DNA, 95 bp, Homo sapiens
  chr3:197330132-197330227
  hypo
cgaagatcttttttcatgtgtgagataataatagaagatattcctgagagttttgtgtatttttgtgtattttccttgcttgtggatggaagcgc

SEQ ID NO: 26990 - DNA, 835 bp, Homo sapiens
  chr3:197807078-197807913
  hyper
cgctctgagggtgcccagcgccctccaaggcccccgtcccaggggctgcggggctgcggggaagccgggcctggggaccccctcccaccccggctgagcccccgctacctgtcctgggcatccacgtcccggcacctgcgcgccaggcggcgctccacctccgcggcgtcgcccttgagggccgccctgtggatcttccgcagttccgcgtccctggtgtggtacgcgggacccgggtactcgtggtcgatggagcccaggaccgcccggcccgggcgtctcccgaagctgaagagcttcctcatggggcgacttctcctcagacgcccaccaccggctcctgagcccccgcggctcctcgtggcctttccactaaccctaaccccaaacccgagatgtagctcagaatccgcgacccggccgggtccaccacagccttcagcagcgacactcgcagcctctgacctctcagcccgcgaagccgttaggcgcgcgcctgcagctcagcgcccgcgcggactccggaagccgctcccaagcccgcgctgccggcagggggcggctgcggctcgggcgcaggcgccgctggcttgcgggttctcctgggctcgcccgggacgtcccgtagtcgcaggcgcgcaacccgcccggcctgagggcccgcctggccgtgacccccgccccgctcctcctccgaagagagatcggggccgctggcaggggccctccgcagccaccagggatggggctgtggggcagttcccgccccggtgcagccgccgccgggcagaccgcctggcttggctgcagccgcggcatctggctccggttctgc

SEQ ID NO: 26991 - DNA, 1095 bp, Homo sapiens; identical to SEQ ID NO: 22906
  chr3:32433054-32434149
  binary

SEQ ID NO: 26992 - DNA, 1071 bp, Homo sapiens
  chr3:33259711-33260782
  binary
cgctgattcccactcatctttcacgtcttcccggaccaagccaaaatatccgagggagttttctaaccatcggcggtgtcctcaggggcacattaatagacgttgagaaactgagggacggcggaaaatcaccccttagcagaggaggttctagggcaccttagaggtgatttcattcgagctttcttggagaccttaggaaagccagcggcgggactgcgggacctacgcgctcggcgctaagggagggtccaggcaccaggcgggcgtttgggcgcacgggcacgcggagacttggtgggccaggagagggatgctgggtcgcaggaccgcggctcgttcgttcctctcaggcttgcgcttgccgcttgccgggccggtcagagggagcagccccggcgagctacgccctccctgcccggaccccacgctccaccccccgccccgccgcctcccgcacactcaccatccgcccgcaccgaaaggcgcggcagaccgagcaggagcagcgccgccgcccagagcccggggaggcgtctgtgccaacgggcaggcgggctgggtccctcggcagtcatggtccgggagtgcgcgggccagcggactcgggtgagggctctggctgcgtttggggttgcccaggccactgcccagcgtgcgccactcggctctgcgctctgcgctcggctcacgaatcgcaggcttcgcgccgggcgcgccgagagggaggagcgcggagagccgggggaggctcgggacgcagagccggagcgcctgggccgccgaactcccgggggtcttctctgtggcgccgaggaggcggctgtaacccggctccgccttcgcgctgggcacctggaaacctcggtgccaaaaggggctgcgctgggccgcgcgctctgcgggtacagcggggcggagggcgagggcgcagggaggcggggagagtagctagccggccgcaaggagcccccgcccgtctgggggacccttggcgagagggtgacgcagtctgacaggcggagcccctccggcagggccgttagacaacgagtgtctaactctgtcctc

SEQ ID NO: 26993 - DNA, 984 bp, Homo sapiens
  chr3:3841314-3842298
  binary
cgaccctccttcccagtcctgcctccccctgccctggcctctgagagccgactgagcccagccccgtgcagcagcggttgcctgtgtcgccgcctagtctccggtcttggtgctctcccgggggtgccccaaggagccagtgcgcgctgcgggctgggaaggaggcgccgctcagctagtcctcctcctcctcctcgtctttctcctcctcctgctgctgctgccgccgccgccgccgtgggtgccgggtccgcgcgcaccccaacacccccaccagctgggcctcggggtaagtccctggccggccgcgccgcggcaggaggtgtgggaggcagcgaggggaagtcgaggcaaacttggtggcgtgggagaccctacggggtctggggaacctcagggtaagatcgcgggcctgagggggacgagggggcgcggctcacggagctggggaaaatgacgaagtcgggaaacgagaatatagtgccccgtttccccccgtcccccttgccaaaaaaaaaaaaaaaaaggtgtgggagagcgatagttgggaaggcaggccagatagaaacaggcaaaaaaaggcagtgaccggagccgagcctgctggatttcaggggccgaccaggggagggaggtgcccggggacggggagggaggagggctgccgggatgtgaaccggggaaggcagctggggctggagagcagcgcggaaagggggcccagggagctggaaagagggccaagaggagggcaaggaaggtggcgggcgacggggagaggaaagaaaaagggtgtcttggcggtggccttggtaagagaaaggggcaaggggtataattgacaaggcactgaaagtattgaagtcagagccttgggaaggatctaccgaactctcggcggtccacgcggggacagacctcagcccgtgagccttgagctccacgcggggacagacctcagcccgtgagccttgagctccacgc

SEQ ID NO: 26994 - DNA, 88 bp, Homo sapiens; identical to SEQ ID NO: 9708
  chr3:40350800-40350888
  hyper

SEQ ID NO: 26995 - DNA, 831 bp, Homo sapiens; identical to SEQ ID NO: 24437
  chr3:42814273-42815104
  binary

SEQ ID NO: 26996 - DNA, 1980 bp, Homo sapiens
  chr3:44036670-44038650
  binary
cgcccggaaatccaggcggcgccagccttgtagcatctgcaggccgggggcgcgcacacgaggggcacgtgggtgtggaggaaccggcgcggcggggcctccttcctgcagcgccgcggcggtcgagtgcccgtgctggaggaacggcgagtggggtgcctgccccgcgcaggcggtacccgccgccccagctccgcacacagcaggcacggccagggaccgggaccgtggcccagcgcctggaggcgctctccacgcgcatctttcccgatgccggggcgggaagccgagtggctttgtccggagatgccaggggatgtgggcaggggacgaagaggtttcccaactggccaaaccctggcttgaggaaagactgaggtggtcattgacccgtgggagcgccctggggcttcgagggaacggcagccgagcccgggagactggtgttgggtacccgcgggggccggcgggttccacgtgggtggaccccgagctgagggcagggtagggtcgcggatcgctgacctatgagctcccctactcccgcacaaggacacctgcacatggacccgggcttccacccgcttctggctgggttggcgccgggagcgcgcaggggagggacggcggcggagtgcggggtttggcgggtgaggtgggtgaggtgtggccgcgggggagggggcgaaggcactagaaggctgcggtcgcgctgtcgctgctgttcccaccgtcggcgcggggcgcggagggggcgaagaggtgcctgccagtcgcactgcggtctaggggtgaaaggaaaagggtccatgtaaaggagaaagggcaggcagagactcttgctggtgccagcaggcacggaaggatgtggccgcggggacttggagtttagagggcaacgctgggtgtcataatgccggagatgaccccgggtgcagaggcgattccagttgggtagagctacagagaacgtggcccgagaaggggagcttccttaaattagacatatcctgtgttgtcctaaacctagcatttaccctctcccaccccgctcccacaacctccagggtcctagcggagtcatttaagcgctcagtactaccagcttcattttaggtaaaaatcaagactaattctgcactttattaacctcctcgtacccaagtcaccacggggcagcttttcacagccctaaggcgtggtcacttcaagcccacagcgagttgctcgtgtcctcggcttctgctccgcaaatctcggacgatgccaccggaggacgctgaaggcaaaggctggtggggccaggcgccggcgagactgccgcgctagcacagcttccgcgggagccgagtgctgacgggcctcgcgaccccctcccgagggcaaacggctcggccctccagggacacttggtcagtgtcactctctccctaccgggtgtcgcgcattttctcaacagaacgtgaccccgtagacggatgaactcggaatcggcaaaacccgcctgcccttgtctagtctctctgccccaccacaccactgcccttcactgcggactgcgccgtgtgcgctccgggaccgcccctgcacctttgcccacagcttcccattaccaaggcagccggaggaagacctttccgagttacctgtctcacgtcagcagccacaccgaggcggtccccctcgcaccactccccaagtgcagagcccctgaaagtccgaggctcctgtgccacgcaccctcccccctgcggggcgaccccgcgtatgcgtgtgtgtgtcacgcgtttaatcgcacagagtaattcccagacgtgcaagacaaagcatttcaagcaaagatggtccagagttcaaattggaaagcacatctcgaggcgctgaatctgttctcgccgtctgcctcggtctctggggcgtcgcatccaggagaagggttttaactccctgccagatccgctcggaattagctcttctggc

SEQ ID NO: 26997 - DNA, 990 bp, Homo sapiens
  chr3:44039665-44040655
  hyper
cgtgttgctggagttggcgcagacgcgtgtgcgggcatagcggcggacgtgacaccgcattttctccgaattcctgccatctagggtggtgccgccccaagagggggccgtggggaggtggggtaataggctgcgcaatccacttgctctgggggagcttagggttcagagcagagcgcaactccggggggctgtcgcacagccccattctcccacaccagaagagcaatgctccttatggatgattaatagccgggcttctcctgaccatgcggcgcgtccctgccggcaccacttagttgttttaatttgacctttattagcaacgtgctcccagaggctgcgagttggattcgcaccacgataacggccctctccccttccacccggccggcttcctgggaaggatcggggactgcagctcccgcgacgcctcctcctcctgcgcagggagcaggcctgagttcctccacgtaatgacctgggagacctcaggcatcccggggcctggtcggagggtcttcgggccctggagctgggcggtgtctgcagtgcaccgccgtgagtttctctcgggtacaatgtgctggtgtgcagagaggaggaaaggaaaaaaaaaaaacccaacaccactcttaagtggcactggcatctatgaagtggcagtggtctacactgagcgtgcccttgcctggaggtgtagggggcggttactgcagccgaggggagggtactgcggccaagggcagggcgagaggacagtcaaggccggctggccgcgtgggagcctttcctctccgggttcagcggccggaatcaccagcactgcggctaaaggggctggtaggctctcctgcaccccgcgtgctcctccgccttctctgtgtcccccggcttttccaggaggaagatggggtgcccatcgcgaatggggcgcgccgggccgcctggccgggcggtcacgtgtcccccctcccccgccactgcggc

SEQ ID NO: 26998 - DNA, 190 bp, Homo sapiens; identical to SEQ ID NO: 9709
  chr3:49066961-49067151
  hyper

SEQ ID NO: 26999 - DNA, 691 bp, Homo sapiens; identical to SEQ ID NO: 22908
  chr3:49906737-49907428
  binary

SEQ ID NO: 27000 - DNA, 59 bp, Homo sapiens; identical to SEQ ID NO: 7371
  chr3:5165842-5165901
  hypo

SEQ ID NO: 27001 - DNA, 1220 bp, Homo sapiens; identical to SEQ ID NO: 24443
  chr3:53032401-53033621
  hypo

SEQ ID NO: 27002 - DNA, 1821 bp, Homo sapiens
  chr3:54155239-54157060
  hyper
cgccgggagccccggcgacgttaggagcgcactccttgctggggtcaccggagttgcgcttggccgggcaaggatgactcagcctcactccggtcggtctttaccgccagcctgcgcgagggctccacaaagttcccaatcacaccccatacctcgcacgggggagaggggttctgcaagctgggtcccggggtgggggcagcggcgagagaggcggggagaagcctggttcccagaacgcgcaggggcttctccggcttcctttctcctcgcccctgagggcggcgagaaggcgcctcctccggcgctcactgcctcctgcccagtgcggtgggcgccggagtggggagcaggcaatcccccaggctcggagaaatcttttatcccgaaatccagggtgtcccccggtcaggatcgactcggcgccgcgttggcttcctcgctcaaccctgacatcccggtccccaccagtcaccgcagccgggcggactccgaaggcagcggccgctggggagccccggggcctgggtcgggcgcgcagggggccgctgcgctgcggccggatgccgggagccccgcgctggtgcgcccaagccgtggtggcagcaccgccctccgtgctttcccctgtcgggcgccgcggccggaggagcagctgcgggcggtcacgcagcgctgccctagccagagccccgagctcccacccagtcccatccccagcccgatccgccccgcgtgcgatcccgcctgccgccgcgagcctgtgctcctttctgagatttctgcttcttccccagctccctccccgcaggagaatcgcgcggcgggggcggagggcgcgccccctttaggttccgcggcccccgaccccgcccggcccaggggcggagcgggcatgctacgccctctcctagcagccgcccgcaaagtgcggagcgccgcgccctgccctcggcttccctcccgcgcccccaacccccaccctggctagggtcgcccggcccggggccagccccagagtcgcgcccgcggtggcggactgcggagttgtaaagaactcagcggccgcagtagcccgggtggggcagggcgcgctccgccgcggccaaggacactggagtttccgagtccccgcccgcgcggcgcctcctgccccgccgccctcccgccgcggcccgccggactccccggggccgccgaggcggggccgggcggctgctgctgctagaggcgcgtctcgctgcctcctcccccgcccgcctccctccccacctctcctccctccctccccacctctcctccctccctctcctctccgccctccccgccccccccacccgctcctttttctgctccccaagtgagccgggcgcgcgagaggcaggcggggcggcgcggagcggagcaggcagccccgcgcgctcgcccaccgcccgctccgcgcagctccccgcggccgctctcgtcgccgccgcagcgggcgcgtcggagggagcccagcatggccgggccgggctcgccgcgccgcgcgtcccggggggcctcggcgcttctcgctgccgcgcttctctacgccgcgctgggggacgtggtgcgctcggagcagcagataccgctctccgtgtaagtgccggctcctgcgccgcccggggaggggaccttgccgcctgcgacccactgtgcccaagtttgggcgcctgcaggtgcggctgggcaggacccgccgcgggcgtcggcctcgccgctcgcacctgcctttcgggacccgcgtcgggcggcgaggccggggtgggatgctctggcccctgcccgcaggttgcc

SEQ ID NO: 27003 - DNA, 2003 bp, Homo sapiens
  chr3:55520340-55522343
  hyper
cggctaataatgctaataacgcgaccccgctccccgcgccggggtgcgcgctggccccccgccaggcactcttaaaggcaaaggggcctgaagcgctcgagttactcggccaaggcaagcctacaatctggcctccgtcggtgcgggggggtgtcggggaaggtgtacgccgctctggagtagttggcccctagttcctctgcgggttctctcaaccaaggagtccctttccccatcccgagccccggccacacaccgtcccggtgcccgcgcagtgggcgcttggtaaatatttgttgaattgaatcattatcctgttactgaaatatacatagtaaattacactcgatgttctcagagcaaaaggaaagtcgtcagtgaaccgcactcagtttgtctactatcgctcttccccactttttctcaaaaatcaaaattgtttgcagaacgggtggtgcgaccagaagtgatctcctgggacactgaggcagtgcgcccggcgtggagggcgaaggggtaggggttcctgccagcgacgctggagttccagcttcttcaggcggttggggaaatggagggataggaagaggcgaagggaactcagttaacttccaacagggggtggggggaagtaaagaaaaaaagtggcagcgcactgaacacctaccttcatggcgagggggagggggcgcggggaggaagtcgccacccgagcgagcgcagccgaggaatccgagcggagcgaccgggttaagcctggggggacggtcaggagcagggctgcggagtcctccggcgcgcgtccggcgggcgcagtgaaccggagctgaagcgggcactggcgcccgggcctggactcccgagttggggcagagctgggatgcgcccaggaatggagggggcgcggacgcgcgcgagccggcagcaagggcagggcctggtcggggcgcaactagggagccgccggtccggcgagggcgcgcaggcaactgttccacggagaggcgctccgtttccaacgtccatcagcgacggcggtaattagggctttccaaccccaaatgtgggcgtgattgtgcaaaagaccttacgacaaataataataaaaagaaattcttcacaagagggtgaaaaaaatgtaccactactcaactgtggcccggggcgggggaaggggggcgatctgtgcgcccaggtgcccccagttcattcacaccacagattctgcaaactcttggcggctcacgcctcctgatctccagctcctcctctctgggtctgtagccgaaacgtctgcttccagacgctgatcctgcagccgcgagttagtgtggacgtctctgtacacacacagacacacaccccaacacacacacccccgctgcagctttggggccacagaacaatcaggcgcgcatggctttttctccgggagatgccgctgaaaacgcacaagtcgccatctgagctgcaagagtcagccccaaattgtgtcctttcattttagggttcggcaaaaacggggagcaaaataggtgaaagtcgccccggaacttattgctgtgcggtgagctggaggggtgcgactaacccaggggagacgcgggctccccccccccaccacgtatcccgttctttctctcttcgggttgatctctcttttccccgtttttccagggcgaagggcgaagagcagcgagtgcaccgcgggcgcgaggctggggaagggcgagagctcggagctccgcggcggcgactcagctccggcggtccatggccggcgaagctgcccacctcctcgtttggcgcccgggtccgaggggcgggagagcgggccggcgggaggcgggcggtcccgggcacaacggcggcggcggaagggctcgctgggcagctgccgcacggaccccggctctgggcggcggaggcggctccgtggagctcgcagcagatttccacgcgatcctgtgccccgcaaacagactgaccgaccgcggggacgc

SEQ ID NO: 27004 - DNA, 503 bp, Homo sapiens
  chr3:57204027-57204530
  hyper
cgcctggcctgggaccgccttgcctgggacgaaaggccccagactcagctgattcctccagactcttcctgtctaggacgccaaaaacatggccttcctaaacccagccttggcgcctcctgcacagcccagagacccagggcggcggacaacagaaaacctggggcggcggacccaaccctgcgcccagaaatcccaggacgcccaccccatagttctggagcggtgcgtaccttggccactacacggaattcaccggcccacggccacttcccgtttcttttcccggaggaaaagaagagcggatgtctagtctccaaggtaaccgcgagggggcgcgcgcagtccaggtcggagaccgccgccccagactaccctgcactgcgaccgcacaacaagtctttctagatcaaagccgccagggcaggtgggagtactctgctgttattcagagctggtgctaagctttaggggaagtagagtccagggggtcgtaagaaaac

SEQ ID NO: 27005 - DNA, 1294 bp, Homo sapiens
  chr3:62859445-62860739
  hyper
cgagccagaaggtggcggcgaagtcaccttgggaagaggagaatagggtcaaagacaggacggcggaggggctgacccggacggaaggaccagagggcgtgcccctgctctggggtcagtgaggaagggtcagggggactggtgagaactccagccataaggaagcagtgcccgaggacactttggcgacgctagtcggtgatcagctgacccgggcagggagaggagggtgcccttcgcagagtcacgggaagcttcgccttctgggcttgctttctcccgcctgcccctgcggttgctctctgccccagcgagcggagcgctgctccaagacgctcttctccctccacctcggcgcccccacctgccgttgcccccgcccgccgaacgcacgcccaggagggcgggcccggagttgagcgcagccgcccgccgctggagagcgctgggagccctgcaagcgagcaaggcctctctgggcgccgcgggcagcaaatcactccccgagcctctcggtccacaaagcgggacctgcctgcctcgctcaccaacgctcccgggctgggggggctcgagcaagcggcgctgcgctccgcggccctcgccggtcccagtcagctccaggagcgctccaggctgggttgggctgggcctgggcgagcccggccgctgggagggggcctcgtagccctttccccagggcgcggtctccacctctcctgctcctcctcgccagctgcgccgccagctcccattgttcaccccgcccgcctggcgacgtccgggtgctgctccctgggcctcccaggcgcacctaccttctgctgccggcgagccatgtcggtgggctgcttggcattaaaggggtaggcgatgcagcgcatcacgaacacatacagctgcagcctcttcttcctctcctcctcctctttctgcagccgctccaactcttccttctccttctcgctcaccaccgacgggctggggctggagggccggccgccgccagcgcggctgctgggttgcagccccccggccccgccgccgctgctcgcgccgctgcccccgccgccgcctgcacccaccccggctccggcgccggcgccgccgccccccagcccggcgctgccggccgagccctcgctggtacggctgggagacaggcgcgcgccggacggggccgagccgagcacctccttgccgctctcctcctccacgatctcatccgattcttcttcgctggacgaagggtccagcatagtggcgcctggggagcggggtctctggagccccc

SEQ ID NO: 27006 - DNA, 837 bp, Homo sapiens
  chr3:63264141-63264978
  hyper
cggtggtgccaagcgaacttcatttttaaaaagaactggtggatgagaagagcgagcgagggcgagctatggaccctgtgagtcaggtgagacagaactgggcagggcggctggctgggagcagggggcgggggatgccgcggcttgggagaggcgcccccagccccttcctcacgctttgctttctctctctcgcctcattcccccaaagctggcctctgcgggcaccttccgggtgctgaaggagccccttgccttcctgcgagccctggaattggtgagtagcagtgtgtgtgcagggaggggcgccaggcagccagctatcaggtgaggagaggtcggatggggtgctccctgctcagttctgctccaagccggagattcaaccctcaagccggggatttcaatcctgccccctcctaagatgccgttccaaggtggtgaggacaaaatcgaggcaccctgcttggaggcgggagtgtggacgcatttttgcaggggcttagacaagtgtcgtctcacctcaccgcttgcagacgcgcaggggctgtggaaagaaacctcccccttgggagataggggaggggggcgcatggaagggctgccgctgggttctggcccctcacctggaccttcgtggggatgaggggatgggtggagggacccatagttgagcggaggagccgggaagacttggccaagctcagaaagttggtcagaactgagacagctcctctgcgggactgggatgctggaagcgcgtgttcaactgctccgcgggagcttcagggagggaaagatgctgcgaagctattacagactgttataaacggcggc

SEQ ID NO: 27007 - DNA, 1076 bp, Homo sapiens; identical to SEQ ID NO: 9722
  chr3:67048291-67049367
  binary

SEQ ID NO: 27008 - DNA, 616 bp, Homo sapiens; identical to SEQ ID NO: 23250
  chr3:73673919-73674535
  hyper

SEQ ID NO: 27009 - DNA, 600 bp, Homo sapiens
  chr3:79815480-79816080
  hyper
cgcaggtcctctagatgcttggggtgcacactaaggatatttgagtagtgggagctccgactcgaggcaggagtgggatgtcttagcattccgtctcccccaccccacccatctgcgtgggacacagtgactcctagaagggtatcccaggattttagcggccaggtgtgagcgccctccacgcggtcctccgagacctcagggcgcgtggcaactgggcagaagccgtctctgcagcgccgctgccccgggtggagcggcagcccaggctgcagcagtggggttgccacgccgagttttccgcatcggccgcccgcagggctcgcctgcttctccccattgtgttctcagagctgtgggacccagccgcgcgcgcagccgcacccgcgccaacgctggaaccgaaggctcatggaagcggggctggcaagatggggcagggagaaggagcaagaaggggccccagaagggcacggcgtttcatcaataatgcagaggctcctggacctccctgcaatacgttttccagctaaacgccaccaactggagcgcttcctggttcgtcccactcgtgtggtttttgtgtgtgaaagatgggac

SEQ ID NO: 27010 - DNA, 1260 bp, Homo sapiens; identical to SEQ ID NO: 23251
  chr3:85007731-85008991
  hyper

SEQ ID NO: 27011 - DNA, 664 bp, Homo sapiens
  chr3:8810773-8811437
  hyper
cgagaagtcactttacaatctctcggaacaccccgagctcctccaggaacaaggagtgcgaggcaccccaccacctccactcgggtcccgatggctccaccggccctagccatcccgtccacccctgcttagcacccagctacctgcaccgagtccgcaggcgaacctaaagttgactccccccggggaagttgcacggcgactgacggccccagtgacgcgtgcgctcccggcccgagttgggatggcctgccggctgcacctaatgtgatgctaagctgaggtctctcactggagcctcggttggaatcccctcgccgcagcctggctggtcgctggatgggtacaggaggcgagcgaggagcgcctcccaggctgcgcgcgcggacagcgtctggatgcggcgctgtgcgctggggctgaggctgcactatcgcacgggtccgctagggggcgggcgaggccagccgcgcagacccctccggagcggagctggttcgcccagcgttggtcccagagccttaacaaatgggtttattttgcagtggtttaaaactgcgagagggagggaactcgtcaataacccgcccgtttcttcctttcttggtttagaagctcttgactccgagacacataggaggcttgaataataatgttcttcccc

SEQ ID NO: 27012 - DNA, 113 bp, Homo sapiens; identical to SEQ ID NO: 7378
  chr4:100555198-100555311
  hypo

SEQ ID NO: 27013 - DNA, 198 bp, Homo sapiens
  chr4:100729543-100729741
  hyper
cgatggatctaatcttgacttcaggtaaaacagctcccccgcgcccaccaacgcggtattactgccacctagtgatagcatatcctcatcacagaggtcctgcctgtggaagtggaggggaagaggtgtagtaagcacagccagtagggcgaatccacaaattaaatacacccgggggttgggggtggcgaggggagc

SEQ ID NO: 27014 - DNA, 733 bp, Homo sapiens; identical to SEQ ID NO: 24451
  chr4:10462790-10463523
  hyper

SEQ ID NO: 27015 - DNA, 950 bp, Homo sapiens
  chr4:107956718-107957668
  hyper
cgaatccttgctccgcatcaacgcggccatctcccggcgagggggtccccaggaagacgcaaagcccggaggggtgggaatgcaaagggagggaggaccccaacacggggcccctcacttgggtcgcgggggcttgcagattgtgttccctcaacccttcctggttcggggacccaggaccctatgaactcagtctcacgcctcaggacagaaattagcggaacccaagcgagacccgcttctccaccaggacaggaagttctgcaataactggaagcaatcaaatgcgaggcgctttctcgccaaggaggcgtgacccaaggtgcaagaaaacccagccctgtggatcgcaccgcttccgttccttcttgccccgcacctccttggtcccgccgggatctcggcggtttaactctcctcttaattgatcaggaggcccgcatcagctccttctccttcaactcagttgcttttctctcctctcttttcctatcctttatgtgtcaaactttgcaggacacagtgctccttttcaaagttagcaggcgctttagtaggggatcaggagacgtccccggaccgaatcctcgagatctgaagagaatcgaggtcccccacacgcgcactcacagttgccccgaagcgttgtcccctgactcacaagagacagcgaatcgctgccagcgcagcgatgcctagggagcggacttgcgctacgctcgccgcgggctcccgctttctctctctctgctctctccccagtcctctttgctttttatagcttcccacagtgaggactttttttttttttttacctccgcccccaattcaagagtgacaaagagtgaaaatttttctctcactccccaccgcttccgcccccctcctctctgcgtgctgcttctgcttctgcggctttcactccagcttttcctcctcctcatcctccc

SEQ ID NO: 27016 - DNA, 972 bp, Homo sapiens
  chr4:110223448-110224420
  hyper
cgaaacccacccagacagctcttccgactcccagaggaccgacacctctttcgagggccccaacagtggccgctcagggtccgagggcaacggccgaggcgccacgcggggccgcggctcgccctggccacggaggaccggacctgttgcgcctctgtgagtttgccttatttctacctactcggtgtctttcggcacgccgacctgtttcccacctgcattcagttcaaggcaaaaaggctgtgagagcacgctacagcgcagcgcgaaaggggcgactaaggtggagaagagagaggaaaacgaaataaacccaaggaaccaatgctactcgcgaagccgaagtcgcggctgcccgaaggatctccgcagccccgcgtgcgcgatccttaaatacccttcgcgatgctcgcgtgagtgtgtgtgtgagtgtgtgagtgcgcgcgcgctccgagcacgacgtccctcccccgaccccctcccggcgcccggcgtccggcctgccgctcccgctgctgcgcgccccccttccgaaggcaaagcaggagcccgccttattatcataatgtattcaccttggcccagcccgcgggccggcccggggaacccccaagggaggcgggaagcttgggtgggagcggggcaggaggtctgttattagcataatgtatgcaaatagctggagcggccaccgtgattggagaggagcctggcgacccctccccctgcgcggagtaacttcagcatctccgagggccacctctctggcctgggccggggccgaagcggggtcggctgcgcaagaggcggcaactttggcttatactgactcagcccagcgccccctttttatcccacataaaaatggagaaatggcctccgggaggaagatgtgaagcggcacgctctatctctactgatcttcactcaaaagcagccgcaggagctgttgctatctcgctgtggtgcagc

SEQ ID NO: 27017 - DNA, 777 bp, Homo sapiens
  chr4:111550070-111550847
  hyper
cggacaactggtacaatttcccctgggggtgaaaaaccacaacgcggcggggcacctttcaagtgagctgcagatttgattggcgcggggggtgggggaggggaggggagaatgggatggcggaggtcgggcggaggaaagaaaatggaaaactctccttacccctatttcgttgctttttcctcaagcctcatgcccccttcggcaagcacctgtcccttccgcgctagccacagctagagttctccacctttctctacacatccccttctttctgacaaggctcaggaccttggtcaccaccccacgcaccaccattttgcgttttgctagagacggtctgggctgatctcgctggtgtccatgttaggattaaaatcccttcatgacggcgaggaaaactgtattatttgctttcagggggtacattaggagtccacgtagtatatgctccgcaaacattcgctgattgaatgagaggcgcgggggcggggcggcggagaggggtctgcggccgccaaggccgccagggttaacccaggtccttcgaagaaggttgggaccgagctgctgccgcgtgtgaaggtgtgtgtcgcggctgggggtgccacaacgggccatggagcccacctcccagagggaggaagtctgtgcacaccagcgacttgggtcgaacactttcagcccatccactgggccaaagctatttaacaattaatgcgttcctgggggaggccgggggaagtacccgccccttgtcgggacgcaaagccaggc

SEQ ID NO: 27018 - DNA, 810 bp, Homo sapiens
  chr4:113441539-113442349
  hyper
cgacctcacaagttgcgaaagaggacaaatggtcgccgcgctagtcccttgctgttgcaggtgactgtcgggggcgcgaaagagggcgcccttccctgagaggacaaaagccaaggtttggctatccagcgagcctgtcccccaattcacagtaaaccaccgtcggccaaaggagatggcgtgtctactctctgctaaaataacaagatgaagtacctgacaagggggctttgtaacccaaatcctaatcctccgagtgagttctcagaaagatggaaagatggcgggaaaaagttggtaaatcctaaacatcttttacatcaacggtctctagttcttcgctgcaggctagaaacgcagcttccagagcaggagagcctggtatggaaacaattagctttctccgcagagcaccccttgcaacgctaggattcgttattgatagtggtgagcgctgggaatgagtgtgaattcggagtttctgacggtcccctatccgggagccaaggaagccaaggagaaaacaatgtaaattcgccccgatccccagttactgcatcccacatggtattctcggtctcccccacgttttccccttgaatcctgtccggggaggattcggcttgaacctagccctggagaggtcccggccaggtcactgaactgcgcttcactgcgccagcccctccccttcagtattttcatcgcgtccgaggaatcggcatccaccacagcagacagaaggcagggaagatcatcccccaggccccaagccccactctagagaccctggccccaagcccgcacgac

SEQ ID NO: 27019 - DNA, 442 bp, Homo sapiens; identical to SEQ ID NO: 23257
  chr4:113443992-113444434
  hyper

SEQ ID NO: 27020 - DNA, 271 bp, Homo sapiens
  chr4:113627389-113627660
  hyper
cgggaggggcgccggcaccccattgtcctcgcgtcccccaagggcggggacctcaaccccaatgcggcggctcccctaggagcggggccgacacgagccaacttggctacatcgcccggcccaggaccattctctaaacctcttttctcagtctcacttcacacacagacacacatacagacacacacgcagatagccctagaaaaatacacgtcttccaaaaccagacgtgtaacttctgaacgcacgcacactcacacacacgcacccc

SEQ ID NO: 27021 - DNA, 902 bp, Homo sapiens
  chr4:121993488-121994390
  hyper
cgtgcgggggctgggcggcgggaggatgccgcagcgacccgcggggctggcgcgggcttcgccggccgccgctagtcgcacaggcgcctggctggagcgccgcgcggggtgctgggagagccgggcgcacggggcggcagcggccgtggcgggtgcgctgctcagttagctccactctctcgcggctggaagtggggagtgtgtgttcgctcccgagtgtcactgctgaagcccggagtctcttcccctcccagccctaacccctcccgcctcaccgctgcccgcccgccccctccctcctctgcccgttgcctccccctccgtccctccttctctccctcccgctgcgcgccagcgcgcacgcacacacacacacacacacacacactcatacacatacacacactcacacacagacaccctctccctccttttctctctccctgtagccctccctccctctctttctctcacacacacaccaccctgctcagcgacccagcgctccccaaacaggaccctcgcgggcggcatcgcgagggacacgctgctgtcctaaccttagcgccactcggggagaatgaaggaggcccaccgagcccccgacaaagctgcaaaacccaggagacgcgcacgcgggaccatcacactgtcaagcagaccggggtgcacaatagagggaaactctggggttgatctgggggcagggagggggacgtgttaaatccagaaggttggtggttggaggcggaaagcagagtgtgcaaactgtgcattcatgtcccacttttcacccgaacgcctgcctatcacagccttcactcagggagcgcttccccctcggcgcagaccgagcctcctccgatttgaaactcagcagctgttttaacaattgaaaaagc

SEQ ID NO: 27022 - DNA, 464 bp, Homo sapiens; identical to SEQ ID NO: 6590
  chr4:1225310-1225774
  hypo

SEQ ID NO: 27023 - DNA, 1977 bp, Homo sapiens
  chr4:122871204-122873181
  binary
cggggaagtgagctggtggcgctttcatcccaaaggatataccttccctccatttcctgggccgtttccattccacgcttatcttcagcaataactgaaccacatcgggatgcgtcgctcatttaaaatcagaactcttccctatgggatctactcccagccactgattgtgttcctgtgttctaccggcaggtccagcctgaccaggcgcagactctgcgcgcgcggagcagcgcgcgatcctggggatgcaggggtcatcccggaggtctcggcctcgggcggtgggcctctcgccggcagcagggggcgctgcagaacctcggtccccatcctggagaaccacctccccggctcagccggtctgcgccgcccgccaccatccgaccccaagttctctacctagttctgagcgttcttcctaaaaaagacagtaaaccctgcggcactcccagtgttacgtgacagaaaaaatacagagcatctcaccctgtgaaaccgatcaccctctttttatcttctctgcgtctcgcactgattaaaagctgtctccaagattggaaattaagaaaagttgctctttctcatgcattagcgcgccgaccgctccttcgtttagaaagagagagagggaaagaaagaaagagaaaaagagagcccgcgcgccggggcgcgagccgctgaccctgcaccgcctgggaaccgcagtcaaagttatcactaaagcggttccccggctgcccgatgcccactctctccctcaggggaccctatagggcttcggttccagttttaccccaaatgtgactgaaccacagagagacgaggcgcctgggcaaaccttcaacccacaccctgtatcgcactgtcccctccctactccccacttctctgcccccgcccccgacgtcccagagcgtcggaggggacccaagtccacgctgggacgcccgggaggagttcagggttcaagtgcgcgcctgggtctgtgcacatcttccccttcctcggcctccctgggtaagctcgggaccccggggtccgtcttccaaggggtgcccagccctggcagcagtcgtgcgagctcctcggctctaatacagggagtggctgctcgccaggatgcttgtctgaagtcagtgtgcccgcctgcgggctgttccgtgtgcttgagcctggacagagcccctgccacgcactcggcagcccctgtgtccctccaccgcgcgggaccgagggggcgagcctccggccgaggtctgtcccctccaaatcactccaaatcgaactgcctggccgtaccatgtgggtctcggaggtcccgggctcgacgtggagccgcccggcgcgcgccttcccgccccccgcccggcaccgccctccgaggcgcgggccgcggccgggcccggtactcacaggtccggcccgtgggagaagggcggcgggcagtagccgtgcggctcccgctgcgagggcgccgagcgcggctccagccccccgttgacgcccctccagccccggcggcggcgctgcggctccgcgccctcgtcctcgccctcgtcttcctcctcctccggcgccgggaaggtcacccttgcttgttctttgcacttcctgaccttggtggacatcgcgccggctgcggtccgagtgtgggggtgccggctgccggcctcctccgccttcgcggcagtgcagtcttcccgcggcgccccttcaccacctcccgcggcttccggggccccgggcggcccagggcgggaaggcaggagcggagagcgtcgcggcccgcgatccagcagttagaggctagcgccgaagccgagctgccgccgcccaccatcaaaccgtgggagcagctgccgcggccgtggctgcgacgaggaagcccggggccgagcggggctctggtgctgggagaggctctccagccccgcggcggcggcgatgcctcctcggcgcccgtctcctgtctcc

SEQ ID NO: 27024 - DNA, 1563 bp, Homo sapiens
  chr4:123747655-123749218
  binary
cgtggtttgggtggtgcgggggttgggcgggggtgacttttgggggataaggggcggtggagcccagggaatgccaaagccctgccgcggcctccgacgcgcgccccccgcccctcgcctctcccccgcccccgactgaggccgggctccccgccggactgatgtcgcgcgcttgcgtgttgtggccgaaccgccgaactcagaggccggccccagaaaacccgagcgagtagggggcggcgcgcaggagggaggagaactgggggcgcgggaggctggtgggtgtggggggtggagatgtagaagatgtgacgccgcggcccggcgggtgccagattagcggacgcggtgcccgcggttgcaacgggatcccgggcgctgcagcttgggaggcggctctccccaggcggcgtccgcggagacacccatccgtgaaccccaggtcccgggccgccggctcgccgcgcaccaggggccggcggacagaagagcggccgagcggctcgaggctgggggaccgcgggcgcggccgcgcgctgccgggcgggaggctggggggccggggccggggccgtgccccggagcgggtcggaggccggggccggggccgggggacggcggctccccgcgcggctccagcggctcggggatcccggccgggccccgcagggaccatggcagccgggagcatcaccacgctgcccgccttgcccgaggatggcggcagcggcgccttcccgcccggccacttcaaggaccccaagcggctgtactgcaaaaacgggggcttcttcctgcgcatccaccccgacggccgagttgacggggtccgggagaagagcgaccctcacagtgagtgccgacccgctctctccgcctcatttccatttcgtgggttctcgcccgctctctcccctccagcctgcaccctcctcccggatcttcactgcgaccctagcgctccgtgtggtttctggccgcgcggccctcggcggtttcgggttcaccactcaccccctcctttccgggctgcggcgtaggcccgggtgtcccctgggctttggggtgtgccaatttgccctgtaaaccagtacccccggcccggagccgcggcgcgccggggcctcgcggactggctgtcttcccgcggacaacctgtcgcgtcggggatgcccgcggccccgccatgcagctctggccgcttctatctgctgcgtgctgtcccggggacaaagacaggaaggaccgcagcagaacgaaacggtctttactggaaaaacacctttctagagtcctgcccttaaattccgactcgggacgacccgaggcatatggcacactactctcacccactctgttttatatttttccgaattgacgaaagctgaaagagcaaaaacaaaaaccaaccagccaaccagcaaaaaatccagatgttgttaataaagtgccatagctttgtttcagtagtgaaaagaagtgcaaacactttaatcttccacctgcagtgactagctttgagaccttgagccgacgcttaaccccagagccggtttcctcatc

SEQ ID NO: 27025 - DNA, 162 bp, Homo sapiens; identical to SEQ ID NO: 9734
  chr4:128702523-128702685
  hypo

SEQ ID NO: 27026 - DNA, 811 bp, Homo sapiens
  chr4:13546098-13546909
  hyper
cgggacagagagcgccggcggccgcagcgcgagtgagctgggtgtgcgaggccgccgccgcccactgctgcgcggcccagcagctcccgccccactccgtcccaggatcagcgccgaccctcgcccccaccttagaggcccaccccgcccggagaccccctccccccgaatccagagccagacgctctcctttcgcagctcagctggattatctcatcgcttctcgcccttaggggcgggctggggtctgccccctcgggggacgtgaaggaggattggcgggggcccctccgtggcagcagtcccctcccgagcgccgccggggcgcacagcccgagtcactttttctttgcgcgtctgtcccttcctcgcctgcaggatttcgctcctggcccgtcctccccttccctgctgggcaggctcttccggagcccacccccggcggcggcggcggtagccgcggccgcggccgctggattccgagaggcgcggggaacttttttaccccctgccctggttttatctgtttcttttctctttccttcccttgcgttccactgtaccacccccctcccgcccgggtgtcattcctcactgctgagtgacagcctgaggccacacccctccactgggctgtcccgggcgctcccggccgtccattggctggctccagttgggcgacgttgactttaacagacaaaactgggcacgttgcgccgctaaagacagggtctgacttaaccccttctctcctaagcctggtcctcgaagcaccctccagcaacaaggaggctcatccgacccaaaccac

SEQ ID NO: 27027 - DNA, 1363 bp, Homo sapiens
  chr4:141293964-141295327
  hyper
cgaatattaaagcaggatgccgctttgtgtcaagtactagattacgatgaacggtgtcacgaagaacactccactcttgataccgtatatgtgaccttgagcaagaaatgtgttcacgctcaggcttcagttcctttctgtgggttgctgtgaggctccacaggggtaaggtaagcacaagtgctatgcctcagtaccactagggtattttctcaattctaaaatattaaatggccacgcactacagatttaataatagtttcggaggaggggcgtgaggagaggaacattccactagctcaactataagctttccgatttcggaaataagaaaaatatgaaaaagtctgcttttagaattaaggaacgacggtgtcgcgttgactttctctgcttggttcgcaaacgctcttttctcgaacttgaatgacttctctgtcgctcataccaacctctttcctgaatgacttctctgtcgctcataccagcctctttcctgattttccacactgggattctcactccaattctcaggtttcctgatagacctgatgagccgcttcaccagcgccgcttagcttcgcttctttactgtcattggctgtcgctgttccaggtcccgcccacagcgacctcaatcctgattggatgtcagtgtccttttgttatggcaaaggtggatcccggtgctttgagattggacgactggggtgaggcgggcagctaatgcgcaggcgtgtattctcgagtcaggattggcgggcgagcggctgggacgggatgggattcttctcacggcgcacgttctgtgggcggagtgggcggagctgccggggtcagttggtccaagtgtcccggcctgaggtgtcggccggatccctccttctcccggcgcctcaagcggaaggtgagggccgtcccgggcagcggagggcctggccccaggcgactagagctgcatcctcagtacctccgagggcctggagggcggggcgggctggacgcggccctgcgcaccgggggcccgggaggagcggtctcgggcctgggcatttggtgggcggcggaggcctggctcccggcagaacccttgcgcgacctctttttctcctgttttcgttgtcaggcccaggcgttctttgggagagggacctctcgcggtccctgacgcagacatcgtgtagctttctccccgcagctcctgggtcgggagccgctttgcagctctcggctctggaattggactgcgggaggggcgtttgggtggaatgggacctggcacgcctggaccttcccgtggctgctctgcgagagcctgagagatgggaggggaggctgaggtggggagggagcctagagagcc

SEQ ID NO: 27028 - DNA, 894 bp, Homo sapiens
  chr4:144620966-144621860
  hyper
cgcggaccagcacacccgcggacccagcgtcttggccctcaggccccagcagctccaccatcatgggcacgtagtcacggttgggcgaggaggtggctgtgtgctgatagcgcaccccagcacggaggaaagcctcacagtctacgcccttgcccctggggagaggggcccccaccgcgtccaccaagcgcccgtacttgggcagggggccgtcctcgtgaggaagtggggtaagccggcacctgcgggtggccgtggctccagacttcagggaggcgaagtccagcactctcctgtctatggcgcggctccagcttcgcagcttctccactaccaaaggcctgttacgcgtcaccagctccagctgggagaagaccaagtccaccgccagcgtgaagggcagcaccagagtgtgagtcggggcgtcgtagcgcagctgcagcagcacccgggcgcgtccggggctgtgggagccgaagtgagtgtactggacttggcggggcccgaaggtgcaggggaagcggcgcggggagagcgcgcccttgagccgcggcagggcgtccagtaccgtgacttcgcaccggtcccccggctgcactccaatcaccagatcccggagcgggtcgagccaaagggaacgacccaggggcacccggagtccagggttggcaatcagcacgctggggccgtcggggcgagtgccgtcaagcgcaccccgggcgggcaggtaaagcgccgggtcgggctcggtcccaagtgaggatgcccgtccctgcagcgcggggcgactcaagagcaggcaggcgagcgccacaaggagctgccggggcgtcccagtcgggtgccgagaagcccccgccatggccacggatggctcctggcgttgggattccc

SEQ ID NO: 27029 - DNA, 956 bp, Homo sapiens
  chr4:147559188-147560144
  binary
cggggagggggaggagtcgcatgcgcacagacgacccgagcctgctccgcggctgtccaatccgctgagagctgcgagaaatcgagtgagagaaagccctgcagcccctccgaccccatgtctctttggcaccaggcacccgccgggccgtggggggctcgtagccgaacgccgacctccgctcgtattgggctgggagttcagagccgcgcgcagaacccgggttggccgcaacgtctgtgttctcagcggtggccgggaacctgggatcagggtcacctgagctgacggggtgggggcgggccgagtggggttggaagcctggaacttagtggtaagcaggaggcgtaggaggtggcagccaggtaagaggcactcttacctacccaacgctggcttgggccgcaactttatttgggagtttctttttccggtgagacagagacccggcagaagaagcgggaggggctggaggctggtccttaggtaggcactgcccggcgactggagcgcggacctggccatttgggtggggttgagtgggggcgcgattgtgagtagcagccgcgggacgctgcgaaggggcggcggcaacagagcacgggcgggggcagaaaagaggcggcggagggcgcggtgggggagcgcgaggcgagtgctgagagagcagaaaggactcaagcctgaggggagtagagaggaagaaggggcaacgcgagaaaccgaacaggagccggcgtttcctggcaagggagggcggaggcgcgcgggagagagggagagagggagggcggggggcgcgggggtaggcgcggggagaggggagtataactcgccggccgcgaggagcgggggcagtttcgggtgccgaggtctgcagctagcggcaagcggagtcaggcatccgttcagactgacagcagaggcggcgaaggagcgcgtagccgagatcaggc

SEQ ID NO: 27030 - DNA, 116 bp, Homo sapiens; identical to SEQ ID NO: 6592
  chr4:152591291-152591407
  hypo

SEQ ID NO: 27031 - DNA, 986 bp, Homo sapiens
  chr4:154709413-154710399
  binary
cgtggcaggggcgggatctcctgggagcgtctcagcccagcagggagtggggaagcaagagggaaggcttaccttcctcggtggctggcaggaggtggtcgctgctagcgagggggatgcaaaggtcgttgtcctgggggaaacggtcgcactcaagcatgtcgggccaggggaagccgaaggcggacatgaccggggcgcagcggtccttcacctgcacgcagagcgagtggcatggctggatggtctcgtctaggtcatcgaggcagacgggggcgaagagcgagcacaggaacttcttggtgtccgggtggcactgcttcatgaccagcgggatccaagcgccggcctgctccagcacctccttcatggtctcgtggcccagcaggttgggcagccgcatgttctggtattcgatgccgtggcacagctgcaggttggcagggatgggcttgcaattgctgcgcttgtaggagaagtcgggctggccaaagaggaagagcccgcgcgccgagcccaggcagcagtgcgaggcgaggaagagcagcagcagcgagccagggccctgcagcatcgtgggcgcgcgaccccgagggggcagagggagcggagccggggaagggcgaggcggccggagttcgagcttgtcccgggcccgctctcttcgctgggtgcgactcggggccccgaaaagctggcagccggcggctggggcgcggagaagcgggacaccgggaggacagcgcgggcgaggcgctgcaagcccgcgcgcagctccggggggctccgacccgggggagcagaatgagccgttgctggggcacagccagagttttcttggccttttttatgcaaatctggagggtggggggagcaagggaggagccaatgaagggtaatccgaggagggctggtcactactttctgggtctggttttgcgttgagaatgcccctcacgcgcttgctggaagggaattctggctgc

SEQ ID NO: 27032 - DNA, 711 bp, Homo sapiens; identical to SEQ ID NO: 22911
  chr4:156297402-156298113
  binary

SEQ ID NO: 27033 - DNA, 1047 bp, Homo sapiens; identical to SEQ ID NO: 24465
  chr4:15780048-15781095
  hyper

SEQ ID NO: 27034 - DNA, 1212 bp, Homo sapiens
  chr4:158142705-158143917
  hyper
cggcctattcgcgtgaataagagactcttggatttttgggcgctagcgcgcgcccctcctttccctcccggggcactgacactgttctcttgcttgctgtttgttctttgcaggggggctatttcctaggggcgccgatcaagaatacagtgcatttcgagtagggatggttcagttttccacttcggagttcagactgacaccccacatcgacaatttggaggtggcaaacagcttcgcagtcactaatgcttgtaagtaatgaatattcatgcctttcgggtgctgcacgcggaaggccagcgagtgtgagtgtgtgtgtgcgtttctggggtggtgtgtgtgcgtttctgtgtgtcagtgtgtgggtgtgagtgactgcacacacgcgtgcgtgtgaccgtgtagagagaaggtggctgtaatctcagggacccccgctggctggagagggctgaagagagagggaaaggacgtcaagagtgtgcgcattagggagccggggtgagggttggagccagggagggcggctttcttgggttcaaggggttttcgctcatcttgagtgcttcaggagaagccctcccacctcgctccccatcgagcgcctgttggcaccctgcccacagagaacacgttgttccccagggcgcgcagtcgggctgttggacaaatcccacgagggactgccggagcccagtggcctcctgccccagcagctgccgctctcgcccgctgcccccagtttagatccgcagcaccggctgggctcaccctgcggccctcgcgagctccatgttctcctctttgggacaagttgttgaaatggttccggagttgggatcggggctgttacataacgcccacccgaggggcgaggagcggggctgacgcaggctcaggccggccgggtggcgtgggggtggggcggggaggcggtggaaagggggagcgctgtcaatttctcctgctcagttgcgcttccgcttaagttggagggggcgaggccgccaggggcgccgcggtcagcttgccagcccggcgcgctttgttctcaggtagctgggctccagcagaggcagccggggaaaaggactgggaagccgtgggatctggccgagtttgaaaatctggagaagtcgctgatcagccattttagtctttgcaatgctccatattaaccctctcactccgcgcagtgctccgggactc

SEQ ID NO: 27035 - DNA, 971 bp, Homo sapiens
  chr4:175749838-175750809
  hyper
cgtaatgcacaggcttaatgagttctccgactgttaaatccaagcgaactcacctgagtaacagtgctgcttcccagaagtaaaatcccgaaactaatgtccgaaagtgtctcacgtgggccatgatacggagagatattcacgatcctgaaaatagtcttatccaaggcatggggaaccagaaagacagaatgaaaatgtacaatctaaccccgcatggtgttggtgtagactgatgcttgggaagcttcagcaccttagacagctccccgcagtatgcggaccccttctcagcattgagcagaagtggagagtcacagtgttataaatgtgcaggtgatttttacagtgaaattacaaaaatgagtgagatgaaatgtctgaagtgcctaggtgctgggcaacagttctctaaagctccagcagcaaaggaagaatgttcgttcttccctgactgagacccaggattggaggaagaagagcagcaacagccggaaagaggacgcctctccacctgctccaagcgccgcccgccggaatccagctctccaccttgggttaaaacccgagacccggagcgcggcaaagggaagcgggggtggggccggacaacccggtcctgtcgaccaatcacgaccgcacagcgggacggagtgacaggccacttacgacggtaggcggggcttagcgcttcaccctttaacaaaacccaaacaaaccaaacggcgactggagcgaggtgggcggaaaaagccacctgggaaagtcagcggttttgtggattaggtagtgtaaccccgcaggagggaccctttagtattcccttccgggaaaaggcacactttaggtcttctcggatgtgacactgtctgttacactctacaccgaaatacaagagtcagcagtaaacccagaccctggcggagggctggggaagagaagacaatgtggtgcgtgaacgcccgtggaac

SEQ ID NO: 27036 - DNA, 1090 bp, Homo sapiens; identical to SEQ ID NO: 23267
  chr4:176922585-176923675
  hyper

SEQ ID NO: 27037 - DNA, 615 bp, Homo sapiens; identical to SEQ ID NO: 23268
  chr4:176986744-176987359
  hyper

SEQ ID NO: 27038 - DNA, 901 bp, Homo sapiens
  chr4:2042115-2043016
  binary
cgtgggcgcgactgtccgtgggcgctaggggcaggggtgataggagcaggtcgcgagcgggcgcagcgtgggaccgaaggggagaaggacgcctgcggcccggcgcgtccccggaggcacgtcccccccagggctccgcggccccggcaacagcgcggggctacccctctacggctcccgccccactgggggaccgcgacggcctgctcccgggctcttggctccgagtggagaagagcgcggaagtgcgcactagcccgacactcgggagggccgctgcctccccaggcgcctgggacagcggcccgcagcccccacccggcccctcgggccccgcgtgcgtttcagcgcgctgaggatgcagcacacccccgaggtgcgaccgggtccccgaagcccggcgtcggcccaacccggaggaggcagcggcagtcacgggcacgcttccccaacccaccctcccacccactcttagggtcaggacacccgcgtccggccggggcaggggcggctctgaccacgcgagaagcaggtgcgtccgcagtcccagcttgtgccgggaagaccaccggccagaaccccgggggttgggggtagaggtcggctaggctggggaggggggcgcccgaggctccgggtcctgcacggcgagcggggcggcctccaggtaggggtgcggctccgcccaccaagaagagggtctggcgggaggtgtggttagtccctgagctcccggccacagcgcgggctgctgggtggggtggggggggagcgggggcgccagcacccacgtgcgcctggggcgccttctgaggaggccaccgcctgtgtcggtgtcggcgtgggggcctggctccgacggctgggaccatccctcccagggcgtccggggcccagattc

SEQ ID NO: 27039 - DNA, 50 bp, Homo sapiens; identical to SEQ ID NO: 6595
  chr4:2622600-2622650
  hypo

SEQ ID NO: 27040 - DNA, 933 bp, Homo sapiens
  chr4:41753226-41754159
  hyper
cgcttggcactagagccttactgcacctggggtgtgtctccgcgtggtgcagagcgcgcgctctactccggaagctacggccgggtgccgcgccaccgctgtgcgccctgggcctgatccctacgccctagtcgagtgcagggcagggcaatttcgccgtgggtcctagtttgctgacagttcccaggcccctttagcttttggggaggaggcgagactaggacctaaaaagtgctgggagctcggagtagaggggttcatgttgccagtttctgaggattgctcttaggtgaagatgtggaacttggaaatttaggtggtgcacagaggcacttcctgagcgaaagggagtgttggggtggggagttcagtgggcacctcaggggacctggatgctgacggggcatcagagggtgtcaaaaggagaagctaagggatctgggcgaggtctcagccgaagggcgctggcaagggaagtgcttggccggggagggtgcccggggggcggtcaaggggcaggcccggggctctgtccctcccggtcctggggtcccttcccgtcccgcggttccggaacgcctcgccagccctctctgggcgccccctgctgccgggcgccccctgctgccggccgccccgggtcggggtgccgtgagccttctcgcctttgtaccaggagacctttcagcgccgggcccacacggtcggatgagcaaatgcgcttgacttcattttcccctttgtagaccttgtaggtttattttgttcagtgtcaccatccctcccccaccacccctggcctatcgtccctctgcccgtcttttgtggcccggggtcctgcttctgcttggagatgaaaggcgtgcggggctgggccaggccagagccccagccccagcgccctgttttgttccagttgtgctttctacacgc

SEQ ID NO: 27041 - DNA, 2383 bp, Homo sapiens
  chr4:42152717-42155100
  binary
cgcaaccagcccatctcgctccctgcaggcaggcagtgggctgctttgccgggcagcgcccgcagactcgagataaaggagaggagtcgcggaccccagagtgggtgcctcccacgaggcgtttctgtaaggctcgggccgagatgctcgggaggggcaggaccccgcggcgcggcagcgtgccacggacggggacgaggggatggcggggacgacgacgtgggcggtgggagcagagtgcctgcgactcccggggcaggaaggaggggcgggatggttccccgcgcccgaaatccacggcgtggcggacgcggaggagccccgagtctcacaaccaaggggtgggaaggaaaagggacagagcgagacagagcgcccccgagaaacacaggcgcacaaaaaaagacagaaggaaaaacggaactgagagccagccagcatggactgcgacagcgtgagagtgcatcaaagaggtggcgaagaaagcactagaaggcaaaggagaagtggagagaagaagaaacaaatggaggaagaaggagaaagggaaaaagcagacggaaaaagtgaagtagtacgagggcgtcccagcggggcggcccgagaagctccagcttcttcccgagcggccgccgctatcccccgggggggcgtctggccccactccggaccacgcccgagcgatcctggtcgccgactgccacagccgtgcttcccggcgcgggatccaagccgcggagccacctgttaggcgcgcgccgtcggaagcccaggcgcggcggcgctggagaatcctctcgaagtttccgggtgcgcggggaggccccaggtgcgccccgacatcccgacacggcccagcacgggtaagtgtcggcggccccccgcttctccttcctgggtcccctcccgctgcccccggccgtggcgggaaggaaagttgtgcggagagttggtacctgcgctgagctccaggctggcgctgtcgctacccgtgccgccggtgccggcggccgccgccgcgcctgggccatacctgacgacagcggcgaacgaagacgacgaggaggcggcgggggacgcgggcggcggctgcgccggagtcctcaagtggccctgggatgtggcgggcgtgcaggacggcgacgacgacgaagcggcggcggcggcccggccgggcccgggggggtaggagctctgcgcctggaactgctgcggcggcggctcgctgctgctgatggagacggcggcgtgcggcgcgaagggcggcgggggcggcgggggcgcccgcacgtgcggcagctccaccagggtgggtcgctcgtagcgcttggccagcgccggtctcttgctggggaacgtcttgaggacgctgtaggggctgcgctgcttgtagattttggggacgctgggcccctcctctgccggctgcatctcttcctccatccggcgcctcggggccggtccctcggagcacgtcccctccccgccgggcgccgggctccgagggtgcctccgccgcctgcccgccgggtctgccctggtgcgcgcgtgtgggagggtgtgtgtctgtgccgtggccgccgccgccgccgcctgtcgctgaggctggcatcgccgagcccccgcgcggggggctgccgcccgagctcctgattgacaggctgcctcgccaatgcctggagggagaaaggaggtaaagagcaagtgtttagggtaatatctgctaatgataatgggggcggggcggggcctggcgccgcagccgcccgcggggtctgcctggcggctccgcgcctccgacggggagcgggggaagggggaaagcgaggacctggaggacgcccgggaactggtgaagaaggtggggatccgggatctggctacggcgagactttagagacccagatgtggactcgaggcttctgcggctgcgggcggggtccggcttccgaaacgagctcgtggcgccccctgcatgaccccaaactctcggggttgcacagaggaggggctagtcgttggggcggggtcgtcagagtacgtgtgtattacagcaagttcttctaccaatcgggaattgctctccgatccttctgaaaagaacctcttgaagatcttggcccgggtggtcgcgcggtgtttacggggctttggggtcctgctttccccgagcatcgcggcctctgagctcatgcggaacataaaagctcgcaaggcgtagaactttttcacgttttcatttgtttcccgtaggggccccgagaacgtgcatgacaccatgatttcccccccattataaagatgagaaaaccgaggctctgagaggttgaagggaattgcccaaagtcagacactcgggagtgtgcggctgtgttgcactgac

SEQ ID NO: 27042 - DNA, 1371 bp, Homo sapiens; identical to SEQ ID NO: 24477
  chr4:42398819-42400190
  binary

SEQ ID NO: 27043 - DNA, 866 bp, Homo sapiens; identical to SEQ ID NO: 24478
  chr4:42400216-42401082
  binary

SEQ ID NO: 27044 - DNA, 983 bp, Homo sapiens
  chr4:46391158-46392141
  hyper
cgccacaaccccctcaaccaagaccacctccgcaaccacagcgggaaaagctaggggcaggcagcccacttttgcaattactctacattacagtgaactgcggtcctcacgtcttcttttcttcactccccttaacaaaataaaataaataatttcccttcctgcccacccacggttgcccaagaccaagtcttagaggcagccgggttccgatcaagtgctgcgaaacgacgcgtttgacagctgctctggagccgaggatcacaataagagaaggcgcgtgaggctccggcagcaaacaccagccaggcaggcagcggtaatcacagtgagcaaagttgaagactataaaagagccaggctaacgtgctgccgagcaggtgtcctggattttattgtagttgcaaatatgcttctggtgataagtatcgaaattattttttaagtgcgctggggaggagggaggtgcgggaattgagcctcctccgtttccagggagcctctgaaagtggggtggggggagatgaggcatgcacgcgaggcaaagacaaacaggaaagtgtctctatcgggaccaacgtgtgcgaccctacctgaaacggcaagcagaattcggtgttttcttccttttgccctgatcttgacgagataggaaacttgggagagagagagagagagagagagagagagagagagagagagagagagagagagagagagaccgagactgcagcagccaagagagcgtggagcgatgggctggtggaagccggagaggagcgctaggagccgcggcggcggcgcgaggtgtagaaggaggcgaaggcgttcgtagtggcggtgatgggcggaggaggaggaagaggaggaggaggaagaggaggagggggaaaacgatgacaggagctggggccggggggggaaattggggggacgcgggcggaggcgcggtgcgcgccggcggtggcgggcacgagccccgc

SEQ ID NO: 27045 - DNA, 748 bp, Homo sapiens; identical to SEQ ID NO: 23274
  chr4:47034214-47034962
  hyper

SEQ ID NO: 27046 - DNA, 885 bp, Homo sapiens; identical to SEQ ID NO: 23616
  chr4:513070-513955
  hypo

SEQ ID NO: 27047 - DNA, 1867 bp, Homo sapiens
  chr4:54965998-54967865
  hyper
cgtggggaagagttgggctgcggccagggtagcgagagggggtgggatggaggatgcagcgctgtgatttctcagtaaagcgtggagaaagagggggaggaggccggcctccccgggaaattaacaaaacctacactttgcaaagtctcccccatccccctcccccgagttcttccccgccgcgcgcccgcccctcctcgcggcttctgttgtgactcgggcagcctatcccgagggtgcggagctgccgaggagcctgagccgagcggtactccgcagcatcacgtgccagggtggggggctataaaatacccgagccggggcgccgggcgggggacgtgaggaccagccctctccggggacccctttgttcccagcccagacgccaacacctctgcgtccccaagggcttgactgcccgtgtctgcgcggctcccagggcagagcttagaacactagaggagaggggtcgccgcgaactgccggggcttccagccacccacccctctcgacatgtcgcgctccttctatgtcgactcgctcatcatcaaggacacctcacggcctgcgccctcgctgcctgaaccgcaccccgggccggatttcttcatcccgcttggcatgccgcccccattggtgatgtccgtgtccggccccggctgcccgtcccgcaagagcggcgcgttctgcgtgtgccctctctgcgtcacttcgcacctgcactcctctcgggggtctgtgggcgccggcagcgggggcgcaggggccggggttaccggggccggaggcagtggggtggcaggggccgcaggggcactgcctctgcttaagggccagttctcttcggctcctggggacgcgcagttttgcccgcgggtgaaccatgcgcatcatcaccaccacccgccgcagcaccaccatcaccatcatcagccccagcagcctggctcggccgcggcggcggcagcagcagcagcggcggcggcggccgcggcggccttggggcacccgcagcaccacgcacctgtctgcaccgccaccacctacaacgtggcggacccgcggagattccactgcctcaccatgggtagggcggggtcttggggcacctgcgctccgcgcctttcgcgctcctggagcaaactttccacctccagtggaggaagtgggagcccggggacagggtgaagagagaggacgggcttttagtgtaaccgtagagtcagccacagaagttccacgaaagtggaagttagtttgccagcttctccactcagcctggtgcgttttactcctagtagtaggtgctcgagtattgccttattaatactggggccttagggacctcgaacgtcacggcggataaaccagaggttaactgcttgggatttggggtgggtgtgtttgaacctgtgtggcatccccgcgtcggggcggctaaagcgtcttgacgtttttggctaagcctgcgcgcttctccgcttggctcaaagggaggcgatcagatagtgcaagcccccatccctctttaatcctgtgacttcgcatcctgcgcatcgaagacctttatttgctttgcacgtctcttttcttccccgctaagcaaccacgtgccttgaaatgggaaagggatacagatgttcggctgggcttccccgggtgggtccctgaaatgcgtcctggttagcacatggggtgggagcaccttgcccgagccttacctctctaccctctcttcgccggtccgcaggaggctctgacgccagccaggtacccaatggcaagaggatgaggacggcgttcactagcacgcaactcctggagctggagagagaattctcttccaacatgtacctgtctcgactcc

SEQ ID NO: 27048 - DNA, 547 bp, Homo sapiens
  chr4:57687545-57688092
  binary
cgaagcccaagcaagaactaaagagggtggctgactccacaaagccacccccacaacccccagttcgcgttcctccacctggcaggtcctctggggaaccgccagtaacgggcgcgcgggtaccgtcgccgaggccgcccggagcagggcagggtccgccgccggtctgactcccaaacccgcttttctccggaggtccccgctcgccaggaccgctccgagcgctacctgcgaaggtaactgccaggagcagcagcgccaagcgcagcaccgacagcgccatcctcctcccgcgccggctgtcttgcccctgcggtctgttacctgcgccactcgcagggagcgctcgtgcgacggggcgcggggagggcgggggaaggggcggggcgagaatgggaggaaaagcagcggtaggtggcgagggaagaggggcggcgggaagaggagcggcgggaagaggagccgtgaagggtcgggggagaaccggaaagggctgggaaggagaaaggtagaaggacgggggagggggccatggggaaggaggggc

SEQ ID NO: 27049 - DNA, 761 bp, Homo sapiens
  chr4:58029764-58030525
  hyper
cgtgagtcagtgattcccagtgttgctgtgcctgaaaacccaccactaatgtcagcgccttgtgctgttgagttgcacgcggcgcccctgcagtccagggctggggctagcccggcgagcgcgcggcaggcagagcattcccggacgagtccggtagatggtagcattgtgcagccgatgcgtcctctcccagcttgcgtctcatttttccctctccccctttcctgggctcagcggtgaggctcaggtaccggcgccgccctgatgcctactatgccgcgccatctccagatggtccgcacctggcgggtcacgacgagtctcaatccacagcatggggctgactcggactcaggagtttttgtggctccaggcgtaaccgttgctttggataaaattggtccagttcacttgaccaaggagaagtgcagaggaggataaacgtccccatcccagtggtgtcctctcccgactcctttcgtgtagtgagctttatttttagagactcccgcgcctgccagccgctcatgctcgggttccccaagcggaggggctccgcgtgcagtgtgatgcccactgtcgccggcagagggcaccgtcgtcacacactgcgcaggagccggcgcgggaaggcggcggggctgtccttcccggtcagcgtcctacgcgtgaccttgggacccgcaaatgtctgcgccggaggcattgcctcttcccgactatgggggatactgcacggggctcccgatggcctcttccac

SEQ ID NO: 27050 - DNA, 923 bp, Homo sapiens; identical to SEQ ID NO: 23276
  chr4:6201800-6202723
  hyper

SEQ ID NO: 27051 - DNA, 533 bp, Homo sapiens
  chr4:650837-651370
  hypo
cgccggggatgccctgcgaggggtggggcctgtgcggtgtgggggcctccccgccaagcattcggctgtgtgcgtgtgctcatgtgtgtgcggtatgcatgcggccagggagaggacgacaaagggcccccccgggagcaggagcctctgcagagcacccgggagaccccacacagaagcactgcgacaccatggtggcagccccaggacctgcccgccgagccacggggcctggcacacaggcacatgggagggggcgcgccgggagcgctgagcgccagtgacactgccatcccctccagtccctgacacagttcctgggctggtcagtgatgaacaccgacacctacgacaagatgaacaagctggagaaccgcaaggacatcgcacaggacatggtcctttaccacgtgaagtgcgacagggacgagatccagctcatcctggtgcggcggggcaggacgtccaggggtcacccaggggtcacggctgtgtggcaggggcaggtcgtccaggggtcacccaggggtctc

SEQ ID NO: 27052 - DNA, 871 bp, Homo sapiens
  chr4:66534909-66535780
  binary
cgaaatgtcacttccccacgcgccttaagtgaggcccagccgcacccatccccctggaacgggcctccattccccaaaggaggcctcgacctcctttcccccaaggttttccaccttcccagccccccaaccagcctctgtccacacgcatgttccttgcccagcactccgcagctaacgtcaaacaatgcaaccaaaaaccgcagaggggagcgaaaaggccagtggaaggggacgacaaataccaatttgagatgagactgcgatttagtctgcagcagcagcgtccagcgcgctgagacctgaactcccaggccccgcctagcccctccgccccaggtcgccacggtccccacccccatctccctaccttcgttgctggggctggccaggagggtccggagtgcggcgcacaggagaaggcacgtccagaggggagcccgtcgaggtgcagagtagcagccggccagggacgctggggtgatgggggtgtcgccgccgccgcttgggggccgccggcgtcccgcaccccggggccccgagccccgcatcttctccgagcctcctccggtgccgctgtcccgagcggctcagtccaccgcttcggcctcgcagagcggcgaagggagactcgggagtcctccttgtccccccttggggtcctacgccttctggcacgcggctcctccaaatgtaggaaccacggatccggctgagacagctgaagtttgcttctggctcctctcgcctccccctttggtggggttaaatgaaatattagttctggttgctagtgcagatctggactcggatcaagggtgtcgagagggtcctgggtcctgttcctttgcctttcaaaaagactttttac

SEQ ID NO: 27053 - DNA, 37 bp, Homo sapiens; identical to SEQ ID NO: 7406
  chr4:71566942-71566979
  hypo

SEQ ID NO: 27054 - DNA, 618 bp, Homo sapiens
  chr4:73433670-73434288
  hyper
cgggcttcaccttgagcctccaaagggttgggggcagggccgaaaagaaacagagctgcactcaacttagctttaaaaagaggaggagttgtgcagagggggaggggagaaggcggccggcgcctgcagcctctgcccaggaaaacggagggcaggaaacgtctccagcccccctccccaactgtcaaatcctagcccggccgtggtactcccaggacacgtgtctactggatctctccctgtccggcccaaggacttcctgaaacccccgcctccggctgcccgaaaaaaccgtgagtcagttcggaggagagaaagctccaggaacccgactctggcggcagcagccagagcgctgggatcccggacccagcgtccagaacttcattcaagcgcccagaccgccctccagaaaggggaagcccagatggcccggcgaggatgggaactggctgcggtttgtcactaggaattgttacgaatgtcgcagactggtgaagccctaggtgtgacaagactgggctcccggagtgggagtcgtaacctcccgtgcaactcaaccctctacccccaaaagcccgcacgctgcgcccagccctcaaaacaccgtttctgaac

SEQ ID NO: 27055 - DNA, 692 bp, Homo sapiens; identical to SEQ ID NO: 23277
  chr4:76555346-76556038
  hyper

SEQ ID NO: 27056 - DNA, 780 bp, Homo sapiens; identical to SEQ ID NO: 9766
  chr4:80993254-80994034
  hyper

SEQ ID NO: 27057 - DNA, 895 bp, Homo sapiens
  chr4:81187647-81188542
  hyper
cgctcggatctcctccctccttcacatcccccgcccccgggaccgcgaggctccctccccgcaccggccagtgagtacacaaagccgcgggtgaggggaagcttcgcaggcgtgcacggagcagtgagatcactggcgttataaatatcccggtgccagcgcggagatccgctcgggtggcctctctcttcccctctccccttctcttccccgaggctatgtccacccggtgcggcgaggcgggcagagccagaggcacgcagccgcacaggggctacagagcccagaatcagccctacaagatgcacttaggacccccgcggctggaagaatgagcttgtccttcctcctcctcctcttcttcagccacctgatcctcagcgcctgggctcacggggagaagcgtctcgcccccaaagggcaacccggacccgctgccactgataggaaccctagaggctccagcagcagacagagcagcagtagcgctatgtcttcctcttctgcctcctcctcccccgcagcttctctgggcagccaaggaagtggcttggagcagagcagtttccagtggagcccctcggggcgccggaccggcagcctctactgcagagtgggcatcggtttccatctgcagatctacccggatggcaaagtcaatggatcccacgaagccaatatgttaagtaagttactcgctctcctacaaaacccgtcctaggcggccgcggaagattcgggagggacagcaggtattcgccgggacacaggctcaccttcctgagcccaggccactgggaccaagctgatactcagaaacagccgggcgggttgggtggagatgcatctatatggcgtgcgcacacgcacccctctcctgggcatgaggaattgc

SEQ ID NO: 27058 - DNA, 115 bp, Homo sapiens; identical to SEQ ID NO: 9767
  chr4:8609457-8609572
  binary

SEQ ID NO: 27059 - DNA, 616 bp, Homo sapiens; identical to SEQ ID NO: 6185
  chr4:90228673-90229289
  hyper

SEQ ID NO: 27060 - DNA, 1830 bp, Homo sapiens; identical to SEQ ID NO: 23281
  chr5:100236036-100237866
  hyper

SEQ ID NO: 27061 - DNA, 1887 bp, Homo sapiens; identical to SEQ ID NO: 22915
  chr5:100238197-100240084
  binary

SEQ ID NO: 27062 - DNA, 1059 bp, Homo sapiens
  chr5:101631442-101632501
  hyper
cggtaggttgaccttggtgagagcgcaagcaagttccaaacccggggccaccttgcagggcgcgtccaccgtcccacggaccccgcgcacctgccctctcccccggctggctcgccgtgcccacctcgctctccactggcccgagcctcaagcgggcgctggactttaccttgcgtgacggccaagaggcagtagtgaagcagaaagcctccaggtgtgttgcagcgctggagacattgaggatggaagttcctccagccgtaagacccctcctcaaactcggacagcgacagtgaccggagcttctcttcggagacattgggaggggctgaaggcagagatggctctggtgacttctggggctcctggggcttctgaagctcctgtggctgagaattctctctttgggggtcagaggacaaggcagagacttcgatttgggagggcgacgcagacaagcggcgcaggatgtctgggctggaggggacaaaagccaagttctcaatacctttggcgctcttcatgtctggatgggttctcccgactccggtgcttcagagcagcagagccaggtccctctctggctcctcccacaggcaggtgacagcgcccccgtgcgggaagcttcccgcctcctggccctccagcctccagcgcactctccgccaccgcctgaaccttcctactccagctcgcagctgtctggagcgcagagcgctgagcgggggcgttagcgccccagcctgtggctttggcgctcagctgtgcctcacccgtcgcctcaaggaccaaccggaaggcgcggcgtgggcgtgccacccggcggcggccgagtagagggggcgagagttctcaccccacagccttcgaccggagtccgcctccgcccaagcccctgcggttctgacctgagccttcagcccgcagcgcgcctcccttgagcccaagcactgggaacacacagagactgtgggagtctctggccataagctccccttgggtgctgacatgaaacctgtaaacagttgcatcaggagattgttcaggaaactatcttgc

SEQ ID NO: 27063 - DNA, 423 bp, Homo sapiens
  chr5:1034298-1034721
  hypo
cgtgttggcgtgggtaggaggcgaggtcccggcccccacgtccccccacaggcactccagtgcgatgtctcggtggaggaggacgaccgccaggagtggacgttcacgctctatgactttgacaactgcgggaaggtcaccagggaggtaggtgagcttgtgtttgcgtcaggtccacagtagtagacagacggggcagacagactgtgctggcctcgcgatacctcagggggcaggaggggacctgcctgctgcgaggtcctcatgccagctgggcttgcgtctccccagggcccagttcacgtgtgtttctgggccgagcctgcgccgcccatttctgcggctgtgcttcccacactgcaaggctgccctcagggcactggaggcgctcacagggccacctgggcagacccaggctgctcc

SEQ ID NO: 27064 - DNA, 520 bp, Homo sapiens
  chr5:1039295-1039815
  hypo
cggtcccaacactcacggggcgacttctgtgacatgtcagctttggagaaaggtgtgtcctgcaagggtcaggagacggttgcaggccagaaggacgtcccagtgacgtttcggagtcttgcagcctgcaggggtccatgtggttacccggaacaggaaccgtgggggtgctttccgggacccagggggcccgtgccaatgtttctgagtcttggagcctgcaggggtccacgtgtttaccctgaacaggaacatgcgggtgttttccggaatctggcgaggccgcgcggcagttttgcatttacattccttgttttgtttttaaggataaagcggtgctgggtggggtctgtgggaggggtttgagccatggcggaagatccctggtgaatggcttggatgtttgtcgcctccgagtctcatgctgagacgtgatccgtggtgctgggtggggtctgtgggaggggtttgagccatggcggaagatccctggtgaatggcttggatgtttgtcgcctcc

SEQ ID NO: 27065 - DNA, 1094 bp, Homo sapiens
  chr5:110559569-110560663
  binary
cgccacggagacgcgctcaaggagggatgagttgcgccaccaccacctaggtccctctctcgctatccggcggggccgcccggacccaggtgctgccagggtacgcctggcgcccgccatcccagagcagcgtcccgctgcgcacggtctccctccagctccggtccccgcgggagggcgcgtgggatgatgcgcgggtccttgtgccttccccaagctccagcatccggagccgccctagccggcaccgcggcagccacagcctgggagagagaaaggaaagagggagggcggcgggaaaggctcggcgcgggaggagggcgggtgaggagggaaggagcgagggggagggagcctctctcctcagcggtgcagctagtctccctccagcgggcggcgactccgggttccccctcgcgccctctcgcagaggctcgcccccttccccgcccaccgtccctgcgagcgcgggcggcggcggtgggcgtgtgcgcgcgtgaaggacgccgcctctctctcgctcctgcgttcgcaggcggcggctggcggccggcttctcgctcgggcagcggcggcggcggcggcggcggcttccggagtcccgctgcgaagatgctcaaagtcacggtgccctcctgctccgcctcgtcctgctcttcggtcaccgccagtgcggccccggggaccgcgagcctcgtcccggattactggatcgacggctccaacagggatgcgctgagcgatttcttcgaggtggagtcggagctgggacggtaaggcgcgggctccggctggggaagcccgcggcgtgcactgggggttgtccctctcgcagcgacggctcggagggtgcgggagcctgccttcgtgcccttcgatttctccctacctagttagtgtcttgagagagagctaaccttcattcaggtgcggctcgagtccttcccaccccaccagagcgcctaggccggtgcagctgtaggatcagcccgactccctcccaccttccctccttctcgcaggctgccacttcccttgggtgacagctcccaccgcacgtgggccctgctttcccaattgatatctttgctcac

SEQ ID NO: 27066 - DNA, 1400 bp, Homo sapiens
  chr5:112629411-112630811
  hyper
cgcttgcctcaaagactcaggagtccagatccgggcaggaaataaagttctaaagcggctttgaagtgctttctccccagacccctccccagcgcgggtcattcatctcagcctagggaagagaccaccttgcctgaacgtagccaaacgcatcgcacgtgggagccaagtgggagatgaaataatccaatgcgtccccctcaccaccaccacccccaccaaattagttaccgtcggcttaaactcatcgggaatgtccgtgtattttaccgatcagggaaataaaagggtgtatataaattagtggaagcgggtgggaaggaacaagggatgcagactgtcgtgagtaaaacgcctcgcggcttggtgagaggttgtttcttttttaagccactcatttcagactgaaatatcaagccagttcaggtcatttcctgagtagcactacaagttaaaacaagatccagaaaatctactaatcttcaattgcgctgcctccagactgggagcacagggggatagggtgtagggctgtggggaggtcgaggggagggggatttgtggaaaagcaaacgcccgagaaaccctagctcccgacctcagctgtttcttacctcactcagctcggccgaggagtcgtttccatatttcatggcaactccggaattcatgatgcacttttcagagctgggctctcagtcccccaggtctcggagcttaagagttggacttcacaggctcaatatccactgcttggtcccttctgccacattttagtctagacagccattttcacccaggacagttgcgaagcgcaaacggaggatgcaggcactcttaaaaagagcagccgtggctcgcgtttcacggacgagccattgctgcaggaggctcggtggcgcggcgcgctcgcagctgcggcagcggcggagcccgcgcggggaccctcccgcgcgcacccagcgccccgttccggggcagtgccaccctgggcgccgcctcgccactcctacggtgcctcgccgccccccattaccaggatggagggcacttcccagcacgagccgacaccctagagggcaccggcgagctcccgaaaaaactagggcggtggggcgaggaagatccgcgcctcggattccagagaaggaaagaaagctagagggagccggagcggagctgcacttcacgccgaagtttccccttcgaatcgtctggagttgtaagtggtttctgattgaacacagctgtctagctgctggccacggggtgcgcggaggaggcggggctagagggagaaaagggtgggggcgagtagcctggaggccgagcagaggagaccgtgctgggagagcagagcaggcatccttccagttctctgcaatagtaattaaggaccc

SEQ ID NO: 27067 - DNA, 1370 bp, Homo sapiens
  chr5:113696433-113697803
  hyper
cgaactccaacaaaactccagcactgtccgtgggcagcgactattcagcccaagctatcattcttaatttccctgccaggctgcgactaccggggtgaatcagcccgcgccaggcccctttcccacccgccgctgcagttaggacttggcaaagatgctcgatatttgcgtatttgtgaccggtctttgctttgtgtctgcgctgcaggtgaggaggaggaagagaagcagaagagcagctggaggccggcggtggctgagcagcccccacacctttgagcgagccgcctgcctctccaccggcaaggaagccctgggacctccggattcgggctgccggagggcctgagcgccagagcccaggacccggcggccgggggcgccatcccctcatgttctggagaaggcgcaaatgtgagctggcggtagcggggaaagccctccgcccccgccaggggggacccgggaagcccggccggctctgtcggcagactgcggggatcccctcctccggccccgcccccacccacccccggccggggtgccgaggcggttaaccctacccgcgccgcagcgcacttgggctagagcgccgcgcacccaatccagattccagagcctgccggctgggaaagatccggtctcggggtcggctatgatcccgcagcggccaaggcagggctcaggccccgggattctccccacacgctgctgcactggcgcagccggtcgccaaactttttctccccaaagccagtgcccccgcagttacttggcgggcagccggcagcccactctcggcgggatgatctgggagaagcgggcgtgggacgagggggctgctgttttgcagccctgcgaggcgtgcagtcggagaagtggtcggggttccacaccgtccctgagcctgcccccggccaaggtggcccgacgtgctgcagtggctggcgcaggtgatccgggcagcgcgtccggcactagtcaagggggcagcggcacgggagggaggggcgcctttctcttttctcctccccctgcagcccagctgcactgcgtgggggctctccatctccacgcaatcagcaggcggaatccctgccctggagcgccctggctctggactgcacccccctagggtttgtcctgcagattcccctccccatctttctctgccacacacgcttccctaagccgcgcgcgccgcaaactcagtctcggtccccgcaggtgatgtcatgcccattgttttggtgcgcccaaccaatcggactcgccgcctggattctaccggagccggcatgggcccttcctcgcaccagcagcaggagtccccgctcccgaccataacgcattgcgcagggtgcaccacc

SEQ ID NO: 27068 - DNA, 997 bp, Homo sapiens
  chr5:115151516-115152513
  hyper
cggtctctccgcatctccgcgcccggggttaacgatggcttgggagtgtgggcattgctcccgaggccaggggcaggaggactggtggtttagaagcagaggggtttgcgggagagaagagaacagaaaatctcgcagacgcgcggtggcctcccttcccggcgcctgtccgccgttcccggccggaggtcagcaaggccagtaggatccaccttccgcctgcgctgtggccgcggagccccaagcgagtcgtgccagccccgcggctggccagcgagggggcgagcggcggacgcagcgcggcccgagcttcccgagccagtcactttgggctgcgtcccccacgtccattcctcctcagacggggcgagtgggcgccgcctggcattgaagctgcagcgcgctcacctgtactggtcgaacttggcgtacattgcccactcggtggggtcgctctcgtaggcttccatgatggcctgcacctcctctacattgacctcatcgccggcaaagagctggtgcaggatgcggatcagatcagccagggtccgtggcttcagcacttcggtctgttccatctcgtggggagctggctgcgcgcgcgtctcactgctgggctgcggtggaggagctgagcgagccaaggagctgggggcgagggagcctaacagcccgctagaccgctaagcagacacacacgcacaaacccagcattagagtgccgaaacgtaaggatgtcgtcgcagagacagcaagagacccacccccaggcccctggcagcgcagtggatccgggatcgctggagacgcggtgcacacacaaatcaggttcagatctgtggggttcatcctcccgggccccttttaagcgcttggagtcactaggaatgtaccaacggccctcggagggaggacgaggcggagagccacccaagaaaggtggcggaggcggggagaccctgcgggcacggctcacgcgcacatccccggcttcccc

SEQ ID NO: 27069 - DNA, 303 bp, Homo sapiens; identical to SEQ ID NO: 23287
  chr5:115910923-115911226
  hyper

SEQ ID NO: 27070 - DNA, 1683 bp, Homo sapiens
  chr5:11903295-11904978
  hyper
cggcgctttctggagcctggctgtctattgtcagcacgcagaagcccccgaaacctgtgaagccggctgcaaaggcttgctgggaagccgctaaatatagaccaagggggctcagggtctggcaagccgcgggagcctgaagacacggccatggacgcatatgactaagtctttccattttgttctagccaaacatcgtaatgacattgaacataagggcaaaagactggagggaagtcctccccacccccaccccgtctcctcccgtatattagggacgtcatgaatgcaccgagtatgttctcagggtggcggggagcagcattgtcggtgttgccctaaatacgcttcctcccggggagatgggtggcagggagggggagcacgcagggcagccacttggtaaccgctccaagaaaggcactaaccccggacccccttccaggcacagcggcttccgagggggacctggcgcgatcgcggtcctccccgaggcaggcagaaaccccgcagcagccgccgccgccgcctgccggccgggagcccaggaccacccccaccagcggcaagaggaggaggacggcgccgggaggaggctgcgcccggccccggccgcccagccccgcaactcacccaaaggcgcggcgcccggcggcttcctcgcaaacatgcaccctccgccggcgacagctcctcagtccgggaagaggcgtgcgcggcgccgcccggcttcagggcaaggtcctgaccttgcccaactgcagcatcttccgcttttgttgtctgagcgcggccgcgggacaagggatgctggcgggcggcaggggcgagcgccgcgggcgagaggcggctcccgacgcgagtgcgcagcgcccggcccggcggcccctccgagctcggcgagcgcagcgccccctgcccggctccgcgggctccacgggctcctgcgggctcctcggggctccgggcgccgccgccagccggccgggctgagagagcagccgccgcgcccgcagctccgctcagccggctgtcgccgcgggcgcgagcctggggccgccgcggcgcccggcgccgagcgctcccgagctgcgccccgcgcgcggcccgcgccacctgtgccgccgccgcctcagccgccgagggcgaggctcctcccgcggcgcgcggcagcctcagcctccacctaaacctcggcggccggcccgggcgcccggctagtgagggagcgtccgccccgccgccgaaaccggccccgggtgcggagcatgcccagtgccgccgcgagagcggcgcttcgccgcgcgcgttccacttctcctggttttcgcggcagcagcggcagccgcgggagagaggggaggaggccgcgggttgggagagggccgagcatccttgggaacgcacgccctggacctgagatgggtggatgctccggagctaggcgaaagctggaagggacccgggaagggatggaaccccaggttactccgcttccctaattcacgtgcaaggcgctgacagttgactctggtggggcagatgtcagcctgcaacaaaggaccagggtgcgaggggtcctagagtggccaggtgggttgggggagggaggctggcggaacgtgctggtgagcgcaggtagatgctcttgcagatcctgtgattccagagctaaggaggcac

SEQ ID NO: 27071 - DNA, 1550 bp, Homo sapiens; identical to SEQ ID NO: 23292
  chr5:124082318-124083868
  hyper

SEQ ID NO: 27072 - DNA, 204 bp, Homo sapiens; identical to SEQ ID NO: 22916
  chr5:124084158-124084362
  binary

SEQ ID NO: 27073 - DNA, 381 bp, Homo sapiens; identical to SEQ ID NO: 22917
  chr5:124084660-124085041
  binary

SEQ ID NO: 27074 - DNA, 740 bp, Homo sapiens; identical to SEQ ID NO: 23293
  chr5:125930492-125931232
  hyper

SEQ ID NO: 27075 - DNA, 1446 bp, Homo sapiens
  chr5:127872759-127874205
  binary
cgcagcgcgagctctgcacacgctctgcgatcggcacccctggaccccctaaccacccgccgcccaacccccggagagagggctttccgcccgctgagctgcggggttgggaaggaaaagggggacgcgctcctgggggtctttggatattctggcaaagggggctgcagctctaggctccagctaaagggtctgggacggagtgggccagaaagccgccaaactgaggattcccccctcccccaagccggagccctaggtgcggagccgcttgcccacttaccctcggagcacgtcctgctgtcctcgccggcggacgcggctggccactgcggcaccctcctcgcgatactcgggcgctagaaacccgccttcagagcctgctgtagcggaccgaacctgttgcggcggcggctggggccggggcggcttgggcggaggaggctgaggctggccggccgtgccctgcgcccagagcaccacacagcccagccacaggaagtagagctggagacacagcctccgtcttctccccatcgccggcgccgaaagcgcgcggccgtagacccgcggagagggagtgatcaaagacaaaatctgcgcgcctcagaaaagagtcagggtctaataagcccttcgtcggctccggggactccctcgggctcgggctccctgctctagctggagacctcgacagagcgccggccccctgactgcccgcgaagcgagacgcggggcgccgggtctagcgcagtgagcggcgaggcgcggcggaggtgcagccggcagccccgagcggtacacgttgcataaccggcctaaagccccgagcgactccaggaccgtcagcgggcgggggaggaaattacaaaagccctggcgtaaaatttcaaaaaatgtgaacctcaaaagaaaaaagggcctgcacgcagagctcggcggattcccgtgcgctccgaagacggatattggaaagctgcaaaagtcaccagaaagaaacaggcaagcaaacaaaagtcgcccccagaagaagaggagggttccctccgggctcgctcggagtcccacagggcaacgaagcgcgggtagcggctgcggagccgggcggaggtgcgcggggccggggcgtgcggccagcaagagagagggcgggaggctgggcgctggagaagatgcggcggtggagggcgcggcgcgggggttttagaggcccggcggggcgcggggcgggccggcgggcggcggctgtcagtgggggcgcggccgtccacacgtggggctcaacccggactgagaggccggcgcagagtgggcggggacagagtaagggagagatcgggactgaggaacgaggggaaccagggttgggtgaggggaagaggaaggaagggggggagggcgaagggagggaagaggacggagattggggagaaggggggcgaaccc

SEQ ID NO: 27076 - DNA, 1985 bp, Homo sapiens; identical to SEQ ID NO: 22918
  chr5:128795471-128797456
  binary

SEQ ID NO: 27077 - DNA, 823 bp, Homo sapiens
  chr5:136834322-136835145
  binary
cgccccagcccggaggcggggaccccgcggcgggcacgggcagcgctcgcgcacctggggcgcctgtcgcgcctctagacccagggacccctctcacgaatgggggactcatctacgaacgaggaggctgcgtcacgaatccgaggctgccgtccaactacaggggacccgtctcgtctattctccgagtgccccacagatgccgccctcctatcaggggcttggtacccctccccagaagcggggagcccgggtccgcacgccgcactcccacagacggtgcggtgcacacggctttggggcaggagaggggagaacagggctccagcagcacccgagctccggcaagcggggtgggggctgccagcagctgggggtccccggcgacagctaagggaaaggtctcccttgagcgccctgaggtctcgggggtaagaaaggcgcgcggaggtaaccccaggccctgaccctgccagccccctaggcggccgcggggaggtcccaactactccaagttggggcgcggggttcctctgggcacgtaccttgggggccggcccgggtcccctagtccgagttgctcgagctcccgcggcacggtcgccgggaaggctgatcgccggctcgcgcccctgcgctcctgccacacgccgccgccgagcgtctggccgctttgtgagcccgcagcgatgtgctctgctcgctcgctggctcgggcgcggcgtccgcgggcggaggaggccgagcgcgcgagccaaggctctggcgccccctggtggccgcgcgctgcctgcccgacagcccggccgccccagcccggaac

SEQ ID NO: 27078 - DNA, 121 bp, Homo sapiens; identical to SEQ ID NO: 7417
  chr5:137912553-137912674
  hypo

SEQ ID NO: 27079 - DNA, 39 bp, Homo sapiens
  chr5:138627710-138627749
  hypo
cggcaacctccgcctccggctcaaacgatcctcagcccc

SEQ ID NO: 27080 - DNA, 497 bp, Homo sapiens
  chr5:139637-140134
  hypo
cgctgtgcgcccatgagaaggtggtggtgcagctggcgtccctgcacggagtcaggctccagcccggggacttctacctgcaggtcacgtcggcggggaagcagtcagctagactggtcttgaaatgcctgtcccggctgggaagaggcacagaggaagtcaccgtccctgaggccatgtatggctgtgtcttcacgggggcgttcctggagtgggtgaaccgggagcggcgccatgtccccctgcaaacctgcttgctgacctcaggcttggccgtccaccgagccccgtggagcgacgtcactgaccctgtctttgtccccagccctggagccatcctgcagagctactccagctgcacaggtcctgagcggctgcccagcagcccctcagaggccccagtccccacccaagccacagcaggcccccatttccagggaagcgcctcttgccccgacaccctgacctcaccctgccgccgagggcatacgggcagc

SEQ ID NO: 27081 - DNA, 881 bp, Homo sapiens
  chr5:140855795-140856676
  hyper
cggaggaaagagagaagggtttcgctgtgggcaacgtggtcgcgaaccttggtttggatctcggtagcctctcagcccgcaggttccgggtggtgtctggagctagccgaagattctttgaggtgaaccgggagaccggagagatgtttgtgaacgaccgtctggatcgagaggagctgtgtgggacactgccctcttgcactgtaactctggagttggtagtggagaacccgctggagctgttcagcgtggaagtggtgatccaggacatcaacgacaacaatcctgctttccctacccaggaaatgaaattggagattagcgaggccgtggctccggggacgcgctttccgctcgagagcgcgcacgatcccgatgtgggaagcaactctttacaaacctatgagctgagccgaaatgaatactttgcgcttcgcgtgcagacgcgggaggacagcaccaagtacgcggagctggtgttggagcgcgccctggaccgagaacgggagcctagtctccagttagtgctgacggcgttggacggagggaccccagctctctccgccagcctgcctattcacatcaaggtgctggacgcgaatgacaatgcgcctgtcttcaaccagtccttgtaccgggcgcgcgtcctggaggatgcaccctccggcacgcgcgtggtacaagtccttgcaacggatctggatgaaggccccaacggtgaaattatttactccttcggcagccacaaccgcgccggcgtgcggcaactattcgccttagaccttgtaaccgggatgctgacaatcaagggtcggctggacttcgaggacaccaaactccatgagatttacatccaggccaaagacaagggcgccaatccc

SEQ ID NO: 27082 - DNA, 507 bp, Homo sapiens
  chr5:148033538-148034045
  hyper
cgtcgtgctgccccgcccccgccgcgtccccaccggcacccgtgggctcctggggtcccgacccccggcgcacttgccgcacatacccgctgccagaggcgagggagcgaggtgccctggcagattcgagcggccacccccagccgctgagccgagcttctgctgccgccgctgccgctgcgctcccagccgctgcctgcgccctccctgccgccccctcgggtgcgggctccagcccccgcgctggggagccggcgagcgtgaggcgcgggccaggggctgcgggcgcaggaccccagccccggatcacctgggctcgccgcgcatcgtccttctccccaaccgagccggactccacgggctcaacagcccccagccccggtggtccccgctgccctgcccgctgccgcccccactgggcgccagggacagcgggggtgccgctctgccggcagggcgcacaggggagtgggcacagaggcgggctggagcgatctcacccgttcc

SEQ ID NO: 27083 - DNA, 924 bp, Homo sapiens
  chr5:153859078-153860002
  hyper
cgcttcaagctggggactctcggtcttacctcccgctgtggttcctttcttggccgatgtccacctacctgggtccctcattctctcaacctttctcagctcaacgccccctccctcggtgtggtagagggagtgtgcctctcttcaaagcaaagtcgaggggagggggaaaggagaagttaatgtgagtgctctttttagaaggcaaatcattcacccattcattcaacaattatttattgatgcctactatgtgcctatcatagttactagtccaaagacagagggagaaaggcccattctctccttgaacagatatggaacgtgaagcccagagaagaagagcgattttctcgaggtccggtagggagtggatgagtggaattccactcctggacaagagagtgaatgaagggtggggggttacatacaggagtgacggagacaaaagcctgggcctgctggttccacctgtgggagctcagcagggctgtgggccctggaggtgcatgggggggtggtgcagggaggtcctggtttcctgcccgaggcgggctggaaaccccccgctctccccggcgcctggcgccagcagcgctggggtagggcagagcgcggagccggaggcacgcggggagggagcgctgggggcccgctgctgcggcggctctgcggggtcccaagcctccctggcctggaggcattctagaaagagcgcaggtagagagtaattacgctgtggagagaaggacctcaacacacaatcctcaacacacgcccagtctttgtcctaatccaagtacaatctgcaacagtgcctctcagagcggcacactaggccctcagattatacattcacaggtacatgcacaagggctcacaaaaccttgccgccgtacacaaaagcccgtatcttcataagac

SEQ ID NO: 27084 - DNA, 287 bp, Homo sapiens
  chr5:158526133-158526420
  binary
cgtgggctcctcgcagacagctccaggtcctccggccgcaggcgacgaaggcagagcggctggagagcgcggagccccggcggagagcggagcgcagcggctgcggactcaccccgccgcccggccccgcggcagcagctgccgctgccgctgccgcctccgcctcccggctctcccgctcgcggctcacctcggccgcggtccccgcgcagtacccacctctgcgccgccgtgttggcgtccagcaccccggcgccctgcatccacgtccgcaccgcgttcatgcc

SEQ ID NO: 27085 - DNA, 750 bp, Homo sapiens; identical to SEQ ID NO: 22920
  chr5:158527374-158528124
  binary

SEQ ID NO: 27086 - DNA, 315 bp, Homo sapiens; identical to SEQ ID NO: 9795
  chr5:1645162-1645477
  hyper

SEQ ID NO: 27087 - DNA, 73 bp, Homo sapiens
  chr5:1654309-1654382
  hyper
cgatcaacagctggacgcgtagcagggggtatccgggtggcctaaaagaattcagcaaggccgactgcaggcc

SEQ ID NO: 27088 - DNA, 569 bp, Homo sapiens
  chr5:1667511-1668080
  hyper
cgccgttgccctgggaaccggggactgcagccgcggacttcggggtctcggctccggcccctgcaggaccgcgggcgccgccggggaagcgaggcctttgggtctgagggtccgagcggctcccggaggtgcgggcggagataggagaccccccccgagcctggggggggcgcaggaagggggcgcgcggggcgggggcgcgcaggaagggggcgcgcggggcgggggcgcgcgttctccctccgggcagcctcgtgggcggtagatgcagccaacgcgtccgtcaaagcggttcaggggcgctgggaagaggcggcggtgaccccgggacggcagtgggcccgaccgagcctcagtgggggtcccgcgtgtacgctggcctcgccctcccgcctcgcttctgggcttttgctccaactctcagccgccgtggagatcgcagggggcgtagggccaagccagggattccgctgtgccccgggctcgggagaggtgtcccgggagtctatggcagaatttccccctcatcctgcgctgggagaggggtctcgccccggatggaactccgc

SEQ ID NO: 27089 - DNA, 795 bp, Homo sapiens; identical to SEQ ID NO: 22921
  chr5:169063996-169064791
  binary

SEQ ID NO: 27090 - DNA, 454 bp, Homo sapiens
  chr5:170107974-170108428
  hyper
cgtgcactttagaacagcaggaagggaggcttggaagcctggttttctggctttgaatgaccgcctagcgcttgccggtgcgccagggtgctgtgaggatgtgggcagagggcgagtccgaagggctccagacactgggaatagtggtggtcgtgtgctcctccctgaaacttttgcactacctcggactgattgacttgtcagacggtaagcgaaccctggagcttccccgttttctgtgaatgtgtttttgtggcttcggttgctgtgacagtcgtttcgaaaatgcacggaaatgagggcggagacccgagagatttgaaaaagccgggctgaaacagcgtggtattggtccccgcctccccagtcgcgccccagtgctgcgctgtccgtcgtgctgaaatgtggtgcgcctggggagtgcgggagccaggaagttagggtctcctgctcc

SEQ ID NO: 27091 - DNA, 687 bp, Homo sapiens
  chr5:170171114-170171801
  binary
cgggggaaacgcgggcaggagaagggaagtctcgctcaggggagtggtgtgcatggggcagaggctgccagggacgctgaaggctgatagccgggttggcgcggaaatgggacgccgcagggtgggacaggcgggagggatgggatgggcagggtgtgatgccggacgaaggaaacgggcctgcccggcaggtggcagagagccacagaagagctccgagggggtggtgcgtgagatggcgctgcaggctggaaaggggctgcaggcagggtgcctccagagaccgcaagagaacagcttgcgagggaccgtgggaacttcaaggaaccgcaccgccctcctggaccacccgagaaaacaggggaagtgggcgaatgagtagaccaaagtactcatgacagggcaggagcaagtgagagaccctggaggaccatggagagaacgtggtaaccgatggagagggatgaaaaccgagccgcgggtgtgagtctgaggcgcccccaggcccaccagcgtgtgagcggcaggtgctgttcgccatcagccgctagatggagccggcgcctcgccgaatgcgccgggatccgtcgcgtggatgtcaggtccgggccagggagccaaagcggcggctccgcggggaccctccacagttccggactccagcccagcgccggcttcagggcgtgc

SEQ ID NO: 27092 - DNA, 892 bp, Homo sapiens
  chr5:176056921-176057813
  binary
cgtcgaaccggagtgctgggttcggcgcgaatatccaggacccgcctgtacacgcacggcacagtcacacggtcatgcacacaaacatacaccacggacaagctcacgtgcacacacaggacacgcagacgctccaacgcgcacgaataccccgacccacatgggcgcggacacacgtccccacagccgcccgggcagctgcaaacaccggagcatactcacatactccggggtgcacactgacgcgcatcccccgggtctccctccattttccatccccttccccagctccctcctgtcgccccagtcccctctccatcctcatcccgttccccatccccggcgcgcggccgcctcacctggatgcggggccggggctggggatggagcggcggctgcggcgggcggacgcgggggctccgctaggccaggccggggtggaccaggggccggaggggggatagggccgggatcaggcgctcgggtcgcgggtcctgagcaggagcgcagcagtgcccgggtctcgggtgcgtagccagccaccgctcgttcctcgcgccctgcgagctcgcgcgctccggctccggctccggctccggcgctgcggcagctctgagctcagcgcccccgctggcggccgcgccgccccttcggcctgactgacagggggcggggagggtgacagcgcgtagccgatgagcctcccggggcgggcccgggacgcgcccctgggggccccggccgtaagactcgcgtagtctgttgggagttgagggagggggacaacgcggcgtgtgaagagtggggaagaaatcacgcgactggatttggagttctgctgggctcgaatctcagctgtgctttttattaaccgtgggaccttgagctactc

SEQ ID NO: 27093 - DNA, 395 bp, Homo sapiens; identical to SEQ ID NO: 23622
  chr5:176558657-176559052
  hypo

SEQ ID NO: 27094 - DNA, 719 bp, Homo sapiens; identical to SEQ ID NO: 23623
  chr5:176794807-176795526
  hypo

SEQ ID NO: 27095 - DNA, 572 bp, Homo sapiens
  chr5:178594083-178594655
  binary
cgtccgcaaggagcgccccgctaggctcaggcttggcacacgacacctcgcttccacttcattttcctaccttccggatgacgaactgcgtctcagacaactgaaaggactcgcctgagtcccacagccggaaagaggtcggggtgctgccccccgcgcggggcgggcagaggaagggccgggcccgagcggccaccaggtggcgctgctgccgcgagaacagcggcccgggccggggacgcacccggcgcccagactccgcggccgcacccgggctcccggggccccagcggccccaagacagcctctgggcctcaccctaaatacatcaattatgacctgagcaaaaagttctgttccaatcgttgctctccgacatttccattgtttgctctggaaggagctgaattatctatgctcttccctccttcagtcaaggagacgtgggaggaaaccgggatggggatcagcagcctggaggccgcctccgctggaaccgcgcccgccccgccaggaggctctgcctgctgggcaaggcgcactcagccagccccgcaggccgccacgcgacc

SEQ ID NO: 27096 - DNA, 681 bp, Homo sapiens
  chr5:180644001-180644682
  hyper
cgacctagggtagtaactggaactgcaggtatgcaccaccacgctcggctaattaaaaaaatatatatattttttcctagagatggggcggggggcgggggcgggggcggaggggacagtctcactatgttgcctaggctggtctcgaactcttaagcccggtttccgagtcgctggggctacagtagcgcgctgacacgcccgacccttgctttgccacttagatgttgcatttattcgactttcacgtcgggcagaggtgctgggaaagaggcggctggcccctgcgtaagtgtgcgggtgcggtgtgagaaagctggaagcctgttttctaggcggggaagcagcctgcgctgccggggccgcatcatggcacgtgggtttccccgggcttactctcctgccagtagcgctgtcctagggatcccgcccacccctccggcttcttctctgaagcctttgcagcattttccctgagattgctgaagaggcccctggggatcgggctcccaactcacccgccgcgtcccacggcccgaagccgacgagctgcaagtgaggatgggtgcagagggaggccgacggtcacgccttggagaggctgatggtcctcttgaccgccctccaccgccactgcgaacccaaaagccgtgtcagtgctgcaggcccgcccgaagtggc

SEQ ID NO: 27097 - DNA, 966 bp, Homo sapiens
  chr5:1875992-1876958
  binary
cgtctgggcagccaccctcggccacattaaaattcctggcgccccagcctcgggcctcaacgctgtcccccgagacgccactttcgctattactgtcaagtacccttgactctttatttttgcccttttatctattacaactaattcgagttcttttgcccttttcagtctaagacgtgggctttctgcaaagcctccccctgccagcgagctctcggagcgcggagcctttagaaattgaggggtttactgtcaaaatgaaaatttcacttcaaattaccttggctgatgctcgctcgccaggccgggggctcccgccgcagccttttgacaggcacatgagccgcgagcttccgaacctcgataatatcatctcgagcgcgaaagtcaatacggtgacagcgcgcggccggatacaatccaattacgctcggctgcccgggcgctcctggggctcggggtccggcggccgagggtccccctcagggcccggtccaggccctgtcgccagggttcagggcaggccccaccacgcgggggactttggtggcccaggggtccccacgaggccgcagtccgggtccgcccagccccaggctcctagaggaaagccgagcctagtgagtccctccaaggccgcccgcccgcaagacagtcctgcgtctccggctatcctgtcccaggcaagggcctgtggtcgcctcctcgccgcccccgggccgctcccgtagtccttgggacacctgggcctttgatgagcccagcagggcttcgggcggagggctcggggtggggggtggggggcgagaggagaggcctcaagtccgccaggcgcctgcgggggatgcggaaccgcctccgccgcggggatggggaggggagcccggatttctgagcgtagccacggcttggccgggccccccgagccccggatcgctccgcgggttccttccacacgcccttccc

SEQ ID NO: 27098 - DNA, 841 bp, Homo sapiens
  chr5:1931173-1932014
  binary
cggcggtgcctggaggcgggctcgccccggctgctccacgcccaggccggtccctggcatttcagccagtgggagggcgtccccgccgcccccgtgcctctccgcaggggctgcgccgcgtccccgggcctctccctccgccgtggcctggtctgcctgctccagggcgcagctgcgcccgcttcagcgcctcccgggtctgcgtggcctgctcggctcagaggcctccaccacggtccgctccctgccggacgccgcgctgctgtggccgcggtggttctgtggctgtgagggccgtttctgtccgtccacaccgccttccctctgcaggtgaggaatggggtctgcttcgtttggaatgtgcctttgccgggtcctgcctgacctccaccttccagccgggacgcgcgagcttttccgtttggctgagtcaaaaagggatcgcgcgcatcccgccgcccctcaccacgaagcgcagacacaggaggttgcagggtcagtgctgcggagaatcccagacggccccacagccgccgccacccgcggggcactcgcccgggctctgccgaggatgtgggggctttggtctccgcagagctgggactcccgaaggccttaccagaaactcaggagcagccccagccctgcagagcccgcgagggtggagacgggagacccgctgtggggcctgaggctgagatgccggcctgcggtgaagccggcgggacgttccaacccgctcagacccgcccactccgcagggcccgggcccaccccccggcctgtggcctgtgctgggctgcgcagccggcggtggagggacctgggaaaccaggtgctc

SEQ ID NO: 27099 - DNA, 686 bp, Homo sapiens; identical to SEQ ID NO: 23298
  chr5:22852983-22853669
  hyper

SEQ ID NO: 27100 - DNA, 1687 bp, Homo sapiens; identical to SEQ ID NO: 23300
  chr5:42950747-42952434
  hyper

SEQ ID NO: 27101 - DNA, 1290 bp, Homo sapiens; identical to SEQ ID NO: 24515
  chr5:42994313-42995603
  hyper

SEQ ID NO: 27102 - DNA, 331 bp, Homo sapiens; identical to SEQ ID NO: 6604
  chr5:453948-454279
  hypo

SEQ ID NO: 27103 - DNA, 750 bp, Homo sapiens
  chr5:465360-466110
  hypo
cgcttcctgttccggaagctggcgtccgtgagtgtcgcgcaggtccgggctggagaaggcctgtcgctccgcggccctgttcagcctccaccccgggactcgggccagtagatgggagtgtgtcgtgtgtttgtcaggcggggggagcctgggtccaggtcctgcctgaccttgtggttggacacgaatgtccacagaggtagacgcgccggccccgccggcttcccgaggccgcccacagctccctgacggacgcttcccagtctgtcctgcgctgcgaggtgctggctgcctcccacggtctcgccctcaccccagacccctggccctgtcactgagctttcagagtagatcctgaggagtcaggtgaagagggaggttcccagtcaggaaggggctcagccagaatccagctgctcccagcgccgcgggacagccgagggcggctcctcacattgctgctgccttccagggtttcggggaagacgtggacggatactgcgacaccatcgtggctgtggccgaagtgatcaagctgacagacccttctctgctctacctggaggtctccactctggtcagcaagtatccagacatcaggtaagggatgcacgtcttagaatcctgccttagaatcctggagtggagcggcaggtccctccttctgtctggggcgggtggggctcctggttcgcaagttcagccctgcagcacggcaagggttcaggtgcggcacagcggggcccaggc

SEQ ID NO: 27104 - DNA, 368 bp, Homo sapiens; identical to SEQ ID NO: 9813
  chr5:476496-476864
  hypo

SEQ ID NO: 27105 - DNA, 742 bp, Homo sapiens
  chr5:49736607-49737349
  binary
cgcgcccgactcgcggggcgctgttcgttcaagactcgccccaaagagcgcaggaacgcgagccgcagcagtttcagggttcagcttaggtgacacaaacgtagctaatgggaggccgccgccgactctcccacccgcccttaccagcatccccgcgcctctccccgccacccttgcccggcgcgccggcgatgccctctgcccgcggggacccgagcctcgcgcgccctccgccctccctaccctggaccctgtacccatcacacctggggcactgccgtccgccgagcttgggcgcgcggcagcgagaaggcactggaggaggagcagccggggcgtacgcgccctggcctccagcaggccggggagggcgcgcatggcgccagagggtccgcctgggtcctcgtggagactgctccctcagctcgccgccgcgggtgtccagagtccctgcgcacactcgcaggtggcccggcgctcgcagccagtgccgcgggtaggacgctgaagaaaaggcggaatgggaggggcccggccgccttgccccactcccccgagacgctcttaccgcgcccggccctccatcagttatgcagccctcagccggctgctggcgttcccggatgtgcggtggcggtgctacttcccggctgcagcctctccggcctccgccctctcggctctagcaggtcgggagagagcttgggcaggtgatgtctagccaatctcgtggggagaggtc

SEQ ID NO: 27106 - DNA, 811 bp, Homo sapiens; identical to SEQ ID NO: 24516
  chr5:54516349-54517160
  hyper

SEQ ID NO: 27107 - DNA, 1069 bp, Homo sapiens; identical to SEQ ID NO: 24517
  chr5:54518558-54519627
  hyper

SEQ ID NO: 27108 - DNA, 1621 bp, Homo sapiens; identical to SEQ ID NO: 23303
  chr5:57877796-57879417
  hyper

SEQ ID NO: 27109 - DNA, 62 bp, Homo sapiens; identical to SEQ ID NO: 7438
  chr5:74753672-74753734
  hypo

SEQ ID NO: 27110 - DNA, 1026 bp, Homo sapiens; identical to SEQ ID NO: 23306
  chr5:76940861-76941887
  hyper

SEQ ID NO: 27111 - DNA, 1172 bp, Homo sapiens
  chr5:77147514-77148686
  hyper
cgcggcgtgcatgtgtgcgtgtgtgcacgcgcgagaagtgcgtgtgtaggcgcgtgtgcaagtgcgcgcgcgtgtgtttacacttccagaagtcaaatcctttctaggactcccccttgcttcacccggaagtgttcggtgacccctccacccaattaatgaaaacaaagcaaagggcccgagcgggcctccgacagcccggggcttgcggagctggacgccgacagggcgtcagcccggtcgctcgcggcgcggaggctgctgcggttcggagctggggttctgcactctcgctcccggctcccggctcccggctccccgccacccgcagcctcctcgcgccgccgccgcgggcaccgccggggcttcagtgacaccaggcacccgccccgggccgcgggaggaggaaattccctgcaaaatagcaatggttccgagaaaaggatcacaacaaaatattgaataaattcccttttaatttatttgatcattccacattacggggctatgaattgctcaaatttgataacaagtactcaattcaactcattatgtaagttaaattagacttcgataaaatttcagtggcgcgcagtggttcctcgaatgaaatgtaatttgtgcaagaatttgttgtatctgtcacaaatatttccaattagcgaccgtaattatttgatagtttctgcaattatggcttaaacgggtgaatttgggactgtggaggaccctaattggcctaaatttgatattttgcatatttgcataatgaggaaattggtagaaaattgtgttcattcatttgtgaaaaatcctatgaattttatgaatttgaaagctctgtttgtgcagactgtgactttgcctgctgatccctgaggagctgacgctgaacgcctgaatgggcagcgcgccaacttcgctgctccaggaggggggtggggagggagaggaggaggaggaggatgaggagagaggggaggtggaaggctgtggtaacggtgggcggaggcgggaccatggcgcatgctccgcgacgtcccgggccgcgggcggaatcccccggctaacctccttgggggtgagactgggtgggatgggggtcggtgggggaagttgcatggggtgttatacccgcccggttacaggccgctgccctgtagcataactgc

SEQ ID NO: 27112 - DNA, 927 bp, Homo sapiens
  chr5:82767041-82767968
  hyper
cgcgtaaacacgctgtaaccaagttctttgctgattttacagttttgtgtgctcccgagaagaagtgatcgtactcaattgtctattgctggcctgccccctaagagcctgggggctcctttcccctaacccagaactagctgcacggggggcggggaaatgggggtggggaaggagtgggagggcagtggtttccgcgagcagagcgatgttactgagtgagtccctgaatggggagcgctgctgtccccaagccgattggtacttcttgtcaggaagaaacgccaagaggtgggagtgcctggggagggaggcaggcggtccctaccgcaggcgcggggagctgcctttccgcccctccgcctgctttccaagcctggactcttaggagtggctgaagctgcggagcgcttttggagcctgtgaatgaaccctcctcctctccctcctccttcttctcgctgagtctcctcctcggctctgacggtacagtgatataatgatgatgggtgtcacaacccgcatttgaacttgcaggcgagctgccccgagcctttctggggaagaactccaggcgtgcggacgcaacagccgagaacattaggtgttgtggacaggagctgggaccaagatcttcggccagccccgcatcctcccgcatcttccagcaccgtcccgcaccctccgcatccttccccgggccaccacgcttcctatgtgacccgcctgggcaacgccgaacccagtcgcgcagcgctgcagtgaattttccccccaaactgcaataagccgccttccaaggtaatcacgtttcttttgttccccccttaaaaaacaaaaacaaaaaacttatagaaaaaaacccgcgagcttagaaaaaagaagcaattggtagaaggctttaattaaggcaaagagctgtaaggc

SEQ ID NO: 27113 - DNA, 2405 bp, Homo sapiens
  chr5:82768232-82770637
  hyper
cgctcgaggcaaaagtttgaatggggactaccaagacttgccacagacaagtccccgaagccgccttggtgcaggccacctggtttcccagcccctggtgtgtggtcagtgcctggtgttcctggaaagccactcccgggcagctcctgacagtgcgacccggcgcccaagcagcctgggaccttgcgcggacctgaccccttcagaccgcaggcagtctgggaggaggtccggccgggggaggtgcaggatccccgccgtgtctctttgacgacttggggactgtcacggttctctcccggcgcccctgggttcttttgtcctgcacgcggtgcgaaggggccagcagggaaggagcagaggatggggggtggggttgttggagccccgcggaggtctgggaggcccctgggcgggaaaagcctgttctgaatcggcagggatgtgcaacaatttttctcaccctgaagagtgaaatagggtctgtcgctcccatctcaacaagcaaaccggcacccagagcgcactgcagacaaaggtggctcggggacccgaatcaggggcctctgggtcagtcctctcgcccagactacaggagtcctccgtttccttacatattccccaccctctcctagttctccgctctagttgagcaactttactggcaggtctagcggcagcggcgcgcgcgtgtgccgggagccccgggggacgtcctcggctggagcgccccaccgtcctgcagaggcgtgggcgctgtagggcgacatccctggtgcgtgcagacctagggcatccgggttgttctggcccgcggtctgtgtcactgggcgtggagcggtctgggtgttaggcagaggagagcggggtagaaaaatagtgtcatagcctaaactatttgctctccaatccaactgcgtctcggcaagtcctgcatgtccctgggagatgctgcgggaagggggagaaatctacacggcgcctggagagttgtcctgccgcgcgcacacccgcggcagagtctctctgggtcgcgttcctcatctttgtgtctccctctgtctccatcttctctgcctcccttcccctctcccagcctctgttctctctctctagcttctgcgtcccctcccccacagctgacaaatgaatggctagtgtgaaatccctgcctttcccgtgctccaaggcagcagggagggaggagcgagggaggcggtgcgctccttcggatctgcccccagttcagctcacaagacttgcagaacctagatgtctaggaattgggagttttgcggcgggtgtgggcgccccctgatggagaagtcccgcacaggcggagaaaaacaagccccccagaccaagcgagcatctttcacaaccttgtgttcaaggatggaaggccctagttttcccttaagtcattcattttgcactccacaatctgcggcgtacatctaggagtttggaggaccctgaaaaaaggtcttggtctgtgcaaagtgcagagatgccttctcgcgagtcggctggaacgcacgcggcgccctgggtccagttcgccgcttagtggacgaacgcacatggccagggtggagccaggtttcggaggtctagacgcgccaccctgggcgtctttaagaaagataatacacataccgtgctctcaaaacccatgaccacttgaacccaacgctagggccccgccccaggatattgcaaaagaagggctcctaatccaaaacttaaacttcctcaacttcagggcgggcgtcggacgggaaagtggagagaaggcgggcagtgggaggaaaaaagaaagggaaggaagggaagtggaaggaaagaggaccgtggaggggaggaaaaggagaaaggaacggagatggggcagatggcattcaaacagccaggaacggaccggaagggttcgtttcggggtttgggtctgaatttcgagactcgttttaggatactcttttccctttcccagcggcaacaaatgtgactgcagaggcgtgccgggatggaagggtgggaaagaactagacaagcggaggtggtccagccccgcccaaaggggctgggtctggggcccgcccccactcgctcacctcgcgccaagggaggacccgcaacgggcgctccccgcagcggctgggttagccagccgccacgtgggttggcgcttcggctcccagccgagacgggtgtgacttcctgggctcagagactgcagtacagccgcacaggcggccggcgcagccgaggcccccacccaccgaggccaatgggggcggggcggggaaggcagggcccagcttaaccgagagagccgagtggcctcgcccccaggattcggggccggctgcttctggagctgacccgagttccatccagacagc

SEQ ID NO: 27114 - DNA, 955 bp, Homo sapiens; identical to SEQ ID NO: 22926
  chr5:87436549-87437504
  binary

SEQ ID NO: 27115 - DNA, 1107 bp, Homo sapiens; identical to SEQ ID NO: 23309
  chr5:87956173-87957280
  hyper

SEQ ID NO: 27116 - DNA, 2242 bp, Homo sapiens; identical to SEQ ID NO: 23310
  chr5:87969885-87972127
  hyper

SEQ ID NO: 27117 - DNA, 915 bp, Homo sapiens; identical to SEQ ID NO: 23311
  chr5:87975991-87976906
  hyper

SEQ ID NO: 27118 - DNA, 138 bp, Homo sapiens; identical to SEQ ID NO: 9831
  chr5:87982673-87982811
  hyper

SEQ ID NO: 27119 - DNA, 716 bp, Homo sapiens
  chr5:88178399-88179115
  binary
cgtctacttcaaggtcacagaacatgctgtgaaatattaaaatccaccaggctccacacgctccaccatatcaaacatgctaatgacgtgaactaacttcatgaaactttaaatacactggtgtgacaggaacgagtcaggagtgatttcaatagctgatggcaaacggatacgactatctaaaaagttacttttagcaacaaacaaggaaatcatggaatctaacgaaaaagaatgcacaacgagcctcaacttcagccttcaaaaaaggcacagggatagatagacacagtgccgtggaatatattgatgcagattttagagacaatacccgggttttctatttcctcgagaaatatcaggggtacttacatgaaggaagacccgatcagattagtccttgggatattttcctttcttaagagagagagagagagaaaaaaaaaataacaacaataatctttacttcgtccagcgttgaagtgcttctccacctgattcaaacatgcagccacggcgacccacacagaaccttcaaagtcaatccaatagcagcccgaagatgtctgggtgtacgcgtgtgctcaagtgtctgtgactgcgagcagagcgagcagagagctggagacgatgtgtgcgtgtgtgcgcgcgcgcgaggggagcgcgcgcgagggggggggcgcggggccgcgcattcgcgcgcgccgaggccgctc

SEQ ID NO: 27120 - DNA, 1197 bp, Homo sapiens; identical to SEQ ID NO: 22927
  chr5:88179191-88180388
  binary

SEQ ID NO: 27121 - DNA, 1125 bp, Homo sapiens
  chr5:88184868-88185993
  hyper
cggggttgtggtggaagtggggattaaaaatctcgtcctgcgttttggtgcccacttctttgtttggaaagcagagcgctgggactcaatccggacggccctcaaagacccagacgagggacgcctctagtttgagcaactcactccgctgagttattgattgcaggcagcaacaatccctccggttgatttgtgtgaaaagtgaatccgctctggctgggcgttcagcagaggcgcaacagctgcaacgccatccaattattgccgatcctcccctccaacactgctctcatcacctatatactcttctctctgcccgtctctgcttccccccccttccccccccccttttctcccggccgacggagctgaaggggcgggggttccttccttggagtgtttctagagctcggaggctgctggtagggggtgagtgcgccacgtgcgtgcgccacgggcgagcaggaggcaggctctgggccctcctggggacctgctggacctgctggacctgggtgcgacgagtgggcggccacgctggtttggcgcggggaaggaagggggtgtgccgacttgtatttagttgggggttgtggaagtcacggctgggggaaaagcgtccggtggtttgttggtaaagagggtgcgtgatgggctctggggaatggaggagggcgcaacggctgtgggtggactgtggaaacgggcggtggcagtgccggggtagttgtcctgctggtctggttttgggatcctgggctggagaaatgcgatccaaaagagctcgggatgggctcagagcgacccacgaaaataccaggggccaagtaaaatgaacccaccctttaacagtgcacaaagcgctggcacacggtccacgtctggtgacgcaggctgcccgaagcgctccaaccattttgcaaacctgggagagcaagaggggctctgcaggtctagccgccgcccctgtcccactctggccagccggagtttttcacctgacagaccaataggaaagaacacgggccccaaactggattttatagtctgagctctcagcatctaaggaattatatttcaaaaaacaaaagccaactcatagctctattaagctaacgcgtgtgc

SEQ ID NO: 27122 - DNA, 742 bp, Homo sapiens; identical to SEQ ID NO: 23314
  chr5:89854237-89854979
  hyper

SEQ ID NO: 27123 - DNA, 916 bp, Homo sapiens
  chr6:100038655-100039571
  hyper
cgtcgccttcctcccactgtgcgagcttcggaaccctaaggccggttcactgcgcattgtccccgacaagttagcagcgctccccgaggggtgtgaggcaccaggtagggtgcagggcgcgagcgcggggcggtggtgcccggcgggggtggggtgcccacggacgcagccgcctagctctgccggccgtcctgaggcagctgctggcgcccgccgggaggcgcgtggccacttgcacttcagcgcgcggttctctctccgcaggctgctttctaggatttgaaagggccatagcgacagaagtcgatctctaagaaggcataaactcggcctgagacgtgggggggagacactgcagagaagaggccaagttccagcgcagaaggggggttccgcggggccctgggattgaggagacaggagcgagccttccctttccgtcctctcaggaaaacagcctgacctgctggcacgtccacccccaacagaagagggaccccggcgcggcgtccttaccatccccatcccccgacccctgaggaagccagggctctcttctttccctgggcgcctgtcacaggggcagaggctgggcctcgagcttttctgcacgtgagctcggtggtccagcagagtcttctggctcccgggaaagcagcgtggcgccgccccagcccccagtccccagactagggattgggacgtcagtcattggctgcaggttactggtctgggctgggcccgcagagatcccaagcgctcctctgtcggtgcttcctcagcgtctgcgtttccgcagatgcccgaggtcagacagtttcgcaagggggctgaagagccaaatggggaaactgatggagcctcacaagtttattcctttcccacgtctgtgtttgtctaagggtgctttctgtgc

SEQ ID NO: 27124 - DNA, 1368 bp, Homo sapiens
  chr6:100050769-100052137
  hyper
cgaattgagtgcgggctcattcggcagcggccggcagagaagcgctgaatgtggaggtgccccgagacattgcaattcagcaacacgctcgctgacttttctttgcaccatgtcaaccgaaagaaccaagaaataagttggagaactccggttaaaaggcaacttgagagggattctgaatacttttattgagccgtttccaacggaggacttaaaaaacaacaaaaaaggcaccacaaaacccaccagcggcgtccgggctgcgtcctggctgccactttggagcctcccggccgccgcgcatccaccggccatgcaattaaggggaaaatggcctcatcgccggcgtgtcatctggtggcgttcccagagcccatcgccgccgccctattcagacccggccttaatgtcccacccgcgcctcgggggccgcgcagctggtccaagctgacccgcccgcccggccagcgcggacaccctcggggggtgcagcccaggccacctcaggccaaaattcggctactgaaagcggggcttgcaggactctctctgctttccctaacctccttcgcctcgggtctctgaccccgcgcggctctctgcatccccgggttcaggactcctccggccccagttttgggattccgcgttgacctaggagggaggggtgtttggtgagtcaccagcaccagggtctccaaggctgagcccgcctccccaacccccgggacaactccctcggtccccgtggggacctgaaactcaaggcctttgagcgacggtgacgagcagccccggagaagtgtggtctgaaagaagccgctcatctcagcctcaaagtcttaaggggctcctttcctctaggcggagccgagtcaggtcacacgtgctcggcgccggccgcattcccagctcttcgctcattcgcgactatgcgccaggcggggccgccccctaacgctgccgggttcgaaagccgcccgcgggtgggacttagctctccgtagcctgcctctcggagggccggcggctgctggtgagcattccagcctcgttagggcaacctgttaccggagagggagccttgcccgaacggttctactgtgggcagggagcaggaccgcccctaaaccgcctttccccgcacctcggtgtaggagagatttcgctttaacggagactctggacgcccatttcaagtcgataaaaaaaaaaaaaaagccgagtggaatgttttgattgagtctcaacattgtctttgaataaggctgagaccatgtaattaatgtgtctttttaataagggacaatacggccgttcaagctatttaatttcatttaattttccatcccatttgctgcacagccc

SEQ ID NO: 27125 - DNA, 1319 bp, Homo sapiens
  chr6:108439841-108441160
  hyper
cgcatccacaccccgcccccacccctctctccagggattttttttttttttttttttgtatccaggcacagctgggggctccctcaccacccacccctggcctccccatacagaataaagtcagtctgtatttaatggttatggcggatgtgagggggatttggcagaggcagaagagaggcctttcgctctcaaatatcgtcccttacgtcgtgtgagtctaccaacccaccacgacctcatattcttgtgcgggtgtctgactcgaatgacaagcgagctgattttttcagtacatagctgggaaatgtagtgagtgataatagagatttctctttcattttttacgcttgacttggttattgttgcttttcttttcccgtgattccttctgaggattagctctgacttccccactattggcggtcaaagtggccccgactcgggatgacaattgacggggatcaagggattgcccattctgtgcctgtaagaaccgattcgtgccagagaaactcatcaagtggaggcggagaataaagaccgttcgggggtaaatgtattcattgagaagggttctcccaaattgcttctaagtttttttaatgaaaagtaacgattgcggcaatcagcggctttttggcggattacaaatctggagggagctgcggcgctgcattgaaaagtgcccccgccttcgcaccgggcagccggttcacaggagcagcgcgaggggcgggggtccgatagcgggacaaaggcggggagggggcgagcggaggagggcggctcggggcgcccgggcgcgcatcgggcaggagacgcggaggtgcccaccccagcgcaggcgtggcagggcgccccccaccgaggaaggcgtggggcagggtgcaggaaggggaccgagggaggtctaccgcagcaccaccagcactggggagattccgggcatctggagcgaggaaggtgtgctataggggttgagtccatcaccgtggaagtccggggaatgggaggtgcgactcggtcccccacctctaccccgggcacggtggtgtcttcttttaaagacgtctcacttcgcaattggaatcgaagcgtgggccggtgtcgggtcttcctggtgttacaggcaggaggagggaaaactgagtccttcctgggatggggcaggaccctcacacgcaagaccccactgagctggactggcgcgggggcggatcccttctcccaaatgcttctgaatggcgcgcgacctggtcccctctgccacacggaccctgcgcgcacgccctggccctggcggcctctggggacac

SEQ ID NO: 27126 - DNA, 945 bp, Homo sapiens; identical to SEQ ID NO: 9837
  chr6:112193858-112194803
  hyper

SEQ ID NO: 27127 - DNA, 964 bp, Homo sapiens
  chr6:117586022-117586986
  hyper
cgaactttagaggggcagaagggcacggcccaagagagcagaattggggtgtgggacaggcggcgggaggaccaggttagagggagcgaaaggaagtggattagaggacagcggttacaggtttcagccactgccatttccccgcagaggtagctcttctgcgccctggaggggtacccggactcccacatcctgtctgccacgacccggactccctaggggattccaagggacagcaccgtcctccccatacatcatcaggaaccgaaagcagagaatttgccccacctcggcacttctggaagcacccactcaactacagtatgagacaagggctttcctaagagacctttctccaactttctttctctgcgtgtatgagcccggatcccttcgtccccgcctccttctctctctctctttctctctctctcctattttgtcctgggagattcctactcgcggtgcgaagcctcggatccgctgggaaccgcatagtctccggcacccttggccgcatgcttgtcagaggtgggccccgggaaacacactcgctgcccctccaacaagcgtccctcgctccccattggccccccggtccccgccccccaccgccccctcccgctccgcagcccccgagtggcgtcagcacgcccgccgggcatgggctttaaatgcccactagcgggagctcaggcgcttctgccctggagcgcggtcgggagtaaaatcgcaggagtgggagggtagcgagccagctggattccgagccgcggagcgcgctggctttgctccgcctgatgactccagagcgcgggtccaagcgccgcccatgcagcacccctgagctccggggaaggagagttaatgaaaaaacacttaaccgtctccgctgcggagagtcatgagctgtctggatgttatgtaccaagtctatggtcctccgcagccctacttcgcagcc

SEQ ID NO: 27128 - DNA, 639 bp, Homo sapiens
  chr6:118241020-118241659
  hyper
cgcggtacctgtggttcctgaaagagagtttgacaggcttcaggaaagggttagtgcctcttgaactggggagattacaaaacgagcgtgggcctaaaaggctccacagaggcaggcagcgggatggatagagcggctcagagggaagggacagagccgctttaatgtgctaatgaggggaagcccagatgccagcgggctcagtggagctctttgtgacgccgggttcccggggctggctggagtctctgtacctatctggatcctgctgcaggccggggaaacactgcgctcttagagaggggccctgtcctccacagatagccccgcagaccctcggaacgcgggtggacggggagggcgtgcgcgagcctcggggcttgggtggtggctggaaaagggagaaccaggaggcgggggaggggcgctcggactacagaggaccggacgggggcgagtgttccgcggggtgtgtggagtaagagctgggacggacctttgtagctttgcgaaattaaccgtttttcctccacaactgccagctcggcgaatggccttcaagcccatccaacaggagataatctgtccttggaactagtgcaagtcagtttttaactacttgcggagaaagtctgaaac

SEQ ID NO: 27129 - DNA, 138 bp, Homo sapiens; identical to SEQ ID NO: 25760
  chr6:12287989-12288127
  hypo

SEQ ID NO: 27130 - DNA, 600 bp, Homo sapiens
  chr6:122931153-122931753
  hyper
cgcgtacaaccggagggacagaaaacacgatgcgacgtcggaaagcaggaagggaattgaaattcccgcagtcacgtcacagaaatcttagcagaacctcatcatcgcccaagggaactgggagtggcgggcggggaggacgcgggttgtgtgacgatcaccgataattagttggtggttaacgcacaagtaggataaaagagctcgccccaggctgccagcagaaaaaagctaccgtggcacgtgccccggggagtgatgcggtggcccggtttgcacggagagcgggacaccgcctggggagccgcgctcgtagcctgggggcgggacgcggcggccgctccctccgcccccgagtagctgccaccgcctggctgcgccccagcccagtagctcagacgcggccgcatcccggtggactgtagaggcggcagcgagctagagcccgagtcgcagctccgggccgcagagcgctgggcgagcgcgagcgccagggcaccggcagggcaggcagctgcgcgcggctggtacgtacctggtggagcgggcgcgtgagtgggtgtccctatgcgaggagggaggagtgggacttgggaagtc

SEQ ID NO: 27131 - DNA, 479 bp, Homo sapiens
  chr6:122932019-122932498
  hyper
cggctctcgcgccagcaatgccaagtctttcccctgggcggtgcttaccaagccccgggtagtcacgagcggccgcggggttagcagagacccgagtactaacccgctcggccagcgtccggctgtgtggctttagccaagtcacctcacctcactggcctccgtccattctttggataaaatatggaggtgggtagaccgagtaaactcaagggtcgcccgtagctattggattttccctgctcctaggaccccggcaggccgcagggagggacacgagtgccaggtggtcgcgggctgagggagcggagggcctgtgttccggttggtgctgatgctagccccttggggaaattcctgaaggtgcatttcggagccaaatgaccctgccttgcagcaggtcccttccaagggagctgagagggccaggtcagaccggtcttcgtagagctccccggggaacgcagccaacggaactc

SEQ ID NO: 27132 - DNA, 524 bp, Homo sapiens
  chr6:130088233-130088757
  hyper
cgttgcaaagagaaaagcatgcaaagatgctctccttaccggaggtgaaagcattgtgccagctctgtcactactataaccatcttccgcaagtggagagcagggaacgccagggtcccaagaagtgacgaaaagcgataattagatctcctgcaagaatcttccctaagcactttcttccgtgacacacctactttgtggcatctacgcgctcttcacggctaaccacaatcctgtcatttcggcttattcatccagcagctgccggaaggaccgggctgaagcgtggccacgaggagggggatacccgtgcgagcgctgagccggcagagcggctgcagcccacgggctcctcggacccccgctgctgcgccgctgcagctgaccgtgcgaaagccgcatgttattgggtagagatcagctttccaggaacaggcatcagctgtgcacgagcccggcagcatctcgagacaagtgctagccggtgttggtgcaaaccaaagcttgctatgtgctcagaaagc

SEQ ID NO: 27133 - DNA, 823 bp, Homo sapiens
  chr6:134210203-134211026
  hyper
cgcccctctattccccagataaattcctagtgtccaccaaattcctcagcgctcgctcaccctcctctacggccacgactctgggagtggggaaacagagagccggttcctctgctgcagaagtcctcggggttccttctcacaactctgcgaaggggaaagggttgtgagacccaaccagaccccaactccagctcccagcaggaggtggctgcgccacactcgggaggcctcttggtttcagggtctctctgtctctctctcaccctcttcctcgctttctctgtctctctgtctctctctctctctctccctcgtccactcccccaaacatgtccaccggctccctcagcgatgtggaggaccttcaagaggtggagatgttggaatgtgacgggttgaaaatggattcgaacaaggaatttgtgacttccaacgagagcaccgaggagagctccaactgcgagaatgggtctccccagaagggccgcggcggcctgggcaagaggaggaaggcgcccaccaagaagagccccctgagcggggtcagccaggaggggaagcaggtccagcgcaacgccgccaacgcgcgagagcgggcccgcatgcgagtgctgagcaaggccttctccagactcaagaccaccctgccctgggtgccccccgacaccaagctctccaagctggacacgctcaggctggcgtccagctacatcgcccacttgaggcagatcctggctaacgacaaatacgagaacgggtacattcacccggtcaacctggtgagtgctcccggggctgcagctgcagtccaggcgcgccc

SEQ ID NO: 27134 - DNA, 471 bp, Homo sapiens
  chr6:134213931-134214402
  hyper
cgcatgcctgccttttggttgctgttagcgggtgcgtttagctcccgccacgacttccggcggactgggtttaatttaaacattttccaggctacggaacagctcctaagggaagattaagttgagataaacagagaagcaaggccgaggagcctgcgacccgggtccctcactgccccagcgcagcccgcggcggccgatgcgccagatgccaccggggctgtttaatgttcggggttatgaccgcagtgtttacaagacgtcttcggttatttatactgttattcctcgcagagagccttgaaacttccgcttcatttgctctttcttttcgattttttacccttttttctcggcttagtttggtacctggagcgagagcttctccgcccttccaccaaccccacaggccgcttcgcgggtggagccctctgcctggccatggaggaaggatcccgctaggctggtccc

SEQ ID NO: 27135 - DNA, 381 bp, Homo sapiens
  chr6:134499457-134499838
  hyper
cggatacgtgatgggtggagcaggcgccccctgttctgtcccagcaacctactaagacttccgaacaggaaggtgacacacggcggaggggtgcttgaggggagggggagacgggggagctgtgtgtgacgcgcgcctgttaacactgcacaggcattaggttgccctgtagctgctattcaaactcttgatctgttcttccttcctgtcgccagcctctttctttggtccagatagtcctcctactgggaggaatccggcccctttcctcatactccctggtggcgaagtggtccgagtagcctcccgaactgtttgtaaatgcaacctagagggcgatcgagttctctgggagaacttgctccatatacgcgtatacgc

SEQ ID NO: 27136 - DNA, 458 bp, Homo sapiens
  chr6:134638705-134639163
  hyper
cgggatggagaatctagcggggctcagttcttcactcgcgcattctgcagcaccagctactgcagcaacctctccccactttcagttgccaccgacagcggcttttctccttccatcattgctccgaaacatatgcatcaccgctgcaggaccctgggggccggacggtgggatacggccaatctccggggagatgctgtggctcttaccgagcgggagaagggtacgcctccccgcccccagctacctggctgctcttccgcggccggcgcggggagcgagtcgctcttctccaggtgatgcgctcctggaggcggcttgagagaggagagttgtttttgattgtgcaagttccagtgggagctgtagttaagcagctgagagaaggagtaagaaagagcagaagccagagggagggagggagaacagcgccagaaaggcagagggagcgagaaggc

SEQ ID NO: 27137 - DNA, 791 bp, Homo sapiens
  chr6:137808706-137809497
  hyper
cggagtagacggaagggaggcgagatggtgggaggctgaataaccaggaggagaaaggagtcgccataaaatgcacccgcgccaccctccatgtcccccagtggaattgaggatcttgcttgtggcaaaagtgcgttcttggcaccacagccccgcagctggggaggggggcctcagtacccggcttccgcaattttccaggcgtggaggtgaggggtgcttgcgtgtaaactgtggcaacccccagaatcaggccctggctcctgcactttcggaggtgtctgttgcagaccacgaggaaaagaggggtcttactcaagtcagggccggacagaactccaaaacttacgaggacagctatccaacactgcctcacagacccttaggcgctgccccctctttgcccctgtcctcctgcggtgcgagaaacccgaccactctgcttctacccgaaccccaggacgcaacagtaaaatcaaggcccgtcgttgaactcccaggtctgcgcatccctccctcctggctccctggggtcttggccccagcaggtccagtacccatccccagagggacccactaccctgggcgtcccagggtgccaggcacgatggcctgcaatgggggctgcaatttaaccgaggcgagttaaattccttttgccggtgcctggctgcgaggacaaacgtccgtactttcgttcgggagccacgggcagtccaggggcttgggttagaagcaacggctctcttccaggggctgtgatccgggtcggccagggagagcgaggcccc

SEQ ID NO: 27138 - DNA, 786 bp, Homo sapiens
  chr6:137816474-137817260
  hyper
cgctggcgcaaaacggtgggacggtccgcgcccgaagctccgccgggcctcctctggccgctgtgctgacgtgccccgagctccgggaactcagcggcaccccggcctgcgcgggtgggtccaccaggctggggccgccgtacggcgtcggacagggaaatcagaagctcataataaactatctgatgtcggggtggtggggcgggggggtggggtgcgtgggcaaagaagcacgggggaagggaaacaacgaaaggacctagaaagccccttgtgcgtgcccgggcactgcggttcagcgcagagtcgtttctgggaataaagaggaggtcggagtttggagccttcggtgcgagtgcggaggtgggcgtagatctttcttcccccttgctgtgtttttgtgatcaagactttagctcagcagcacgaggggcgggaaggcagaaatcccgggaagggagagagccccaggagtggtctctagaagaacccggacaccgcccctctcccggcttggtggaacgggaaacaaacgctagctagtgactgagagtctcggtggaagtgtgaaatcgaatcaatcgcggaacctcgggcacttggggcctcttgcgccgctgagtcacttcgaagaacaggatgcccccctttcccttgactcaaaccgagcggtcagtgggagagggatgcgcgcccaggtccggagtttgcacgctctgaggctgtgccccactgacagtcacgctgcgaaggcagctctggccaataccagaaggatgggcaaac

SEQ ID NO: 27139 - DNA, 409 bp, Homo sapiens
  chr6:142409837-142410246
  hyper
cggtgccctgaggactgaacgcccacgatttaggtttaatcgatgtccctccctctcgcccctgcaagtttactgtccgcggggcaagcctcacagcaccacgtccctaagagttcaggacctggggaggggtctgtccacacactcgggcgctccgcttctagaggggggaaatggctccggctaactctgaatttaaattaaaaaaaaaaaaaaagcaaagcggttgcgtctttgttccgtattcagtggtttgttctcgcggttatctagcggaaaacagcctttcaggaacaaggagctgtcccttggggatcagtagaagcacctgccggactcttcgcccagagaagcagaagtcatcctggcgctgtccagcgggccgcagctgaaatcccgggaactaggc

SEQ ID NO: 27140 - DNA, 324 bp, Homo sapiens
  chr6:146349455-146349779
  hyper
cgggtcagggaattgcaactcactggtcaaagcgtcccttgcaggccctgccagggaatgtctggctggaccgagcactgtccagggtcctgaaggcggcagggctcaggctgccgcggcgagagcaacccggaagctcccctccgttccctttctagcaactatgcaaaccccaaagcaagcgcaggaccccccctaacccgtccacccaccgcgggaaacaagttaccttatctgcaccccttcttcttgaacatacacagcaagcctgacttcttacgggggaaacataccaaactcctccatacggagactttaccaggc

SEQ ID NO: 27141 - DNA, 68 bp, Homo sapiens; identical to SEQ ID NO: 9846
  chr6:157193700-157193768
  hypo

SEQ ID NO: 27142 - DNA, 617 bp, Homo sapiens; identical to SEQ ID NO: 24541
  chr6:158093637-158094254
  hypo

SEQ ID NO: 27143 - DNA, 120 bp, Homo sapiens; identical to SEQ ID NO: 9849
  chr6:16322061-16322181
  hypo

SEQ ID NO: 27144 - DNA, 186 bp, Homo sapiens; identical to SEQ ID NO: 23318
  chr6:166298476-166298662
  hyper

SEQ ID NO: 27145 - DNA, 450 bp, Homo sapiens
  chr6:166421891-166422341
  hyper
cgggaggccaggtcccgttttgaggagaggagatgcgcccaagcgggggcggaggagcgggtcgcgccgctgacattcgccaaggacaggatggggtgggcgcccgccggtggccgactccgccccgcctctcaggggtgcgagtcatcagcgcagcggcggatcctggcccagggagccaccggcccaccctcgcgcccaggagccggactcggagacgtccacctggtggagagacgcgagggagccatgcagacaggggctgctccgtggagagcccgggaagcctgcggggcgccggaggggtgggtcccgggacagaccagtgaccatccgcctcctgcgtagcgctgcccccaggagaggaaaacccatcggaggttgtgctgtgtgcgttctccaagagggaagctcagtatgagcactcccttcgtccccttaaggaggacc

SEQ ID NO: 27146 - DNA, 855 bp, Homo sapiens
  chr6:166579711-166580566
  hyper
cgactttacaagtttgttccgactccacgcagtaagtactgtggcgcatgtttaaatttaaatgcgactttgccatcaaggctgatatcttttccacccccaggagagtttagggctagacaacggaagttccccaaaagctccagtccttcaaaggggagtgctcccgctccccgttcgccaggcgtggatgttatcagcttagtataaacagcgctaaaggccttattagagaaggctgtggcagtttctccagggcagacgtcgcctcccgttcaagcagcgtcccttcccacaacccccgtgcagaaggcgcagcgcggccccctcctcgctggtcccagacctggcgggctcctcacacctacctggccccctccgttgagcttgttggtgagcttgactttgctgaaggagacgggagccttcatccagtgggccccgaagttgggcgagtcggggtggatgtagacgcagctgggcgcctgcggctccggcttgccccccggcacccattccccgttcacgtacttccagcggtggttgtccgccgccacgaagtccagcaggaaggagtacatggcgttggggtccaggccagacacgttcaccttcagcaccggaaacatcctcctggaaaacacggggcgggcgcaggaggaccccgacactgaccaggtaggccggaggcagaagctgggcacagaggcctcagttatttcggggcacagaggagccccctggggaacgtccgagggtgactcccaagctcccccttccccgagccctgccaggtccaggtggcctcctcaccatctccacggcctcgggagggaggggaggagaggacctggc

SEQ ID NO: 27147 - DNA, 1466 bp, Homo sapiens
  chr6:166580595-166582061
  binary
cgcggggacaggcggggaccagggcgcgcctcgcgggtcccgggatgcctccgaggtcgggacaccgaagtgcgcgttcctcctccccaagcttccgcggagaaagccccagaagaggggcttgtagaaatgcactcgagggagttaaccagagcgggaacaaacacaaagccctcctccaggagaaaaagggttcgacctccgggaacttgccaggtcccccaggctgcccaggcgctggagagcgcggcgcgcgcgggctccggacgcgcacccacctgccgttcttggtcacgatcatctcattggtgagctccttgaagcgcagccacagctcgctctcctccaggcccacgcgcagttcgcgctctgtggggtcgcccttctcgctgcccgcctgcagctcattctccacggcgctcagcaggtggtccactcggtactgcaggctctttcccgcgctctcggtgccaggggagctcatcctcccgtccggctcccctccccgccgtccccgaagcccagactcgctacctgagatccaccttccctgctcttggccgccgcccttccgagaaaaggggccccttggaccgagacctgcgacggctcccgggtcccgggtcccggcacagacccgggaggagggcgcggaccaagacttggggggaggggacgggggcagaggggtggggagaagttattccacttgaactccccaaggctctactagtgtaggtctctggggaccgaaattcagtgccctccccataaatagagccgcggcggcagcgctggggtgctcggcggattgggccgcgcacgctttgaagtgccgggcagcctcccattggccgagagcggccatatcagacccagccgggcgggtctgggaggccgggggccaacaatgggctcccgcacgcctgtttcatgtaaatccggggccccagccctgcgagccccggcccagcccctacacccccgcccttctccaaatgtttgcacctccatcaaagcggcggggcaagccccggaggaaggtaagctggacgccccggcctgccccagcccgccccagcccgccccagcccgcacttccgcgaggggctgcccggcagcctgcgatgctccctgattcccgcgcggggtcctcctcgctttcccagcgcgcccggatcccgcagccgcgccaggctggaacgttcgcgcggcctcacctgtccccgctccaggcgcgcctccctcccctcccagggacgagcgcatttggccgggctttgggatgcgccgcgctcgtctcgccgcagtagtagtgctgttctcgcgcctccgatgcctcaactctccagtctggcagtttccggtgcacctgtccccacacgtccctcgcccacggagccccaggcggcgttacgcacacccaggatcgtggatcagcctgccccggcgtcgggtgtccccgc

SEQ ID NO: 27148 - DNA, 1333 bp, Homo sapiens
  chr6:166582089-166583422
  binary
cgcgcgcagagagggaaatggacggaaataagcaaaagcaaaacaaccccttctgagaagtgtcctcctcgctctcttataaaaacaggacttgttgccgaggtcagcgcgcgcatcgagtgtgccaggcgtgtgcgtggtttctgctgtgtcattgctttcacggaaggtgggagaaggtcggggctggcggggtggtccggactagtgggactcggggcgctttccccgcccggcccagcgccaagcggtgtcggcagcggttgttttattacctttcggtgagaacttacgcgaggagagcgaaggagaggtgacaatgagcaggaaatagttcagtggggtctctttaaacagtaacattcctcctaaaacgggagcccaggaagggggaaggaggcagaagctcccccttccaaggcctggctttgcgcttctgcacacctcgcccattcgctggacgagggcctgcctcgggtagcagcctctgtttcccggtctcctgagcgggcaccccagccccaacccctctagagaaagcctgcgcatcgggtggggcagcgagttcagaggagtcttgcgccctagcaagggggctttcccgcggacatggtatctgcgccccgcgctaagtctcccctgccccctgccccctgcccctcgcccctcgcccagccgggctcgctccggggtcgggaattgctggggaagccgaaggagggatccccgcccgggactcgagggatcgacccgcctcgcggtatgcggagggctgccaggagccagtcccggggaagggtgcctgccgcccgtgggggacagggctccttctctcccttctccaacttacaccgacgagtcaggaagccggagcgtctagtccctgtccgcatttctcagtgtcttttgatgtctgggatgcatggatattcccagggggctgacccgaggtggggaagtttccttctagaaagaggcaccaaaaggacctcatttgctcctgacgccggaccctcctgacacgccttcactggctcatcgggtcctgggctttgggggagagcgtggtgcgtgttactctccttactccgggtattaaaatgtctaagaggtcatcgctttggcccaaggcctcccgaggataagataaaagggaaaagtggaggggaggtgaaggaggaacgagggtgggtcccaggcaattgagggcctcggaaccctaggcacgggagcgaaacctctcctgcggcttcagggcaaaggagtcccgaaggctggatccctcccctgcgctcggacggcgtcgcggccgcttttcccacagtcgggaagc

SEQ ID NO: 27149 - DNA, 582 bp, Homo sapiens
  chr6:169653496-169654078
  hyper
cgtttacccgggttcccaggcaggtatatacattgaaatagcagcagccacaaccctcagagaggaaggggtgcccggctggtgaaagcacagccacggaggaaaagctgaggagcggccacgtgccttgctcttcaagcgggcagtagaaacaccacgtgaagaaacacttgccatttagtgttaatagatacaccacccaccttaagttaagaatcgaaattgctcctttttcttctccgcttcttagagttcgagaactctaatttcttaaaattagagcaccattaaataattgattgagtttaagaaataatcgtacctggtttgccaaaaagatgcagtgatgactggtttcagtgttccggaccgagtcagaaaggcgcaggctctgctggagcgagagaccggccctgcagtgcaggatgctccggtggacgtggccgagcggctcccgggcagcgcggctttatatgccgcttctcctgtgcagggctgtcaatcagacacacgaggaagcacgtttaattcattccttcgaaggaatgacatcatcccccttctgatctcaccatttgctcc

SEQ ID NO: 27150 - DNA, 117 bp, Homo sapiens; identical to SEQ ID NO: 9853
  chr6:170178959-170179076
  hypo

SEQ ID NO: 27151 - DNA, 194 bp, Homo sapiens; identical to SEQ ID NO: 25781
  chr6:24494664-24494858
  hyper

SEQ ID NO: 27152 - DNA, 788 bp, Homo sapiens
  chr6:26033454-26034242
  hyper
cgcctgaatattaggcaaaacgccaccctgcgcgatggtcacacgccccaagagtttattaagctcctcgtcattgcggatggccaattgcaggtggcgcgggatgatgcgggtcttcttgttgtcgcgggccgcattgcccgccagctccaggatctcggcggtcaggtactcaagcaccgccgcgagatacaccggcgcgccagccccgacgcgctcggagtagttgcctttgcggagcaggcggtgcactcggcccacaggaaactgcaaacctgcacgagaagaccgagtcttagccttggcgcgagctttaccgccttgtttgccgcgaccagacataactacttctgataagggaaaatcgccacaagaaaatgtaatgaaactacattagaacgcaaggcagagaagtatttatactgactggaggtaggctgtgaggaattctcccattggctaatgtcaaatacccaatgggaaatcagaatctgcatccttcatttgcatgtaatccttccgtctggtgtaaggtttatgtttgacccaatccccagtctggcttgacgagccttcgacttgaatactaataataattggccgaattaggattttgtcaaaataccttttttaagcatgagtggaggttttgttctggttattttgactttcagccgctcgtgcttttcccggattgtgactcatgtttttggaaaggagtggactccgaccaatttctaaatagatatttaagaggtccttcaaatcgggcgcagtggctcatgccc

SEQ ID NO: 27153 - DNA, 147 bp, Homo sapiens; identical to SEQ ID NO: 23322
  chr6:26327821-26327968
  hyper

SEQ ID NO: 27154 - DNA, 134 bp, Homo sapiens; identical to SEQ ID NO: 23323
  chr6:26328309-26328443
  hyper

SEQ ID NO: 27155 - DNA, 893 bp, Homo sapiens; identical to SEQ ID NO: 23324
  chr6:26331633-26332526
  hyper

SEQ ID NO: 27156 - DNA, 730 bp, Homo sapiens; identical to SEQ ID NO: 23325
  chr6:26577146-26577876
  hyper

SEQ ID NO: 27157 - DNA, 854 bp, Homo sapiens
  chr6:27205418-27206272
  hyper
cggccacccggaaaacagttgttctttcaattttaaaaaagcaaaatgtttgttgtttttgtgtttctttaacactaaaggaaattcttttcctctcctcaaagggatgtcttttaaaataattttaattgcgactacgtaatattgtttcttcaaacttctgttggtgttttgcattttcccttcctgcactcccgcagggaagaaggaaaacaaaaacaaaaacaaggacaaggccaaaaactctacctccagcagaaaggaacttcgcctctcccgtgggaaatgagattttctcaaactcacctattccgcccggagaaaatactacagagaaccattcacgagaggggcttccttccttttgaccttgggaggggtccagagacccgggggacgatctgggagcagaagctggtcgttctgagttttccatccaaatggtttgcttatgaaattgactcaccacgcggaatggctggtggatttggatcgcggcatgaggaatccgctccataatggaaggaagaaaatctccggcagctatgcctcgcgggttcataaggactggagagttactccttctctctggccccctcaaaacgcccggtggtatgtctgttgctccactacgcgttattataattaactgcttgtgttactctttgtgctgtcttgctcttcattctcctggtacctcgggtgcccgcacagcatggtaagctgctcaatagttcaatgaatggggaaaaggtgtgcagaggtcatttctgctgattatcaagacttcaattcttcgaagtggagcacgaggatcctctaggcggcaggcaaatgtcatcaggagtctcaac

SEQ ID NO: 27158 - DNA, 551 bp, Homo sapiens
  chr6:27255952-27256503
  hyper
cgccgcggttgcggccgcgaccctgttcttaccaccagcaattcctccagggacttggtcagcagcccaacttgatctgcgtctctctgctaaggtgtttccgcaacagggtcaactccaagtctcacctttctaggaatcccgggcgcagcgcgggggtcgggactccgacctgtatttccaggcggaggtttccctgggtcaggcggccactctctgccagagattgtcagttatccaactgtcaatagagccgccgctccagcgagtttaatttaggcacagaaaagtcctgcctgggttgaggtgggcttaggatgagtttacttgagtgtgtgatttagaaatagatctatgggacagacagacacgaaatcgggcattggggccctcgcaggcagggtatctagactggcagctgccggtgcaggatattgccaaggactcggcatccggctcagctcaaggtggggacgaagacgtcctggttgcaaggaggagccctactccccccggaatcagaactgtgcatagcgggctctggatttgcc

SEQ ID NO: 27159 - DNA, 773 bp, Homo sapiens; identical to SEQ ID NO: 23327
  chr6:27356293-27357066
  hyper

SEQ ID NO: 27160 - DNA, 766 bp, Homo sapiens; identical to SEQ ID NO: 23329
  chr6:27470822-27471588
  hyper

SEQ ID NO: 27161 - DNA, 365 bp, Homo sapiens; identical to SEQ ID NO: 23332
  chr6:27560506-27560871
  hyper

SEQ ID NO: 27162 - DNA, 357 bp, Homo sapiens; identical to SEQ ID NO: 23334
  chr6:27640042-27640399
  hyper

SEQ ID NO: 27163 - DNA, 752 bp, Homo sapiens; identical to SEQ ID NO: 9866
  chr6:27655169-27655921
  hyper

SEQ ID NO: 27164 - DNA, 808 bp, Homo sapiens
  chr6:28175204-28176012
  hyper
cgaagggtactcaacaaatgggaggactcgggcagctttcctgggatatcacaccatatagactgagaatttcagaaacgcaaagtgcgcgtcccagcagggcgagaatggcgttaactatgtcaccaccgcccaaattccctataatttaccacttatcgttcctggctttattctccgtgcgtgcagggacatgtaattctctaggagacggtggtccggacttggttcccgactccctcgtggctgcaaacaggggcagctgatttgggtggatgcagaggttgtggccaggggaagggccgcggggcagcgcgtagaactgattgtaaacccaacttcccgcctcggagcgagccgcggctcggagtagcgtcattcgaaagccaccggagatatcgagagagctccttaactgctcactgagcaaacttcgttttacagctttggggttgatatttgggaaactgggtcctaaaagtggcttctggtcttcagaaggctttgttctccgcttttgattttttgacaccacgggtttcacaccccaccccaccccccagtctcacacaaaccactcaaactcgattgcgtctccattgcgctttggggaaaaataatttaagattctcgcttctgaaatacagcgtgatggttaagagcatgggccgtggaaacagacccggggaaagcctcagctcggccactctttgccgcgtgaccctgggtggcaccttctaagggtgattctgggattctatgaattaatgcatggaaagcgcttgcgagagcgctagccggagtccgc

SEQ ID NO: 27165 - DNA, 1467 bp, Homo sapiens
  chr6:34111644-34113111
  binary
cggacaaggcgagggactatgatgggaacatacatgcccctccctccctgtcacttcgggctttctgccagattgacacaggggcagccaccgctctgagagacacgtggcttcgggcacccagctaggcaagcccagctcagtcggtgtccggaaaggccgcgttctcccgcgccaggggccggcaatggtgcggagaggggagaaagaagcaaggcgcctcctccgacagggactgaaagtctgagggcgggatgtcactcaaggcctaggggcagggggcgctcgtacgttcgggcctcaggactccctgccgccgccgatgctgctgccccatctcagcacaaacagcctcagaccgccctggtgcgggggcgcctctcgcagtcgaggcctccacctcccggccccgcccccgcgcggggaggagacgcctcccacctgcgagcgccggggaagaccgaccccggagcggggacccccagcacacacgcgcgtacacacatgcacacacagagaccactgccggtccgctcgcccggcggccgcgtagacgcgcaggttcatcacggtcccggggagggacggtcccgagtgtccggagagagcctgaccctgaagtcctggggctgcagggagaccccagaccctagagacccccacaacctgccgaggccacgggcaagcggttgccgggctccggccgctggcgaaggcggcgctggggcgggcacgggagctggacgcggtgcctgggaaaggagccgaggcgcgcgaggctgggtgccctcccgccgggagactgccgggaagaggtgcaaataatgccccgcgcccccgcctgtcccgcctctccgcagaccgggatgcgctaatgccgccgcccccacctgaaagctggcacgaccctccatccggtggaagcccctgtatacagagacagtactttccaccgggcccgcaaaaaagcctctgccccattccctccctcaggggcacccggaaagcctgccttagccccgaggggagaccctctagttcagatcccgcgccctccggcccctagggctccgggggcgccagctctcctcggagcactccaagcgcgggagctcgccggaggccacctccccgagccccgatgtccccgccgcagccctcgccccaggaggccggagggcacggtcccctctgtcggtccccctcgggccacaactcaccgcgcgccagcaaggtttaagccgcggcgaggggtcggctgcgtgccggcctgccccgggggcgcaggcagtcgacggccggaggcacggttctcgcggtgcccagagcccgggccgcggcgggcagcgctgacgctgcggacccagcgcgccgcggagccgcccggagtccgggacgcagcagggatgagctggcggccgcccggccggagccgccgccaagcgcgcggcgttcggctgctgctcc

SEQ ID NO: 27166 - DNA, 223 bp, Homo sapiens; identical to SEQ ID NO: 6607
  chr6:36198250-36198473
  hypo

SEQ ID NO: 27167 - DNA, 2706 bp, Homo sapiens; identical to SEQ ID NO: 22934
  chr6:391113-393819
  binary

SEQ ID NO: 27168 - DNA, 851 bp, Homo sapiens
  chr6:40554364-40555215
  binary
cggttccatccacccgtggctccccgtctctccatccggctctccagtctcacatggacccggctctccccgctccccgccagagtttcacccccactgtaggaaataaagactaaagaaaggaaaggaaatctctcgcgataaggatgggcgaaaagagaagggggtgtccgcatgagcacctaggatgcggggagtcttcaagagaaaaagaaagggatgcaaagttcccggttccctcgggtgcgttcagccccgcgccgagctcccgcggacacccgggatcgcaaagacgcagcgccggcgaccactcacctgggcgaggcagcatctacccccggctgggtggcaccgaggccggctccgcggggcgcccgggctccccggctcggccacgcatccttccccgcccgagacagactcgagctaaaccctccggcggctccggcgaatgcaggcagatggtggcctcggacgtccacgcggggaaagccctgagccgcttattcagttatatccatggcatttagcaagaagaaggggggaaaagcacaacttgttctcttctcttccagattaaagaaaaataataataataatccctccctaggaggatgccggtaggattttccggatcgaagaaccccaggcattcccaggaacctcgggcatcttggaatgtggggtgtcttcaagttcagacgagcctgccgggttgtgtatgtgtgagtgtatgtgtgtctcagcgagagggagccaggcactcacacccacacgcacacacaaacacactcccccgtactccccgcatgcacactgccccccacgcgcgcgcgcatacgcgcgtaccc

SEQ ID NO: 27169 - DNA, 608 bp, Homo sapiens
  chr6:4135175-4135783
  hyper
cgtgtttcggttttgttccctatgcacagattcgtgcgggttcccgggaccccagggaggtgcagcgtgcttcttagccgttactctgtacccggccatttcactttatagcatacgtgttctccaagaagcagagtgttaagtccacacgagtgataacggcttgcgtttacctcgcttttagcaagcgacgctttgcaccccagaagcagcccggctgggaagtgcaggcccgggtgctcagctggggcggctcacccgcccggagtccggccccaggaggatgggagcgtgcgcggaggcaggcggagaccttggggactgctgacagggaaccatagccctgacctcccgacgcgcccatcctgaccactccgggcccagcggtgcaggagggcgcgcgtgaggtcgtcactttttagcactacctcaccggaaaaccagcaaagcaaaatcctgttgccacctagacaatagggaaggagggtcttccaacggcggcgaccttcgcctggacagcggtatcctgcgggcgaccatgggccgaacggccgggactccaagcttacctcggacacgaacgccgcgccagtctccaagccaagtac

SEQ ID NO: 27170 - DNA, 540 bp, Homo sapiens
  chr6:43612825-43613365
  hyper
cgctgacctgatggacgccgacagcctcctgctgtctctggagctggcgtccggcagtgggcagggcctcagcccggaccgtcgggcctcgctgctcacgtctcttatgctggttaagcgcgactaccgctatgatcgggttctcttctggggccgcatccttggcctcgtcgccgattactacatcgcgcagggcctgagtgaggaccagctcgcaccgcgcaagacgctctataggtgaggaggcccccgggacgggctccccagagggtggctacctggaggcagggcggggtgggcgggtcgcagcaattgaaaggggcggggcccatggggccaagggaggtgtgggcgggatctgagatgagtggaatgggggagaccctggggggcgggcctggggacggtcaagaggtggttgagggaaagggcggggatggggatgtctcggaatctgaggctagggcggagcctgagagggcggggcaatggacgggcgatgtcccccggagggcggggccttgcgagagcttgttctcc

SEQ ID NO: 27171 - DNA, 965 bp, Homo sapiens; identical to SEQ ID NO: 22935
  chr6:46097250-46098215
  binary

SEQ ID NO: 27172 - DNA, 814 bp, Homo sapiens
  chr6:4775131-4775945
  binary
cggtggggaccgcaggtagaagcaccgcttaaggggaacggcgattcgactcgcagtgacttaagggttggcgtggtgcttgttcctgggcgtggggaggacaggaaaccgcggggtctgtgagacgccccgtggttgttgaaacgctgttggggggcacaaacgaatagggctttaggaagaaaactggtgggaggagccttgtggctccaaggtaggttaggaactggagcgagatggagcacggaggagtgaggcggcccgaaggatgcccggggagacatggaggaactggcgagggcttcccgatgcagggcctgggggagagggtgaactaatgcctctgcagtgccccgtggggaagttccgcatactcggccagagtgatcggagttggcggctgtctgggggagttgggtcaggaagccccttctttcgccaccgatggggcacgtccagggcccggcaggtgtgccctggcagtagatcttccctgggaagtggagcgcgggccagccctcgctgttctgagcgagggcctgtcgtgtagtccacaccgttccgcgaaaggaaccaccattgacagcctcgttcgattagaacccggacctccctggaatccagactcggtcccttcccagctgcgcttcggaggaggcggacgctccgagaggaacccagaggcctggcgtggggggagctgcgggcagagcggaggcagccgcgccctcgcgccgccctccgccgcgcccggctcccgccccccggatcccacccccggcctgccgcggagccagcgtgccagccggagctc

SEQ ID NO: 27173 - DNA, 1356 bp, Homo sapiens; identical to SEQ ID NO: 23342
  chr6:6007079-6008435
  hyper

SEQ ID NO: 27174 - DNA, 928 bp, Homo sapiens; identical to SEQ ID NO: 22937
  chr6:6008704-6009632
  binary

SEQ ID NO: 27175 - DNA, 1998 bp, Homo sapiens; identical to SEQ ID NO: 22939
  chr6:69344116-69346114
  binary

SEQ ID NO: 27176 - DNA, 901 bp, Homo sapiens; identical to SEQ ID NO: 25813
  chr6:71123134-71124035
  binary

SEQ ID NO: 27177 - DNA, 1299 bp, Homo sapiens
  chr6:71665452-71666751
  binary
cggagtgcaaggggcgtgtgactgcagcccggccggcccggaggcccactcccgccctcgcccacccagcggggcaggctggcctttacctcctggaagagctccagactataggtgttgtcgtcgtcagcgaagaagagcacgccgggctgcgcgcgctggtgctggtgcctctggcgcagccaggcgaggcccgcgttgcgctgctcagtggcgcgcggcagcccgggccgcttgtagcgccgcggcgtgggcacgtgcaggtgagtgctgggcagcccggcccgcgccaggaagcggctcaccagctcgctgcgcgccgccgcgtcctccaccaggatccagtgcagctgcgccacctggcggaacgtgttggccaggcgggtcagctccgctttctgcaccgggcggctgtaggtgggcgtgatggcatagatggtgggcagctgcggctccggctgtggctgcggccgagactggttgcgcttttgggtcccgtgagccgggccgcccctgcggagcgggagtcgggcgcccccgcggcccaccgcgtagggagagaagtaggggcgcggggtgagcgggggcactggcctgcgcgtgtccacgtcgagcatgatgatgacaattaggatccagggcaggaggataaagaagcgggtgaaaagcgcggacttcatggtgcacgctccctggcctctcggacaccccagagaggggcgagccgagggaccccagtgcgcagcttggacagcggcggcgccagcacttagggagtggtgatgggtgcgctgtccatggggccgagggcgctgcagagacctggagccgcggggctcactacctgggcgtggaggagcggcaggttcgcgcaagctagagcgacaaggggtgcaggcgggcgggcaggggctgcccccgactccaggtgagctggcgggaagcgggactcggtccagccgcgcgccgccggtcccggagttgtgccgagtgcgggaaaggcgctgatccccaccgcgctctttctgaagagtggaagccgagaagcggcacccggtgcgcctcgccgctccagtccggcggtgctgcgggcacaagggctccagccgcgggcccccaggacgctctctgggacgccttcgagggcgggcggcggcgctgggggctttccttcctcacattcccgccggggtggcgaggagcgggtggagacgctgggggttgtgtcccggctgtgttcgcgcgccgcagcggaagcctgctctcagtcccttgctcttgtcttctcagaacctctcc

SEQ ID NO: 27178 - DNA, 759 bp, Homo sapiens
  chr6:72596036-72596795
  hyper
cgaggtgctgtgcacgttggcgactgtaggggtagcggccggggcacgcgtggctcggacccggggagtgggcgggtgggtgcccgtgggcggagcggcgccgggactgagtggctggcagctatgtctgcgagagcagcggcatcaccctggatggaagcctctgagactccgcctaactgacacccaaactctccctctccctcccgcagccccaaattggaggcagcagagcctgggagcagcctccacggcggcagcggccgccccagtcccagccccagccccagccccagccccgcccccgccccgcgccccgccggagacgcccggatcggcggagcctggcgcgagccctcgccccctcgcctctcccgccgcgcctccgcctgcccgcccccgccggccgaggctgggctgcgggaggcggccgggcggccccgagcttcgctagggcgaccaaaacaaaggcagcatccggggctgggtggatgcaaacaaccatgaaagactgggttctcgctctccccggctctgctgctgctgctgctgccgccgccgccgctgctcctcctcctgccgccgccgctagggctccgctgtgagggggaagcaggggcgcagctgctgggcgtgcatccgaaaggtgagagccagagagcgagcagagggggcgggcaggccacgaaaatgtcctcggccgtggggccccgcggtcctcgcccacccacggtgcctccccccatgcaagagctgccc

SEQ ID NO: 27179 - DNA, 1457 bp, Homo sapiens
  chr6:73331651-73333108
  binary
cgccccaaacaggtccggatttagaattcgaagctaaaggctgttagaaattgggactcctcggcctcctctgcagcccctcctttcccgccccgaagcccgggcggtttgctggctgcctgcttccccgcccccggctcagaggtctctggctggcgggcgccccgtcggccgccggcttcctccttgaaacccgccggcgcacatgaggccgctgcccccgccgcaggcgctggcggccccctcgcggtgcccgtggtgatgccatgccccgccaccacgcgggaggagaggagggcggcgccgccgggctctgggtgaagagcggcgcagcggcggcggcggcgggcggggggcgcttgggcagcggcatgaaggatgtggagtccggccggggcagggtgctgctgaactcggcagccgccaggggcgacggcctgctactgctgggcacccgcgcggccacgctcggtggcggcggcggtggcctgagggagagccgccggggcaagcagggggcccggatgagcctgctggggaagccgctctcttacacgagtagccagagctgccggcgcaacgtcaagtaccggcgggtgcagaactacctgtacaacgtgctggagagaccccgcggctgggcgttcatctaccacgctttcgtgtgagtacccgcgccccctgctatgcccgctgcaggggaccactgtccctggccccctggggcgtgctccgcgctcgcgcccttgggcccccgcgcgcgtgcacacgtggtggcttttatttcttcgcacgtgttcgtggtcttccttctggagcctctcccctcccccagccccacttctctcatctctacagcttgaaccttttccccgaggacacccaatgaactgcccggtagcttcaggctcccggggcgagagccaggcagacgcgggacttaggctgcgcggataattgggagcaattaggtcccaagatacgtaaacttcaaccgaacggggcgcccgggagctagggaatgcaaagggaggacaggcgcccgtgtgaggcttgagagtatactggagaggttaggaggtgatggcggggtaggacggggagaagtgagggggcatcgagggctaggtcctcagtcctaggggcggagtaggggaagctgctacttggagagagctgctaggttttaagcgcgcccggaaacacgcctcgccaccacccagccaccaccaacggaaaatctgtcagtgcatgtagcccttcctgccacggagaaggtggccaaggtctagaggaggccagcaggccaggcgaagcaacgctcccgcgctgcagggggcggggaggcagcggggaacctggggcgcaggaacgcgggcggaggtgcgatagcagaagcgcaaatgggtcgcctctgacagagatcgggcagtgggttaagtccccgtttgtggcgc

SEQ ID NO: 27180 - DNA, 2758 bp, Homo sapiens
  chr6:7726066-7728824
  binary
cggggtattggtcagatcattcttactagcgatgacctcttcgcctttggcacctcgcggctcttcgcatgcctccaagaattcccgggtcttgaaacctacgcgcggcggaggcgacgcctctcgggagagggagggtgaaagaaggggcggggctatttaaatagcccgcgagcttcgcgtccccattggctgccagcctgtcggttaccgcggggcggggagtcccggggctggagtgaggtacctgagccgggcgcgcagcagaaagcccacgttggccgctgcggggagcgcggcgtggagaggcgggagaccgaattccggcgccgccgccgcggccgctgctcggtgcactagcccccttccttcccatcctttctgcgagcgggtttgctgggcagccgggcgaccgccgaacggaaagcaagatcctcgccgcctccgcttgaggaggcgtgcggcgcgcggagattttgagtgggagcgacggtgcccgagagctcaggggcgcggagttcgtgagcgagaaggaagttaaacctcgcggaatagactggcatttcgggacgccttgtcgccgcagcctgggccctgcaacggggtaaacttcatggtggccctgcgatctggggaggggcgtgcgccacggtgatgccgggcatctcccgcagctcgtgagcggccccgctccccgctgccccgggtcccactcagtcgccagggagagcgcggggcagcgcacgtgtgcggccagcgaggcccagagtgaccgcgccgcgactcgcaggagccagggcgcaggctgcagtgcagcccggactcagacgcacctggcctggaccgcgcgcctctagagacctgcgcgaggctgtgaggctccccttcctcccctccaagcggttctcctggtgatcgccccttcgccacctctctagcctgggcaactgggggcgccccggacgaccatgagagataaggactgagggccaggaaggggaagcgagcccgccgagaggtggcggggactgctcacgccaagggccacagcggccgcgctccggcctcgctccgccgctccacgcctcgcgggatccgcgggggcagcccggccgggcggggatgccggggctggggcggagggcgcagtggctgtgctggtggtgggggctgctgtgcagctgctgcgggcccccgccgctgcggccgcccttgcccgctgccgcggccgccgccgccggggggcagctgctgggggacggcgggagccccggccgcacggagcagccgccgccgtcgccgcagtcctcctcgggcttcctgtaccggcggctcaagacgcaggagaagcgggagatgcagaaggagatcttgtcggtgctggggctcccgcaccggccccggcccctgcacggcctccaacagccgcagcccccggcgctccggcagcaggaggagcagcagcagcagcagcagctgcctcgcggagagccccctcccgggcgactgaagtccgcgcccctcttcatgctggatctgtacaacgccctgtccgccgacaacgacgaggacggggcgtcggagggggagaggcagcagtcctggccccacgaagcagccagctcgtcccagcgtcggcagccgcccccgggcgccgcgcacccgctcaaccgcaagagccttctggcccccggatctggcagcggcggcgcgtccccactgaccagcgcgcaggacagcgccttcctcaacgacgcggacatggtcatgagctttgtgaacctgggtaaggatttggggtaacgtaatgacgagaacatttcccccttttcagtgtcccgggcccaggggatggagtgagggggtggaggagctcccggcgcgcgggtcccgcctggtgcgccagagaacgcggggacaggcaggctgtgctcccgccacctgcgcggcggtgggcggcacatgcgctcccccgcgccgcgggcagggctgcgcgccgaggcccccagaggcggctggccggccgggccgcggggctccgggagcgctgtccccagcgggcgtgtatttgcggactccctgagcacgttccgcgctttttttcacttctgcccagctctggccaggttaactcaactgcagcaggagagtccagcccgagtgtggccatcctgggaagagggctcttcagtacgattttcccctctaaactgccgccttttgccccctaacttggagtgcagttttcccaccgagacttttagggaatccgacagcggctgggaactttgaaaacttggcatgagtatgtttagaggtatccacggcactaggggaggttgcagagggaagtcccaaaaggaccgcggaaggcgctcggatcccggccgggcggggctcgcttctgtttggggcgggatgaaagctcaactggggtaatccatcctgtgccccggctcacatgcccttggccattgtccccaaaggctgaacctttgatcaatgcagcccaagctgcacgggcagagaaagggtgcggggtaggggccggggttgggcgctgagctcctctgaaccggttgccaggcaacagaatggaaattcacgggcggctaaatggagctccgccacaaatgttctgtggcaaacccggacccagtcacatcgccctttctcccccctcccaccccactgagttttctcatctgtaaatgagaagggtgcagagaagactcttttcttcggagtcagtgcctcc

SEQ ID NO: 27181 - DNA, 390 bp, Homo sapiens; identical to SEQ ID NO: 9886
  chr6:80487617-80488007
  hyper

SEQ ID NO: 27182 - DNA, 1146 bp, Homo sapiens
  chr6:80656537-80657683
  binary
cggggaagagggaggcgagctcgggagatgtgggagcacagggtggggcggctcctgcgaggagctcctggctgcacaggctccatctgatatgtcagctcccgcatccgagagctgatgagagatggagggagctcagaagaaaaccctgcgagtgtcgggggaggggaggccttaacattcggatcagattaaccagtgctcaaccgcagtgcccgcgccggcccctccgctgatccgcagcatccgaaagccgcagggcgcgggggcctgtggggccgggcccgggagctgcgagaccaggggccggtgaccccccgcgggggaccgagcgaggatggggaagtcagcggctttacctgcgatggaccaggtccagcggtagaactctaccgtgtcgttgagtgccgtggacactacgtttaggacactacccggctccgagtccaggagccccatcgcggcgatgagcgggcgctggcggcaggagaaagcggagacccagagagagggctgaccccggaggcggtggcggccgacggggcgagcggcggccgggaacccctctaacggcggcggcccggctgcgtcttctcctgctcctcaaggcgccgcggcggcggggatgcggcagaaggcagggccaagcggaaggcgtcgtcaaggttcccgggagaaagacgaggaggtggaggaggcccagccgccagcacagtgcgctgcaccagtctgcagcctcgcgcagccgcccctccaatctcctcagccggcgtcacgtggccgcgcgcgggggcggggggccggccgcccctcctccctccctccctccctagtattgggactcgctggcgtagggatgctgcgctcaagggtgcgacgccaactgggctcgcgcaggcgcgcgccgtcgagcgggagcgggacacctgggctcctccttggcccctccccgcacaagtcgcctcattagccttccccgcccctgtcccgggcatcggcccctgcggaggagttcaccgcctccccacgggtgatttcttatccgccccggatacgtcctgggaaacaggacacgggaagaatgggtgttctgtgggcaaagatgaggtaggcgtggtgctttggtccttacctgacactcacctc

SEQ ID NO: 27183 - DNA, 897 bp, Homo sapiens
  chr6:86159095-86159992
  hyper
cgcgcgtcgcctctgttttatcactaaggttttaattgtgaataaacaaggaactggattcgaatgatttcttagtttctgagatttttttgtctaagcatcgtagacttcgtgcgttctcaacccaacaggaagcgtcacatctcagtgagcttcggctctcacagcccgaaactgcaaggagctcctctgcccggcctctctttactcctcctctctgcccctcagctcgctcatctttcttcccgccccctctcttttccttctttggttctttgaagtgatgagctagcgcaaccacaaaccatacattccttttgtagaaaaacccgtgcctcgaatgaggcgagactcagagaggacccaggcgcggggcggacccctccaattccttcctcgcgcccccgaaagagcggcgcaccagcagccgaactgccggcgcccaggctccctggtccggccgggatgcggccggtacccgctccccgccgggaacaacctctccactcttcctgcagggagctggtgccagccgacagccgcgccagggccgctccgggtaccagggtcggatcgggtgacgtcgcgaacttgcgcctggccgccaagccggcctccaggctgaagaaggacccgccccggccttgacccgggccccgcccctccagccggggcaccgagccccggccctagctgctcgcccctactcgccggcactcgcccggctcgcccgctttcgcacccagttcacgcgccacagctatgtgtccccgagccgcgcgggcgcccgcgacgctactcctcgccctgggcgcggtgctgtggcctgcggctggcgcctgggagcttacgattttgcacaccaacgacgtgcacagccggctggagcagaccagc

SEQ ID NO: 27184 - DNA, 986 bp, Homo sapiens
  chr6:99272621-99273607
  hyper
cggattccacttgatcttggagttcgcgaagtaactgccaagtcagagcgtgcgttccgcagtgcgcggtggctgcgcggcgctggctcttgctgtggggcagacagcagaggaccaggggcgagtcggcagcgggaggagccgcctggccaggagcctcggacagtgtctccccgtcccgaaccccttcccgccacctcctccaccccccgccccgcattccccccggggcgaccctccctccacctgcggactgccccaaggaatggaaaacctgcactcagaagccaccccccaccccgcctctgccgtatctgctaactttgctaacactccccttcccctgccttgtaagtcactatttacgaccgcgtcgactcgcgctcacgcacgcctgcccttttctccagaagcctgaaagtggctgaattcaaacactgacacgtgaaaactctattctgagtgacttagaatctcccgctttgaggttttaatcttgatccgccggtcctgcccaaagttcagagcagctgtccgaaaggtccccgcatttgctgtccctaggaaaggtgaggctaggaggaagggggaggcaacgcagggaatgtgagaggactggggccacactgtgtatctaggaggaaactctgaatcctaatctcaagaatgtaagtctttgcgcagtttccaaatcgagtccatttagcagctttcttcggagcccgggtaccccaagtggcaacttaggaactgggagaaggaacgtgccaccaccgaccacctatcctggtgggaggaggtactgctcccccctactcctcccttttccctgctccctctccatcagcaacaggttgtcaagttgaggagacatcccctccaaactctctcactccccacttgtggccgaggcctgccctgtgttcatcccagacagtcaggcagacgctgagctgtccgcgtcggcgtgggcgcctgtggccagc

SEQ ID NO: 27185 - DNA, 327 bp, Homo sapiens; identical to SEQ ID NO: 9893
  chr6:99873227-99873554
  hyper

SEQ ID NO: 27186 - DNA, 420 bp, Homo sapiens; identical to SEQ ID NO: 23630
  chr7:101475674-101476094
  hypo

SEQ ID NO: 27187 - DNA, 288 bp, Homo sapiens; identical to SEQ ID NO: 9896
  chr7:101616410-101616698
  hypo

SEQ ID NO: 27188 - DNA, 412 bp, Homo sapiens; identical to SEQ ID NO: 25824
  chr7:101652279-101652691
  hypo

SEQ ID NO: 27189 - DNA, 740 bp, Homo sapiens
  chr7:103969373-103970113
  hyper
cgtcaacgtggtgtgcttcatccagccctactggataggcgacggcgtggacaccccgcaagccggctatttcgggctcttccactactgcatcggcaacggcttctcccgggagctgacctgcaggggcagcttcacggacttctccacgctgccctcgggcgccttcaaagccgcctccttctttatcggcctctccatgatgctcatcattgcctgcatcatttgctttaccctcttcttcttctgcaacacggccactgtgtacaagatatgtgcctggatgcagctcacctccggtgagtgcgcgctcacctccgcggaggcggaggaccccggggcgcccgagccggggaggggccagagtgggagggacgggggctgtgcgcgccgctgcgagccaagccgcctaatccgctcaggcgtcgaggtgtggggggcgggagcccagcgaggccggaacccccggggttccccagccccggcgctggcgcctcgtcccggggctttcgtgagcctcccaagtgtgggggacgcccactcagagggacgccccggaggcagggcggttgtggggccgagtccgctcagaactaaggatggtgggtggagaagtggccgcttagagagatggggccggggttccgtgctgagggactaaggagggactgacagggcgaagtgaaaagcggatttggagaggtcatagtggaaggagcagccagcctgccctgcccctc

SEQ ID NO: 27190 - DNA, 67 bp, Homo sapiens; identical to SEQ ID NO: 9898
  chr7:104917801-104917868
  hypo

SEQ ID NO: 27191 - DNA, 912 bp, Homo sapiens
  chr7:106685229-106686141
  binary
cgccgcgctcgcagccggtagcgcgccagcgccgtaggcgctcgctcggcagccgcggggccctaggccgtgccggggagggggcgagggcggcgcccaggcgcctgccgccccggaggcaggatgagcatcgagatcccggcgggactgacggagctgctgcagggcttcacggtggaggtgctgaggcaccagcccgcggacctgctggagttcgcgctgcagcacttcacccgcctgcagcaggagaacgagcgcaaaggcaccgcgcgcttcggccatgagggcaggacctggggggacctgggcgccgctgccgggggcggcacccccagcaagggggtcaacttcgccgaggagcccatgcagtccgactccgaggacggggaggaggaggaggcggcgcccgcggacgcaggggcgttcaatggtgaggaccagaccccccacttcgcgcccccggatcccctcgctgccccccaccgctccccgctgtgctctcggatcttgccgctttgcgcacccacctctccccgcattctccacctttccctaccttcccatctcgcccaccccctcagcatccatttctgtctctcccactcgcccaccttcctactccgctctctgtcataccctcttcccttcctctagaggtgggagagctgggatgttacgcttccctcttaccctttgccccctctgcctgggccggttggggtgggcatctgctagaaagacaactttcgctgtggttggaggtatttcgcttagaggataccattgtgcataaagaaactggcccgcttggcgtcttctttcagcccttgtatttattaatggaatgtcgaaagagaaaaggagaaccgtgtttaatatgattggctttactgttgttaggacggtagattc

SEQ ID NO: 27192 - DNA, 82 bp, Homo sapiens
  chr7:107148318-107148400
  hypo
cgtatttggttttaagaatattctctcatggggtgggtggagctaagatggctgaacaggaacagctcccagcgtgagcgac

SEQ ID NO: 27193 - DNA, 1228 bp, Homo sapiens
  chr7:107300997-107302225
  hyper
cgcccctgacctcgcaacccttgagattagtaacgggatgagtgaggatccgggtggcccctgcgtggcagccagtaagagtctcagccttcccggttcgggaaaggggaagaatgcaggaggggtaggatttctttcctgataggatcggttgggaaagaccgcagcctgtgtgtgtctttcccttcgaccaaggtgtctgttgctccgtaaataaaacgtcccactgccttctgagagcgctataaaggcagcggaagggtagtccgcggggcattccgggcggggcgcgagcagagacaggtgagttcgccctgaagatgcccacaccgcccggcccgggctccactcccggggaggcctcgagggttgcggatgggactcttaagtggtcacggatcaggtgggcagggggcagtacagctttctttctgagacgccgagagcgaacaggctgctcggaaaacaggacgaggggagagacttgctcaataagctgaaagttctgcccccgagagggctgcgacagctgctggaatgtgcctgcagcgtccgcctcttggggacccgcggagcgcgccctgacggttccacgcctggcccgggggtctgcacctctcctccagtgcgcacctggagctgcgtcccgggtcaggtgcggggagggagggaatctcagtgtccccttccagccttgcaagcgcctttggcccctgccccagcccctcggtttgggggagatttcagaacgcggacagcgccctggctgcgggccataggggactgggtggaactcgggaagcccccagagcaggggcttactcgcttcaagtttggggaaccccgggcagcgggtgcaggccacgagacccgaaggttctcaggtgcccccctgcaggctggccgtgcgcgccgtggggcgcttgtcgcgagcgccgagggctgcaggacgcggaccagactcgcggtgcaggggggcctggctgcagctaacaggtgatcccgttctttctgttcctcgctcttcccctccgatcgtcctcgcttaccgcgtgtcctccctcctcgctgtcctctggctcgcaggtcatggcagcgccaggcggcaggtcggagccgccgcagctccccgagtacagctgcagctacatggtgtcgcggccggtctacagcgagctcgctttccagcaacagcacgagcggcgcctgcaggagcgcaagacgctgc

SEQ ID NO: 27194 - DNA, 446 bp, Homo sapiens
  chr7:112726534-112726980
  hyper
cggcggcgcctgcgcgctggagcctccttgagctccagccgcgtcctcccctgtcgcagcggcaccgtctcccccagtaacgcaggggccgcggcggcggcggctgcggtggcgagggcggcggcggggctgcttcagcctctgtggaaccagcaggaacccctacctgactccagagctggctgggtttattgactgccctgtccaatccaactggcagcattaagcttttgtcccttcgtggctgcttctgaacttttccctccccgcatttgtagtggggggctggaaaggccctttcaggacctcaggcccatcctcttcccaaaggcagcgcacgaggaagtcacagtgcccgtgacgcccgccccctccctcagcttcccggaaccctaaccttccccagacactttcttcccttttcttttagggtggtccaaaccacc

SEQ ID NO: 27195 - DNA, 1482 bp, Homo sapiens
  chr7:113724948-113726430
  hyper
cgactgacttgcgagcaaagcagcgggctcagtctgcggcgcgcggaaaaggcggccggcgaagagtcgcccggcccgcgggcaggggagggaccggagggagacggcggggagggagcgctggcccccctctgggctggggctccggaggaagcccctcgccaagattccggtcgtgcgtcccctccggggcccgctctctcctccctcggcctttcccctgtcaccgccctgggtcccaagcaggccgcccagccgggtcacacccggtggatagaagccgggacccagggctggcggctgggcccgtgcatcccccacgcgggcgcctcggctttgaagtgcgcgcggagcaggctctgaccgtttcttctttcctttctttccggttacttttgctcccctcagtcactgataggacccttcccgaaaacctcagactctctaagtcccagcttggcggccccttccttccaagccgcgccccggtgacctgggctgcgcgaccacgaggaagcccgagaactccttggcccaagtgagacaggaaccagggcaacaatgaagagaaagacactcggcctctctccaccccaggccgcagaggcgcacaccgtgaaaagaaaggccaatcagcgctttaacgcacgctcgggtctccctttccgactaccatgtacttttaactccctgccaccgagggctttggatcccttcgaggctttctgcacttcaagtggaatcccctgtttcatttgccagcagctccgtctgctgagaggacgtactttggggactgccaagaagcagcagacacaactcggctttgccaatacagcatacggttttgttctcgcctccctccccacccccttccctgactcgccgtctggggcgagctggagaaggcggagcaggaggtggggagaagggtgggggtgggggaaggtctggcgtagcacaaacaagttctccagcgggttgtttacatagcaggtggacctgacgtcagccaggaggctccgctgcaaatccgaacaatattcttccccgcgtttccccctccttaaagaagttagggaacggggggagataggtggacgggggagaaaggcatcctaaccagctggttccaaacctatcaacaacaacaacgacaataacaacgcaaagtaaaacaaaacaaacaagtggtccggcggtacttcagaatcctctgcggcgtcctgtcccccaccccgcccctccgaggagaggcagccccgcgagcagtgtgtgtacagttcgcattgccaacaacacgcgcgcgcggccgggtgcgcgcgcctgccagcgcacattcacacacacagacacacagacacacacacacacacacacacacacacagatccgggtggggggagcggctgcgcgagacagcgcgagcctccgagaaagcgcgagacacgccggcgcgtgcagctccgcggccgccgcttc

SEQ ID NO: 27196 - DNA, 983 bp, Homo sapiens
  chr7:113726446-113727429
  binary
cgcgccacccgcagcccgcccgcgaacgcccgccccggttatttatgcggcggccgcgtccgctggctgcggcttcctcggccccccccctccccgggcgcgccccccactcgcggcagcagctgcccggactcgcgcgtgggtgtgttgtttgggggcttctgcctcgccgccgcgggtgccacctcccgggacgctgcccacggcgtccccggtcgcggtaagtttcttggccctcactctggcgcgctacacctccgcaccccaccctgtcccagccacctccacgctgggccgagctgcgactttactctgctccgcgctcctcccgcggtggcgacaaagtttcgccccaaaggcagcgccctgcttgccggggcgagtgtgacatgtgtcaaatttgggctcggcgttggggtcgcattccggacccagcatcaccacttgttgttctctttcattttgctttgtgatgggggaaaaaggggtggagaggggagatttgctgttggctcacggatgatttttagtttggataatgcaaaatgttgcttcgtccggagagacctcggctggaggagaatgtgtgtcgaaacaccagatgtgtgtttgtttactctcttctttttaattgtttgttgtcttttccccttcctccccgcacccccacccccaacctcgggaggagaaacaacagtaaaaacatctggcggttagaagcacacactttattgatccaactgctgacctttatttactcagttgggcaagtgcacgcttctcgcgtctaagttgggcacttcagcgttcatctcagaagtacttctccaggaaggagagagatggaaaggggacactcctgtttctggagtcaagaaactcctgggccctactgacgcttcgggataaccgtgcacagggatgactgctgccttgatcgcgttcctttccctgtccacgcgttagcacgaccggcttccccc

SEQ ID NO: 27197 - DNA, 1330 bp, Homo sapiens
  chr7:114562170-114563500
  hyper
cgggagggcgcagcgcccgggtggggagcccgagccagcccaggccggctctggcctcctgacccagacagcgcagggcgcgagggatcgcgcggccgagcccgggtcgcgccgctcccagcatcggggccgctagccaagagttcgaggccttcccgatccggatgtgatgaaaaagagcaacagagggagaagtgtttcaggattgtaggagtggaagaggggaaagagaggcagagagggggaaggccccctcgcaggggagccggctggagtgagctggctggaaagagggggcggagtgcgcggagtcagagccgccaccgctgccgcagttgccgccactgcggcgtctgggctgagccggagggaggcgggaggacgcgcaggggcggccgccgccgtcgtcaggccaccggggcgaaaatgcggccgctgccggaggctcgctaactttccggggcggaagaggaggaggaggaggaggaaggggcttggagcgactacggggggatgcggaggtaggtagtggtctccgggcggggaagaggaggggtttgatccccatccccggggttctcccaaacccgatctctctttccagcccctccccgctgggtccacctcggacccctgggaccccgccgctgtcaacttgcgctgtaacagttttcttcgcaagtttcaaatcaaaacttccccggggtggagtttgagggagggaagtggagggggagggaacgtcccgcaggggtggtgtgctcttctctaaaaacatttttttttttaattttgtatatttttccgccagaagcagtcagttccctgcacccagcacctcacagcccttcctccgtgcgccctgccgggcggcgagctaggcggcagcggcgcggcgcgggctcggcggagcggcccatgtccggcgcgggcgaagccctcgctcccgggcccgtggggccgcagcgcgtggccgaggcgggcggcggccagctgggctccacagcccagggtgagtgcgcgcttgcaagtggcaagcttctttgtcattgttgcatttttcagtttgctcacaagtgcacagataggggtggggggagtgctgtgaggaggggctcccactcgtagttgagaacttttgcacagttcgcgttactcaggcaagttcttcaggatccttgccctagatcaacaaccgggtaagagggcgggaaccgttggtccctccactcccccttcctttggttgcgaagaaacaggatgacaggattgcttctttcttaagcatatgcatgtttgggcctaagactcaatgtgtaggttctgaagc

SEQ ID NO: 27198 - DNA, 847 bp, Homo sapiens; identical to SEQ ID NO: 23347
  chr7:117119463-117120310
  hyper

SEQ ID NO: 27199 - DNA, 856 bp, Homo sapiens
  chr7:121946579-121947435
  hyper
cgggtccctccgccccactctaactttccgcgaaaatcagttccgcctctgccccaagagccaagaggggtggaaaggaagagagcttgggctgggaacgcgcctgatgtctaacagaaaggcagtggcagctgggtgagtggtgggaaagctcacaggctgaagaaatgggggagggggagtgagtcttattggaagttgaggacagccaaggggcaagatggggggagaggtctggctgaatacgacgggcttcagcagctaggcctgggagtgcctcgtttcaggcctcgaggtggcttcaggctgggacaactgatgcagcagagaagggcagagcgcccggggggagaaagcaaagaggcgctacactccaaggcggccctttggaaccgtccttggcccgggtgcacctactttggattcgcccagactgcaaatttttctttccttttgctggggccacgggacagagcacctgggcagagcaagcggagaggcgccacatccccgagaggcgcttcgtagttgtccttggaccgggcgcagacactcagtattggtcagcgctggaaattttctttccttttgctgttggggccgcagaaccagtctcctcctttcccctgctcagacaaagggcacgggaagggctttgctggggcaaaggggggtggggggttctctgtcccacgacagatgggtcgcggttaagactttaattgctgacttttgggccggatcagattccttttcctacctgccacttcccagcagcgaaaaatccccctcctgctgcactcctccgccaccgggctaggttgaaaggaaaaagccaagaagcgcgaagcagccc

SEQ ID NO: 27200 - DNA, 277 bp, Homo sapiens; identical to SEQ ID NO: 23349
  chr7:121951878-121952155
  hyper

SEQ ID NO: 27201 - DNA, 89 bp, Homo sapiens; identical to SEQ ID NO: 24583
  chr7:128097604-128097693
  hypo

SEQ ID NO: 27202 - DNA, 982 bp, Homo sapiens
  chr7:129424670-129425652
  hyper
cgagtccagcctcggtttcctcatctgtaaaataagccgagaacatccgcgcctctttctggagaaggctgggaggatgccagagagaaactgcgcgcaggccctggcgaggagcccctccggcccatgcggaactctgcacaggctgggtccctccagggttagaaacccagcttccccacccctacccagcagggacccgcgctgcatcccctaacgccccccaaccctctgcacccagacccaagagccggccttcgacgcaccacatgcgtggagcccgggtcccagccctgaggaccaggtttcagggctcagaagactccagcgaggttccctcgcagattgtgtctgcggtcgttgggggaggggccccgcagccttcagcagattatccaaaggtcagtgacccagatatggttttggccacgggccatgtttcacttcctgtgccccaagcagaatttagctgaataattcggaccccaaaccaaacaaaacgctcttatttccgtttggggattcttcggagttgggatttttctgtctcaaattagaataatctgcattattaaccacttaacagttatttgttggttggctgcctgacctttctgagcctcagtttcttcgtctgtaaattgggagcttacccaggtcggaggactgttggaattggaaatattcgaataaggaagtgtttttgcaagtgctttgtaagcagcaaagcgcttcttcaggggtcaatttttttttagctctgcagtcaccacccaaattcggaagatcgttgtgcctttcttggatgagaatgcccggctccagcccggggatgggacggtcttttccttgctaggagtccgctgtggagggggcgatgcgctctgtccaggacctaggagtccctttctccctccaccctcggctcacagcgggcagctcccccgacgcgtaccgcctctttgcccccagcctgaggtgc

SEQ ID NO: 27203 - DNA, 1138 bp, Homo sapiens; identical to SEQ ID NO: 25842
  chr7:134142980-134144118
  binary

SEQ ID NO: 27204 - DNA, 474 bp, Homo sapiens; identical to SEQ ID NO: 25843
  chr7:134918319-134918793
  hypo

SEQ ID NO: 27205 - DNA, 802 bp, Homo sapiens
  chr7:140771242-140772044
  hyper
cgcctcgttcgcgcttttcaaaatgcaggaagggcgggggagagagagagagagagagagggaaaaaaaaaaagacaaaaagaatatggtggaggtgcgctcattttggctcacaagccccgttgtgcaaagcagggtgtcagagactctctttttccccagggcaactctttacccggcaatgccggacctcgactttggggtgagggtgaaaacgaggggtgagcattagagtgaaaaacccagcgtttgatgccgggagggagggtcccagcctttgcggcgccgtctcacgtgagcagagcaggggggctgaagttgggatgaagcggggcttgcctggggcccacccgctcaaggtctggggtccggcgctacctcccagagcccctgcagagcctaaatccagcggccacccttacaaaatgacaaaccctgcatcgaggtttcttttaaccccaccttccctcaacgctcgagctctccagcgttttcaaaatatctactaacggaccaccccccatccaccattaaatttctctcgtcttgagtcgatcagccaaatttcttctttctgttcctgccgaggagggagggcaggtggaggtgggtgtgtgtcggggtgcctggctctggcttgggactggactggggctggccggataactccgcagccgctctcagctcagtcctaggtggaaacgcctgtagcttgcaaggtagcgcctgtggctttctggggaaaaaaagatcaaatgcctcccaagacaccagcgacccaaaccggggatgcagggagctc

SEQ ID NO: 27206 - DNA, 966 bp, Homo sapiens
  chr7:140772296-140773262
  binary
cgtgcctgggaaatggtgcagtttatctttaaggagactagaaaaataagagatgaggctcacgttgcacggatgacatcactagcttttggctgcgcgctcggtgttctcgtctgtgggttttagccaaggctgcagctacccgcgccggacgagagagcgcggcagcagcttcctccggcgcccgcacccgggcaatgcgatttccccagtcccctgggcgcagcctgggctctcgcgcctcccgggcaccagccgagcctgcgaggcctcggagccgccgcggctagaggaggaggcgacgaggggaagccgagtgacccagcctccctcccccaccctctccccattcatctcggcgaccaccgcgcgccgggagccggatcgtgggacgccgaggccaggacgggattctctgcacgctgtcgagtgagccggcatctcggcgcccgggtgggctgcgaagaaaatggtgcaatctgagagcgactgagcccagctgggcagagcagacggggtgccagagtgccaagggctcaggtgcctggagaaaggggcggattgtttggaggggccgggaccggggttttcttcggtgcctgcggcattttctttgcacctgggcggcaggctcccggggctcccgggtgccagatgaagtgaggcggaggcgtcgcgggagagccgggtccggaggcggtcgggtggacactccaggcagaagacggcgctgggaagagctgcgtgacgctcgggggctggcggctgggccggcagcgcgccgtggcggcgtgacctgtccatggtgttgaaggcgcggtgggccgagcccctagcgccgcgcgcagtgagcgctgcctggtgcaccctccgccgcgcagcccgcccctcgcgtccgccagcagccgcccagtctccgcagatcccaggccgggtctcgtccggtaacgccgcccgggtgaacac

SEQ ID NO: 27207 - DNA, 793 bp, Homo sapiens
  chr7:145813513-145814306
  binary
cggagggagcgctcgcccgcagtggcaacagctgcaccaccgtccccgtcgctctgccttcctcttctgcagcctctgctcttctgattacctccctcccccgtcctttggtgatttttttttttcaagaaggagagggcggggtaggtgtccgttccctcccctcttccccctcctttgccttcttggtttgaatttcctcccccggcgttgcactggcacacagtgcaagaggcaatacccgcacggagggagaacgaaggctgagactcccctgccgctccaagcccggaagaactggagcctggaggggggtgaggggagaagaggaagcgggaggggcttggcttcctcgcgtatttgaggacagcccatctcccttcaagaaccctacggagagtcggactgcatctccgcagcgagctcttggagcgccgccggccgggaggcgaaggatgcaggcggctccgcgcgccggctgcggggcagcgctcctgctgtggattgtcagcagctgcctctgcagagcctggacggctccctccacgtcccgtaagtagccgtctcctcgctctgctctggagcagtttcagtgcggcattgatgtttggcaccagggtatcaactccgaagtgcatcgcagtgctggcaccctgatgtgtttgtgtctccgctgtcacacacttgcagccactgcagtagacaaactcgaaacccagcgtttctgttttggaagagacagggttgtgacgctggtgatgtttctggaaagttgttcctggtcttggtgatc

SEQ ID NO: 27208 - DNA, 669 bp, Homo sapiens; identical to SEQ ID NO: 9910
  chr7:148036392-148037061
  binary

SEQ ID NO: 27209 - DNA, 168 bp, Homo sapiens; identical to SEQ ID NO: 9911
  chr7:148523540-148523708
  binary

SEQ ID NO: 27210 - DNA, 208 bp, Homo sapiens; identical to SEQ ID NO: 24591
  chr7:148841969-148842177
  hypo

SEQ ID NO: 27211 - DNA, 846 bp, Homo sapiens; identical to SEQ ID NO: 9912
  chr7:150671471-150672317
  binary

SEQ ID NO: 27212 - DNA, 985 bp, Homo sapiens
  chr7:155164423-155165408
  hyper
cgtgacccgctccatcccctctttccctgttgcaaggcgagcggaccgcgctgcacgggtccaggctgggtgcccctctcccctggggtaaagaggcagcacaggttgggacagctagatgggggcaatccaggcgtcctgcccacggtttcctgggagccaacaaaggcgccgagacctcacccgtgtgaggcaaccgccccgtggtcccacagagcttctggaagtctgcgtcccggccttcccgatgcaaggcgccctctccacctgcctcggccgtgagcaggttcaggagggcgagaaaggttaggccgagcggaaccgcgcggccagcgttacgcagggtgccctggacacccctaggcgcccacctggacttgttcccacctcctctcgccccttgccttcttaacccgcattacccgtgtaggcctggggtggaatcggactacttgttcgggatttgctcgagaacattctagggagaaggcacgcccggctttgggcttggccgagagtttagggcaggagcgccggcggggagctccccgggtgctggagaatgcgtgtccggaaagaagtagggcgcgcttcgtggatgcaaccagggccgtctcgcgcactttcttcctaccctgggacagcgcctgaactggagctgggcgcacacactttacggagccagctcgggttcttacgccctggctcacccccgcccgccgccccaggatgcaggtgctgcggcgctccctggtagcctcccgcgctccctgggggcgcgctttcctccatttcagggaagtccccggacaggtgcccacgttttacgctgtccggtagaagcccgcgggctcaggccgacttgcgcggccgcttctccccagggagagaagctggagcttcccccacgcggccctaaggcggggccggctgggccggagtgggcgcggccagggtgtcccagcgcgccccctgccgaccgcgc

SEQ ID NO: 27213 - DNA, 967 bp, Homo sapiens; identical to SEQ ID NO: 23352
  chr7:155165412-155166379
  hyper

SEQ ID NO: 27214 - DNA, 982 bp, Homo sapiens; identical to SEQ ID NO: 24598
  chr7:155166913-155167895
  binary

SEQ ID NO: 27215 - DNA, 853 bp, Homo sapiens
  chr7:155174253-155175106
  hyper
cgggtcagacaaaagccaacttgcatcttccgctccgaggggatctgggcagagcccgggtacagccctgcgcggccccagggagaggggggagagggcgcgtgtccccagccctgccaagtggcgtggggagcgcgaggccctcctcggtcagagccaccaactctggtctccgtggacatcccccttcccccgcccgctcccgaggctctagggcggcctcctggccgctgccttctcgcacccagggtcttcggcctgggctccacacctcaggcccctcaagtaatcggcctcttggtggccgggcactgcctttccggctgctctctgcacccgtctgcccctccggcctcccctggcggctacaggcgtccggggccctcgctccccagctccaggcgtcccgggagccaggcgcgcagcggggcgagttctcgtgtccgtgtgagcgcgggcgtgtgtatgcgtgcgcgtgcacgagcgtgagtgtgcgtgagcgtgagtttgagtgtgcatgcgggtgtgaatgtgtacatgtacacgaatgtgagtgtgagtgtgcatgagcgtgagcgtgcgtgtgcgtgcgagtgtgcacgagcgtgactgtgagtgtgcgtgcgtggaagcgcggcggggagcctggctgaaggcctgctgcctgcatggctgtcagagaaaaacagaagtgggagcctgctgcgggctccgagaggacttgatgggagccctggcgcgcgctgggcaccgcgcggtgagtgtcgggggtgggggccgcgggtctccagcagcccctgccctgtgcggaccgccgccccgagggtccctgcttgcgggtccggggctgggc

SEQ ID NO: 27216 - DNA, 1414 bp, Homo sapiens
  chr7:155258739-155260153
  binary
cgctgagtttttttttttttttttactcctatgtttattacattttaatccaacagcatataatctaagctgctccctcatggagagccgcggctgtgccacctgcctgctttcgccatggagaccggagtcaggcctgcagggaagtcggtgcgcctttcccaagtcctctgcccgctggttcctctcgggcctcccgggctctgcgtgccgcggatctggacccggactgcagacaccgccccacgactgggcccccggccagactgttaccccacaggaggagggttccctaagtgtgcagaagaggaaagctcatttataaagtccttgctccttcgagctgaacgacccccgcgcccgaggcctagctgtgtccccgccgggcccaggctgagcttactccacactgctccatagccgggcagagactccgcgagggtctgggagtcctggcctcggaggacccgccgccctgcaggcctgcccaagcaggcgcccccgcgagagtgcgggacagagagggcctggcggggctccttggcgctgagagccctccttctccgctgcacccagctctgccaacggggctggatgagtgggggctggagtcagaatcccagggtctacacccgccgacagcagcaatgccgacccgccctgcctttctcctaaggagcggagggaaggagccatgtgaatgaccccagcctgaccaccaagagggcgccagcatttctgttttcctagagtgaaaaggtcaaatcgatgggggctcctacaccgctggacacaggtgcgcccgggcgtccagtgcgcgcaacacacgcccagacactctatatgcaaatatgcctgccgccgcggagccggccgggaggcagcgtttgttcgctggggttctgctagaagtcattctgtctcccgctggtttaatatccgccctctgcggtctccgctcgcctcggcggctcccgaagcgcccccgggagggtcccggctccgccgaaaactgcagcctgccaggctgagccgccgcgcgctgggaggttaatagcgactgacgacaaagggccaaggtgcaattcctaaagcggggattcgccgggtgaggcagaaatcagcctccggggagatgggtccccccttcccgacgcgcccctgcacacactgctgccccggcgccgggcctccgggcggggacccctcttccgggcatcgcggccccattcggcggagagctaggccctctccaggcctccaagtagggagcggacgtgggtggtggggaagggaagccgccggcgggacggagagtggggtcccccggaccctgggtcgggcaggcctggcgctggcagctctgttgcacagatttgtgagcgatgctggtggccgcattgccgcgcggcgc

SEQ ID NO: 27217 - DNA, 123 bp, Homo sapiens
  chr7:155299564-155299687
  hyper
cgtttctgattcagcggagacgggggatcctgtgtcagagccgtggatcgcagaggcagcgaggctcggtctgcaaacaagacgctgcaaggctgagtgagagagagagggtgtgcgagcagc

SEQ ID NO: 27218 - DNA, 738 bp, Homo sapiens; identical to SEQ ID NO: 23353
  chr7:155302323-155303061
  hyper

SEQ ID NO: 27219 - DNA, 777 bp, Homo sapiens; identical to SEQ ID NO: 23633
  chr7:155581242-155582019
  hypo

SEQ ID NO: 27220 - DNA, 146 bp, Homo sapiens; identical to SEQ ID NO: 9914
  chr7:157151185-157151331
  hypo

SEQ ID NO: 27221 - DNA, 650 bp, Homo sapiens; identical to SEQ ID NO: 9915
  chr7:157202474-157203124
  hypo

SEQ ID NO: 27222 - DNA, 89 bp, Homo sapiens
  chr7:157346655-157346744
  hypo
cggccaggccgggcgccggatcctgcccgctctcgtgccctcctgggcatgggtgcggccaggccgggcgccggatcctgcccgctcgc

SEQ ID NO: 27223 - DNA, 851 bp, Homo sapiens
  chr7:157476570-157477421
  binary
cgcccggccttggtcctggctgctacaagatgagaacaattagcaaacccctttccaccacctaatttcgcgtggtaacaaaatggatttttccccatgaatgcctggccggcctattcattatctctcttctattagtaattttctgctccgtattcagcctcccaactcttcatttcctcccgtctcccagcgtacacagtgcctcttatgtcaggccgggcccgtttttatcttgtaatcataaaggccaccaaagcaattatcgccggtcttgactggaaaagctggtcattaattagcctccttttgccttcggtgcagcggattagctggtgccgggactgagttaatggaaacgcgggttaaatgagaaaagacgcccggattttcctgcctggatgcgcggctcggaggaggaccgcgaggttctccagcggcgggaggcggtggagccgccgcggagagggagggaggctttggagagggagggaaggaaagggggagggagagggaaaggggggagagggagaggaggcgcggggtgggggaggggagtgagcagggagccgggagagggaggaggggcgggaaccaggggagcggcccgaaccccgtttggtccggaccccgcagccaccgctgggtctcgccgccgggtcgcccttcgcgtggagatccggtccgcgccccctccccggtctcctcccctcccctcccctccgcccccctccctccggcccacacagcctcttccagaaagaagtcactctagagccgcgcgacccagccccagagtccgccggggtccgcccaccgggtctcctgcgcgcccctccccgcccctcccc

SEQ ID NO: 27224 - DNA, 250 bp, Homo sapiens; identical to SEQ ID NO: 8686
  chr7:157589680-157589930
  hypo

SEQ ID NO: 27225 - DNA, 1387 bp, Homo sapiens
  chr7:1703861-1705248
  binary
cgggctcggcccgctctgtctccctgttccctggaggtctgggcgcccccgcgcagggactaagggctggacagccgcaggcaggggctccgtccttggcctccacccttcgtgtccagcaatcccgggagcaggcggcggcacttcctccatgccccggcctcaatcacggtctcagtccccccaaccccgtcctgcaggaacaagtgtggtagaggctcggggtcggagggcgggcggccgtcccgcgggctggacggagtttctgggctgcggagaggccgttggacccacgtccggacaggagccccgcgcgcccatccccggcccggccatcctcggggcgcgctgtctgcggcctcccgcgccacccccacccctgtcccgggacctcctccgggaaagacacccggggagcagccccctcccctccagtagtcccctcccctcccctctccctgccctcttgacggtgtggggctccccggccggaggggcgcggcgctggcagcggggtccagagtgtcgcgcccagcgcgcgctgggggtcccgggctccgcagctccgcacgcggccggtttgtgaagcggcgcgcgggggcttagccgggcgagggcgctcttgagcctggtttggaatttttagcccacacgaaagccgcaggctggggaaggggcgggtgggagcgggagacgccctgggaagccgtgagaccgctcggcgagggctcgggaccaccagggagcgacgggggacccctcggctcagagcccgagggcgcgatttcggatccgctgggattccggaggcacatgaagggagagggaaatccgctaaaccgaaccttccgggaatcggaaggcgccgggccgctcccacgcctccccctcctcccggccgaaaggcggggggcgacgcgcaacggggagggaagggagggaggggtcggcgaccttaggggagggcgagtctctggggacgcggggccgccaggggcccgacgaccctctcgctccacctccccgcccccaagtgccccgctctccccccgccccgcaaacgcgcgtcctgcgggctgtgctttggccctcgcggacgcgcgcgctcacagagggtctgacttggggtcaacttccacgaggttgccgggcgcctgtgagcacagccgtgtccccacccaggggcccacctcccagcgccaccagggtcccgacccccagaccttcggacgcttctcttccaaaccgaagcctgggagcctctgggtggcctggggcgggggcagggggcgagcggggcgggccaggaggagggggcgaggccgccactcggcttcccacgccgcccccgcggctggctccaacttcccctccggagcccccctcc

SEQ ID NO: 27226 - DNA, 1036 bp, Homo sapiens
  chr7:19146849-19147885
  hyper
cgctgtaaatttcctatacaaatctcaaaatttttcttagcattgtcaactaccttcttggagacaggctacagcgcttctaaacccaatacgcttttctggagtcctcggaacagctggccggggcttttagcacacgggacgggaccttcgcctttgcctgtttttttttcgaccaggagaagcaggtgcgagagtctggggcttaggaggtggaaggcggggaaagagaatccactaggtcctcgtgtagagaacaacagtcgctccttagatattactccaggacggaaacctgattgcaaaccgctgttccttcgaaacttgcaaaacccggaacagaaaactcccgcccagccaattttagctctcgctgaactctcccgcctgcgttacgtttgcacagcaactctttgtaaatgtccgagtcctctcggaggaaagatcgttagggcgacgagaacattaagaggggacctggagggcagatatcctcgatcccaagagagcaactttgtcgcctcagaaaacacgccaacttccctcctgctctttccttggtcaactcagaatcaaccgattgtattgaaatctcctgaaatcccgaacagggattggcccagtcggcttctgaaaccgaggccggggaatggcaggaatggggggcagagaggatcggaaagaagagtccttcccccacagacattcccagctgggacacgagctcgctcgcagcgcgtttatggaaagagggggcgctgggaaccgcgctggcggcgagcagactccagggtcgagattattcgacacgtgtcttttattcctcacaatccatttcttacgggtgatttatgaacgaatctctttgatcagggacggttttatctgtccactgctacagatgacagatgcggctgctaaaatgcctggtccccgctgcctaaaaggttgctcccccccttcccaaatgctgttgctttttctctggcggtccccaccccctgcttcttcgttctccttccctacccccaacccc

SEQ ID NO: 27227 - DNA, 1495 bp, Homo sapiens
  chr7:19156344-19157839
  binary
cgcggacatggaccaggccccctccatcctccagaccgagaaggcgtagctgagccgctcgtgagccacatagctgcagcttgccatcttggagtccagctcgtcgctctggaggacctggtagaggaagtcgatgtacctggccgccagcttgagggtctgaatcttgctcagcttgtccgagggcagcgtggggatgatcttccgcagcgcggcgaacgcctcgttcagcgactgggtgcgctggcgctcccgcacgttggccatgacccgctgcgtctgcagctcctcgtaagactgcggactcccgccgccgctgctgctgccgccgccgccgcccgcgccgccgccgccgccacagcccgcagacttcttgccgcgcttgccctgggccgggctgcccggctcgtcgccgcctccgacgcccccacccgcggctccgccgggccccgcgccgccgcccgcgctgcgcctgctgctgcgccgcttgcgtcccccgcgcttgccgctcggcggctgctgccggtctggctcttcctcgctgttgctcaggctgtcgtcggccggcgagactggcgagctggacacgtcctgcatcatctctcgagcggcgacgcgtggcctcgcgggcccggggcagaggagaagagcggggcgcctcagcccgccagcttcccccgcgcgcggcgccggcccgggcgatgcggcccgcggaggagagagcaggaggacggacgggagggacctccgcggggagggcgcgcgggggaggcggggagggaggcgggagggggaggggacggtgtggatggccccgaggtccaaaaagaaagcgcccaacggctggacgcacaccccgccaggcctcctggaaacggtgccggtgctgcagagcccgcgaggtgtctgggagttgggcgagagctgcagacttggaggctcttatacctccgtgcaggcggaaagtttgggggcagcagtgtcattggcctgacgtgaggaggagggacttttcgaagttttataggaaagtttccgctttccagtccccctcccccgtcccacctcccttcctcggggtctaacaattcgtcctcccaaaccattcaaaaacgacctggcccgggcggccggcccctccacccgcctcctagccgccctcccccttccctccccgtcgccttcctccggcgggcgcggggcgatttccttccccgccggagcgtgcgggcagcgcccccgaaccctagcgcagcccaggaagcggtcggaggagactgtcctggccgcggtggcagccccatccggagtggctgtgacagcagcaatggcaacagcttctacacagtgggtgatgtctcatctcgcccaagagccctctaggtccgtggggccgatttgggattgctggggctgggggggtggtgtggcgcggggtgggggggcatgccaagaaaagtgtcaaccgcggagcccacccaatggtcaggtagac

SEQ ID NO: 27228 - DNA, 1247 bp, Homo sapiens; identical to SEQ ID NO: 25862
  chr7:23052818-23054065
  binary

SEQ ID NO: 27229 - DNA, 129 bp, Homo sapiens
  chr7:23569158-23569287
  hypo
cgtgagccactgcgcccggccagaaacgattttaaaaagggcatctccagacaagcttctcgcattgttctaattctttaaccaattacaaataaagacaattatctcatcctataaaaactaaaagac

SEQ ID NO: 27230 - DNA, 684 bp, Homo sapiens; identical to SEQ ID NO: 25870
  chr7:25896671-25897355
  hyper

SEQ ID NO: 27231 - DNA, 824 bp, Homo sapiens
  chr7:25901811-25902635
  hyper
cgtttccggaagacactctacacctctccgcctcttcataaatatttaaaccgcttctttctagatttgtcatttaaatctactagggaatgtgcctcaagggctcatctttcactgggtcgctcacacagaggtggggcgagagggaggaggcgcattagccctgcgctctcatttgcttaaacggccttcttacgtcatcgtaagcctaagccaatccgtgaagtgcactttgacaagctacccgcccctaatttgtcctttcaccgccagcctaagccaatagtgtggctgcatgtaaatgagaaaccgcgagcatctccccccgcccccggctccgcccaatttcccacctcttcccggagcgcacagacgccagctgagtgggaggggcctagctgcgggcggagcacggaggaggaagggcacgaggaagaggcggagcgggccgaggcgcgcggagctgggtttgctgagtgcttccttcctcggccccacctcccgccgggcaggatgccgtttgatcattggctggtttaataaagagggcgtgtttattttgcataaatagtgggcgggcacccagggctgctttgtaactcgagaacccggtgtcccgcctgtctcccggggggtatgggcgggtctcccgccagcctcgccagactgagccaagggcctgaaggaaataaatggctttctgaaaaaattcgtcttaattcgcccttttgagagaattctgtttctaaatgcatttttttcgttggttcttacaagtcgttaagagttgtaacatgaaataagtagagatcaccaatctatcc

SEQ ID NO: 27232 - DNA, 970 bp, Homo sapiens
  chr7:27135555-27136525
  binary
cgaagcccggcgtgactgtgccaactttctcacttcctccatggggccggagaagaaaaatgatatgaatgtacagtgcgcaagagggggggcgggagggcggaggacgctggaggaggggcacgtgacggtgtcagccaatggctgagcctcctgcaaaagtttgccggcttccgcagtgatggatcaccgttttagtggcatttaaatccccggcgctccgccgtctaggtgacgcgcagtcgcccccccaggcagcctaggcggcggcagctgctgcggcgactgcaaaggccgatttggagtgctggagcgaagaagagcaaaagctgcgttctgcgcgcgcccgactccgctgcccgccccgccaggcctccgggaggtgggggctgggaggcgtcccccgctcccgccccctccccaccgttcaatgaaagatgaactggcgagaggtgagaagggaagagggctcccggctctctcggggcgggaatcagtgggccagagctcgccgggtggccgcaagtacgccggcccagcccgcagcgcgcccagccggaaggcggggaatccggctgacaccgcgccccgggttcccaggccacctcctctgttctgaggctgggctgggagaccgtggggctgtgaggagcgcatagaaccgtggtggagggcgaggctgggccaccggctcttcaagctcggaatggagggggaagagcgcagagggctggctgggaggaactcgggtgggcgtgaaggagacgagggcaagaaaagaaacttcccttcttccaggagggtcttcgaaaccctctccccacagcccctctcgtcattagcatggcaatgaggagtttctgtaattcgacttggaggggcggatgagccctggaaactcagagctcgccggaaaaggccgggggcggccgggctcttcttccccaccttccctctctcgtcgctctcc

SEQ ID NO: 27233 - DNA, 805 bp, Homo sapiens
  chr7:27190160-27190965
  hyper
cgtccttctttgccatagccaatcctcctcagagcagccaggcctacaggcctcaggactacaggtagtctctccgattgcagaatcccaaagccagagtgttccctgaaccagcgtgcgcccccagaacgccttgggacgcgcagtttggacagaagcagccatgacgtgccaggcggcctgtgcaaccagtctccatggtgctggagtgggggtgggggaggacccgagtctataacggcgtccagctccggtcaggggtagccgaggcggggagatttcccggccatataggctctgggtgatcgccccccaggtccccttgcgtccccctctaccctgcttgctgggaaatctctgaggggccagtacagcagtcgcgccaggctgcaagaggcgggctgcagctggcgccggtcccggcgacggccacggcgtggcagcagcgagcgccagcacggtcgcaataaataatcggcccgcggcagccgcagtcaggaaggcggcggacctaggatgcaaatgcgccgctttatccgccccgagcgcacgcagagcacgggctaacgtcctaaacatccacagccccttcctatttatcgaatccataccaagatattgtctcaagttggggaaacaacaacccaaacaaaaaacaaacaaaaagaacctcggactcttttcttgtcgctgtccgaggagttctcggggcaaatctggtctgatgtgcacttaggccgagctacagttcgagccaccgcgctacgcaaagccaccgccagcagcacgctctgcgcttcctccc

SEQ ID NO: 27234 - DNA, 88 bp, Homo sapiens; identical to SEQ ID NO: 9928
  chr7:27651058-27651146
  hypo

SEQ ID NO: 27235 - DNA, 60 bp, Homo sapiens; identical to SEQ ID NO: 23638
  chr7:2798471-2798531
  hypo

SEQ ID NO: 27236 - DNA, 982 bp, Homo sapiens
  chr7:28448716-28449698
  hyper
cgtgtcacacggcgctgggctctgcaagctgttgcttgcgcagtcgcccccgccgctgccgctcccgggcgggtgcaccagggtccgcgcgggcggggcggggtcggggcgggaccggggcggggcctgccccctcgacgcgccggccccgcccctcgctccgtccctccccagcggaccgcaatgatttagaagttcaggaatcccacgtgacgtcaccgggggggtgatgtaatgcactctaaatagaatgtattgtaatctttgctcagtccaacgtggtcccttcacccgggctccgctcttgccttctccacacttgtttggtaagttcctaaaaatacggctcggccacttctggggcttttgcatttagccacttttgttgcacttgccgcaggagccatctcgggagtgtacttgtttgcaggggttggttctcggcagcagccgcgaggttacttggtccagtgggcaggtcacagggcaaggagtagggaagatgcgatgcatttttttctggagggtgatctgtgtttgtaaacattttggcggaccagagggaagtccggccccgagtgctggtagactgtggaattcggctgtgtcctgaggccaccctagagaccccgcgccgcgtgagtgccggagcgctcggtggccgccgcgccgcgcgcctggagggatgctaacgtggagccggcgccgagtccgcccggcgtgcgtgcgtgtgtgggagcgcgcgagtcccctgacgcggggaccagttatgaatcgggggtgtgtgtttgcctccagagacctggcaaggtgcggagccctccagaagtgcggtcaagcggcagcggagacggcgagccaggaacctccccccgcgtccccagcttcccagcgtggcggcggaacccccggagaaagtttgcaaacttccagcgggcgcggcgaggacgccgggtcacctagggggcgggtgggcgcgcgc

SEQ ID NO: 27237 - DNA, 779 bp, Homo sapiens
  chr7:33943436-33944215
  binary
cgtcacagcaacgtgctcgcatcagctcctcggtgtgtcgcgatgttggcaatgttgcactaattaagtgaagtctccaaatcactcgaaaaaacgaataaacagtcaacgaggcagggaagggttaaggtgaagctagattaaacctgtcagcaaacagactcatttattttcaaagctgtagtttccacaatggaaacaacccactttgcctggagacccttaggtccgttccgtggggacccggtttcaactcttggacagaggaagtcggtagtccaccgtgagctcaaggacagctagctgatcgtcaggtcccaacacttgccaagcgtccctcactcccacctcgcgccttcgtactttggttacaaaaatcatctctctgcgattgcaccccttttgagtagagggtgccactgcgtggggaggaggcggcgattcagcagggggatcacaggagctgactccccgacacccagtgctgcagaggcgagagggcgcagccgggctgagagagcgacggagctccgagctgcagaggccgccgcgcggcggcccccgccagagatgagcggtggggcgggggttcctccctcttttcgggtgaatgaatgattagtcaaacaccacctccccgccccggtccgcccgagattggaagggaggagtctcggagcgactgttcattttttaaggacgaaaggcgtttgcctcggtacgtttttaaatcgaccttgtgtgtgtttcaacttcggtcatccctagtgtcaggacgc

SEQ ID NO: 27238 - DNA, 308 bp, Homo sapiens; identical to SEQ ID NO: 9929
  chr7:35576961-35577269
  hyper

SEQ ID NO: 27239 - DNA, 543 bp, Homo sapiens; identical to SEQ ID NO: 9930
  chr7:36894954-36895497
  hypo

SEQ ID NO: 27240 - DNA, 1809 bp, Homo sapiens; identical to SEQ ID NO: 22945
  chr7:37487365-37489174
  binary

SEQ ID NO: 27241 - DNA, 947 bp, Homo sapiens; identical to SEQ ID NO: 22946
  chr7:37960179-37961126
  binary

SEQ ID NO: 27242 - DNA, 835 bp, Homo sapiens
  chr7:39453515-39454350
  binary
cgcttcgggaaaataacgagcccctcaagatgccccacaaacgacggtcccctggtccgaggagccgggcagcgccgcgcagccgtctcgcgtgggacccacccgcgggcggagccaggcggcagggctgccccaccgagcttcaccccagcaacccctttaactttcttaaccctgtattccccaaccgaacacttcccagagttcacgctggcagagcccacttcaaaaaatgctgcaggaagccattcacactcattcctatccacgtttttaaaaatgcgaaatagtgatttaaatcagaacagaacctcttccaatgggggtttcctttgcaaccggggcttcgcggtgatttctgtgctgttttgagggcacacacctacataacacgtttgcagagataagggatctcaaactgttcccaaaagtcccagggactcgtaatatgcaaaccgagggcaaatgaacgtgggaggatccgaggcgctcgctgaaggggctctcctgcagtgcccaggcagagggagagtggagggggcggctgtggagtgaagggcggaagtgccctcgccgtcctgaggcctgggaccctcttgatggtaaatggcgctgttgagccccgatgcgcagggactccgcgggcggcggacttgacaggaagctttgctgcggggcggcccagctgcggacgcgcgggacgtcagggccccagcagaagcgccgggctgtgcgtccttaagactgcgggtgcggccccgcccaaggtcgccccgccctccatccttctaccccgcccccccaccacatttctgaaatgaaagagttatcaatc

SEQ ID NO: 27243 - DNA, 848 bp, Homo sapiens; identical to SEQ ID NO: 23361
  chr7:42927739-42928587
  hyper

SEQ ID NO: 27244 - DNA, 100 bp, Homo sapiens; identical to SEQ ID NO: 23639
  chr7:44097742-44097842
  hypo

SEQ ID NO: 27245 - DNA, 1369 bp, Homo sapiens
  chr7:4801650-4803019
  hypo
cggcagggcccgcagggagcagagcaagggtagccgtcctgcctggcaggggtgcactgacctccggttccggcttggtggcttagcccctgtataggggacttgaaaaaagcagctgggtcctaaccagaccccagagtaaccctcttcttcctccactccagccctcaccagccctttgcagctccttgcgacccaagcgagttcatccgcgccggtggtggtcacccgggtgtgcgaggtggggcccaaggagccagcagcagccgtcgcggccacggccaccaccaccccagccactgccaccaccgcctctgcctccgcctcttccactggagagcccgaggtcaaaaggtcccgggtggaggagcccagtggtgctgtaaccacaccggctggagtgatcgcagctgccggcccccaggggccaggcaccggggagtgaggtcacctgcaacgcgggggagtgggactcacccagcggcgaccccgaagctggacccggcagctcaggcggccgcacccacagacggaggagaacagcccgcggcggcctgtgggcatcggcggcacctggacacacccagccctttccatttgatcgcctgccttcccgtggtttaagacaaaaacacataaacaagttcagacaactgattgtatgattctgggaattctttgctttcctttccttctccctcggcaccacctcctctccccaggcctccctgtcgggcatggggaggaggttggagctcagcatcttgaggaatgtgtcaagacagcccctccgctccgcgctgcacggccagccgcctttgtccgggaggacagacagaaacgcagcaaggcacacaccaaggctgccggggaggcccgggcaccggacagatgcctgttgggaagccaggagctgccgagccacggaccacctaacagcctctccgcccggaacgtgacatagagagtgttggcattaactcggggggtgtccgatttcacttcagaccccaagtttttctttgtttgtttaaacatggaattcagacttcattgtacacctgagacagacacaaaagggatcatgtatttttgaggattttacctgttgacgtctgatgaccggccgtaggtccagggttcccgctgggtttaatcccctcgaagagtaaacctgccgctctgtctgataacttcaagtaagagcagcggcttcctgggttggcgttcgcggtggaaggttcctaggatgaaaggtgagcctggatccgccggccgcagacatcgcgctgctggggacgattggggccgctgctctgcagaccagaccttcccgaattatccgtggctccgatgtcccggtgctgac

SEQ ID NO: 27246 - DNA, 813 bp, Homo sapiens
  chr7:50344027-50344840
  binary
cggggtggcagggcgcgcgctctggccacccgccgctctgggcggcagctggtggcaacgcaagggcgcggcgggggcggccggcgcggagggggccaggtacggggcccgcgggcggcgctgtgcgcgcggggcagccggtcggccgggagcgcgaaagcctggtctgagccggctgggggcggggagtgtggcggagaaatggggaacaatgcgagtgagcaacttcaggaagtcattgtgaaagaaagctgggaagagctccgcggccaagttagcaggacactctaacaagtgactgcgcggcccgcgcccggggcggtgactgcggcaagccccctgggtccccgcgcggcgcatcccagcctgggcgggacgctcggccgcggcgaggcgggcaagcctggcagggcagagggagccccggctccgaggttgctcttcgcacccgaggatcagtcttggccccaaagcgcgacgcacaaatccacgtgagtgttttcaaattgaatttcaataggaaaacttggggtaactggtgaatttaaaaaaaaaaaaacacagtaaagaaaagcggtaaggttggtagaccctggtgtcgctcaggtccgcctctcttttctgaggacagtgagagagttcacttctgtcaagcgtctgttgctctgcactgtgccagcaggtgcaggaccaggccgacatgggacacttctgagcagccccgctgtcaccaggagaggagttctagctcccaaccatatttaaatttatgtagacctacatatacccacggaagtcagcctttataaagtc

SEQ ID NO: 27247 - DNA, 484 bp, Homo sapiens; identical to SEQ ID NO: 22948
  chr7:63767582-63768066
  binary

SEQ ID NO: 27248 - DNA, 110 bp, Homo sapiens; identical to SEQ ID NO: 9938
  chr7:64254700-64254810
  hyper

SEQ ID NO: 27249 - DNA, 167 bp, Homo sapiens; identical to SEQ ID NO: 23643
  chr7:6443294-6443461
  hypo

SEQ ID NO: 27250 - DNA, 425 bp, Homo sapiens; identical to SEQ ID NO: 24649
  chr7:6443704-6444129
  hypo

SEQ ID NO: 27251 - DNA, 690 bp, Homo sapiens; identical to SEQ ID NO: 23364
  chr7:64734140-64734830
  hyper

SEQ ID NO: 27252 - DNA, 729 bp, Homo sapiens
  chr7:64974264-64974993
  binary
cggcgtcgggggctaaaagccgcaaaaagccgcggaggggggagcgaaaagcagtgggagctggggcaaaaaaccacaaaaagccgaggcagcggcggcagaaaacctcggcagcgggggcaaaaagctgcagcggcaaaaagcggcgacgggggcaaaaagccgcggtggcaaaaatgcgcggcggcgggggaaaaagccgcggcggagtggggcgaaaagcagtgggagctggggcaaaaaaaccacaaaaagccgcggcagcggcggcagaaaacctcggcagcgggggcaaaaagccacggtggcgggggtaaaaagcagcggtggcaagaagccgcgacggtgggggcaagaagccgcggcggcccaggcaaaaggccgcaaaagccgcggcgacgggggcgaaaagccgcggcggcggaggcaaaaagccgcgacggcagggggcaaaaagctgcaaaagcctcggtgcgggtgaaaaaagtcgcggcgagaaaaagccgctgaggcgggggcaaaaagccgcggcggcaggggcgaaaaccagcaaaaagccgccgcggtgggggcaaaaagcagtgggagctggggtaaaaaaccacaaaaaaccgcggcagcggcggcagcaagccacggcggcgggggcaaaaagccgcggcggcaaaaacccggggtggcaaaaagccgcggcgccgggggacgaaaagcttcaaaggccgcttcggc

SEQ ID NO: 27253 - DNA, 98 bp, Homo sapiens; identical to SEQ ID NO: 9944
  chr7:66204269-66204367
  hypo

SEQ ID NO: 27254 - DNA, 107 bp, Homo sapiens; identical to SEQ ID NO: 24652
  chr7:66293261-66293368
  hypo

SEQ ID NO: 27255 - DNA, 123 bp, Homo sapiens
  chr7:7102882-7103005
  hypo
cggggggagtcagtgatattggcaatatcacagggtgtgtacaccacacctgttatattgttttttttttccggcaatgaagaaattgatactattgtcaaaacagaatgcgcggtacacccc

SEQ ID NO: 27256 - DNA, 229 bp, Homo sapiens
  chr7:76145303-76145532
  hyper
cgtcaccccagtaggctctccaggacccaggagcctccatcacctggaaggaccctctgtgcaaaacctcaagcgtccatctgtgcacaaggccggtggttcccgtcgtcgccactcggggtcgccggtgagccgcagccaggccgcctcacggccagtgtgcatgctcgctgctattcgctgccccttctgcctccgaggcggtagcagatgccacgttggcggggtc

SEQ ID NO: 27257 - DNA, 940 bp, Homo sapiens
  chr7:8473085-8474025
  hyper
cggagcacagaggccgagtctgggagacgctggttgagtgggaggtgtcagtagcgagggaggtggtgacggctcgaagcatcccccgtcctcctcctcccccttcacgctcagcccagccggcggcgaggagtccagaggccaaggtcgcccagtcctctcggctgtctcgagctgaatggctggcagtctgcggctcccccgcctccggcccggcagccacaggtcggaggcgcccggcgtcggcgctcgaggccggcaggggcgccctgcaccctcccgcgcccttccccgccctacgcgactcccggctgctcttcccgccactcccctgggctttgcgatcttccctacgccccccgggaagggggcgctgcggccaccgaagacaccgcgggagccacttgtccctgtgggcccagcccgcgagagcctgagagccggatctgtttacacagggtactaattagtctttgaggaatcattcacccacgtgccaaagtaattgtccgtgtcaggaaggtaggcgtgccaagccgcggctctgcggagaaaccacgaccaccgcggccgccggaaacccaaagcgctccagagcgtccccgggtggccgggcagcaccagggacagcgcccgggactccactggggaccggctcctgggcttcccagcgtcgcgggtagaggtacagctgctccgtgtgccgcaggctccagattctcgccaccccacccctccctcagaaactcggactgctctcgtctgccgtgtggttctcttttcttccgaaaggccagtgtcttatctctccacttcaagtccagaggacttgctcagtctcctccccttaagtcatttccaccatcctcaggcagctgtgggaagccgagagtcctggactgttcgtccgggtgccagcgctggcagtcccagtccgtcc

SEQ ID NO: 27258 - DNA, 752 bp, Homo sapiens; identical to SEQ ID NO: 23366
  chr7:8476320-8477072
  hyper

SEQ ID NO: 27259 - DNA, 1117 bp, Homo sapiens; identical to SEQ ID NO: 23367
  chr7:87229392-87230509
  hyper

SEQ ID NO: 27260 - DNA, 1363 bp, Homo sapiens
  chr7:87563203-87564566
  binary
cgatgcagatgaatactggctgctgtaacggcccagttggtgcatctcggatgccaggaggcggtccagtgctgatctctttcttttgcccttccctcccgcccttccagtctgtgggatatagaggacctcacagtcacgaggtcgcgacggtccgtgccgtcgtggagacaagcgggacacggagagagaactacatttcccagctgactctcctgcgcgcgcccttgcctgcgcgcggggggcgagtgcaccgggcgctcgctccctgccgagctcttgtcgcccgcccgagcctttgccaggggatgaggtgggaggcgctagaaaccacttagctacagccaaccgcccaatgcagcactcgctcgctccccccgccagcggaagcgtccgcgaagcacaatgcagcactgagccgcggtggaggttgcagcgccacggccgccgcagcaccggccggggctgggtggaggtggccgcggggaccccgggggcgcggagcgagggaaacggactcggcggcgccggcatgaggagctgagcgtctcgggcgaggcgggctgacggcagcaccatgcaggcggcagtggctgtgtccgtgcccttcttgctgctctgtgtcctggggacctgccctccggcgcgctgcggccaggcaggtaagttagccgtcctctgtgcctttgggccataccatttcccgggaatctttggagccctcaggcgtattgaaaagggggcatccccatttcccgagtgcgcggggagattttttttttttttttttttaattcgggagggtggtgagaagtggagcaaaaatatatgtgtggaggcgcgcagatgcactggaagccttcggtcaaagcctgtttttctccttctgaagaggaatggggagaatgggaaaggggtgccctgcttctgggccccgctcctggttgctctcggatgagctggtccaaggctctcgggctggtgtctctgcgtccttcccagttgggttccgagagggagggggcggtggggattttcgtaggggagacgtaggactgcaggatggaggagtgagggtcagggtcattattttcgccttttctctccactccctcctttcccggttcctgcctggaggagacgcctcattgatggagctagagaagaggaaggaaaaccgcttcgtggagcgccagagcatcgtgccactgcgcctcatctaccgctcgggcggcgaagacgaaagtcggcacgacgcgctcgacacgcgggtgcggggcgacctcggtggcccgcaggtgagaggctcggtccgggaggtggtcctccgcgcctcccggcccacccgagaccccacgattgc

SEQ ID NO: 27261 - DNA, 1258 bp, Homo sapiens
  chr7:93203842-93205100
  hyper
cgttagtctcagtcctccctctccgcccctctcctggttttctgacactttaaatctgtcttaggtggttcagacccaagtctaggttgtattatcagctaaaagacaactgttctttcccctggcttgctttctacctccccagagtccaggaggctcaccttcccggcgccttcctgcgctctcccagctgtgaagctgtgcgcaaacttctcctgacttaagagtctcaatcctagcctgcgctcccgccccacccccgcccgcctcccgacaggcggcagaggaggtggcagcagaattgatgagagccagccccccttcccggaccccgccaccccagtcagccccctcctgtcccaggagagggaggggcgagctggtgagctccgtgcgcctcgcgccagccccagtcgccccggcccgcgagtggggctgcgctcgcggctgctgtctcgctccagtcagggctggggctcaccctgcgagtccgggagactaaagcgccgcgtaaacacaggaagcaggcgagggacccgagttagaccttgagtagggagggagaggggggcgacagtctggactgggagacagctttctgggagccctgtcccctccccggagaatgcaaattccggagggaggtgagtttccacaagaaccttatcccagagacattgtgaccctggcttcttcagccgccactccggggacagcactagggagcctgtggagggagggtcggtagtgggctaggtagtgaaagtggggtgaggacgtgggaagacggctggctaagagctggggtgctaaaaggaaaaaagtgctgagaggaaggagatgagaagagacaccttgggggtcaggcaagccctgggaaagcgtccggagttgggcggctgtaggctggaggcataacttggatttggagaaagagtgccctccgtgtaggggactgctggtgggcacagtgttttagggtgaatgaaaacagagaggatggcgagggaagacggggatatggggtgcctgacttggtgccggacactgcgactcctcttctttccccctaaagccctcgatgtcagcaggagtccgggacaatccaataccaggcggggcgcagcggaggctggcaggcacgccctgggaggcaggcaagttgattccaaggacgagtcaccctcaacctcttttagcccacaactgggtggatcaaggcaggagccaacacttttttccctaactctgtttaggc

SEQ ID NO: 27262 - DNA, 1084 bp, Homo sapiens
  chr7:94536809-94537893
  hyper
cggagccaacacccgaacaggaaggggccttgccccaggccggagaggcccctcgcccacggccgagggggtggggcggcctcgcctcgggccggtgcttttcgcccttccttggccgccagaggctccctctctctccctctcccgggattttgctgccgggctccctctctctgcggccctagagttaatcccatcagccgaggtgaggcacctgttaccccggccttcctcacccccgcggcctctcctccattacaccgcggccgccgaaacggcccggcgtggcgaccgcacgtgggccaaaccccttccccggccggcacccctggccccaggccggcccgagcgtgcgggcgcgtcgctgctcgggccgccgcccgcccgcaatggcgttggggagcgcagcgcgcctcccggggccgcccgccgcgggcagggagcgcctgggggccgacgcgcgagtggaagcggccgccgcagccgccctacgcgctgcgccgtgaggagcgggttgcggtgtacccagcgggccggcgccgagccgagccgccgcgtccaccgtggggcggggggcgcctgcgaggagggggtgggagccgcggcggcccgaccctccccgcccgcggcgctcccgctcgggtaagggggaggctgagcgcggggcgaggagttggggagggtggagaggaggaaaaaatcggcttgtacaaaggctgagttgcaggctgggggtgggggtgggttgtggtggaggagcaataggttgaagatcggaggcattatcagtgggatctattgtttcctggcacattgggaggaaaaacaaagggatttattttcattaccctgtaattttttttcttttctatttttttaaatgtggccagggagctcgtctctctccgtgtcacagtgggatccgcctggcagccgccgggagctgcagccaatgtgttaggacttcaggtgcttcttggcacaaagctagactgcgacctcctaccatagcgcttggcgtcacctgctctcccggtcctgccccagggccgagggattgcgtcccgaaccgggcttgggaatc

SEQ ID NO: 27263 - DNA, 192 bp, Homo sapiens; identical to SEQ ID NO: 9957
  chr7:987241-987433
  hypo

SEQ ID NO: 27264 - DNA, 954 bp, Homo sapiens
  chr8:104512485-104513439
  binary
cgcgcgggagccctgtgatgcgtcagccggcgggacggatgagttgcttctccgggaaaccgtcctcgcttcctcacgaccctctcggctcccgcctgggtgcccctcgggccggcagtactccgcctccgggcgctcgaagcgagttccccgggggcttgttcgcaggcaccccttcccctccgaggcggcgcgcgcgctcccggccctgaccgcggccggacacactcgcgccccggtccgcctgtcgccctcccgcctgctccctccagtcaccccacccttagctgtccccgccaccttactccaccaccctcccccgcctctccgcgcactccgcgtcccggcctccagttcccctttcccttgaaccgctcacttcacagcccttcgcccccgggaagaagaaacatttcccgaagcgcactcctcagccctccttccccacgcgctcgccctcccctccccctgcttttcttgggggaggggggctgtcgccttggattgaaggccattgatttgtatgtatttgtcccagcgctggaggctgccccagccgccgcgccggtgccgccgctgccagtggagttgcctccccgcttccctagggtggttcggctccaccaaacatgtcggctcctgtcgggccccggggccgcctggctcccatcccggcggcctctcagccgcctctgcagcccgagatgcctgacctcagccacctcacggaggaggagaggaaaatcatcctggccgtcatggataggcagaagaaagaagaggagaaggagcagtccgtgctcaagtaaggacctggctccatattcccgcctctctccctgccctccgccccctcgcccactgccctgcggccgcctgcgcgccccagttcgccgccctccctcccgctggcggcgcccaggccacgagggctgcggccagcgccggccgccc

SEQ ID NO: 27265 - DNA, 891 bp, Homo sapiens
  chr8:110986505-110987396
  hyper
cgagcgccaagggctccccttcaccctcgctgcagaagacactagagtccagggaggtcagggagccgctgtccagcggcgagtccagcagcgctctgccgctggaaggcatctctaacccagtcgccgcggcctgagggcgccacaaagttggggacacgccggaagctttggtcccgcgagggcggtggcacggcccctggtggcggccgggattccccgggctcccgaaggggttacctctccttggcgcaccctctccacccgctgtgcgccttcctcctcctgccgctagggagccgggagtgcgcggaagcagcgcacaagtggcagaaagaggagacagggagcagaggaagggtcgcgctaagagagaggatcaggtgaggtccaagcccgacacagtccctgtgcacactgccggtcgccctggcccttcccaaacgttgtcaccccgcctcccaacttcgcaattgcgattcccagcccaggaggtgtacagattgaatgactcgctacttggtgggtggaggggttggggaagggaggaaggagggagatgtggggcggaggaggaggaagaggagagaagatgactcttagctgaacgcaagcaagcaagcaagcaagggggatggcgagactcactcctgcccgcaggagaccaaaacaaaaagttcagaaagcaaaggaagtggtaaccgggtcccttccaacttgagaatttatattcctcccttttcttttactgctgcttcataggcctcccccggggtgttcgctgggggtgtgagcaggtgggggagggttctctgggtgagggggccgcaccattttctcccaattcactctcattctagtctgatgatcactgacgctccattttcttcc

SEQ ID NO: 27266 - DNA, 871 bp, Homo sapiens
  chr8:114449549-114450420
  hyper
cgtgacgataatgaatcgggctccatcgatgcccacgtcgttataatgggacatgtgttactactgtagttgcagtatatttcaggcaggcttctcccatttattatcctgtgatttaattgaaaaaggaaatcacagagaattttctcaataaattctgccttcacacggaaaagaatgtatttgaacacatgtatttacatactcaaataactacgtgtaaacccttcaccgggtttttatgattcgggaaacggatttcatccgtggcctgggcgggggtggggtggggagggaagtcaatgtcgtttcctcaaatagttctccctttcatcctcccaacccccttttcagtttgtgtgtgccgcagttaaactactttatctgtggtagttatctagaacaaacccatttgtcttaattctgaatcggtaccaaatatgtaaataggaggtttctttcaaaacgaaaaatgtatgtatctatacatctggatctgcttcccccatgcaccacgcaagggttaagattgcacaagggaagagttcttgcgccatctactggccgtctccgagccgcccgttcttccttcgcatgtataagggaccctgtttttgccatcccttggtgtcaggggagctgtgtccccgggaccagtatgtcgtgctccttgatttttttcgaccacggtcctggcccaaatctttcaatgaacaagttccttagattaggcaactgattggtgatctgaccttttcgggaatctggtcccctctcagcagtggggagtgccacagcgctagttctgaaacaggatattgctgttgcgtgtggctccatttaactgcctcaggctatcatgggcgtgagc

SEQ ID NO: 27267 - DNA, 596 bp, Homo sapiens; identical to SEQ ID NO: 24658
  chr8:121823361-121823957
  binary

SEQ ID NO: 27268 - DNA, 638 bp, Homo sapiens; identical to SEQ ID NO: 23377
  chr8:124172800-124173438
  hyper

SEQ ID NO: 27269 - DNA, 132 bp, Homo sapiens; identical to SEQ ID NO: 9961
  chr8:126042734-126042866
  hypo

SEQ ID NO: 27270 - DNA, 340 bp, Homo sapiens; identical to SEQ ID NO: 23645
  chr8:126044399-126044739
  hypo

SEQ ID NO: 27271 - DNA, 798 bp, Homo sapiens
  chr8:12989380-12990178
  hyper
cgccccaggggctgtgcgctgaaggacgctcgcggacgcagcaaactacacgcagcagggtgctgcagagaggaggggtgcacctccttcggagggatcaaaggctcgccccaggactctggaggtggggacagcgacatggagtgggggcaggcttccaagaagctgtcgccttgttacgaaaatagtcgggtcgggaggcgagcttccttcctctctccggcccaggaactcgctcctcggcctccttgtccgggtcaagggggtgggcatccccaagggggcatttcagggacacgattcagcgacccatctccgggaaaaaaaccaaaactgtgtgtgtgtgtgtgtgtgtgtgtgtgtgtgtgtgtttcctagcaagaagcacgtttgcaagccacggggcttgctaaactaccccaacactctccaggtacctgcggccaccaaaccgagacttccctggccaggtctgagttaattcccagcgcttaaagtatcttacccaaaaatggttgaaaaggaaaacaagtttttggtgaactttcaggcagtgatgaaaaaaaaaaatttccaagcgccactagggtctaaaatgttcccaaacagtaaactctcccggagttcactttgattttggactaagctggtgaatgacaggagatcagtacgagcgcagagcagtccccagaggaaaggaaggtagaaggcggtgtcgccgcgcccctcgagccagagccgcgagcccccgcccggctcaaggaggaaagtgaaccagggcttcccttcacgggttgc

SEQ ID NO: 27272 - DNA, 925 bp, Homo sapiens
  chr8:132051918-132052843
  binary
cggtgaagaagcccagcaggatgcccttgagcgggtccatgggggccgaggccaggctcaagtgtaggaccaagagagtgagtttggtcagcacgtccagcacgttcatcaccacttccgatttgcgcctttggcccaagaaatagcgctggtagaggcgttccaaatcccgagatttgaaggagttgcgcagggtggggaaaatgacccctcggtagctatagcccccattaagaaagaaatccgagttgctaggggcacagtcaaggtgcaggaagcccaggtcgcccccgcctccgctgccgctggcactgccgctcccgctgcgttccgggaagactttggtgccgcaggtgctgtgcgctcgctctcccgggcccagcgagtagaggggcagcgccgagtcgcctgacagctgcggcgcgtggtggttggggccgccgcccgcagggtccgaggctttgcccgagcctccactcccgctgccgctgcctccccggtgcccgtgaatgaagcgctgctccgtgatgtgtcgcaccgccgtctgccacagcagccgctgcggccgggaggcgctcctgccgtcgccggccgggggcgtcgggtggatggtgtagagttcctcgctgcctgtaaggcagcgcacatcggagagctccatggctctgggccgcagggaaggaggcccagaaccttggggaggcagccggaggaggggttcctaaagactcaaaggcggcctggtaggagcttggcaaggatcctttttatcctaggctgccccgttgcaggagccctgcgctagggctccctgtaggtcgggtcatactgtgcccaggggcaaagggcacctggaagatcgcggcggacctcggcgtccttgcgtgctgctctcccgccagccggcgcagcttgggtacgcagc

SEQ ID NO: 27273 - DNA, 756 bp, Homo sapiens
  chr8:136469763-136470519
  binary
cgggactggcggggatcgccgtggactgcctcaggggcgccgcagcccgctcggcccgagggcccgcctaaccgcgccgcccgcgcccgctcctcctcggcccgcgcccggagcgcgggggccgccggcgctgggtactcggcggccaccggggatcggggctgagcggtcggttcccgcccccgtgccgccgccgccgccttccggccgaccgcccggcttggccgctgctgccgcgtctggcccccgggtccccgccgctgggggcgcgggcggggtcgggggttgccgggcgccgccccccgtgcgcctggagtccacatcccgggcccggcggccggcgagcatggaggagaagtacctgcccgagctgatggcggagaaggactccctggacccctccttcacgcacgccctgcgcctggtgaaccaaggtgaggcgccggccgttaactgccggccggcggcggttgggggccgggtggaaacgcgggggcccagggggcccctccgtgccctctgctgtcagcggacgcggcggagacggaggcccgggtggcccccggggtcgtttgcacggggacctgggaggctgtgggacacctaggggaagaccctgatgtgaattttggggacttggaaggagaaggctggggcgcatgggtgagacttgaaggaaatctttggggactcgggcacacccaggggaaacttctgggtgggggacagcgaccatctgggggcttcgttgggaac

SEQ ID NO: 27274 - DNA, 242 bp, Homo sapiens; identical to SEQ ID NO: 23379
  chr8:140643192-140643434
  hyper

SEQ ID NO: 27275 - DNA, 82 bp, Homo sapiens; identical to SEQ ID NO: 9967
  chr8:141624866-141624948
  hypo

SEQ ID NO: 27276 - DNA, 104 bp, Homo sapiens; identical to SEQ ID NO: 9968
  chr8:141634072-141634176
  hypo

SEQ ID NO: 27277 - DNA, 934 bp, Homo sapiens; identical to SEQ ID NO: 6626
  chr8:142235190-142236124
  hypo

SEQ ID NO: 27278 - DNA, 1499 bp, Homo sapiens
  chr8:143531858-143533357
  binary
cgctggcgggggtctaagggagccccccatggcccccaacagccacacatagacgcagcaggctccggagagcccccgagcgtgtccccctcctgctaatcacgtccagggccccctacagacattgtaagggcccgagacgtcctccccccacgcacagagctcggggcaggcaggagaaaaccccagactccttctcgaagccctcgctcgtagaagccctcgcctgtagacctggcattggcagtggagactccctggaggtactctcccccacttcgggcggagggctatttttgcgccccccacccccacgcgaacgcctggctcttccctccttgtctacctttccactgggtcggacaggccgcgcggataagccgctctcaactttgggccggccctatgccgtctccgctccaagcgccgagcactcccgggcgccgagcactcccgggtccgcgtcgccggtgagcagaggccgccggccctccaccgtcgccgcgctagcttggagccgcgcggagctgcctcgaggaacgagcacggcccccgccccctcctggggaggctgggagctctggacccggccaggagccctctccctaggtccccgcggccccctgggcgaggtagagagctcctccggcctcgggagggggcggcggagctgagaatcaccgcgaagcgatgcgaccgggagggcttgacggaggctgcggctccgagcccgcgtccctcctcctggccgcggcggctcctgcttggccactccccggcagcctgaagagaacgcctaatctggcaccccagccccaggccgctgggcaccttacccctttccacttttattttgggcttctaagtttcttggagcgcaggcgcctaggctgggacccgaagagccctaagccagccctctttcagcacccgtccccgccgcgacctccccgttcttcctccgggtctggggcgcagattcctgggctgcaactccggagtagttgaaaggcaggaaggcgtgtgggcgggtagggggcctgcactcccgccccagaggagccgcttgtcgtttgtgttggggagggagctgggaggtctgctctcccgctccatcctgggaacccacggagaccctcggtactctccccacagacacaaacacacgccccctcggagcgagagccgccgcgggggaacagcagaggccgcgcgggcggaggcgggggaaaggggagctgggtcccttttctatctgggagggaggtggtatacggtgtgtggggtctggggaggcgactgtcacgtctcctagaaccctcatgccttccactcgtctgcgaccccggctgccgaggaggcaacgagggaggtcgagccgctccctcccgtgggcggcagcgaaactctgcgcccgcacgccggggtgccgccgagtccggctttgagtacccagcaaggtcaagcaggcgaaggagggggcgggggttcctgggcgc

SEQ ID NO: 27279 - DNA, 882 bp, Homo sapiens
  chr8:143533861-143534743
  binary
cggcccctctcggacctcggtggccgcgtccgtgaaatggggacgcgggctctgctctcggatcccttccagcccccgaccctccgcacttgtcccgagatccaacgtgcccggtccgcagcgtgctgggtctgcggcgtcagggtggcccgagtcccgagaccatctgcgcttgcggacacagccgcggggcctggcatgaagggccccagggagggcctagcaagcgcccggggtccgagcagcctcctgcggcgtcctccgcccccggtcggcccgaccccgcctccgggagtgggtcgtggggcgcggagcccgtcctccggggacgccgcggggctccaggcccaggcggccggcgcggggccgcagtggcggaaggcggagggccggcgcgctgccgctgactgccgggagagggcgcccgcaccgcgcccgcgcggccctgcccgccccttccgtctcctccgcgcctggcccgcggctccggccccatcttgggcagccccggccgccacctccctcccgcccgcccgcccgcccgctcgctcgctcgctcgccgtccgctcccgccgccgggtcccgtgacgcgcctcgcgtctcggccggagcccccctcgccggcccggcccggtccccgtgtgcggtgcgctggcgtgagcgcgcgtttgcgtgctggtgtccatgtgtggcgcgcatgcacgtgcgtgcccgtccgggaggctgggggcacgtgtgtgcaggcatgcagacttgcacatgtgtgtgcgtgacgggggcgggtctcgcgccggtgtggccccggatggcaggatttagtcaaaccccgttttaccgtcggctctggctctgggctgcccccgggtctgctctgtgtgcac

SEQ ID NO: 27280 - DNA, 218 bp, Homo sapiens; identical to SEQ ID NO: 25923
  chr8:143993982-143994200
  hypo

SEQ ID NO: 27281 - DNA, 227 bp, Homo sapiens; identical to SEQ ID NO: 23649
  chr8:144414263-144414490
  hypo

SEQ ID NO: 27282 - DNA, 372 bp, Homo sapiens
  chr8:144589930-144590302
  hypo
cgccgggcccgccaggagggcagagacagggggaagggcggggcgctgagaggcgaggccggcgtcttcttgacaatgcggtagcgggtcttgatcaccttgctggtgggtgcagtccgcacggcatgcaggctggacgctgtagagaaaacccagggcacagacatgggtcagggaaggccggcaagggtagggtcagagaggccacccacagtgccagctctgcccaccgcctccgccggagcttgaagaccctccatcgccccgtggataaaaccctcaacccatgtggcacacacatccccagggcgcctggcagccgacgcttcaggagctagccagtgcagcctctgagaggcgggcaccagcccc

SEQ ID NO: 27283 - DNA, 829 bp, Homo sapiens
  chr8:16884178-16885007
  binary
cggaagctgcccttcagtcgtcaaagtgtttgccttaatttgcaatcgttatgacttgagccaaatgcttatacctcatttgtgtcgtatatgtgaagatacaattgcaaatcgttcacgaccttgagtcaagaccttgagtttcctgaggtcaggagaccgttagggaatgtgagtgtcccagacgggcgctgagcccagctcggagacccaccccgcccgtagcagcggcgcgggccccagagagccccgcactcggccgcgcctcagttacgctgactcggctgtgcccgcagtgtcgcgctgtcgcgtagccaggtgtcgccgggctggcgcggttatttatgactgcgtggttgggctgggggttcggggccggggagcagccgggatccgccgcctcttccatgatcttcccgggccgaaccacgggaccgctacgctgaaggtggcgtcgcgggtccccggggccgcgcgagtgtaggggtcgctctcggccggccgcgaagctcgcggcaccgacttctcgcgagatttcggcgacccccccccccgcccccgcccctccgttctctgccccctcccagctctggtgtgggcggcctccgctatggctgcgctgcgaaggctcttgtggccgccaccccgggtgtctcctccactctgcgctcaccagcccctccttgggccgtgggggcggcctgcggtgaccaccctgggccttcctggccggcccttctcctcccgagaggatgaggagagggctgtggcggaggcggcatggaggcggcggcggcgctggggggagctgagcgtggcggcggcggcc

SEQ ID NO: 27284 - DNA, 56 bp, Homo sapiens; identical to SEQ ID NO: 9975
  chr8:21959292-21959348
  hypo

SEQ ID NO: 27285 - DNA, 334 bp, Homo sapiens; identical to SEQ ID NO: 23651
  chr8:23423722-23424056
  hypo

SEQ ID NO: 27286 - DNA, 673 bp, Homo sapiens
  chr8:24814801-24815474
  hyper
cgtgaaactgcggcactactgcaggtattggtttagcatttttaaacctttacagcagttaatccgcctgttagtgtttctagattttcacatttcttaactgagaatgaagccgcagatggctttaacgtgttgcagtgtgtgggtggtggagggcagagaaagagttggaaacacagagactgacttgctgaggcagccgcgcgctccgcagccgggagcttcaagctgcctggatcctcaccaagctaaattcctgcttgctaccaccaaccgcagcacatttaaagtccgctttcctctttttacacatgtgtagcacacgacctgatgatttcgataagccttgcagttggctgattttcagggaagccgctgcggccagccctgagcgctgggtgtggtctctggggaggagaactcggcacccaggcttcttcaggaacggatagaaaatagccatagccgcgtgactcttcccccgatacaatgtaataacccgaaaacagatgcagtcaggaatgcatggatttccttcaggaagcacccagatgcttgaaactggcgcacgcggtagcgcacgtggatacaaccctacggtttgcagggcattttcacacgcatgatgttaggagtcccccaggtttcatggagggattgcagagatttacac

SEQ ID NO: 27287 - DNA, 798 bp, Homo sapiens
  chr8:25903657-25904455
  hyper
cggttccctccccacctctccgttcccgaagcccccggtagtgggcggggagggacgggggagtcgtggaaacttcgcccaccgcgcgcggtcgccgcggtgctggccgcgggctggtggccggcaggcggtggcagcagcctcaccgaacagctgaaaccctagacggttttttaactgcgcggggctgctcgcggtgcctattaaacatcctcctggctgggtgtcattttcttgcttctccttttgtattctgatctgcgcatagatctgctgctgctgaaatctagaacaccagcgcgaaaacagatttgaagacaatgaatgcaaatctgtgctcaaagaccatctgccgtggaggagacaatcagctgttcgtagttcgagcgattgcgccccagtctcccggtctcattacggggagggcatttgcgagcgcctggactgcgttcagggcactttctcccctcttgggtctcagatttgagagaccagatcccttaggtgtaggtgagcgctcgcaaatgaactgctagagtttgccgctagaggacacagcgccttgcaactggtttgcctaggctgacaggaagcttgcacttcaagaaaactcggctctctcgagaaagggaccggtgcgcgcctccacctccccaagggacaaaccgcggcaccacgctgcgtgcgcgggattgcgactaggaagtgctggtccgaactgcggagattcgcttgaaaacggatagggggttagggagtttgcggggcgggtgcacggaccgtctctgcacaggcccc

SEQ ID NO: 27288 - DNA, 106 bp, Homo sapiens; identical to SEQ ID NO: 9980
  chr8:26267649-26267755
  hypo

SEQ ID NO: 27289 - DNA, 372 bp, Homo sapiens; identical to SEQ ID NO: 9981
  chr8:28347825-28348197
  hyper

SEQ ID NO: 27290 - DNA, 267 bp, Homo sapiens; identical to SEQ ID NO: 9982
  chr8:30561955-30562222
  hypo

SEQ ID NO: 27291 - DNA, 95 bp, Homo sapiens; identical to SEQ ID NO: 9983
  chr8:30890537-30890632
  hyper

SEQ ID NO: 27292 - DNA, 640 bp, Homo sapiens; identical to SEQ ID NO: 22955
  chr8:33371797-33372437
  binary

SEQ ID NO: 27293 - DNA, 406 bp, Homo sapiens; identical to SEQ ID NO: 25932
  chr8:38008224-38008630
  hyper

SEQ ID NO: 27294 - DNA, 824 bp, Homo sapiens; identical to SEQ ID NO: 23382
  chr8:38323132-38323956
  hyper

SEQ ID NO: 27295 - DNA, 494 bp, Homo sapiens
  chr8:49834207-49834701
  hyper
cgctcggtgagccccgcccgcgatccacgctctctgggagctaggaggggcgcaggagccggggtctctgccctgcccgcctggcttccagatgtggtgcagcgccagcgcgcggggacacagtgtccgccaggagaaggaagggccgccctgcaccacaccaggccagcctctggtgttaatgagagcctatatttggaagtggcatctggagaggtttgccttgcacaaagaccaaataattacctcttggcttttgaaaaaggaagggggaagcgggaagacaaaggcgcctgtgagcgcggaggacgctctcctgggactctggcctggagcgggactgcagccttgcgtgcggcgagggcgctgcgctactcagggcttccgcgaagccaggggcagcgcggccgcgtgcaaattaagtactcatgtcaccgtgttagctatggtggcttgaaagaaatgctttgtagccctctaaaggcaggctgatc

SEQ ID NO: 27296 - DNA, 1259 bp, Homo sapiens; identical to SEQ ID NO: 22956
  chr8:55366368-55367627
  binary

SEQ ID NO: 27297 - DNA, 674 bp, Homo sapiens; identical to SEQ ID NO: 25941
  chr8:57069543-57070217
  hyper

SEQ ID NO: 27298 - DNA, 606 bp, Homo sapiens; identical to SEQ ID NO: 9986
  chr8:57122656-57123262
  binary

SEQ ID NO: 27299 - DNA, 138 bp, Homo sapiens
  chr8:593193-593331
  hypo
cgttaaacattgcatgcgattcctgcgagttctctggcatgagacgatgacctagtaatggggtcgcagcagggacgggaagctggccaggcgcaggctgtgctcgcagggacgggaagctggccaggcgcaggctgc

SEQ ID NO: 27300 - DNA, 1798 bp, Homo sapiens
  chr8:60030947-60032745
  binary
cgcctcccaggtccctgcaccccgactcccggctgctcccctggcaactaatccggagaagggaagtggtgccacgagcccccactgcccggggagggagggagagagaagggggaactgggaaataaactgaattctcttactctgcctccgttcctggaccccagacacacccccaaagtattccacggttttctcttattatttttttaaacgccccccggcaaacctaggcagggatccttagccgcgaacagcaggaaggaaagaatccgagcaaatcgtgtcactttccgcacaatcgcggtgtttggcaagcccccggagctactccacaatatttactacccaagcgcacgcaggctgcagcgggctgcgagccgagcgcgcccgggaccggcctccgccaagccggccccgccgcggcccggccaccgccgctcccctcccaggatcaagcagcaagaacacggtggaaacaaaagcagagcgttcaccttgttgcaatagtaggggtccaggcagggagaaggtcccagacagggagcgtcgggcgcagcggcgggctgggctggaggtggataaaatcttacgtccatttcactctcacatcaagcaactccttttctttttccttttttaaaaaaaagtgttcagcaaaacaagcttagacggaacagagtgaggtgtctgggctcaggagtaaaagaaacaccttccttccctcacatccgtttgtggtttgtttaagaagaagaggaaaaaaaaaaaaaagaggggggaaaagcgctcaactctcccccaagccgcggcgcgcacccgtcggcgccgagcgcgcagcctgctccaccgccgcctcttggtcccgccgccgccgctgccgccgccgccgggcaggtaacttcatgcgctcattgtcccccccgcccgcccccccatccccgcctcccgcgcccctcgcagcccggcacacgcgctcgggctctaggtactgggcgttttattggagattctgagttgttctgcttgtagtttattttctccaccttggaggcccgggatgtggggggtgggggggtggggcggggatccagaagggacagggcgggaggggggcgagcgtcccgggccgggcggggtagggagcgcggccggacgcgggctcgtcaaggcccaatggctgctgttcggaaccagaggccggggaccggagaaaggaggagcggagaaggagaaggaggagagcacggcctggctgggacagaagcggtgggaccctgggaggcctccgctgtgcccgtgccgcgctcctcgggaccagcgcgtcgcacacaaaggggctgccgagccagagccaccagcggcctcagggcaccgtggggagcgcgcagctagggggcgctgtggcgcaccccgccccgcagccccgcccccggccctccccggccccaccccactcccaccgccctctccgcggccgtccccacccctatctccgcgacccccactcctcctcggctgttccccaaccctgtcactgtgctcccctccctactcccggcccgtagtggaggtgactttcctgcgcagcgccgcttctgagggcggagaacccacagggagtgcgacccctttgcacgctgtgagtgggcaactgtccgagggactcgagccgatcgaagggtgaggaccagctcgcctgggggtggacggcctggaaaagccgcccctctttggcttccctctgccgcctgcagcccgcacccctccgagattcgtgccccactggacggtttgc

SEQ ID NO: 27301 - DNA, 1018 bp, Homo sapiens; identical to SEQ ID NO: 22962
  chr8:61193218-61194236
  binary

SEQ ID NO: 27302 - DNA, 1377 bp, Homo sapiens
  chr8:63160281-63161658
  hyper
cgcccataaaatctgtctttgagccctgatgaaatttcatcctctgcagaacgcctccgctctgttttattaggtgggagagagcaggagagtttccacaggattcagagagagtttgtccgtatcttaactatccgagatcttctttccaaatccttctcaatttatttctgtgaagatatatttatacctattccggaaaccttctccatttctagaaaaagctacgcatcttcttcttcctcgacttctcttttctccctcccggtgaggatttcaaagggtatgtgagaaaagaaccttaagccaggtctccccgcggcgtcctggctagtcccggcgccctgggcgggtgcatcgctccgccgcagcgccccttgccacccaactctgtccaactttccctttcagactccagcaggggcgccctccaggcaaccggctgtggcgggcagaagcaagctcggatgggagacccccgagctgcgtgcccagcgccggctcaacagacttgcccgcgcagcgcccgcgggccccctcgcatccgggcaggttccggagctgggccttgcgctccccggcgcccgcccaccctgggtgtctcgcgtcccggcccttcctccccggaacccaagctaacccaactcccatcctcgccacctctggggcagctcaactaagccgtgtcccctcccttgcaaacgcgtccgaccaccctcccaacccccagcacaaccctcagcaagaaagcccagctgggtctacccagttacaccggtcaacgagggtctccatcgccgccggccgccctaattcacgctcattcatattcattctcttttctctctgtccctcttcctttctccccaaagactcttaactagacaggccgatcctccccagcggcactccctttcattcttcccttcccaccacacacacacacacacacacacacccggacccagacagcccactccactttccagacgcccacctcctacatactcccctcccctaaacagacattcacccactcgccatctgtagcctccttccaaccccccgccccgcccgcctggctccccctccccaagaaacagacctgcacagtgggacgcagggacccccgccagacgctcgggtcgtgcgcaccgcactgacctcggcccgccccgccgggaaactaacaaaggcgggcgcgagccccgagccctggagccgcgagcggcggccgcggggccgaggagcctgggccgggccgggcggggactactccggagtcaggaggcagcagcggcggaggacgaggatctctggcagtcagcgccgctcggacgccgccggcaccatgggctgctgcaccggacgctgctc

SEQ ID NO: 27303 - DNA, 491 bp, Homo sapiens; identical to SEQ ID NO: 23385
  chr8:67026485-67026976
  hyper

SEQ ID NO: 27304 - DNA, 942 bp, Homo sapiens
  chr8:70744818-70745760
  binary
cggctcgcacctctcttggacagcttctgcagtggccggcgcctccagctgctctcccgccccgggctgcagtccagtgccttcgtccatggcgcttagaattcagatttgatagctgatggcacccaagcactccggcacgtttcatccaccggcacgaggggccgaagccgggcccagtcagtcttgcccacctgggactggggctgggggcgcagggccgcgcagcagggcatcctcaccagctgcgaggcgcccagtgcatcctgatcacagacacggcttcaaggctccgcagccgcgtgccacagggggcaggggtccgcgcggtactgcgatgagccctactcggcgtccctctccgggcggtagcttgaggcaggcgcctcgcgcgtcccgggctcatcccctccgccgccgccgccgccgccgccgctgggcccgcggccaggagcgagtgcaccctgcgccgggggtgggggggcacttagcgctgctgtccgtacagcatcccacctcgctgcgccaggggtaccgggtgttcgccgcctgggctcgcggcaccctcgggagtgaagctgccgacctgcaaagcagaaagagggcggtcagcgaagagcggctgcggcttggggctagcgtcccagcgccccggggaccagggttaggtgaccccgaaccgtccctagagggacggaggagctagtcaggagcggagccccggaggactaggcagcagccggctgcagtctccagtcccggaacaataagcagcaggcggtcggcggagactctccctcattgtctgccgcggacctgcccccgtcccgccccttctgccttaaacattgcgtttgcttttatatgttaataattatcaacctggcagctctgactcagaggcagtgtcttttaatcgagtgaactaactgcagcctttcc

SEQ ID NO: 27305 - DNA, 898 bp, Homo sapiens; identical to SEQ ID NO: 9994
  chr8:70745885-70746783
  hyper

SEQ ID NO: 27306 - DNA, 850 bp, Homo sapiens; identical to SEQ ID NO: 25946
  chr8:70984130-70984980
  hyper

SEQ ID NO: 27307 - DNA, 232 bp, Homo sapiens; identical to SEQ ID NO: 23653
  chr8:71447942-71448174
  hypo

SEQ ID NO: 27308 - DNA, 1631 bp, Homo sapiens; identical to SEQ ID NO: 22967
  chr8:72755373-72757004
  binary

SEQ ID NO: 27309 - DNA, 943 bp, Homo sapiens; identical to SEQ ID NO: 22968
  chr8:75896528-75897471
  binary

SEQ ID NO: 27310 - DNA, 1296 bp, Homo sapiens
  chr8:81399134-81400430
  hyper
cgctggcggggaggcctcagcttggcctccgcagccccagccgagacagcccccgccgccagcgccgcccgcgcttcagccgcctaatgggcggggggccgacgaggaagtggaattggagggcctggagccccaagacctggaggcctccgccgggccggccgccggcgccgccgaggaagccaaggagttgctgctcccccaagacgcgggcggccccacctcgcttggcggtggcgcggggggccccctgctagcggaaaggaaccgtcggactctggccttccgaggcggcggcggcgggggtctcggcaacaatggcagtagccgcggccgccccgagacctcggtgtggcccttgaggcatttcaatgggcgagggccggcgactgtggatctggagctggacgcgctggaggggaaggagttgatgcaggacggcgcgtccctgagcgacagcaccgaggacgaggaggagggggcgagcctgggcgacggcagcggggcggaaggcggcagctgcagcagcagcaggcggtcgggcggcgatggcggggacgaagtggagggcagcggtgtgggagctggcgaaggagagactgtccagcacttcccgctcgcgcggcccaagtctctaatgcagaagctccaatgctccttccagacctcctggctcaaggactttccctggctgcgctattccaaggatactggtcttatgtcttgcggctggtgccaaaagacccctgcagatgggggaagcgtggaccttcccccagtggggcatgatgagctttcgcgagggacccgcaactacaagaaaaccctcctcctgaggcaccacgtctctaccgagcacaaactccacgaagccaacgcccaggtacagtatatcctgctcctacttttttgagatcttttagggaaaggtttatcagcactcccttcacccccacccacccccgaaaaaaaacctcaaaaccattttcctgggtgaagacatcgttccagttgagaggtgcgggaagcttaggcgtgggggtttagaaagcctgggaacaagttttataaaagttctgtatgtgttgtggggggaaggggatggaatgacaattgtcgtggcgctggattttcttttttatgactcatttcttatcagattgaatcaaaaagaaagtgaggttgaaggttttaacctaaaaggctgactttgcggtaaaaaaattttattagctgtgattttagagaagctggtctatgctcacagacgtttagtgtgctggtcgaagtcaaatc

SEQ ID NO: 27311 - DNA, 947 bp, Homo sapiens
  chr8:8748226-8749173
  hypo
cggagcagttcctggctgggggtggaccgcgccatgggcggggagctttccccctccgccttgccctctccactggtccctaggagcagcttatgcagcagcaaagagggatccctctggaagaagacattgaggatgtcgatgaggcgggtgaggttgtggaagacgtgctccttgagagccggactgtcctcaaagtagagtagcttgccgctctcatgcaggtaggagagggcactctgcagtcggtcctcggtcagacccgcctgcaggcccaagcgcgccgagtcccaccagcttagccacagtcgctgggcctgaggtggctggaaatgcagttcctccagcacctgccaggatcgaggcagtactctgtgtaagttggggaagatctctcggtgctcagcaactgacagcaacttgtcccgaaggcgtcgtaagtggcgcgggtccctgcagctaacaggcaacacgggggagaggatctgcagccggtggttgagcaggtattgaaaatgggccttgcgccgtcgaaggttcttgtccgaaacgccatagtaggctgcgtgggggctggcagagcgcagctcgaagtcccgggccagtgcctcgtccaccaccttggccaagcggctcagtccctccgcgtcgtgcttctcctgcagggcgatctggcggtgaatgtccagacatttctcctccagctcacgctctccgcacaggtctgcgtgggtgcccacgatgcacaccaccgcgtggggcactctcgccccgacccgatgcaagaaggagcccacggtggtaggaaagtggcgaggctcataggtggccaagttgaccaccagcacgtatagggcccctggggacaggaagaagggctggatcacctcataactttcatccccagctaagtcatacacgatgaaccgcaggccccgggaggcatc

SEQ ID NO: 27312 - DNA, 124 bp, Homo sapiens; identical to SEQ ID NO: 24705
  chr8:90913515-90913639
  hypo

SEQ ID NO: 27313 - DNA, 922 bp, Homo sapiens; identical to SEQ ID NO: 23390
  chr8:91094269-91095191
  hyper

SEQ ID NO: 27314 - DNA, 1914 bp, Homo sapiens
  chr8:9763158-9765072
  binary
cgtgccggagggactgcactgctggcggcggcggccgggggaaggagagcggcgcaggaggcaaaggttgaggaggcagcaccctcggatgaataataacaccgcgccgcgcaagttgcggagccgcctggaaatccagcccttcgcgtgaactcgcgtcgagcgcggattgcaggggatgaggaagaagggggaggggaggggagggtggaggagggagggggaggggtagaggggaaggcagagagggacagagagaattgggagccttttaatttttccttaccaagccctaatctcgtgcgccgtcctctttggctgaggtcgagctcctttttaaaaattattactcctttaaaggattattcaggtaaaggaagccgcatctgctgacggttccgaaaacaagaggattaggagcccgtccacagatccaggcccgcagacccccaccccctctgcaccagcacacgtcattctcactgcccccgggtacctccctctccttcgtgctcggggagagctgtgccaaggaaaatgcggatttggggaaagtgagaagtgggagagctcggaagagcgggaaagccaaggccggaggtggcgattcgcacccccacactcacacgcgcttccgtttatccgtttctatcccgggaaaagggggcgcctgcccgagcccacgcgcgccgccgcatctgcagcggtcggcgccccacgctccctgaacgccccccaggcggcaccagtgccgggcagagtcccctcggcggccgcgggcgtcaaatcgacacctgactccacagctcccttccctctcctcttcttccacctccccgggggtccaggcaccgccgtgcgtccactcccggtctccacggcttaggcagacggagtgggggactccggggacccgcgcgtcctctcctcctcggccctggcgggaggagccgggctggggtttccgcgggccgcggcgcgttttagggctgccggggactgcggcggatgcggttgacatcactgcggcggctgccgggccgctgcggcgacctgagcgccggtgcagcctcccccaccccgcctgggcgggcgtctgggcaggacagctgcggggggttgggagaggagtcggggagagggggacgatcgccccatcccccgcccccccgcagtcaaggtgaacatgaaggagagccggcgcgcgtgcccgcgcctgggaggcgcgcggccccgcccctcccggagccctccagcgcgcccgggccagatggacgcccgagattagaggcgcagaagtgcgctccacgacgggcccacccgtcccgcggacatcagacctacttcggggaggcgccttttgttgtggtggccgtggcggtgtttgtgtctttccgggagcacagggtgagcttggccttcaggaatgactcagaatgaatccgcctataagagccaaactaaagacgaccccccgccccagccccccaaccataacccaacgcctgccatgagaaaccttcggactttccaaggggtcagtgcctcagccacgaggggcagccctgacccgcgcggttcacgcacacgcagggcccatctgcttcccctactccggcttttcttctctgatgacttaaaagagagtgagtgagggagagagggagagagagagagaggtctaagtgtttcttgggcactgctggattcagggcaactagagatggggagaacaagccccgccagctaaaagcagccctgctgaaaccacacagcccgcgagggtcgcagcagaggcgcccacccagcaggagtggctgcacgaagggtgacccgggcgaggcccttctcgcttcgaggccatttcggctcttgtcaattattgggtgtttgtcccaatataagtagaatggc

SEQ ID NO: 27315 - DNA, 801 bp, Homo sapiens
  chr8:99986199-99987000
  hyper
cggactggccctgggagaaagggcccgggagttgcttctccagtcggtgaacgctccgttgagccacgtctatgcgcttgctcatggataagcgcactgggggactatactgcagtgtgaccgccagtgtccccagggaggctgcggaaaagtagaggcaatgagacccgagcagaaatagggacttctcgcggcagtccgcacggaagcagctggggagcatccagctcgaccctccccacaggcccagggtcgggacaccgagggaaggcgcggcgcgcgcggcaaggccaggggcgcggggctgggctcggccggcacaagtgctcggaccgcggagcgtcctcggtgaggcgttcggtatggattgggtaggagcggccctgggcgatgggcctgacgtcggtgggcgcagttgaggccactgcaaggccgctggatcccggatccgcacccgagacggagcgggggccacacgggataaccgagggggcgaacgggagtttcgggcctccgctccctctccgggtgggggacaggtcgccgagtccgaggtcgggcgcgaaggccactcgcattttcccgccttccgcgagcaacccaggggccctgcgggaggaggagagggtcccgggagtccgcccttccctgcgccttcgggaccggcaggaggcgctgcgcgggcgaattaaaagaaaaggaaaagctcgtagtggaggtgttaccgcatcctgcctttggacgctactcttagttgagtgacccgattcggaccttaggggcgttagggtctcctccacc

SEQ ID NO: 27316 - DNA, 1595 bp, Homo sapiens
  chr9:100610054-100611649
  binary
cgtatgggcaactggaacccggctggagtgtgcagctggccccctcacttccagcccgcaggctgccgcgggggtgactcccgggagatgcgcctagagaggcaggacacctgcacgcatattcgtaacagaggcagaaatactgacggcgaaacctagagagacttgcactccaggcccggggggtgggggggcgggggagaagccttagggagagtggggaggaggccagaggagagctggctgctctctcgtgttgaggttcaagtgtcttccagctccccgcgccccctcctcaccgtgccaccgcccacctcatgctttgggcgccaagcagccaagcaaccgggttgcgttgtagggggaggcaatcagccctgttacccctcctcaggcggccggactgagctgcgggatgggatccctacagagactggcctgggtaaggggaaaaaatcactgcctcttcctgtgcctctagtggttgaactagaatcctggctagctcatctcgcttttgaagggggaaggggagtaatcatcggctcttttgagattgtcttgcaaaccatggactctctccccagaaatgaacacccacaatctagtgtgtaaatttcaggtttccaagtgttccaaagccgcgcacaaatttcggaaccagaccaagaatcctggactctagacgttgcctgggggccgatcctgcgcccagggtcccagaatctaactgaaatgcgcctgcgggccgccaccttcgccccgggccacggctttgccaggaatgcccgccgccacagctgaactcccgcccgcccgcctgggtcggatcagacgcgggtagtggcttgcgcttcgtggtcctcgggtccggaacgcagggaaagcgcgtggagccaacctagagcgggagcagggtctggcttgactctgtccccgattcgttgtgcgcagtgggacaagtccgcgccgtccggagccgacttccccttctcgttgtggccgtaaagctgctggacctccaagccggctcctgcgctccccgctgctctgagaacactgagtgtcccgggcccgcgcagactgggttgggagagggctctgtgggagggcttgcggggagcggggtaagaaaggctaggtgcttcttacctacgtaagaaacgttggtggcgggatctaagcaaacggggaggtgggaagcagaaggttccccttcctgggccccagttcctccatcctgtcccctgggtgacagtgattcgctgttcatagtgtttaagtggaccaacttaaagggagagagcgcttgccgagctctgggaaaccgaaagggtccacgcccgcgggagcctcggagactcaaaatcccccgctagaccgcagaaaatgttacactttaatcaaccgctacttcttccgtggagaggggcggtgggtgggggtgtgcgcatctcatcgcggcctgtgagtggaacaggctagaattatccccagcgtcttttttccatgtccaagtttcgccttaaaacaatttaaaagaggaagaagaggaccgcgcgtctgtaaggcgctccactttatcaccttgactc

SEQ ID NO: 27317 - DNA, 809 bp, Homo sapiens
  chr9:100619635-100620444
  hyper
cgggtcgtcatttgtgaaatgggaatttgtgactgctacctcagataattttcctgaagttaaacgagaggagaggtgaaaagcgctttgtaaactgcaaagcgcagagcatagcagggctgaaaggctttaaataagcgctgccttgtaacaaagcctcctggagtgtcatgataaagccccgggaaggagaaagacagggtgggaaagagcggacattttcgtcccccattctacttgtcaacttgcgggacaggtaagattgtgccaaaggcgagggtcagcatcaggagagagaggacgctgcggggagggacctggttgtgtgcttcaggtgccccaagggacacggagacgcgcgagggttgggatcaaggcgttgaagacagagcgacagcccttctcggcctcccaccggccgacgacaccaagagctcgcgcaccggccgggccaggtgggaatgggcgccgcgcaggggagcgagtacctcggagacagtgcgcgccgcccggggcctcatccacagcggggtcgcgggcggcccccttagcccgcgtgactgtgggatcctgagaacattccgctgtatgtcttggaaccttctaaccctaggaatttgcaaacccctcccagtccctcatctgggggctcagagactggaggtgccttttttatttttttcttcttcactttatgaacacagaaaaatcgtttgtccctctccgggccctgcacccgccagcgtcgtgtgcaggcgtccccgggctgtggataattagacacgttcttccctcattgcccaaggctc

SEQ ID NO: 27318 - DNA, 150 bp, Homo sapiens; identical to SEQ ID NO: 10003
  chr9:100849678-100849828
  hypo

SEQ ID NO: 27319 - DNA, 1150 bp, Homo sapiens
  chr9:101469196-101470346
  binary
cgagggcgataggaatgtcattcggaaatgatttcacaccgggttagccctgcacagccagccagcttgcatcctctggggcagaggacgcctctccgcctgcagcagcctgcgcgtaccgctgccaactgccaccggttccttcaccttttatttacagcgcagagcaagctggttcaccggtgaagcgggggaggcagggaataagatacaatctagattctgctctttctctggggacataaagagggtccgaccaaggaggaggggaagcccagattgcaccaccagagcagtagcgcgaccctcctcccaaaagggttctgcacctggactccagcagaagcgcccggagagtcccaggaagccaggatcaagcccagcgcctcggccccgttccgcgcgatggaagaggcgccaaccgagcgtactgcacaggaaatcactgcccccttcaggccgcgtctcagacgctgcggtcggagcacaggggctcgctcggtccggaaaaactcgcaaacccgaccttgcgcggccagcgatcgctcctccagacccgctccgcgcgctccagccccggcctggcggtgaaggtccgctctggggcttcaggcagaacccaaaccgagggcgtggggaggggtcttgggatggaaagcccttggctctctggctccgctccggactgctctccaagtctgtgctccggctgctaggtcggatgcttcaagcctgagccgtgagaaactgcctgcagccgcccggccaacagcagcggcgcggccggacaccactgcacgtccgggacgagaactgccagggcactttctgagcaactaacccgaggcaggggtctcctgaaatcgctctggccacaggcagcgccgggcacgtccaggcagaagcgctgcagagccggtggccccacacttgcccgcgcggagcgggctcagagctgctggcgcgcaccaggcgcccagccacgctgcacgctcaagccccttgggttccggagccttccggacctcaaagcgcggctcggcttccctgggggcctgtgagcaggcccgcggcccctccggccctgggtggcccagtttgcagtcaatgcgcctgttcctcccactcggtacctcgcagccccatgagc

SEQ ID NO: 27320 - DNA, 188 bp, Homo sapiens; identical to SEQ ID NO: 10004
  chr9:114556879-114557067
  hypo

SEQ ID NO: 27321 - DNA, 46 bp, Homo sapiens; identical to SEQ ID NO: 10005
  chr9:115087431-115087477
  hypo

SEQ ID NO: 27322 - DNA, 392 bp, Homo sapiens; identical to SEQ ID NO: 6319
  chr9:122318421-122318813
  hyper

SEQ ID NO: 27323 - DNA, 198 bp, Homo sapiens
  chr9:126779038-126779236
  hyper
cggtaggccggtcggtggcgcggatttaagatttgctgaaggcactaccacagatgtagctctctggaacttccatccctcctctcctaccaccccccaaaaaaagacaaaaccgagttcagaccggctcccccaacaccaagccgcttctatttatcaagtgggtcaacttccactcggaagcacctcgcggggctc

SEQ ID NO: 27324 - DNA, 1461 bp, Homo sapiens
  chr9:126779491-126780952
  binary
cgttctctccgtcctttctctctatctctgtctctgtgtgtgtcgtgtttgttcccgtgccctcctctccgaccttggccggggctcctagtcctgagagaaacggcgttcggtgcgccggcggtggctatgcggctggctctttcggggctcccgggactaggttggggaaagagggcatctccccggcctctcggggcccagcccagtcttcctagatctggcgtccgcccttccctcccctcccgcactggcaggagagaaatggccgcagtgtgggccgcggggcagctaggactggaaagcggggaccctggagggtgcgatcgcggacggggtgtgcgggcgcgggtcgtgtgcgtgtgcgtgcagggttccgaccacggggacacgagcttgtttgtggcagtgtcccacatcctgtggcccagccacgacgaccccttgcaaagcctcttgctctggggacagtccctccgaggcgcggcggcaccttactgaagggcggcgagctgggggccgagtggggagggggcgccgtcggggcgccgggcgctgggcttacagcagagccgcgggccgcggggtcggaaagtccttccggggcggggccgcagcggcctcttcccgcagcccctcgggcccgggccccggtggaacggaaacctccccctaccccgggaggggctgccagcgggctgggggtgcgaaaacggcggcaggagcgggcgaggggcccgggccgcgcactttgcgcctgggtttgcgcgccgcggccgcgggagtcccgcgcggaccggccggacgcccggcctcccccagccccagctttttgtgtgtgtgtgcctggcggcgtaattactgatttgattccaatccattatttagacaattgaacctacaatctcgtctttagtaaaatgaggcgaagtcagatttgattacaggttcagtcccagcgacaagagctcgaaacccgatgggttaataacagatcacgagtaaattattcatgattttacgagctctttagctccattgaatcggcctaattgagaggaaaaaaaaaaaaaaggagagagaaagcccgggtcctccccctcccctcggcccctcgctcctccccggatccgatcctggggaatctcgacccgcccccgggcactgggggcgggagtgagggggttcggggcgccggccaaacctgggccccacggctgcctcccccgccgccgccccctgcccttgcctctggccggcctcggcctcgctacttagggccggctcctttccctttttctccactccccttctttccccttttctctactcccccgccaataacggcttcggaaaaggcctcccccgcagggaccgggtctcccggagccccgggattcagctcggccaccggaccctcgccacaagctgcgcctgtttccgggactcgctttcccctcc

SEQ ID NO: 27325 - DNA, 233 bp, Homo sapiens; identical to SEQ ID NO: 10009
  chr9:130637231-130637464
  hypo

SEQ ID NO: 27326 - DNA, 355 bp, Homo sapiens; identical to SEQ ID NO: 8799
  chr9:132393701-132394056
  hypo

SEQ ID NO: 27327 - DNA, 109 bp, Homo sapiens
  chr9:134126685-134126794
  hypo
cggttaacacggatcaaaccttaggcactggctgcccacctcggtcaggctgcaaccaggaaggaggcagcccaccctccaagggacacgtggtccacatgagcagctc

SEQ ID NO: 27328 - DNA, 987 bp, Homo sapiens
  chr9:135457318-135458305
  hyper
cgggcagcggcttgcggagccgtgacatcacccccaaaatcggccagagccaatcagcgtcatcactccggggacacgtgggcgagtccccttaaaaaaacacacacaacacaacgaaaaaaaagaaacaacaaaaaaaaacccagacccaaagtaaaagtgacacaagttcattttttaaaggaagggggggaggagaaggcgcgcgcggaccggcagagagctgccgccgaggagcagggaggcgctgtccacggtgctgacgggcccccggagcggcgagggcgcggagagaggacctccccggccaggtggagagtcatgagccgcgggcagccgccgccgctctccgcggtgctgatgccgccaggtgcgctcctttccgcccgctgctagcgcggcccgggcccgcagctatctgcggtgctgacctggccaccctcagccaccacttgcctggaagaagcgtgcggtttggatttttaaaacgccattctttatttagattccaacatcctcgcgtttcttctgtgccaagggggccctcgggccgtccgtctccccctttgctctccccaacttggcgcgccctccctcccattcctccctgacactcccaccaccccccctcggctcggcggctcggcgcgatgctgcagaagacgcactgagcccttttggatctaatgcgcagaggaggttggcccagagctcccgggctcccccaaggctgaactccgtccaaggtgcccgcaggctccctgcccgccttccccatgccagcccgcagctaggggcaggggcagcggcggctggggttgggggtgggtggggagcttttggggaggacaggtcgcagcttggctatggaaggctccaatggctttgggatcgactccattctctcccaccgcgcgggcagccccgcccttcccaagggggaccccttgctcggggactgccgttcgcccctggagctgagtccac

SEQ ID NO: 27329 - DNA, 661 bp, Homo sapiens
  chr9:136399531-136400192
  hyper
cgccagcctccccggtaacctcaggccagcggctgctccgtctggacacccgacatgtggcccccagttctggacccgggaagaaggcctccctgctcgccgctcctgggccgccgccgccggcagcagccaacaggcagctgggccggcctggccgggctccagaggcgcagagcgggttaaagtgtgcgccaggccggccggcgcgggcgggggagcggcctggtgggaagtgtgagtgttcctccccgtctgcctgacagctataaaggcggccgccggcgcagagccgccactgggctgcgcccctcccgggaaccccctctcttggatgctctttgaagtgggagagggaggcggcgcgggggaggaggggaaggggagagggaggccgggccgcagcctctgcactcacgccgcccccgcacgcacagcgcacctggcgccgtctgccctccgcagcgctcgcccctttctctgggaggacaacctgctgacccgaagccaggtaggccacctcgtccccgtccccctcacgttgcagcgtccaccaggccagcccactgctcagagtggggctgggggtaggagcaccccgcgccctctggagccgttacataacgtggggaggcttgtggggaggggtcgggccgcagagcac

SEQ ID NO: 27330 - DNA, 1254 bp, Homo sapiens; identical to SEQ ID NO: 24716
  chr9:138660497-138661751
  hypo

SEQ ID NO: 27331 - DNA, 789 bp, Homo sapiens
  chr9:139084513-139085302
  hyper
cgtcccgccaaggggacgccacccagagccctgtgccacccccagccccgcccccgctgcaagggggatggggtcctgggcaagggtcggtcctctctggtcagcgaccccgctgcctctcgggtcgggaccccaacgagcgggaaaaaaaaaaaaagacagaacgcgtgccggggagtatgaccccggccccggctccctgcaccccgggctgcgcagagccctcgccctccgggttccctctgccagcgacgccagcagagccgggcaggtcccatctcggggtctccccgcgcccggacgacccctctcccactgcggccccggccctgcctcacccgccgccccaccagggtccgagaccgggagaccccagccgcggggggggggggacatcagccttcgacctgcccccgcacctcccgctccgcggggagactgggcgccaggaaccccgaattcggggctgacaacccgcaggcgcgcggctaaagcttccaccgtccgcgagaaggcgtctccaccctggaaggaagggggctcggacccagggaggatgaggggtccgccttctccttcccctcacctcgctgcagcccagagcccgcagacagccccgcggcccaaggtctctctccgcccgaggtctgcagctctggctgggcgtcccccggcctggcgggggtccgggtgggggccgcggcccgaagtctgattctgggttcgccctcgcgggtacggagcaggagccggaggaggtcggagcccgcgtttctgtccctggggcgc

SEQ ID NO: 27332 - DNA, 815 bp, Homo sapiens
  chr9:139085330-139086145
  hyper
cgcgcggggcggaaccgggtacggccagagcggcgcgcgctgcgctccgatcgggaaccggaggccggcgaggtcacgcagacgcgctctccagggcaccgcgggtctcccatcgccgaggccgcctccgcaggccccgctcccctccccgcggcggccagggcggtgtcgggggcggccacgggctccgggattatcgacgcgccgccagctggagcgggcgcgggcggggtccccgcgggaacagtcggcactttattaacctgtcagcgcctaaaaggtcccgggcggcctgggggaggggccggaggccggggcggggtgggggcgcggctgggggatttgcgccccctcctcggggctgccccccgccagcccgcgctgcaccccggcggccgcgccccctccctaaattccgccttcgacctgggcccggagccgctttccccgcgggctgcccgttgcccccggagagttcggggtcgtccctccagcgcccgtccctggccgcggggccgctggctggagtctctgccctggggacaccgactccgcaggccggccccgaacctcgcactttcccgccggcgcgcctttgcccgcactggtcgccgtcgccacgcgccatcctcgcgtccaaccccatctgcttccacgctcggctccagtgttgccgccattcccagtggccgtcggggcccttctcccctcccgggaccgccctggtgatccgcgcgtctctgcgcttcccaggggtgctcggtgcctccttagacacagcgtggctgccagagcctgggggtcgaaggccatgc

SEQ ID NO: 27333 - DNA, 821 bp, Homo sapiens; identical to SEQ ID NO: 23659
  chr9:139698453-139699274
  hypo

SEQ ID NO: 27334 - DNA, 430 bp, Homo sapiens; identical to SEQ ID NO: 23396
  chr9:19127135-19127565
  hyper

SEQ ID NO: 27335 - DNA, 435 bp, Homo sapiens; identical to SEQ ID NO: 23397
  chr9:21395928-21396363
  hyper

SEQ ID NO: 27336 - DNA, 958 bp, Homo sapiens; identical to SEQ ID NO: 22974
  chr9:29213757-29214715
  binary

SEQ ID NO: 27337 - DNA, 72 bp, Homo sapiens; identical to SEQ ID NO: 10019
  chr9:33023515-33023587
  hypo

SEQ ID NO: 27338 - DNA, 665 bp, Homo sapiens; identical to SEQ ID NO: 6651
  chr9:34318282-34318947
  hypo

SEQ ID NO: 27339 - DNA, 894 bp, Homo sapiens; identical to SEQ ID NO: 6325
  chr9:35756575-35757469
  hyper

SEQ ID NO: 27340 - DNA, 857 bp, Homo sapiens; identical to SEQ ID NO: 23401
  chr9:36036762-36037619
  hyper

SEQ ID NO: 27341 - DNA, 2374 bp, Homo sapiens
  chr9:37025701-37028075
  binary
cgggccaggcagccaggccggccttgccctcgccctaaatgacccttcccgtctcctacacacgctgcgtctttcagaggcgggggtgcctgcgtggtaactaattggcttcctctttctttctttctttttcgtttcttatcctctttttttaaaggggagaagccatgagaaaaggcgtcctgcagagaaggacccaatggggtctttaagggtctctgtatgaactggccggctcctaagcagaagctgaactcagaaaccgctacttccttgatttttcaaagccccctcctcaactccaggacgcctttggagccctagccccggtgtcctcgcttagctctcaacctcttcctccacacatacagacacgggtcagggccccactatccctccaagcgccagtctggatcagccccatggctgaaaaaggcgccatcggagtaggggtgtggggcgctgtctgagactctgactggcctctccctacaacttactgccctccaactggcctggcccggagccctctacgggtccaagccagggttctccgaaagagctgaaatgtcgccgccggagccttgaaaggctgcagctcgctgcccaagctacgcgttgccggaggcgggattcccaggtgcctcagcccgggcggccaagtgcgttgtttcaggtcccctgcctgggatccctgcactttgcaaagttagctgcgcggctgcagaggtccgagatccttccggccttagtacctgacccacggtccggcacccccaacccggtcccggcgggagagtgagagaagcgagctcgccgcctacttactatgcatggatgcaaacgggtcgtgcttacagtgtatttccatcggggcgctccagactgcaggccggcccacgccgccgcctcccggcgccaaggggctgcccagggcggatagggagcctcgccaccaggccaggcactgtgcgagctgggctcagaaaacactgctggagcttcggggtctctctcagagcctccctgctggagaccgcccggagctgcgcggagaggcgggaaatggtgctagcgcacccgggctaggagcgggtgcccaactccggctggcttccctccctggctggctcaagcagcagctccgggcccagcccggggtagctgcggccaaggcgcccgcggcttcgggggcatagcgtaggggcccgcctccgggacagccagcagcccccggccccaggaaggagcagctttgaggaggccgccggaacaatcggcccttgacttcactcagggggcggagagacccgggggctgccaggctggttccgcggcctcgatgcttctgaggtccctcctcgacccctcggtctccgccagatcctttctttctctgcttctccgagtctctggggctcggacttgccccctccgcctctctccaactggctctccgacgtctcggacgaagttgcaaagaacttcctctccggcagcgcggggtcctggcgggtttggagatgcttccgcccctgacgctggggccgcgactccggagtccccgggagcgtgcagccctccaacactgagacccgctgccttcaaagttcccgcggcccccgctgctcgcccatcgctgggaccaggaacggggacaccagcgacggactcttcctcgccggggtgtctacctcgtgccaaccaactcttcgagccccgccgccctccctcgtgggtctgattccactgtctttccgctgcctcttccgggacggccgccgtgcctgccccaggcgtggagtgaggaacagaggagagagcagagggtcccagccaccaaggccgccggggctgccggggctgagatggagccgcagtcggctctgactgcctgcgttgccgccgccgccgccgtcgctagccctccgcctgctcggcgcgcacagtgcgccaccgcgccgccccggagccgctttcaggacccgctgcgtgtggacagcgccgcccggggctcagctccctccgggcgggggcggggcgggggctaacctgccaatcacgctccaccaagccaatcagagtggcgtcagccggccctggcccgaaacaccgccccattggctaagcagcccacaggctccgcctgattagcggacacctgggcaatgggagagaatggggggcggggcccaggcggcggcgccacgttcattgacaaacgcgctggactaaggcctagtggatcgcggctgtggggaggggaaaggggcccacgcagtgcctggagagtcccgctgcgggtcccacgcgggctggacctccccacagcgatgctgggatcctgggacgctctcaaggcttgagagcagtc

SEQ ID NO: 27342 - DNA, 798 bp, Homo sapiens; identical to SEQ ID NO: 25994
  chr9:37034135-37034933
  hyper

SEQ ID NO: 27343 - DNA, 83 bp, Homo sapiens; identical to SEQ ID NO: 10023
  chr9:37118395-37118478
  hypo

SEQ ID NO: 27344 - DNA, 61 bp, Homo sapiens; identical to SEQ ID NO: 10024
  chr9:37118798-37118859
  hypo

SEQ ID NO: 27345 - DNA, 349 bp, Homo sapiens; identical to SEQ ID NO: 10025
  chr9:71320587-71320936
  hyper

SEQ ID NO: 27346 - DNA, 163 bp, Homo sapiens; identical to SEQ ID NO: 10026
  chr9:74640002-74640165
  binary

SEQ ID NO: 27347 - DNA, 716 bp, Homo sapiens
  chr9:77111662-77112378
  hyper
cggacgtttttaaaggaaggggacagctacttccatgggactgcattttagttgtgctaaaagtgatgaaagtgggtttgcattattctaccaccaacacccaaaccacctgcccacggaaacccccgccggagaccgaagtttacccaaatagcgctcggcaaagcgctgccataaattcaaaactaactctgccgggcccgcgggggttgcgagacagggaccgaacgtgaaacccggggagccccgcgtctcttgcctccgaaggttttccgtgatcagtgtccccttctctgctggagtcggaagtgcctgtcacctgcggatctgcccgactctcccggtcggcccttcttctctgcccagttcggacagtctcgaattccccgtcgcagccccggccacctcggactccctggtccccagcccccgccccaccccccgcctccaccacgtcccctccccgcggtcccagcctctccaggcgctgctgggctctgattggcggctgcgctgacagcaggcggggcctggaagtcgcggccaagcccgccctcgcgtataagcccctctcagcgctctctctccatctctcccctctctttctctctcgctgctcccttcctccctgtaactgaacagtgaaaattcacattgtggatccgctaacaggcacagatgtcatgtgaaaacgcacatgctctgccatccacacc

SEQ ID NO: 27348 - DNA, 512 bp, Homo sapiens; identical to SEQ ID NO: 23404
  chr9:79626891-79627403
  hyper

SEQ ID NO: 27349 - DNA, 334 bp, Homo sapiens; identical to SEQ ID NO: 23405
  chr9:79636205-79636539
  hyper

SEQ ID NO: 27350 - DNA, 600 bp, Homo sapiens
  chr9:79637630-79638230
  hyper
cgtgagccatcacgcccggccaccacctatttttaatatgtccgtttcctaattgaacttaagtccaccaccatggtagagactgaattagcaaaaacccgcaacagtgcgtttttcctgtcaccactatccgtcacctctctcccattttgaggtcctcgactaccatctaaggccaggaactcggtgtcagcggggtgggtgcccgacggcgcccccttaagtctgcggtcctggacggaggcagccgggttggcgccgggacactgccgctgccgcatcaactaggcaagcgcgcccagccaccgccgcctagaagacctgttgcgcgccgacaccgcgcctcgcgggaggccacagcctggggcctgggaccgcagagttcttggtgggtgaaagccggcggccaagctgctcgagctgcgggaagggaacccttgggcagcggctgctgcagagctgctctgggagtgggccaggaggccccggcagggtgcggcgcctccgctggggcctgggaagccgcgtcccggcctccgccctccaccctttagcacaggtctactttgaaccagcttccgtgtgcccagccaggccaac

SEQ ID NO: 27351 - DNA, 920 bp, Homo sapiens
  chr9:87283136-87284056
  hyper
cgagactccaacccattgctctctcgagagagaaggattgcccgcctttttcccccgggcaggagctcggcgaggccaggagagccgcgcaccggccgggcagggacgcgcaggcgtcgggcgccgctggttgcgcatctggcgccagagcgcgcccccagcgctgtgcccgccgcgacccgggccatgggctggtgctccggagcgtgccgggcgctctctccccgcgcgggggcaccagagccctcggaagtgtcaggcactgcggtgtattttccccgttctcttttaaatgactgcggaaaaacagattccgagccgcaaaagggaagacggattctcagacaaggcttgcaaatgccccgcagccatcatttaactgcacccgcagaatagttacggtttgtcacccgaccctcccggatcgcctaatttgtccctagtgagaccccgaggctctgcccgcgcctggcttcttcgtagctggatgcatatcgtgctccgggcagcgcgggcgcagggcacgcgttcgcgcacaccctagcacacatgaacacgcgcaaggtacggcaggggagcaagggcttgggatgccctacgtgggggtgggcatcgcggggagtgaatccacgatctgggaatggctacatcccgtcaggttaaaggatgagagaaaatgacgcggcgccacacatcggacaggccagggtggccaccgagcatttagaatacgcatcaggcgcgctcccttcccctcacatgtctctatttcccgggcgtgtgatggcagaaaacggcaggaaaaagacccacttagagagctagaattgtgtttggagactcccttccctctgcaaaagcaccaacaggaagcccctccaaaaccaccgatccccaaataggtggcccggaatgggggc

SEQ ID NO: 27352 - DNA, 793 bp, Homo sapiens
  chr9:95570902-95571695
  binary
cgagcccgcccgcactccccgcatctcaaaaccggggctagaggtccctgtagctgcggccaagccaggcggtctgccctgcggcggctgcacaggggcaggaaccggccctcagacccaaccccggtggctgcagagggccactggctagaggtccccagctccagcagaggaggagctgggcgggggcagggcctggcgggctctcaggccaggtgcactcgcgatctagaggcagcccaggccattctccaccacctgggcgcccaagctgcaggcgccctctacctgctggcaacagctgcctggccactcccaagctggctggcgctcccaagcctcgcagaaccggggctagatgtcgccgtggctgcggccaagcccggcggtctgcccggcggcggctgcaccgtggctggaaccgaccccccagtcccatcccccatggctacggagggcccctgtcagcggccccgatctctctttggaggaggagcggggcgggagtcacggccaggagggccctcaggccggaagggatgcacgtctgcgattccgagacgtcccgcgcgagcccaggagaacccgcaagccagcagcgcctgcgcccgagctgcagcagccccctgcaggccacgcgggctcgggagcggtttccggagtccgagctggcgctgagctgcaggcgcgagcctaaaggcttagccggggcccacgctgtctgagagatcggagcgttcagctacaggcacgcgcttaacggcttcgtggagctcactcggtctgagaggtc

SEQ ID NO: 27353 - DNA, 55 bp, Homo sapiens; identical to SEQ ID NO: 10030
  chr9:96155825-96155880
  hypo

SEQ ID NO: 27354 - DNA, 799 bp, Homo sapiens
  chr9:96717468-96718267
  binary
cggcgacggcttggctccggcgcggggcccgcgcggggctctaggccggcccgcagctcggggcggcgcgcgggcgccggctcatgccccctcccccgccggccggccgggcggaggcgcagggcgcgggcggggcgcgcggggctcggccggtcgaacccgggactgcgccccctccccacgccgccgcgcctcttgcccggccagccccgcgtcaccgccccgccccgccccgccccgcgccgccgcccccaacccctaggctgagccggagggagggacccagaagggagggaggcggaagggaggccaaaaaggagggggccacgtgaaagaggccggccgaccgagaccgagggagactgagcggagcgcacgccctggaaggagagagccggagagttcgggaggcaagacccccagagacgagagtcggagggatcaaacgacacaggtgagagaaggggcagaggcagacggcgtgggccaaacaagattccagacagtgatgtgagggcaccagagacgccaccgagatgtgcgcagagagaccaaaagaggcgtgagagccagcgggctgtgacgtgacggagggcacagaggcaggcggggcagaggaagggggcggtaaagaaatgggaacagctagaaaaccggcggcttgatcggcttttaggtagccccggaaaggtcgggaggaggaggggcaaaggccgcgctcctcagctgggaaggaggtggtctcaagcagcctccagtcccgggctcaacaccgccaacccggcaagggtgaggcagc

SEQ ID NO: 27355 - DNA, 360 bp, Homo sapiens
  chr9:97867233-97867593
  hypo
cgcgtctggcttatttcgctcagtgtaaagccctctaggttgggccgcattgttgcaggtgtgcattttataagagtacacaatagattctcgaaagcattctcgctgtgctggggccgggcccaaagaggtggcacctggcatgtggcagccagtcgtctttagccctgggccaccctcatgactcggattcgtcttagctgagacaccagcacctgggaggcacagcctgggcccactccacaggactgtcctaccaggatggagacaatctcctggccctggttcttggcaggtgggtcatgttacggggactttctgtacatggacattcacgtttcagtcaggcccggcctggac

SEQ ID NO: 27356 - DNA, 380 bp, Homo sapiens
  chr9:99983768-99984148
  binary
cgacctctcagaccgagtgagcttaactaagccgttactcgcgtgccagcagttgggcgctccgacctctcagaccgcgtgagcccagcaaagcggttaggcgcgcgcctgcagctcggcgctagcccggactccgggagccgctctcgagctcgcgtggacggcagagggcggctgcagctcgggcgcaggcgccgctggcttgcgggttctcctgggctcgcgcaggacatcccggaatcgcaggcgcgcatcccttcccgcctgagggcccgcctggccgtgactcccgctcctctcctcctccgaagagagatggggccgctggcaggggctctccgcagccaccggggatggggctgagggtcggttcctgcccc

SEQ ID NO: 27357 - DNA, 393 bp, Homo sapiens; identical to SEQ ID NO: 10035
  chrX:102862914-102863307
  hyper

SEQ ID NO: 27358 - DNA, 286 bp, Homo sapiens
  chrX:110924337-110924623
  hyper
cggccattacggatttccgcctccctcacagaaggcagtcactgcaacgtgcgtggcctcagttgcgtcatatccggcccttgcgatcagggcttgaggaacccgcgccatgaagtgcgtgtttgttaccgtagggaccaccagctttgacgacctcattgcgtgtgtgtcggcgcccgacagtctgcaagtgagtgagggaggcgagcaggcggcggcttggctcgccacccgccatctccggccatactgccagccgcgttagccttgcctgaccgtcgcgctc

SEQ ID NO: 27359 - DNA, 329 bp, Homo sapiens
  chrX:123094093-123094422
  binary
cgcggctcgatcgggtccgcggcggaagcgcggccaaacgaatgagtaagtcaggcgcgggcacggcaccttgtttaccccactcggcggcgcgcccctgcgggcgcctggtttgcgggcggcgtcggagacgctgaacccgggagtcagtcggccacgattggtcggtgactgggaggaggacgctgggtgggagggctgggagccaggcgttgcagtggcaactctctgccgctagatgccgctccctcccaacgggagccgggcgcgggttcgtggccgacagatggcgcctgcgcgttccattcgcctccaagtcgccgaagagc

SEQ ID NO: 27360 - DNA, 116 bp, Homo sapiens; identical to SEQ ID NO: 10040
  chrX:129171389-129171505
  binary

SEQ ID NO: 27361 - DNA, 158 bp, Homo sapiens; identical to SEQ ID NO: 10041
  chrX:133507338-133507496
  binary

SEQ ID NO: 27362 - DNA, 1047 bp, Homo sapiens; identical to SEQ ID NO: 23409
  chrX:13706949-13707996
  hyper

SEQ ID NO: 27363 - DNA, 958 bp, Homo sapiens; identical to SEQ ID NO: 10044
  chrX:13752377-13753335
  hyper

SEQ ID NO: 27364 - DNA, 1231 bp, Homo sapiens
  chrX:13955873-13957104
  hyper
cgccttacaccagcctcgggccaggttggagatttcagattttaaccctccggagctgagccttttgccgttgctagtcgttcccccgttgcattggaacccgctcagcacaccgcctccacctgcacccgggccgcattttaatagttggaacaagggacaaagaggagagactcagcctccgtcccatgctgtccagagtctctcctgtcactttcctggtttcaagggtcatggtttcgaaatgagctcccggaagaccccaggcttggggaaccgggtgtttgtttcgcgcgggcttaaggagaacagaagcacggcggggcggggcggggcaggactggactgggagctcgggcgacagggagagcgtcccgggaaacaggcaagaagcgactctctactggccccttaaaataaagcactagcccgggacgcgccgtctgttctctctgcaacccctcccgggtacccagctcttaggctcccgcgagccgcacgtgcgggggtgcagcctggccgcagccggagcggggaccaccccccccacaggatacaacagggaagcgcacctgggcgttccggacacctgcgccgcgcccctcccacctccagcgtcccggcttcgtcgcagaggtggccgaggaggcgccacctgagcgggggaggggcgggaccctcggaagggcgcgccctcccggggcgggggcgcgagaccgtggccgtggcgcgcagccagcgcgctcgcttacccatggctggagactggcgggaggggtgagggctgcggggcgttcgggctccccggggacgggcagagccggtggcacaagtttgcaggtctcgcgggcacgtgcgctgaccgggcttctgcgggctgcgctgcgctgcgcggggctggccgctggctcctagctcccggccggggtgggagcgcggcgcggctccgcctgcactgggggccggccgcgcggagaggggccctgacgtcagcgccgggggctttgtgcgcccggagctagggcccgattgggggcagcgggcgcgcggagtctgcaggcaaagctcgcggcttcctctgggacccccccgggcgagcgccgagggtcgcgggaaccggaaaagccagcgagggggatgggtagagaggggagtgggcttctaggatcgcggaggcggcgatccgcgtcccagatgaaaactattatggcctggggaggttggggggagc

SEQ ID NO: 27365 - DNA, 373 bp, Homo sapiens; identical to SEQ ID NO: 23411
  chrX:15511311-15511684
  hyper

SEQ ID NO: 27366 - DNA, 678 bp, Homo sapiens; identical to SEQ ID NO: 25998
  chrX:15755988-15756666
  hyper

SEQ ID NO: 27367 - DNA, 1012 bp, Homo sapiens; identical to SEQ ID NO: 22977
  chrX:16729925-16730937
  binary

SEQ ID NO: 27368 - DNA, 187 bp, Homo sapiens; identical to SEQ ID NO: 8822
  chrX:23801086-23801273
  binary

SEQ ID NO: 27369 - DNA, 304 bp, Homo sapiens
  chrX:39871661-39871965
  hyper
cgcggccaggaatccctctgcccgcagctgccgcggaggggttgagggttaaacagacaccgggcagaggagcgagcctgccggctgcggccggcgcggcgcggcgcggggagaggacgggagggaagagggcgcacgctacctagcctcccgacgagaagacgtctcctccccacgtcaggccgggctctcgcccactcggctggccgcctctgctccctggcctctcaagtctcagcggaaagaaacgtagcggctgccaaaagcaccccactccttttattgtccccataagcctatacac

SEQ ID NO: 27370 - DNA, 510 bp, Homo sapiens; identical to SEQ ID NO: 10054
  chrX:39873113-39873623
  hyper

SEQ ID NO: 27371 - DNA, 863 bp, Homo sapiens; identical to SEQ ID NO: 10055
  chrX:39931611-39932474
  binary

SEQ ID NO: 27372 - DNA, 1028 bp, Homo sapiens
  chrX:39953610-39954638
  hyper
cggcccgcacggttcacggcggacagaacccggggagcgtgacggtgcctgcggggtgggggtagggggcccacaggcactggccgctccgagcgcaccacgggtcctctccagctccggccccccgcgctcccaccagcccggctgccggggcacagtcacagctccgcgcgctgggcagtcctatttttatcttgtctaatcctaaactgggcggggagcacaggcgtcgtgcttagagaacaagagataggcgcgggaggcggggaggagcagccaggcagcgacgcgagcgggagcgagttaaagacacagtggaggcgaccgcgggcaggaagaaagagcgggctgcgcgggcctcgaggcgccgcacgcaacgcgccgccccgcgaagttacactcgcttccccgccgtccctcgctaccggcccctccccacttcccagcggcgctccccgcagcctggacagcgaggccccggcctgtgtgggaggcggaggccaggacggccctgcaaagggctggagagaatcgctaatgagctgtgcagcccattgatccggagaacacttcctaattaactctcagtcacctactggtgacagcgcctcaaaggacagcgctggggccagccgagccccagccgcgacttgccggccgggcgcctgctgcccaaaacccgcgcgctcccctaaacaccccaaggcaattggtgtgcgtggcggtgtatacccgcacactgaaggccagcctcggattaaacctggatggcatattaatcatcgccttccccccccactccgctctacgcgctgaaaccctgcccaaaataaacacgaaaaccaacactgcaaaacccacaccagataacaggtcgagagaggagtgggcagggtcaaggaacgagcgtattccctaagtgtccacgtacaggaatctttgaggctgacaattaaaatgccttccacgcaagcaattctgttggcaaaaccgaacccaacacttcgtaaggattgatttcggcccgc

SEQ ID NO: 27373 - DNA, 3660 bp, Homo sapiens
  chrX:39954918-39958578
  binary
cgcgttggtttctttttaaggtttgtttctaaatacacataaccctcctccttccttcttcgctcttccattccccccacccccaccctccagacgccggcggcgcgcgccctggcgcgcgggcactcacagcctctagctggagatcgcggactttctggaaaagattcattaacagcaaattacgcctcgcccggccacggcctacacgctgccagactcgtccgtctccgggaccccgggaagggcccactcgagcgtgcgagcggcgggaagcccgccgggaccacgcgtgacttcggccgccctactccacacacggtgccccaaggctctctccgtaaacagcaggcgctcgtcaccgccgccgcgagcccccgagttggcggaggctctgcggcgcagccgcccgccggctccgagcgcgggccccgcggcgcctcgccctccccgccttggccgaggatcttgccccggtgcgcaagttcctcttcgcctacagcctccttgccacacgccctccgagtgggaccaacttcctccggccgcagactttcacacgcccatcagggctacccaccagactccccattgcccagcggagggcccaggtctcgcccgcccccgccctccctccacgacgctgcccccgcacaagcacattctacacccacccctgggggctcataacttaaaacctacgctgaacatcggggagggagaggagggggaaagcgggagggggatcgcagattataatcttaaaagaacatttacaaaacaaagcgtctgacctggctggcgggcgggccaagtcggaaccccttgctctgctcgatttcttagtagtttttttttttaatccacgtgattcgtgctttggggcaagccaagaaaaaacgggactcccctcccgagttgcgcggcagcggcggcaggtcgagctcggctcggcccgaggcactcgccacacaccctcgcgcacgcacacgccgacgttccacttggaggaacgaccggcccccggagaggcgagacgaggcggcggtggcggcggctgggggtttttacagttctttcccgagtcgaaaaagaaagcagacggcaacccgctgccctccccttcctgctcgcgagctaacgccgaacccagcttcccagcttccagcccacctcccccccctccgcccgactcgcggcgctcagcggcgaccgcgctcccgcgcacagacacacacaggctgcaaacttccactctgcgaactccctgctctcctcctggcccaccgggaggcgccaggcccccagccgcgccccctccctccctggtgcccacgcggggccgcttaggttggctgcattttaaataacatagctatgaaataaaaacgaaagcgagccaagcagccaaagggaagcgcgaggcaaaagcttcgcggggtacgctgcgggagggggccccgggagagggggccgactgcagccctcagcgcgcccgcccgcccacccgtccgcggtctcccgggggaaaggtgttccgggcactgacctgaaatccccggtgggggagtaggcagggagcctgcgatccggctctttgaagttttcccccaagcggactcgaggcggcgagaaggagcggggggcggttgggtgggtggagagagatatgaggggtggggggggttggcgacgttaacgagcggagaaggagccgggccggagaagcgcggcgagcagcaaagtttgcggtccccggctgcccgcagcccgctcgcggcgccgcgctcactcgactccctcgccgtctgctggcagccggctgccctcggggtcggccccgccgaggggtgggctctgggccgggtgggggcggggcggggcgggctcggggcctccgggcaggtggcgacagccccgtgcgatcctccgggctcccgcagctggactgggcttggccgagctcagcagctcccgcgctgccgccgccgcccgcgctcgggcaggagccccagcgccatgttgacggttcgccgcgagcgcccgctcgggctgggtgtgtgtgagtgtgtgtgagtgttggccaagtcgtccctgcgcggcgacagcgcggcttgggctctccgcccggcggctcgcgggctccccctccgccgccgccgcccgcctagctcccgctctcggtcgcggtctgggctcctgcgcgtctcccccgcagccgccgagctcggcccgcgttcagcgaggagcgcagctctgcctcaccttgccgctgggagcccaggctccgtctgccgccgcacgccgcgatcccaacgcgtcccccctccctggttccctcctcttcctcctccccctccctccgcccgtcctccctcccgcccgccctacctccctccctcccaacagccgcctcccctccccccgcaggcgcagcgctcgggcgacagccgcccgcccgccgccgcctccagctctcgcaagtttgagctccgccagtctccgctcaccctccgctgcggcgcctccgcggcggggtttcgggaggggtgattccccaggaaaggtttgcccgagtttccccggccgtcatcgatgcacggcccggcacgttttggcctctctggatccgaaccccggaccacttgggtggcgccccccctcctcgtcccccggcctcccctccccagctcgggccgagttggctgcgcacgcccgacccgggcgcacgtcctgggcgagccggagaccgacttgggcggcggcggcggcgagggctgccggcagagccagagccgaagggatgggggcggcgggggcggctctcccagccgcgcgccgagactcccctcgctacccagaaggccagtggaggaccgcaattaccataaagcgcctcgcactccgctcagccaaagctgtcaaaccccagcggcagcagccgctgccgccgcctcttgccaccagcgctgcgctctcccggcctcgtcccctccgagacccagcggagcgtggcctgtgtgctcccgtgctcacccccaccccagtttgccccttcctcccagaggagccctttcccatttcggtgttaaaagctacctgaaaacaccaccccaggcaacggtggccgttccgcctgaactccgcgcccgagttccccggacgtttcaattgtgtgggaattgtttggaggtgggggaaggggggagcagcccgtggaggcaccgggaggcgtgtggggggcggtcggcgagcggagatccgcctgtatttctcccggttctcgagcattttcacggtctgtacctctgatggttggaggggctgcccaggcccctcgccccggcgttgggagattatctcccgcgttttattttccttgacagggagcaacttttggcttacaccgttcgccccataaatttccactcggtaacgtcgtgctgatcggtgcttggcggcggcgtacagcctgcgcccgcagcagttcaattcaattgacacgtattgagcttctccagcgcacccggcgcggctctgggcgcggggggagggcgggggcaggcgggagggagggggaagcggagaagcgaggttccggcctccccggagcgcaaagcctcaagggcgagccgagaagccctagttggtgaagctggc

SEQ ID NO: 27374 - DNA, 948 bp, Homo sapiens
  chrX:39963967-39964915
  hyper
cgcggacggattgtccctggggagctgaaaccgcccagcggggaaacccctcctctcgcccttccccgaaaagcttggccgcggtctaagctccgagcaagcgggtatccgctgacagccgggcctcacgtaaggcccacacgcgtcccattagtcagcccgagttcccctcgggcgagccgcctggcgcggccccaaggccgggctcaggcggggagagggtgcggggccgcagcgagctgcgggcggaggtgcgggctccgcggagcccggccaggctcggttccgcgttcctgggcccgcgggtaagctgagtcggcggggcaggccgctccctggctggcgccggggcgccaagctgcgcttcacgtgcccgccatatcagcagcagcggcggcggcggcgaggagggggtgctgggaggcgcgcggccgttcccgcggggtctccggaccccgcctccccgcccctccccgtgggggctgggccgagaccaccctgcggcccccatcccagcgcaagccgaaagcggcgctgccagacgcagagaggctcctggggcgccgttccgagagccgcgcggcggcagcagccaggggagggtgctcctcgcggccgccccgccgccgccgccgcagtcacggggaccggaagccctcgcgccgccccgagcggcctccgctggccccagggctgttccagacgagggctggccgcgcgtcacccctgatccctcctcgccccaggcgaccacccgggccctgcggtatcccggtgtaagccgagaggacccttcctgcggtccgatgagatgtccctgtccctctgctaccaccataagcacgcccccccgcaccgctcgcagctccgcagctgggaccggaggggcgcggagccgccactccggccgggcaggaacacctgctcccaggccctgcagctgggcgc

SEQ ID NO: 27375 - DNA, 1317 bp, Homo sapiens; identical to SEQ ID NO: 10062
  chrX:39965255-39966572
  hyper

SEQ ID NO: 27376 - DNA, 898 bp, Homo sapiens
  chrX:39968299-39969197
  hyper
cgcacgattcgctcggcggagcgctgcgctgctgggctgggagggcggcggggaggaggagagacgagggggcgggaggcgaacccgggctgcgcgccaagaggcccggagccgcagattagtcaccgctcggctctgcgctcccgggtgcgcccgggaaccgggagggcaggcgtcggccccgctcagccgggctccccggtcctcggcgcgggtgcccccacccccacccccgcgcgctcctggcgcggctggctcgactctcggggacccgcgcagccgagatccacttgtcaggtcaagggcaggacagaaactctgcaagcggagtcttgcttgcgaacaggaaatttctccttgatgaggtgctgcccctcccccacgccgggcttcaaaacaaaactccagagcgggcggccaggtacccagcctcgctcgccatggccggcgacctccgctcctcggccccggccccgggcggcggagccaagccaacagagccggcggacggactcggcgccggccccgcggagggcgccaggctgccaccctccggggcccggacggggtcggcgggggtgcggagccccggagcccccgcgcctccccaggttctacagccaccgagcggttttgcggagctgcccgaggccgccgggtcagcggctccccggagggcgtggggggcggggaggccgcgcggcgccgccgactcggcgaatcccgctgcgggagcccgggagggctgcgagctcggcctggcaaagttcctgtggaaactccatgttttgaaactcctgcggcgtcgcagaaggagggggagaggggagcgcgggaagcgcgcgggggcggtctgcacccgcctctccccgccggggagtgggttccgcggcccccc

SEQ ID NO: 27377 - DNA, 648 bp, Homo sapiens
  chrX:40005424-40006072
  hyper
cgctctccgcacggtagcctgatccatctcgtgggcgcggaggcggggcgcggggctccgctcccgcggaggcgcggagccggggctggggagcccggtgcctccccccacggccctgaggtcctccctgcgcccccactctgtttaacccccaggtggggagaggaccccgagactgcacacagcgcgcccggggccctgccggggcctgagcgggcgggggacagtgtccgggaggagggagggccgagaggctgatttaaaggttctcaccgggaagcgagcgaggcacagacctgagagccgccgcgcggtgaaatccgaggagctctcttggcgaggaggggctgtcagaggccatttatctctcgccagagtggaggctcagctcccacaccgcccgcgagtaacaatggcagcgatcagcagctctgcacgcgcttcagtgcatgaatggattgcggaagatgcctgcgtccgctccgctcaggaggctctaggagcgccccctccccgcccgccgcgcccgcccccgtggcctccctaggccctgcgggcgcctcggggttcgcaagctgggccctgcggcgcgatcactctcacccagaacccccgccgccgttcccagggccttggcacctcgccacc

SEQ ID NO: 27378 - DNA, 1974 bp, Homo sapiens
  chrX:40012993-40014967
  hyper
cggcggcatcagagtgcagccgcgggggttagggggtggcaaaggcccccgcgcggccggaggctcggggccgcagcagccagtgcctctgctctgcgttggggactcggagccgcagcgagaggcagtggagaggcagggctggcctcgtggcgggaggcgaggagggggtgcgagggctgccgcgccgtggggggcagggggcggggacgcagccccggcttcctgggccgcagctgcgaccgagggcgcaagagcagatcgtgctctgcggcggtggcggctcgggcccgccgctctagcagctgagaatcaacaaagggaggcggcgggggaggggcgccaccgagcgttcgctggctgctctggaataataaaaaataattaataatgataataagagaaaaatcccccggctttcatggctctgggtttccgtgtggctgcagcgggaagcgcgctgtccttgaggcggcctctctcgcctggcctgcccgcccctccccctcctcgccccctcccctccccaggaaccgggaagagaaaggtctgcagctgacaaatattatccattctccccatcgatcgcggagtgtacagatgtgagcgcttgatgtgcccgcggagcggcggatcctccctgctcgctcgctctcgcccaggctccgctcgccgtccccctcctccccctttgttctcctcccctttccctctctttaaatagatttcagggcgctgcctgttggagagcagctggcgatctctcccgagagagggagcgagcgaagcccgaggtgccctgtcaccagcctcccctcccccacctcggcttttctctacgtcccccccaccccacctttctccagtttccaaaatagaaaacaccgggaacacccacgtccactgcaccgcgagcccctgggagcctttggacccctcgtgctgttccttgtgtctgtgtctgtgcagaggaagggcagtgcagggaggggacccagggccgcggcagaagagccaagggtccggatctttccctggcagcagcagggacgcagcgtgggtcacgctaacagggtacagtttacccattagggaaagtcggcggagacggccctgttattcctcttttgcagatggcagattaatccggcagcacccggcctcaaagggaccggctgctcggcaaagggttaacccgtcggccggtaatcgtggacacgcgcgcacacacacacacgcacgcgcgcgcgcgtcctctccgcctgcccgagcgcccgccgcggcccgcagtgcgcccggggctgggggagtagctgcgggaggggagggggtcgggggaggggcggggcgggcttaaccaggccgctcgactgagccggggccacctcgccgtctgtcacttaaatgattgtcctccgctccgctcagtgcggtcagtacgggctgttaacaggcagttgcaatcagtttccgaaaggtcagccaaggtcctccggctctcgcagacggaaggcattacgaaaccgcttttgtatctgcaggcactttagaaaaagaggcgagaaggggcgcaccgcagtgccgcggctgctgcgaccgggggagagggtcgggggctgcggagcagaggagtccgcacccccgcggccagggtcaggcggcgtggatatcacccgcggagtgacccagggcctccgggtttcggtggggaagcaggaagggggtggggagcaggcggcaagggaaggaggagtgggaggaagtgggagaggcgtcctggctcctctcctcacccagccaacagcccacacccggacccagacgggagcgggcggccttggacgcgaggagaccccactcggactctcaggccctcctggcgcctggaagtagggagggggtgtgggggggggaaagaccctcgccgagcgagcgagtcccagcgcggtgtctgaagacgctgctgccgccgcc

SEQ ID NO: 27379 - DNA, 553 bp, Homo sapiens
  chrX:40017447-40018000
  hyper
cgaagtggcaggactggccctcggggtccccgtgggtaaaggaggagcggcttcgcgccctgggacagcgcgcgccccggctgacacggggctgtcgccgcttctcccccggacgcgggcggctgcgcaccggccgccatcttggcccggctgcgcaggcggcgctgcccccggcggtaggaccgcggagccgcaggctgggccggggctgccgcgcgggcgttcccgggctgccggggggcgctccctcccgaggcccccctccccgctgcgggccacgctgacccaggtcggggacgatggggcggccgtccctggtgaaagcgtggcctgtagtgtcgcccctcctcgaaacgctggagcggattttaatcctgagaaacgacctctggttcccggactcccgcgatggtcaacgtgttatcgcttctcccgcgcaccccagaactctgtccccagaggcaacctgccgaggcagctgggggtggggggcgaggcctacccaccgttcacagggcgctgttgaggccagagaggatttgagagttaccac

SEQ ID NO: 27380 - DNA, 2334 bp, Homo sapiens; identical to SEQ ID NO: 26003
  chrX:40034239-40036573
  binary

SEQ ID NO: 27381 - DNA, 203 bp, Homo sapiens; identical to SEQ ID NO: 6338
  chrX:40595088-40595291
  hyper

SEQ ID NO: 27382 - DNA, 264 bp, Homo sapiens; identical to SEQ ID NO: 5862
  chrX:41112874-41113138
  binary

SEQ ID NO: 27383 - DNA, 201 bp, Homo sapiens; identical to SEQ ID NO: 26004
  chrX:68758240-68758441
  hyper

SEQ ID NO: 27384 - DNA, 936 bp, Homo sapiens
  chrX:71526230-71527166
  hyper
cggcccgcctggcggccgcccactccccatacccgctccacgggagtcctcggccccgccgcccagcccggcgcccagcccggcggcccggcttacctctgagaagccgcctgccctggagagagggaagcgcggagctcggtgagccgcaagagaggcggcggagcccccagcccctggcacgcacgccgccgccaccgctaccgcgaaccggtcgcgctcagcgcccgcggccgcgccgttggccacccgaccccggggcgcctgggaaaagcccgcaccgcgccgcgccgccgctgcaccgcacagtgccgcgccaagcagcccctgaccgagctggtgcccgcccgcccgcccgcagcttcggcgccggactccggggcggtggcggtggcggccaccgcgctcccttcccggcgctggggacccggctctcaagcccccattgccgcccggagagccctgacgcacacgcacacggcagcagactggcctcggctaggaatcccaggaaggacagaccctttttttccctttttttttctcccctcaatttccacgtctttataaccggcttagggcattattagcacatgtcctggctcgtgggcgagttggtggcaaaatctgaactggatactcacggagggcccgcgcgggtgctgtgccgtccgctgctctcttcctcctcaccgagaactgcccctcgccggcggactacaagagggcagccgggcagagcgagcttcctctcggcagctcagcggtgccccttctgcagctttgccgccgggcacatttttatagcagcggctggcgtctgtggccctttaaaggcgctcgagctggtgcagtcaccgcggatcgtgtgaaagcaaagggccggctggggaacggagtccacgcggccacgcgagtccggcagccctgtggacc

SEQ ID NO: 27385 - DNA, 2135 bp, Homo sapiens
  chrX:8698495-8700630
  binary
cgcgaacgcgccagcttcaccagccggttcaagatcatccccgagggtaaggggaatcacttccacattccacccttattaatatggcctcctctggcagcttaattcccagggcctctagggggacccccccccccaccccttgacccagctctggcaggaggggcgcccagtttaagagccaagggtttggcttccagttcccgcccagccaggggaacccctccccccagcccccatttctccttttggtccctccagagtttccctgaagcgagaaattgggaacttggaacaggtgggcacctagggatagaggcgagaagaagaaggagagaaggatgagagaagagaaaaataagcggaggatttcagagctcgcacgctcgacagggctggtacaggcagcagctgcactcgctcgcgctgagtccggaacctgctctcgtgcgcccacccgcacccggagcctcgcgcaagtcccgcgggggtccgcgccacagggcagagtcccggcaacccgctggagccaagcgcgcggctcccggagcctcccacacaagcgcgcgcgcacacacacatactccccaccctcaggctgaaagaacctacgttcggggtttgggggacggttcccccgggactcgttgaggagtatccgaatacggccccgccaaatcccctgtccccggcacttcttccctgacgctctacgctagtccagggcaagaccttgaatctttggggttccgaattgaggcgcgcacagccactcgcacccccaacacgcgcatacacgcaccctggaacacgacttggcacaagtaccctggctggggctccaagggtgggcagcgagctctgagccctcagagagtgaaaaccatctttcaaaagagacaaagtgtcggcccgcgggcacctgcggggctggggctcgaggtgaggtccccaggcgcagccggacgcgcctcccagactccctcccagtgccccggagcgcctgggactttgcgggagtcgccgcccgcccggagtctcgcgcactccaattcccgggaaaccgccacatccacacacccactcccagcatccacgactctccctccccagggaaatcgcctttggtttcctgctgggaaggagggagttggggcaagatgtctcgggcttctttttcttttcaggagccgggaagaggctggaaaggagagttccagcaccccgactgtaagatccacgcccaggggaagccaggatcagccggcggcgctggccgagaactttgcgagcccaggctgggaggcgcgcgccccggtgcgcccacgccgcggccgcagccccagaaagaacccgggcgggggcctccccgtacctggaagtgctggaagaaggcggagatgcgagtgatctgcaggctcaggcacctggaggcgcagcgagcgcgctggacgctcccggcagacagcgactcgtccagccgccgcgcagcagccgcgccggggccggccgccaggcagccgctggaggccgccagccagaggcagagggtcaggaccgcgccgggcaccccgggcaccatggctgcgggtcgagggcgagggcgagggcgccgggcgcgggccgaggctccctgctccgcgccggggctgcactgctgaggaccaggcagacgccgcgactgagccggaaagttcaatccttcaactccggccggaccctcctcgccgacctccctcccagctcgccctcgaggggtggggtgagggggacaggaggccgcaccattggctggaaggcgtgtgagtgacaggggggccgggcgcagggcccatgggccggtctcgtcagctgcgagcccgggcgctccgggggagggcgacgccgagcggctttccacgccgcgcaggtctcgaggggcccagctcccacgcaggcgcctctcccgttcgcaccaaccgcttcctgcccctcccaccttccccctccgtccaggtaaacgtcggtgtgagcaggtccaggcctgccaggaggggtgctcccttcagcaggagggaagaggcctcaggacccccaggggcgtcccacctgcctggggattgaccccgcgcccctaagtggcttgctttctcccc

SEQ ID NO: 27386 - DNA, 1591 bp, Homo sapiens
  chrX:9432830-9434421
  binary
cgtgggggagcggggcgggcttggtagggacgctggtcccccgaccgtgggacaggggctgggttgggacgcgggtccccactaggagccgcgggggaggggcagggccggagtccctaccctcgtaggggaggggctggttcgggacgcggctcccccggggcgcaggggcggggccgggtggtacgccgggtcccctcccacggccgtgagggaggggccggcggcgggggcggacccctggcggtcctcctggctggggtccgcgcgctcgcggcagctccccgtggaggtcactgtccgtgccagtccctcccgctgtcccgccctctcccgctgccgccgccgccgccgccgcgcccgcctcagcgcccccactccgcgcttgggagcgaggagccgccagcgcccccgccccgccgccgccgcagcgccctcaggccgccattcgccaccgaaactttccagcgcccgcgctctctccgggactcggcggcggcggggcgggggcggcccgggggcggcgcgcggctgctccggggcgccgggccctcttcggccgccgcacggccgggactcggaggctgccggctggagggaggttcggagcgcggccgggcgcgcggcgccgccacaagttgcgctgctcgcgacgaggtgagtgcgcagggctcggcgggccgggcgcggggtccgcaaacttctgcggggaggcgggtcccgcgctgaccctccagggtccggccggcggctcggggcgcccgaacgctccacccgcccctggaactcctgtaggtgcaggtcgccaactgtccccgcggcgctcggactggggtgcggcgcgctcccaggagcctgaacaataccccgaggtggccgctccccgaagtgccggcgcgccttgcggggagagacggaggtcggcggggggctcctttgttttggggagggggaagtggccggtaagtttagggaagcgctcggcttttcctccggtgcccctttgtctgccgattcaggggcttgctgggcaaacctgcgccaccgcgggctccggggaccggggtggagggcggtggcgggatttccccgctgttggggagaagagccccattcatacccgggacgcgggccggccctcccggacccgggtggaagcgcagcctcgcggagtggggcaagcggcgggcgaggtggcgcgggccccgtgtctgctcagtttctgacgcgcagaaactgtcaaggaagtcgggagccccagtcctccgcccatctccccggcctgagcgcacggctgggctgggggcacccttggcccgtcgagggtctgcagagcgccgcccggggagagcgcagacctgttgctgctcctgggctctgacggggcgggtggggtgggtctcgcagatcctgggccccggccttgctatccagggggaccttccctaacgatgggaccggtgctcggagtggagtatggggagtgcgccttcgggagtcggcgctggccggatatgtgacaactgtgggtcgctggaggcccgcctgcgctgggatagggcctggacttcacgtgcgtcgcctgtgttcc

SEQ ID NO: 27387 - DNA, 293 bp, Homo sapiens
  chrX:95940048-95940341
  hyper
cggagaaagatggagcagcccggggcggcggcgtcgggagcgggaggcggcagcgaggaacccggtgggggccggagcaacaagcggagcgcggggaaccgggccgccaatgaagaggaaacgaaaaacaaacccaaattggtgagtgctcccgcagcccccgccggccttagggacagggagagccccgggatcctcctgccattgaacacgggggcacccggggccccctcccaaggatgaccgcgacctcgctgtgcaactcggggagccgctaaaggagtggccacgcc

SEQ ID NO: 27388 - DNA, 483 bp, Homo sapiens
  chrX:9753679-9754162
  hyper
cggacccgcgcccggctcaggctgctggggggcgcccttcccggctctctaagtccagagtgtgagtgcgcgcagggccgcgcgggacgggcggtccctctgccccggggcagcggccacagcgcgggcaccagggcctcccgcggcgcttccgctctcacctgcgcggcagcccgcggtgcgcgagaacaaagtgtgggcgccggcgggccgcgcgccccgagacggaggaggccggagactcccgccacgccaccccgcgcccatctcacctgccgcctcacctgcccggtcctggcctccaaccggcgggcgggggcgcccagagcttcgaagcactgcagagctctggcgcgggaggaaaggcccgacctggcgccggggcctccgcccccgtcctcgcccgcgctggctccgccagccccggggcgcgcgctcctcgaccccgaccccgaacccgctgaacggcgcgcgcgcctgagc

SEQ ID NO: 27389 - DNA, 547 bp, Homo sapiens
  JH636052.4:1361655-1362202
  hyper
cggaccgtgttgacaaagtcgctggaaatcactgtcagagatgtagcttttaggatagtattgtccaggatctgctaggctctatccactgcaggccttggtggggggggagggggggcctgcgaagcacaggaaaacttgtcttttcgttgtaacttccgcttcgttactacaagttacgcagctgagcttcccacgttagagaaaatgacagaacagcacacttgaaatgaaatagttgagtcgggtttaaaagccatttcagtaaccacaatatctgccctgccacataaataagattgcacctatctccgccccgccacagctccatacgcctcaccctttaaacgcacagtcacttgccccagcaccactccagccaatccccaaccaccccgagccctcctagccctaacacacagctgggactctcatgtccagccagtggtcctggacttgctcctacagcgcgggaaatccttcgtggcgaagcagcagcccctgcgctgcctcatctacatagaaacgccctatcggtgatgtcacc

SEQ ID NO: 27390 - DNA, 924 bp, Homo sapiens
  chr1:101004471-101005395
  binary
cgcgctgccagaagccgacgctagcgagggaggtgtgaagagttggccagaatgaccaactcctcctccacatccacctcctccaccaccggtggctcgctgctgctgctctgcgaggaagaggagtcgtgggcgggccggcgcatcccggtgtcactcctgtattcgggcctggccatcgggggcacgctggccaacggcatggtcatctatctcgtgtcgtccttccgaaagctgcagaccaccagcaacgccttcatcgtgaacggctgcgccgccgacctcagcgtctgcgccctctggatgccgcaggaggcggtgctcgggctcctgcccaccggctctgcggagccccccgcagactgggacggcgctgggggcagctaccgcctgctacggggtgggctgctgggcctcggactcacggtgtccctcctctcccactgcctcgtggccctgaaccgctacctgctcatcacccgggcgcccgccacctaccaggcgctgtaccagaggcgccacacggcgggcatgctggcgctgtcctgggcgctcgccctgggcctcgtgctgctgctcccgccctgggcaccgcggcccggcgccgcgccaccgcgagtccactacccggcgctgctggccgccgcggcgctgctggcgcagacagctctgctgctgcactgctacctgggcatcgtgcgccgcgtgcgtgtcagcgtcaagcgggtcagcgtgctcaacttccacctgctgcaccagttgcccggctgcgccgccgccgccgccgccttcccgggcgcccagcacgcgccgggccccggtggcgccgcgcacccggcgcaggcccagcccctgccgcccgcgctgcacccgcggcgggcacagcggcgtctcagcggcctgtcggtgctgctgctctgctgc

SEQ ID NO: 27391 - DNA, 1247 bp, Homo sapiens; identical to SEQ ID NO: 22735
  chr1:101702006-101703253
  binary

SEQ ID NO: 27392 - DNA, 1908 bp, Homo sapiens
  chr1:107682636-107684544
  binary
cgaggagttactggaaacggcgcttctgtggaggagccgggggggatggggagtagagggagggggccctgttgcctcagcgccccgaggtcgtggagcggcagcagctgcagccggagcagcaccagcaacagcaacagcgagcgggacggagttaggaccgctcggagcgcacaggtctcgaggtagtataaggtttgctatccttccacttgctggcagttgcagaagaagatctgctttttaagtgaaacgtacatgccacccctccgagggctgcggcttccccgggcttgcttctttgccgctcctctttccggctctcgcgctcactctttaattggcactggcccctaagtttgccaggagctcgctgcccgctcggagcagggtcccggccgggagccgctggtgggggcggggagtccgggagccgcaatccagaagcgtcgtgggccatgtatatttcatcaaacggactttgggtgcgtcgcgtctcactgccatcagtgctatgtgcagtgacatttctgacttgagtggaggaatgcgcgaaggaaacccgggcgaaattggtattagaggatcttcttggcgccaatgctaattgtcctgatttatgccccttctgactaagctcaacgtcttcatctgaaataaaatgaaagcggtgccaagcggcatagaaccgcctggccgctggttctgatccccgggaaccagaaaatcgtcctgcggcttgaaaaaaaaaaaaagaggaaaaaaaaaagaaatagaaatagaaaaaagaaaaaatatccctcagtaaaagtttaaggcgagaagtgtcagaggcagcggagcgaggaggcgcggaggagagccggcgagcaggggactgggctggcacgacctccgaaggctgagatctcattattaatatcactatatttttggagggagaggcacctttctcatcctctcttcctctccgcccacccttactccctccccctcatctacctgtcaaagtcactgatcttttgcatttcggaagaggacgtcaacgggaaggaattccccctctgggtgcgggctccgagagggggcgacttgcaggaggctccccccgggggcggaggcgaaggtaattaagcggcggggagtggcgggccggcgctgggttctcggtcctcggggtcctctcccgccggcggccgggcgcgatcggaatccccgggctgcggcggtggcggcggctcgggtcctcacgcccacccctcccgctccgcccgctcccgcctggggaggaggctccgcgggagctgccgccctccgcccgtacgccgcccgcgggctccgctgctgcggccgccgcccgaggcggaccaggctggctgcgcagggccgccgccccgcgccgtcggctcggctcccgcccggcgcaagggcaaacgagccacacggtaagtgcctgcggctcgcctctcctactgcgacccgagcctctcgcccgtgcccctctcccccgggtttccccaccccccgccgccccccgccccacccgctgcgatgcacaggcgggagggaaggctccgggtgggcgaggaactttgtaaagcgccccgaggaggcagcgcgcggagccctacgcgcacacacagcggcacacgctcacacccacacacaagtcttcccgggggtgcgccccgggccggtgatgcgtcctcttgttgtgtccggagcccaggcgtggggtctgagcctccatccgccgactgacaggggccccgcgctctccctctctcacgcacacctggccacacacatcgctcaggcggcttgtcgttattttttctttctttcgccaattatatttgtttggggaaaagcaaacaaaaaaaacaaaaaaacacttgccctattgcc

SEQ ID NO: 27393 - DNA, 2283 bp, Homo sapiens; identical to SEQ ID NO: 22736
  chr1:108506290-108508573
  binary

SEQ ID NO: 27394 - DNA, 489 bp, Homo sapiens; identical to SEQ ID NO: 10094
  chr1:1096415-1096904
  hypo

SEQ ID NO: 27395 - DNA, 936 bp, Homo sapiens
  chr1:110692899-110693835
  binary
cgagggcagaagccctggcgagggctccagggtctgcatcccctgaccaggggcctcaagaagctaagcccccttgcaactccctctcccgccccacgcccaccctctccgcctacgtcggccatcagagcctcgctcgctgcccgagagcctcgcattgacgccggcccgcgcgtgagtcaagcctgcgtcacggcgccccgccgccagggtggcctttcggaaagcgagggaacagtgcgcgcagcgctccgcccagctccgttctgctccgcagagccggcgctgccagggcgcagggagggcggcactcggccccagtcttcgcaatcccgcgcgctctctccgccgtgggacctgggtccccgcgccgctcccctgagccccgagcgcgcggcgggcgggagccaggttgggactggtggtgaggcagggagtgaggagcgagcggagtcgcgtgcgccggcgcgcagctccgggtcgccccagccccagccgggggcctgtggcccgggggaggagctgtgcgtccgcgacccgtcggggatcgcagctgctcggccggagtgcacgggccgagtctgcgcgactacccacgcgtgacaggtgagtcgctggccgcgccccgcctggctttaccgggccggccactgcaactttccctgttctggccccgccccagccagggagggctgaggaccaaggtgtgaggcggcgctgcccccgcatccgcccgaccctgcgctcgtcccgggctcctctcgccgctccagccgccgttgcctggcgacggagccccggggcccgctctccttcgcgcatcggggtccccagcggcgtacgcacgggttggacaccgggcttcagcttctggtgctcagaagggcccaagaactccggaggaaattgggcttagctgcggaggcaagcgcccgc

SEQ ID NO: 27396 - DNA, 1318 bp, Homo sapiens
  chr1:110753530-110754848
  binary
cgccgccgccgcctcgtgttgaccgcaagcagcccgggcccacggagctccggctgccgtgagagtgtcggcctggccccggcagccgctcggaggacttgttgctgctgcgctgccgccgctgcggggaagccggctattccggggcttggtgcggtcttggagccggagggtggcccgtgtgagcgcgagcgccccggaccttcgcggtgcgcgtggactgtgcgcttcctcgtctttggtcggggtgaaggcgggggcgtgtccccggcccagagcgtttgtgtgtcccgtcgtagcgggggaccgcgtgtgtgcttgcttctacttccccgggtcctccctctctgcgcctccctctctccggagcttcctgccctaaccccaaccacctgtgtaccggagaaatccaactcctcccgctccgcgtcctagggggataggcaggggcaagcccaagccgcagagggggccgccaccgcctcctgcctcctcttcgtctcctccccctcccccgtctgacgctgcctcctcgggaagggtgtttggagggcagcggccgccccaagccggagccccgcagcgcttcttatgatcagctcggtgtgtgtctcctcctaccgcgggcgcaagtcggggaacaagcctccgtccaaaacatgtctgaaggaggagatggccaagggcgaggcgtcggagaagatcatcatcaacgtgggcggcacgcgacatgagacctaccgcagcaccctgcgcaccctaccgggaacccgcctcgcctggctggccgaccccgacggcgggggccggcccgagaccgatggcggcggtgtgggtagcagcggcagcagcggcggcgggggctgcgagttcttcttcgacaggcacccgggcgtcttcgcctacgtgctcaactactaccgcaccggcaagctgcactgccccgcggacgtgtgcgggccgctcttcgaagaggagctcaccttctggggcatcgacgagaccgacgtggaaccctgctgctggatgacctaccggcagcaccgcgacgccgaggaggcgctcgacatcttcgagagcccggacggaggcggcagcggcgcggggcccagcgacgaggccggcgacgatgagcgggagctggccctgcagcgactgggcccccacgagggaggcgcgggccatggcgccgggtctgggggctgccgcggctggcagccccgcatgtgggcgctcttcgaggatccctactcctcccgggccgctagggtgagtggcaggagcccgtgtctccccatcttgggtctgcaaggggtcc

SEQ ID NO: 27397 - DNA, 1344 bp, Homo sapiens; identical to SEQ ID NO: 22737
  chr1:111216710-111218054
  binary

SEQ ID NO: 27398 - DNA, 76 bp, Homo sapiens; identical to SEQ ID NO: 10098
  chr1:115261261-115261337
  hypo

SEQ ID NO: 27399 - DNA, 877 bp, Homo sapiens; identical to SEQ ID NO: 22738
  chr1:12123137-12124014
  binary

SEQ ID NO: 27400 - DNA, 944 bp, Homo sapiens
  chr1:13910070-13911014
  hyper
cgtttgttgcatgtggtccctttccctcctgttgttgagcagaataaaagcccattttgccagggcccgcagtcctggcggcccccgcagctgcggccctgtaactttaaacctggcctgagatcatcgttttggcgccggccaaacagagcccgagggcgggcctagcgcgcccggacggagaccaccttgcggccgaccccgctcccccgcctcctcgggagagataaatgctgactccgctcggaaagttctcaactgcaaagtttgctgtccggctgcctagggtctgggaagctcgggcaccctccctctccggggctcctgctcccacccctccggcccccccaccgtcgcgctcctccaggctgggcctgtggccgcggtgctttttaattttcccccagctcagaatcttgctgctcggcccccaggagagcaacaactcaacgggaacgatgtggaaggtgtcagctctgctcttcgttttgggaagcgcgtcgctctgggtcctggcagaaggaggtaagacccagcgcaagtggcttcctgccgtcgctgatggggacgagcgagcagagacttgctggaatgcccgggcctggtattcgaggttgtccaggggagcgcgggggagctgagggtgtgtgcgtgtcaggcggctgagcgccggaggaggagaggcagcggcttagtcggtgccaggtcccaaagacgcagctgcgcgggtgtgccgggaggagccccggaatccacaggctgcgaggtgggcagcacagggggcctccctccgagtcggcagcaccagagagatcgggtggaaggttcacagtaggcagccccgcttgctggcagcagtggctggggtttccttcccatagagcggtgtgttggaggaatacgcacgcctcgggagaagctggcctcgtagaatcaggagggac

SEQ ID NO: 27401 - DNA, 184 bp, Homo sapiens; identical to SEQ ID NO: 23675
  chr1:14125492-14125676
  hypo

SEQ ID NO: 27402 - DNA, 1854 bp, Homo sapiens
  chr1:14924519-14926373
  binary
cgccaatattcagcccggctaagaagcttaggagctggctaaggctgctcctccacctggatgcacacacagggctagggctgtggagaggcgggagcaccagcggcccacgccgaggaagataggcgctccctcctggggtgggcagcgcaggtctggcctgcgggtggggggtggagagtgagaggcacgcggggcaccagctcagctcccctctggggatttcgtactcgcagtttaaggaaccggtggagcacgaactccactcctgagctggcgcaagcgtctcccttccatggagatccaccccggctcccctctgaggccccctttccaagcaccctctcttccgagcacccagcacctccccaaccttagcacggctcggggcaccagttctccagggcgggggctgccccaccgctcaagggaggggacagagggccggcctcggtccaggcgacccctgcccctcgccaggggcgccaccttggccccctcccgactgccgtccgccgcctccgcccccccggggggtgtgtctccgaagtacgggggcgcgggaggccaagggtgcccccagcctccgaccgagaccccctcccgagccggcggcgaatggtaggctccatttaaagagtgcctggtggcgcgcggtgtccttcttggagcagctctcggcgcccgcccgccggggtctcggcgatcgctgctcctcctcctccttctcctcctcttttttctcctccgcctcctccccccgccgcctcgccaccgccgcggctagggctggaggcgccgctgtcattcctgtgccggaggaaccggcgctgccggtgcctgggggtcggggcgcgggcgaagccgggccgcggaggacacaacaggtagagccgggggtgcccggccgcgcgccccccgcgcatcatgcagctctttgtcacctctctcgcccccaggccaaaatcctgagcatgatggaagacaataagcagctcgcgctccgcatcgatggggcggtccagtcggccagccaggaggtgaccaacctgcgagccgaactcacggccaccaaccggagactggcggaactgagcggcggcggcggccccggcccgggcccgggagccgcggccagcgcctcggcggcgggggactcggcggcgacgaacatggagaacccccagcttggagcgcaaggtaggatcgccccggcgcccagggcggaggaaggcgagcagagcacgcccggcctcggaggtggccggggacccggggtcccccacacccggggcgaaatcgctttgcattctggcttgtaaccctttccgcccggcggtggccaccgctgctctccggctgggagttgcaggctgctgtcattcacgaaaacccgagcgcagtgtgcacggggtcacacggtcacaccggccccggccagcctgagcgaggcgcagccggcgggtcccttccggcatcagaaagtgccctttccgtggcaccagccccctagctccgtgcaaacttttcatgccggggccttttccccaccccccgcaggggtgaatggcacagttccccccacttccttaggctccttcccagagagagctccgggctctgccgccgtggttgggatagaggattgcactgctgtgcacttttctccgcggatgccaaatcccttggctcagttgcatctggactttattttcttctcatttgaggtctctcaggcattggaatctatagatgcaacagtagatgctcagctcagcagggagtttaaatttccgcaaatataaacaccgagagcactttccagggggatactgtagacctcaaaggttgagc

SEQ ID NO: 27403 - DNA, 182 bp, Homo sapiens; identical to SEQ ID NO: 10104
  chr1:151699304-151699486
  hypo

SEQ ID NO: 27404 - DNA, 936 bp, Homo sapiens; identical to SEQ ID NO: 26021
  chr1:154297543-154298479
  binary

SEQ ID NO: 27405 - DNA, 481 bp, Homo sapiens
  chr1:155911556-155912037
  hypo
cggaggcagtgtgctgagtgctgatgatgctccgatgcctgtcaaattcctagccctgaggctcatggttgccctggcctatgggcttgtgggggccattggcttgctgggaaatttggcggtgctgtgggtactgagtaactgtgcccggagagcccctggcccaccttcagacaccttcgtcttcaacctggctctggcggacctgggactggcactcactctccccttttgggcagccgagtcggcactggactttcactggcccttcggaggtgccctctgcaagatggttctgacggccactgtcctcaacgtctatgccagcatcttcctcatcacagcgctgagcgttgctcgctactgggtggtggccatggctgcggggccaggcacccacctctcactcttctgggcccgaatagccaccctggcagtgtgggcggcggctgccctggtgacggtgcccacagctgtcttc

SEQ ID NO: 27406 - DNA, 656 bp, Homo sapiens
  chr1:156626490-156627146
  hyper
cggaactccatccctcaccctggttcctgtctcttagaaaaggcaccagcgcccctgcccaagagcccctccaggctcctgctaccccctcattctctactagctcttttgcaccgccctcctgtcccccttagtcccgcccctctcggcctgcggtagtggaaggagaccagccccttccaggggacctggccctctgggttttggggccctaagatgcccgcccttatgtgccgcaggcctccgcttctgcaaccccggctgggacgccttccagggcgcctgctacaagcacttttccacacgaaggagctgggaggaggcagagacccagtgccggatgtacggcgcgcatctggccagcatcagcacacccgaggaacaggacttcatcaacagtgggctgggagacagggcgggaggggcccctgccatatgctctcactctctctcactcgcctaaccgccttcctcattaacccatgcacttattccttggttttctcaagcgtgcattccctcactcattcgttcactccccttctcattctctctcccttcccaccctacgcttaggcagtggccttcgggaacggagagtggaggttcgcgcagtagagtgcgcctgtgtgggccgggccgccgtgcagggggcc

SEQ ID NO: 27407 - DNA, 674 bp, Homo sapiens
  chr1:16085153-16085827
  hyper
cgcggggcgggaatcccgcgccccctccccccgagcctcaccttttatggtaaagcggcgcggggcggcggggcggagggagccgagggggcggggagggcggacgggcggaggggacgggaggcccagcggctccgggctccgctggctcgggcgtcggatcggagccgccggggcgcgggcggcccaggtaagcgggccgggtgggtgggggtcgcgtccctccgtccctgtccccggtgcacacaggtgacagcgccggcagtgctcggccggagcctgctcggtcgccagccgggacccccggcgcggcgcccctggaggggcctgcgggtggggggtgcggtcctcacgccctttgcgtcccagtctcttggtctctctccccggagtcggggagtcggcaggtccggggcgagggctcagtgaggccggcggagggccgagtcccagcccgggagcgggagccggggacccggcgcgcagggcggaagctcccgcacaaaaggccggagtcccgcacatggatcgaattaaagctccggcggcgcccagcggtgaccccggcggccgccctgctcggctgcctgcggagggtcccgcgtttccggagcccgggggcgctccaggccccttttcctagccagggtcaggcaaggggagggacgggtccc

SEQ ID NO: 27408 - DNA, 276 bp, Homo sapiens; identical to SEQ ID NO: 26032
  chr1:161509771-161510047
  hyper

SEQ ID NO: 27409 - DNA, 146 bp, Homo sapiens
  chr1:161510102-161510248
  hyper
cggaagtcgcattttgtgaaccctgggtttttgaaactttgactgaaaaaactgcgtgcgatgctatccgctgggagcgctggggccttggcgctcaaaaccagccgcggtgctaaccgcagggagctctggtagcagacctccgc

SEQ ID NO: 27410 - DNA, 934 bp, Homo sapiens
  chr1:184005453-184006387
  binary
cgcagcagacacagggaccaggtccaagcttctttcctccggggacaaaacttggctgtttatctttcccagggcatcttcgtctctccccgggacgtggaaccccgatgcaccggcagggacagcccggagcgctcgcaggagaccaggcccacggtggtgccatggttgggcacactccgcgggctccgcccaatctccacccctaggtccaggtccccctaggagagctaggagcacatttccagcctggagcaggagcccggcaccggaaagtcagagcagcgcactgcggcgccccagccactgcggagcccctggccaaccgcagttacgttccatctgtcgtatctacatgggaatacggcgacaggcaccctatcccctcacgtcagggctagcagtatgaggtggggaaagaggaaacctcgagagttaaaagcgagggaactgaaagtccccttgaggggtgtcccccatgccccttgtgggacaaagccccaattcgcaggctaccctccagagctccagcggtccggttctccccatcagcaccctctgcgcacactgacccgcgcgtccctccgcagcctgaccgcccgatccgccagccaccggcgcgggcagcgagggggtgtgtgcgccagattttccgcgtgcccccccgcccctccagcggctccctcgccctgcagctgctgctccgggcgctgtccgcgctgggcaggccgcccccgcgtcccgccgcggcggcccggggcccgtgcgcgctcaccagatggccatcctgctcttggggtagtccagccgctccaggcagccgaggaagtgcggcagcgtgtgcgccgcgttgcgggcgaggaccgccacgagcaccgtggggctctgcaggggcgactccgggaaaaccaccggctcctctccgtcgtcctcc

SEQ ID NO: 27411 - DNA, 92 bp, Homo sapiens; identical to SEQ ID NO: 10111
  chr1:207240948-207241040
  hypo

SEQ ID NO: 27412 - DNA, 829 bp, Homo sapiens; identical to SEQ ID NO: 22742
  chr1:207669273-207670102
  binary

SEQ ID NO: 27413 - DNA, 708 bp, Homo sapiens
  chr1:208084004-208084712
  binary
cggttctggctgcaacttcgcactccgcgcctctggcaaccagaagagaccctggcatctccaaagcgctttatctcagtccattggaaccagtcgtgctgaccgattcacacctcggctaacgcacactcgcgggggtgatggccttcccttcccctcccacccccgtcagctcccaggtgaggcgctggccccggggggaagcagctgtgggcggcagtgcgtgggttgggcaggggtcccttccctccgtgagactctgctctgctgttcagcctcccagaaagcctccaccctccccgcggcgaagccaagcggccgcggcgcgcgggcggtactcacgcagcaaactcagcaagcaaagcgcggtccagccccgcggcatcctgggccctgcgcgcgcgcccctgcggaccagcatccttcccgcgcggctcctagagagacgcaccgagtggaagacactactcggcttggccaggacgcgctcttcccgccccctccgcccgggagaggggtgggggattcttgcttttttcctctcttctcccctccctttttagtcttggcaaggcagcgcctctccttggctgctactaacttgagctcccctggttggtcccaaaggcggagggcgttaggagggaggctgggttgccgccgtcgaggccaaaaaaggtggaggtttgttcgggctccagatgcctc

SEQ ID NO: 27414 - DNA, 826 bp, Homo sapiens
  chr1:210110997-210111823
  binary
cggagatctgagacgagtatgtggctgattcgggcaaaacaaaacaaaataaaaccaaacgaaaccaaaacagacttactattaccaaatctgagagtcagtgggtgggaatccttttcaaccaaggagacctgtccatggtcctgaccacatcatttgccactcgcctccttcatggacaccgtttgctccaagtaccggacgggagggcgcccggcgccaggaagcttgggcttgggcccccacacgagctcggcgcgcttcgggcgggtctcgggcgcgggcccgtggctctccgggccgggcacctgtttcgaatcgaggcgcgaggcgcggtggggcggtggggtggggtggggtaggttggggtgggggcggggtggcgtcacgtgccagcggcggccccgggaaggttccatttcttccgcggcccgcactcgcggcgctcggggcccctccctcgccccgcccgcggcgcccctcgcggccgcacagccgggcgactccgggccgggccccgcccctctcgctggcggactcagcgcgtcctccgccagccctcgcgtctgctgcccccgccatccagttggtgcggtccatggcgagcgcatcatggcgattgaaggtaagtggaggctgacagcggggagcgaggaccgggaccacccagctggcggggggctcggaggtgcgccggcaggccgaggcgctgacggggccgcctcctgtggtctggagccggctgaagacgcgcgggggtcctggccgcgtctcgggaggcgggtgggcggagcggcgccgctgggacgccgggcccgactggctc

SEQ ID NO: 27415 - DNA, 168 bp, Homo sapiens; identical to SEQ ID NO: 10112
  chr1:212605105-212605273
  hypo

SEQ ID NO: 27416 - DNA, 90 bp, Homo sapiens
  chr1:2170949-2171039
  hypo
cgttggcggcacctttgtacggggacacaccctggacctgaatggagtcaggaagggtttcaacctggatggcccgcgtgccggggaccc

SEQ ID NO: 27417 - DNA, 574 bp, Homo sapiens
  chr1:218520063-218520637
  hyper
cgcttttctgatcctgcatctggtcacggtcgcgctcagcctgtctacctgcagcacactcgatatggaccagttcatgcgcaagaggatcgaggcgatccgcgggcagatcctgagcaagctgaagctcaccagtcccccagaagactatcctgagcccgaggaagtccccccggaggtgatttccatctacaacagcaccagggacttgctccaggagaaggcgagccggagggcggccgcctgcgagcgcgagaggagcgacgaagagtactacgccaaggaggtttacaaaatagacatgccgcccttcttcccctccgaaagtaagtacttattttgacttccatcccctgaggtttagctctgcccggagctctcaaaaccgcagcagctcccgggatcgcccttccctctcgcggttcccgttcgctcttttcccgttctcctgtccttcaccccaccacctccttttcagttgtatgcttgaggccatcaggctttaaaatgtttactttctactttattttctccatctttcccttccccctaacaattcggtgctttaaaaggc

SEQ ID NO: 27418 - DNA, 1082 bp, Homo sapiens; identical to SEQ ID NO: 22743
  chr1:220101064-220102146
  binary

SEQ ID NO: 27419 - DNA, 388 bp, Homo sapiens
  chr1:220132090-220132478
  hypo
cgccaccgcaaaaatggtgttcccaaatgctcccacaacatctgcccgaagaaagccgtaagtgctcttcttgtgctgttttatgttactggcccttacaccaaaaaaacctatgatcatggacacaaagtgggaaaggacggcaaaagcatcggaggccaaggagagggagttgccaacgtaagcgatcactagttccatcacaaagaggaggatgctaacgacgcacatgaggattaaacggaagcttcttccggagtatcgccccatggcgtctcggtgccctggcagttcctctccctttcttgggaaggctgagctgctagggaagcagctatagattcagtgattacaactcctgggtaactcttcccttcagccctccggc

SEQ ID NO: 27420 - DNA, 295 bp, Homo sapiens
  chr1:224528627-224528922
  hyper
cgctgggcacctctctgcccaaccctctgcacccagccggcttctcccccaccgacggggagccccgcctggccccatcgcagagacccccagagcggcgggcttttgttggggggttcccgcttgtccctggctcctgccgtctctgtggagcgcggcaccgccttggatccagctccacctcctccccgtgccctccccacgaggcctgggagcgggtcctgcccggctgcgcaagggtgggggtcgcgcagttagctgcctttgggatgcagagcacaggggacccaccgcc

SEQ ID NO: 27421 - DNA, 140 bp, Homo sapiens
  chr1:226814279-226814419
  hyper
cgctgagctcctgacccgtcttccttttcttcgggcaccttgtaatgcacccgaccgtccagaagggggcagcctctgcaggcggcgccaggctatttcagacgcctctgtaggcggccctcttgatctcactccagcac

SEQ ID NO: 27422 - DNA, 188 bp, Homo sapiens
  chr1:226908290-226908478
  hypo
cggaacatgcctggcacataataggcacttctgaaatcattgctgctattatttttattattattgtgcatcctaagactgtttagtattttttacagccgtaccacctgttaattcatattgaactggtagtaaaattataactcccagtgaatttcaaaagaaatattggccgggcgcggccgggc

SEQ ID NO: 27423 - DNA, 1373 bp, Homo sapiens; identical to SEQ ID NO: 23705
  chr1:226924738-226926111
  hyper

SEQ ID NO: 27424 - DNA, 457 bp, Homo sapiens
  chr1:22777390-22777847
  hypo
cgtaactgtcagggacagaaaaagtggctgcatgtcagtgacagggtgactgtgttcagtgggccagcgcggaggtgactcagtttgttactgctggatctgatttaaatgtttgtgtaaggaagggtggcaaggggacgcttcaacagggaacgcatagtgtgtgagaaggaaaatgagcaaaagaaaagctaggactaaatcccaaagcccctaaatcccaaaattgggaggtgcgagaggcaggatcaggatgcctccaggatgccttcagcccactgcgccccaccagcgccaagcctgtcccacaaagagtgcgggctggggacgcggctcaggtcgcctctccgcctcgcacgtgaatgtgttgttttggaaaaacgaagccttttgtgttcacttccttgccctcctttgaaacaaaatcctaatcctagagctgccggagcgagactgc

SEQ ID NO: 27425 - DNA, 999 bp, Homo sapiens; identical to SEQ ID NO: 23709
  chr1:228528433-228529432
  hypo

SEQ ID NO: 27426 - DNA, 104 bp, Homo sapiens
  chr1:228651978-228652082
  hyper
cgccgggcagcagcaggcgcacggccgtctgcacttcgcgggacgtgatggtggagcgcttgtttgtagtgcgccaggcgggaggcctcgctggcgatgcgctc

SEQ ID NO: 27427 - DNA, 537 bp, Homo sapiens
  chr1:230404024-230404561
  hypo
cgtgtagggttgggtgaagcttacctctggtctgtggatgacaaaacggacgaggtgcccacccaggttccgtactgtctgggtgttgggcctcttgtgatccctggccagcctcacctccgtgtttaatctctggagttcccactgtcactctgcagtgttctgatgatttatggaaggttggagaggtcactcctttctgtgtcagcgcctctgctggaaagcgacacaccttacgctacagcacattaaacagaagcgtgtgctcaggccccggccgagagagttcgtcatcagagtctcgggccccagcttcatcccctgtgcgtcaggctctgtgactggctcaccccccgccagcattgcaccttaattaccgcacagctagtaacacgagacagagtctgggccctgtggaggtggcaggtctacgggaaccaaagactttgtctgtgtagctgctgcctgtgaccctcctcacctgccctcaggaggacagcctgtgtcccgccttcagggctgtggccctcacccccc

SEQ ID NO: 27428 - DNA, 173 bp, Homo sapiens; identical to SEQ ID NO: 10126
  chr1:231122207-231122380
  hypo

SEQ ID NO: 27429 - DNA, 134 bp, Homo sapiens; identical to SEQ ID NO: 10127
  chr1:235955204-235955338
  hypo

SEQ ID NO: 27430 - DNA, 1272 bp, Homo sapiens; identical to SEQ ID NO: 22747
  chr1:237205449-237206721
  binary

SEQ ID NO: 27431 - DNA, 298 bp, Homo sapiens
  chr1:241051980-241052278
  hypo
cgcgcgttgagaagaggtgctatcaactttcccattttgctgatgaggcaatttaggctggatgagaggacgagactgagtactactttcttggtggaggcgacagtcaaagccaggcattagaccggaatcgactcagttaaccactaggctgtgtgtgacagctggaggttagggaacgcggaggcagagagagggaagcagcgggtgcaaagggcagagctacttcggattttatgacggtcaaaggcctcaatgaagaaagaggtaacatttgtttttgttttgtttttgagac

SEQ ID NO: 27432 - DNA, 268 bp, Homo sapiens
  chr1:245772586-245772854
  hypo
cggaaaggatgattccatgcagaacctgggcatcattccctgtgccatctcttggctcttcaagctcataaacgaacgcaaggaaaagaccggcgcccgtttctcagtccgggtttccgccgtggaagtgtgggggaaggaggagaacctgcgggacctgctgtcggaggtggccacgggcagcctgcaggacggccagtccccgggcgtgtacctctgtgaggaccccatctgcggcacgcaggtgattgcttctgaagcctggctc

SEQ ID NO: 27433 - DNA, 514 bp, Homo sapiens
  chr1:33219389-33219903
  hyper
cgcctgccccacctggactggccaggccttcccctgtgcgccctaggctgggcggctcagccggtctcccaggtcccgggaggggcggagccgacgggatgcgcgccaggccccgcccctcctccgggcccgcccccggcctggccattggccgcagagctcgggggcgtggtcgagctggggctgggggcgcccgcggtgcccgcccgcgagtctcgctgcctccctcccggggctgcgggcccggcggccgggctggctgggccgcgcttgggttcccgcgccggctcccgcacccgcaatggggaactcacaccacaagaggaaggcccccagcggtccccgggtccgcagcttctggcggttcgggcggtcggcgaagcggccggcaggtaggggccggggtgggggcggggcaggcagggaggagggtccctactgcggtcgtcgccaccgctgctgccccctcccggggcttggagggtgtgagtgtgggggggtcgggaatccccgc

SEQ ID NO: 27434 - DNA, 993 bp, Homo sapiens
  chr1:34629078-34630071
  binary
cggtgggcgacacggtctgcgaggacagactcacaagacgctgaaggccagagtgggccagagagctcgccactcactgacctgccagaggagaggcgcactttcccaagaaggggaactggggtggtccaggccaagccttcagaggttcaatcggtggtttcaaaacaaaacaaaacaaaacaaaaacaaaaacaaaaaagaaaacacggctccaggtcgaaggtgccctaggtctaggcctggccagcaggtgtttcggtttctcccccagtgggtgtcagcctcgcgggctaaatgaaaatgcggttccaggcatcccggtttggacccgtctccacccgggcacacggaactttctagcttgtagctagaactgagcttcggaggggtgctgtgggtaaagcgggagggcaccagtcgcggccagtagcctccacaggggaccgggttccctcgaaggttcgcgtacctcccccgcgcgctgcaagctgcagccagacacccgcgaagttccgggactctccgcacccgctagatctgccccttcccggactcggtcgtcgggagctggtcccgccgcccgcgccgccgctgccgctgccgcagccgaggcgctcggctgcagcagggcgcgggaaagggcactttggcgcggagtgagcaccgaggggaatgtggcagcgcgaagcctggcggcggcactccctcccccgcctcgggctacaacccccaccccctccttcccatccctcaacaccctccagcccccacctgcaccctcctgcaaggaatgcgcgggacccccaccgtgggcacgcgtccacctgaaccccctcctagctccgagcgccgagggaggggtagcatttgaggagggggatggcggccgcagtctgcagtcggttccagagggggcaccggtttcaattggagaaaatgggcgggggcagggaagggcagaccttgcagacgcagaaatggggagggggc

SEQ ID NO: 27435 - DNA, 1656 bp, Homo sapiens
  chr1:35394588-35396244
  binary
cggcacacacaatcgcccacagacccacacagtgacacactcggcacagacacacagcgacacgcactcacattcacacacctgcagaggaaacttctctccggatctccccagcaccacgacttcccccacaaccagctggctactccctcccagacccgagcctccagccgggcgagggctgggccggggctggcctgtccccgcggccctgaccgggagcgtgggtccgcggtccgcgtggtcccctgcccgcccctcgggtcgggcccgcgggcagccaggccggggcaggagcgggggcagctgaggaggcccagcccctcccccctcccggggccgggagccgagcgccggagcccggggcgtgggcggcgccggggccgcagccgggccgtgcctggggggcgctgcagagggagccgcgagcgcggccccgtccccactcctccccgcggcttacctggcccggctcgggctccggccgggttacatggtgccggcggcccgggccgggggcgctgcggcgttgggcaggcgggcagggaccggggcccggcactgcggagcccccagctgaggggccgcgccggctgcggagccccaagcgagcgccgagcggcagcgggcgcgggagcgggaggcggccaagccacggaggctggatttcccggggaccgggaaggggaggcggggggatcccgcccgcgcgctccgcccccgcccccgcccccgcgcagggcagccgagcagggagagggagagggagaggaagagggagggggaccgagctccccgcccccgcgcggacccaggagggccgaggtcgccgcccgcgggcggccgccggggtcccggaggagcgcccacctcgctgagcgacggtgctgggggcgcccagcgtaggggcaggaatgagatccccctccccggggacccaggaacaggcacccgaagtgtcacggccacgcacagccgacctgggtacagggacccaagcccggcggcgggcgggcggtcggggaccagctcagcctcacggaccgggtctcgccccccgccgaggggcagtcacgccctgaatgtcacacacagcccccaggcccgtccgcttaggagactctccttcgggctttcccggtcggccgcctgacctcagctcctggcttggggtcagggagcccccctcttcggccccagcccctgccaggatggggcgctgtgcccggcctcggagccgctggcaggcgtcccccacccacagtccgcacagccgaggcatccccagtgtggagggagagccccgctgtacctgccgcctgtgctgggcccccgcccgtgcccactgtgcccgcccgcctctgggccctgagcctgggattgtgccatggcggggtcggggtggggggaaagggactgtccgaagcacagctggaggctgcggagcccggacacaggctgcgggagccgagaggcggagagcggactgcagcagtcccctggcttgaatccgtcttggcgcccagagcgatgctgtaatgggggggagggggccacggtggggaagccgcagggggaggggctgaagacgtgggggaaggggtggctccggattccggctttccagggtaggtgtgaggaaacactgcctccggc

SEQ ID NO: 27436 - DNA, 863 bp, Homo sapiens; identical to SEQ ID NO: 22998
  chr1:36042841-36043704
  hyper

SEQ ID NO: 27437 - DNA, 190 bp, Homo sapiens; identical to SEQ ID NO: 23734
  chr1:3659512-3659702
  hypo

SEQ ID NO: 27438 - DNA, 746 bp, Homo sapiens; identical to SEQ ID NO: 23735
  chr1:3663338-3664084
  binary

SEQ ID NO: 27439 - DNA, 1454 bp, Homo sapiens
  chr1:38510073-38511527
  binary
cgtttggtgtggccaggagggcagggccccgcggggagcaggggccgcgctatgcggcggtcggtctgcagcagggcagaagccccttcccgtctgggtgtgtgggagcgcagacccctccggcgtggccgggaaccaagccggggctcggatgaaacgaaacgaaaaatgaacactcgaattttttttgttagttttttttttttttttttgcttttttttggggggagggtagggtagggaaatataaggggaaaaataaattaggctagattaaagctttggctatttcctgcttttatacacagacgcggctctcgcgacctcccctccggggccccgataaatacagtatactgcgatttaaattaagggcgcgggcggagttagaaggaccccaggagccgagaggctccacgaataaataaaaaccgtaaaaaaccaagcccggagaaaggggaaagcggggtggggcgcatccttataggagagaagaggcgtgtagcgaataaagtgacagccccccaccctggacccgcaggctcaggagtccacgcggggagaggggatggagaactctcctcgcttcgtcctctctcccggggaatccctaaccccgcactgcgttacctgtcgctttggggaggccgctgccgggatccggccccgaacagcccgggggggcaggggcgggggtcgtcgaggggatgggggcagagagcaggcggcgggcaggatgcccggggtgagttggcgagttccggatcttcgctcctctctcccggggctcgggcgacgcagcctaccgggctgtcttcgccgctcaccggagagggtcgtccgggtgtttggttttgttcgaaagtttctgggcttttttttttttttgtaaaatccaaagcaaccgaacaaaaagagtccaggccgcgcgggcgggctgcgcgcccgcgccctgcagcgcgccggcgggggcccggcccgcggggtcactgcactgagccgggcagtgtgtggtggtggtggtggtgcagcgccgccggcgggggcggtgggggcgcggagggtggcgatgcgccgcccccgccaggccctagctccccaggcgcgtatacatcgtccatgggcgggtggcccgcgccggccgcaggggtcatgcgcttctccttctgccgccggttgcagaaccagacgcgcaccacctccttctccagctgcaggctgtctgccaagccggtgatctcgtgcgccgagggcttggggcacttgagaaagtggctctcgagcgcgcctttgacccccacctcgatggacgtgcgcttcttgcgcttgcggccctgcgccgcgatcttgtccaggttggtggggctgccgctggacgagtcggtctcctccagccacttgttgagcagcggcttgagcttgcacatgttcttgaagctcagctgcagggcctc

SEQ ID NO: 27440 - DNA, 738 bp, Homo sapiens; identical to SEQ ID NO: 24853
  chr1:41284015-41284753
  hyper

SEQ ID NO: 27441 - DNA, 148 bp, Homo sapiens; identical to SEQ ID NO: 6368
  chr1:44132677-44132825
  hypo

SEQ ID NO: 27442 - DNA, 187 bp, Homo sapiens; identical to SEQ ID NO: 23440
  chr1:44351032-44351219
  hypo

SEQ ID NO: 27443 - DNA, 370 bp, Homo sapiens
  chr1:44717932-44718302
  hypo
cgcacacacgcttcccttcccctgggctgctgcaatttccatgcacagggaagcaggtgccgagctgctcccggctggctctcccctctcgtggctctgcccgccttggctgctgccccattagcttagtggccagccatctgcgacgggcctgccgcatagccctgctgtaggtgcggcgggtggccccctgtgtaacagggagctttgccattagcgcctttaatattctgacacctcagcgcagcctgctattacatgcaaacactgatcgccctgtgaaattacattgctgggcccgcgaaatggaatcgtgtataatcagcctcctccatgcactgtcagtcccatcacaaacacggcgcccggc

SEQ ID NO: 27444 - DNA, 542 bp, Homo sapiens; identical to SEQ ID NO: 26104
  chr1:44726788-44727330
  hypo

SEQ ID NO: 27445 - DNA, 464 bp, Homo sapiens
  chr1:48058828-48059292
  hyper
cggtcttgcgcggaaggcgttatcagccccgcttattagatgaggcggcgcctgcagtagagggggccgtctccgcagggtctgcagcgccggggcccgcacctcctgctccgcggcccgccgccgccagcccggggctgacctctcagagcagggcggaggattttcacagcacagcttcccgagagagcgggattaagggggaactgctcgggtgggccagagccaggggctagggggaggccgggcggaaacccaaaacctccgcagctgtttccagtttgccgccctggctggaccgcggtggctgcgtgcagagcgagcaaggctgcgcgggcctggagcgcccacggggcgcgggacctctctctgtctccccccgccccgcggggctctctctcgtcctctctgtcttggtggggctcagtctgtctctcgttttctctccctgtttctaagatctc

SEQ ID NO: 27446 - DNA, 511 bp, Homo sapiens
  chr1:48190715-48191226
  binary
cggttcccctgggccaagccgagtcctccccagcacaacagcgcggcccctcggcctccgcttaacctgggcgcgcgggctggctgggccggggccattatgcgggcgcatggccggccgcgccggggcgcagagcaaacttaaccttcatttgggagcgcccagcggccggagcgcgcggcgcagccatcgatcgcggctaatggcctcgtctaaatgcggagccgctgcctccgccccccgggtcagggcgcccccgccctcgccccccgctccgtgcaaaatggtgtttaccaaagtcaatattggccgcggcgcccgcccggggcacccgggagcccctctggcctcccccagcccaaggctggatctgggccaccagagcctcatcttggtgtcccaactagccccggccctgacaaggagtcttttgagggctagacacaggcgggtctcgcccagggtctcccaggacccgacctggagtctcaggcctccttcctgtctcggc

SEQ ID NO: 27447 - DNA, 929 bp, Homo sapiens
  chr1:49242191-49243120
  binary
cggtcccctccgcccgggcccccggcccctcccggggtcccagcccccgcccgggtcccaccgtccctccccgcccgcttgctcacctgccagcgccaggatctgggccttgtggagcaacagcgcgccccagtcgcggggggcgcgcggggggctctcgggcccggcgcccaattcctccgggccccggtacacggcgtacaccttctggttgtcaaaatccagccgcgagcgggggctgaagtcgcgcacgcacgacacgggcagcgcgtagcagacgttgtcctccaggaaccgcacaaaggcgtacatggtgggcgccgggggcgggccccggtcgggcagctcagcccgcggggcgggcgcggaggtggggatccggcggggggcgcgagtctcgctacggtgctggggggggcgggggcggctccccaggacccaggctccccccactgttattgttcctgaaagcaccgttctgccaatcggctgctttcgcctgggcgcggaaaagggagggagggggggaaagggggacgaggggcggatgaggggggtttggaagcgcactgccacttgcaaagtcagacccgagcaatcacagccggagcgcgattcgaatggggagggaaaagggttcagagattcagttgcaataaaaataataacaagagcattgcaggaaaaaaatgcattgattaaaaggtgcgctgcgtgcaggattatattgcttcaacaatcgcgctgccaaattgcattgcaacaaaactgcattgccaagtagagaagtgtatgagtgagtgaatgcgggataggggtgggggcaatcttgattgaatctcaaagtgtaaacttggaagccagcagaagtttggagtgttttaaatgtagccaccctacccgcgcccccagccccgcaccctccccgc

SEQ ID NO: 27448 - DNA, 193 bp, Homo sapiens; identical to SEQ ID NO: 10146
  chr1:52081937-52082130
  binary

SEQ ID NO: 27449 - DNA, 52 bp, Homo sapiens; identical to SEQ ID NO: 10147
  chr1:52879577-52879629
  hypo

SEQ ID NO: 27450 - DNA, 678 bp, Homo sapiens
  chr1:53098674-53099352
  binary
cgaatgccccgagactcccggcgccggctcggtgcaggtaaggcgcccgcgccctggcctcgaattcccgccccgccactctggccgcgtcgtgctgtcgttgcgcacccagcgccctcgtgcaggcagggggagcgcagtggggagggggcaggaagcgcaggcagagccaggcgagcacgcggctcccggcccagctccccgcgtccgctccggctcctgccgcgttccagcagccgtcactcccgccgccggcccccgccgcccgccccgcctgcccctacccctccgcgcgggccgggcacctggccgccgctcggtcctcggggccccgcgctgctgtctctgtctcggcttctctcggcccctgggtctcttcgtctctgccgttctcaggctcagctccgtctcgctcggtccctcgcttccccgccgggctctagccggccgtctggtggcccgaggtggcggcgggctgggcgcggggcgcgatgagcggcgcctgcacgagctacgtgagcgcagagcaggaggtggtgcgcggcttcagctgcccgcggccggggggcgaggcggccgctgtcttctgctgcggcttccgcgaccacaagtactgctgcgacgacccgcacagcttcttcccctacgagcacagctacatgtggtggctcaggtacc

SEQ ID NO: 27451 - DNA, 978 bp, Homo sapiens
  chr1:53308283-53309261
  binary
cgggaggagaacggttggccccggcagcggcgtgtcggagggcggatggggctaggaggccgcccggggggtggggtctgcggcgggccggcccccgcgtgcgcgtcgcctcgccgggcatttcaaaagctcgccggcagggcgcggcgctagctccgtgtgcctcgcaggcgtggtgggcgcgtcctggcagccgcccgcttggttctcgcgggatccgggctccggctcgacgccggctctctttttgacgccccgccgccggggttgccatggttcatttcttgcacccgggccacacgccccggaacatcgtccctcctgacgctcagaaggatgccctgggctgctgcgtggtacaggtgagcaccggggtgcgggcggcgacgcggacctcggcgccacgtccagctccggcgagcgcggcgagtctcctgggacgctgccgaggcacttgctggggagtgtggcccgcgcggggctgcggtctagatgccgagccccttccaggcgcaggcgtcgctgcggaggtgcgttgtcgggggaggcggcctgggcgccgcggagcggggggtgcttttctgcgcccggcgaagcgcgtggaacttgcgccctgaggcagcgcggcgagagcccagtcccagagaccggggcgagcctcctcaggattcctcgccccagtgcgggctgctgtgagcttagacgtaggtgcagggcatggcactcggcttggcccgtagtggacggtgtttttgcagtcatgaacccaaacgccgcaaaccttgaccgtttccccacccgtgttgtggacgcagcgccccgcggaggcggtgaccctttggccgttaccacctgaggcctttgggcccggggccgggcgagtagcttagtccggctgggggaactggaacccgaagtctgagattctttcagttccgcgcgtccgcccccgtccccgtcccgtccccagcctttgcc

SEQ ID NO: 27452 - DNA, 795 bp, Homo sapiens; identical to SEQ ID NO: 22752
  chr1:58715168-58715963
  binary

SEQ ID NO: 27453 - DNA, 1062 bp, Homo sapiens
  chr1:59041929-59042991
  hyper
cggttggtgatcaccaggacggccatgccggcgacgagggccaccacgaccaccacgatgacggcgatgaggccggcggtgaggcgcttcatggagaacttcgggggaatctcgtccaggtaatagatgagcgtgcgctccacctgcaggggttctccgcgcacgcgcaagtccaggccgccgcggccctggaatagagactcgcccttgatgtccctctcgaagtagtaggcggcatcgccgatatccacgtcaccggcggccttctgagacgtgttctgccgcagctcgatctggatggtgggctgctcgtagtgcacggccgccacgaacttggggtgcagccgatagcgctcgcggaagagccgcctcagctcggcgtccaggtctgagtggttgaaggcgccggcggtggggcggtggcgcaggtcaatgaggatgtggtgggtgcgcaccagctcatcgcagcgtaggctcaggtcgcccttgtccgtgcggcgcacgcccaccgagttcacgcaccagcacaccgacgtctggttgcactggcgcgccttgaagcggccctcggggtcgcagtcggggtcgtagaggccatcgttgtccacgagcgcgtgctcactcggccgcaccagcgtgcgggcgttcttgggggcgctcatgcgcgccttgagcagcagacacttggaggtcagcgtggagcagtcgaccgccatgcccgagcccagcgcgcggcactggcagcggccgccggggccgtcggggctgcacacggtcatcttgttggtgggacacgtgcagttgtcctgcgcggccgtgtggccggtcaccgccgccagcaccagcagcagcagcggcagccgcagcggtggcggcgcgaggccggggccccgagccatggtggggcggaggaacgcggaccggacgcgggcggatgaggcgcggggactcgtcggggctcgggctccggcgtctgggatggtctgcaggcgtctgccgcccggccgctccctccggctcttatactctacccgacctgcccggctggttccaccaccgacc

SEQ ID NO: 27454 - DNA, 519 bp, Homo sapiens
  chr1:6331654-6332173
  hypo
cggagcctgtccgccatccgctgtggcctctccgccatccgctgtggcctctcccagcagctgcaggcctgggttaattacctcctcctccacacccacccaggactgcaccagcctccagcagaaagcagccggaagtctcaaataatgagatcattgtggagagtcataaacaccctcaccaggggctcccctcacccagcagcaccggctcagactccgaaagaactgcccccaagtggggccaagaaaggaggcgtaaaggccaacgggaggctgctggcggaggcagggagatcgtcaccacaaaggggagaaaaggcattgggacttgggcctgggtggtggcctctcaggagcccctcctgcaggcacggagtgccgtggtcccgggacgctcggctcacagctcttgtgccggagtgtggacatggcggtccccaccctacaacaccaataatgatcatagctgtcacctgctgagtgcccactgtgggctaggcctgggccagaagccgc

SEQ ID NO: 27455 - DNA, 608 bp, Homo sapiens
  chr1:94047877-94048485
  hypo
cgtgctgggcgatgaccttggggtcgttgttggtgaacagttcttttgcacgtttcaacattgctgtttccaggggcttattctcagggggaaggaactttgactcaaactcgttgggcctgaaggaggagacagtctccaggaggggcgtcacaaactcgcccttgtcccactgccccttctccatctgagctgccgcaggttcccaaggtctttccctgtcatcatcatcaaggatcaagtagttgacgccagagttccggggacctggcgcctcattctgcttggctgtgagcagttctgtgtggcttccctgggcacatgagggtagctttgctcccctgccgcagcctgtggcaaacgctgggttcagttcacagtagttggcctctgagttgagccaggcagagggagacgagggaaccttgaggaacggcaccttgcagggcttaggcgggggcttagggcacagttgactgtctgatcccctcagcgcctccccagccctggcgtctgaggagaccctccgaaccactgctgggctcagggcaggctcgcttcccgtcctgaacacaggtgagtttgggcaggggcttgtgtccacaccc

SEQ ID NO: 27456 - DNA, 371 bp, Homo sapiens
  chr1:942328-942699
  hypo
cgccaagtcagccctgcacctggcccgggcctcggaccccgacggggctcacccacctgagatcaccctggctctgcgggaaggcaggaagctttggcatgatcctccacgggcgaggatcacgtagagacgtgtagagacgcgacgaagcacgaagacccgtgtttgacgggttgccaggtgcctacatcagagctcattaaattacacattaaatagatgcacgtgtgtgtgtcaagctcccctaattcaagttgtagaaaatcagactcagagttcttacactcgggggtgttttagcagctgcgcctcaagattctaaattcaaacgcacacggaataaaacatttcggtttatcgccaggcgcggc

SEQ ID NO: 27457 - DNA, 1351 bp, Homo sapiens; identical to SEQ ID NO: 26139
  chr1:9711649-9713000
  binary

SEQ ID NO: 27458 - DNA, 1351 bp, Homo sapiens; identical to SEQ ID NO: 23016
  chr10:100993468-100994819
  hyper

SEQ ID NO: 27459 - DNA, 1437 bp, Homo sapiens
  chr10:101088916-101090353
  hyper
cgaagtgtgtacccgctacgcacagtgcggtgatgcctggccacctccagcctccagcggggacctcctgcccaggtggagtctgaatgcccaccgccaccagcccacgcgcgcagtgggcgtacacgtggtgacctgcctgcggctgggttcccagctccggctcctcctccctccagctctcgctcggcttcctgcagtatcacgtgcagctgcgctgggtgcaggatggcggcggccgcggcggcggcagcagcggtgggtgtcaggctccgggactgctgcagccgaggcgctgtgctcctgctcttcttttccctgtctcctcggcccccggccgccgccgcctggctgctgggcctgcggcccgaggacactgctggaggccgcgtgtccctggaggggggcaccctgcgcgccgccgaaggcaccagcttcctcctgcgtgtctatttccagccaggaccgccggccaccgccgcaccggtgccctcaccgaccctcaactcgggggagaatggcaccggcgactgggctccgcggctcgtgttcatcgaggagcccccgggcggtggcggcgtggcccccagcgcggtccccactcgccccccgggaccgcagcgctgcagggagcagagcgactgggcatcggacgtggaagtcctggggcccttgcgtcccgggggcgtggcaggctcggccctggtccaggtgcgagtgcgggagctgcgcaagggcgaagcggagcggggcggcgcgggcggtggcgggaagctcttttcactctgcgcctgggatgggcgcgcgtggcaccaccacggcgccgccggcggcttcctgctgcgcgttcgcccgcggttgtacggcccaggcggggacctgctgccccctgcgtggctgcgggcgctcggggcgctcctgctgctagccttgtcggccctgttcagcggcctgcgcctgagcctgctgtcgctggacccggtggagttacgggtgctgcggaacagcggctcggccgccgagcaggagcaggcgcgccgcgtgcaggccgttcgcggcagggggacccatctgctctgcaccctactcctgggccaagccggagccaacgcggccctggctggctggctgtacacctcgctgccgccgggcttcgggggcaccggggaagactacagcgaagaggggatccacttcccgtggctgccggcgctcgtgtgcaccggcgcggtattcctgggcgccgaaatctgcccctactcagtgtgttcgcggcacgggctggccatcgcctcgcacagcgtgtgcctgacccggcttctgatggcagccgccttccccgtgtgctacccgctgggccgcctgctggactgggcgctgcgccaggagataagcaccttctacacgcgggagaagttgctggagacgttgcgggcc

SEQ ID NO: 27460 - DNA, 835 bp, Homo sapiens
  chr10:102894440-102895275
  hyper
cgcagtccaggctccagggatctgtgagtcctggggagctttttgtttgcgcaaactcttgcttatggaatcctgctctgtcctggagactggatgcagaacagcccgcaccttgttgcagcgctccagccgggctcccggcagagggtctgtggccccagaccgcggccctgctgacggtctcctcccccagacacccggcctttgcgcagccggtccctaccctggaaggagaaaatcaatccgcgccggctgcggcggggtttcgcgggtcccactggaaggggaatcaattaggagcagatgggtgtgtgtgagaaagagaattttccttctcccatagccacaactctagttactacgcaatgggctttttgttttgttttgttttttcacatttacgctcacggacgtgaagcgtccccaacactctcgagcagcctccctctccgcgcgcactgacgctttctccggctgcaccctctggcacgctgcaccctctggcacgctgcaccctcccgcacatctggcccttgcccgccggagtttctcccctagctcaggccccatggggtagcgcgggagagtctgggcgaagtcggcggcgccgagacgggcgggccttggggcaggaggaaggaattggagtttcctctttttctgaacgaaggcgaggaatctgcctgggattccgcctacggggccacaaaggaagccatggccccacgattctaccacaacatttctgacgctgggaaaggagtgggggatgcggcctcagaccttggaacgctaaagagggagccagggctagctcgggggttggggggactcc

SEQ ID NO: 27461 - DNA, 794 bp, Homo sapiens
  chr10:103535710-103536504
  binary
cgccgcgggaggacgcgctgagcagggcgcgagcggagagggtgcgggtgcgggaggccggcggcgatcacgacgcggctccgcgggtcccgtggaacgtcgtgctcgccgcgccgcaccgaatcgctgtgcgccgctgccggagccggtggccgctggctgctcgggagccggagcgggcgggagggtcacgggctggcggggtgggtggggaggtgggagggcggggaggggtgggggcggggggcgccgcaccgggcgcgaggggggagcgcggggcgggcggcgggagcccgcagcccccggctgggaactggggcctggatgcagcccggggcgggggcggggcggccggggaggggcggccgacgggttcgggattgagggtctgggctaggggaggggtctggggacccgcgggaggggcgggggcggccggtctgggcgcctccccctatccccggcctgtcccctcgcgcgctccccggtcccggacgcgcggggatgggggcgcctagggctgcaaactctgcgggccgggagaccccgagcctgggcttccccgaccgcctggagcgcccgagtctggcgggtctgggtctccgcctccgggcccagccgcttccgccgccggctacgcagtggtctccgagccacctactgtgtgtcccgccgggcccctgggagcggccgctaaccatgcagcgaatggctgcgcacccggccctcgcgcagtgcgtgccggtgccacccggaccccgctcccctgtttcggccgcgtgccccgtcctgtc

SEQ ID NO: 27462 - DNA, 792 bp, Homo sapiens
  chr10:11207098-11207890
  hyper
cgctgatgcgttgatggcagccttgcagagctagacctgcacttaacttgcagctgcctcccgagcctccaagatgtccacgccctgggtgacaggcggcagggcgctgccccgtgctcccccggctctgctcgacagcagcacgcagtgagagcctcgccgccgccgaggagcaactcatggtgcctccgctttgttttagttcatcaaatttctacgactcattaggcactttgccactgctcttcttcctcctccttccgcctccccgctcccccacccccactattttttcttcctgtccctcatcgtgccgccctaactctggctcccggttccgtttttgacagtaacggcacagccaacaagatgaacggagctttggatcactcagaccaaccagacccagatgccattaagatgtttgtcggacagatcccccggtcatggtcggaaaaggagctgaaagaactttttgagccttacggagccgtctaccagatcaacgtcctccgggaccggagtcagaaccctccgcagagtaaaggtacagagcgcggggcgggggtcgccaggcgtccaggtgggcgtcgcggggcactggggctgtccgagcccccagcctgcaggaggaagggcgggtaggcaggagggctggaagcagccggtgctggcggcccctgtgctccaggggctgctcccgactcctccccgcacccccgcccgcctgcccgccgggacaggttggaggcgggagagagggaccgaggcagggcgggagcgcagaggctc

SEQ ID NO: 27463 - DNA, 65 bp, Homo sapiens; identical to SEQ ID NO: 10159
  chr10:114252654-114252719
  hypo

SEQ ID NO: 27464 - DNA, 975 bp, Homo sapiens; identical to SEQ ID NO: 23756
  chr10:118891213-118892188
  hyper

SEQ ID NO: 27465 - DNA, 871 bp, Homo sapiens
  chr10:121301363-121302234
  binary
cgcacccaaaggcctgcacaggtcgtagctattgtgatgagcaaaagggtggaaggaccggaatcaagggcacggctccaccttcaccgtggggtctttggcctatcaagttgcccgagatcgtggctcaggctggcccaaagtgacggccaaggcgaatccttcgtaacgtcagaacttcgctggctcggaccgcagaagtgcccttctccatcctggggttccgccaccctcgcgatcccaccttttggctcctcgcggcagaagcgaaggcccccgacgccccaggcccaggggcccagtcggatgcccgggtccagccgtgctcccccgggcgctcggcatccttccacccacgcccgcagcggaggcggagagcgtcacggagggagaagcccgcgcgccgttccgctttcggaatctggagccccatgtcacctccaaagtttggagatttggggcgctcctttttctcccagaccatcactaaaaagaaaactgcggctgttcctctttcagccaaacttcctccccggggctcccggaggagctctgcgctcccgtcgcggctgggaccgcgaaggtgcggtacccagcggggagaggtggtgcggtcggccggggctccagtctgggaggtaccaccgagccgcgcccgagcacaagagggagggcaggaggccgggcgggcgaaacggcgccccgaccccgagcccgcgggcccccgaagccgcttacctgacggcggccgcttcctgctcagccggctcacggcgcggttgaacatcgccgcgggcgcccgaggaggaagaaggagcagcccggcggcgcggcggctgagccggaggaaggcgaggaggaggaggagggc

SEQ ID NO: 27466 - DNA, 2214 bp, Homo sapiens
  chr10:125851161-125853375
  hyper
cggagccacacttcattcccgagaactcggtacaattaacttaaccaacgtgaacaaggcgaaggcgcccagctgtcacagcggctccgcgcacgcaggcagacgaagaagggcccccgcccccaggagctggtcccagcctccagcctggcagcctccttcgaagacttccctacactgggcgcggacctccagccgccagcagccggcaacccagccccagccttcctcctctatacccgccgtcccagccgcgccggccggccccgggcgcagggcgggcgggaacgtgggcacccggacagcgacggggaggtcaagcagctgtgcccaggacccgggcggctccgaagcctcaacacgcacacactcgcgcgcacgccggcccatcggttgcctggaggagtcgggaaggtgcttccacggctcttcattcattttcccaaaggcaaggttcccttcgccccggcgcctctatcctgccatcccagggggccaattgcgccacagcccgccacccagccacccacagccaccgcgtcctatctcccggcacacacaacccaacagactcgcattacatctccaccgccagcgtcgcctccgcgccccggccgctgccatccggctccccagcttcgccgccccgcagccccggctccccgcctctggcctcaccgcgcggctcagagctgcctcgctcggctcgccgcaccaaggccggccagagacgccgccaccgccgggaagcgccggcaactcccgagtcacgccgcctcccgagacgcggcggggcgcagggaggggacagcagtgggggcggggcggggaggaggaaggaggagggggcggggagcaaaagttcacaccgctcggggctcagccgctcccctatctcttcccaggcccgcccccgccatcccccttccctgaaccgggtcccacgggcttaggcgcgggagagctctggcctccccgcccggaaccgccgcaaggctagagccagggttctggaagcgcatccgagctcgcaaccggggagagagtggcggatgcccacttacctgccccgggccgcgcctggaaacttccccaaagtgcgataggggtgtgggggcggagcgcaaggctggggggaatccccgtcccctaccgccaaacgacgcgcgctcacaccgtgaaagcactggtctgtccgtcggtcggtcccccgcctgcggctcccagagctgggcggtgcaggggcgccccgattccgactactgggctccttctcccggacagcccgccggtgcgttccacgcggcttgcgccccccgccggcctccggctatccacggcgccaccacgccactgctcggtcccctgtcccctcgctccggccgcgtcctctctgcgagggagggggcgtgtgtcgccgctgggtaacccttcccgcggggtcctcaagcgcgcagggcgcccggagcgcggccaggaccaatggcgaagggactcctcccgctggggatcgctgaagcctcggggaggccgggccaaggagcccggggcccaaacctgcctcggctcgtcgagctcgcaagttcattgtctgcctgggccgccgccgccaccgccaccgccaccaccgcgccgggagcgccgcggggagtgaggctgcgcgccgcctccgccggcccggactccctacgcccagccccggccgccgccggcgctgcctggcccgaacccgcggaggggcgccggagccccgagcccagggccagacctcctaccgccgctcctcgccgaccccacctcggcgtctggcacctaacttgtacctgagaagcctgagtccagcccgggagcctctgcggctccggctccgcgggagcgcgcccagccccgagcctctagccccgcatccagggcgcgtcaacctgactccccgagcgctgggaggaaaagtttgggagtgacgtgcagacggcgaatgaaacatccgaggagaaccctccccccgccccatgtcgcgctgacacacatcagctccagtctggaatgtgagatcaaggcgtgtgcgccgagcggtgggtttggcccctgccccctccccctccgagtcaacactgcttgtgtgttgcggtgattccaaataaaagcacatcgaaacccctgaaatctggcagtgacaccttgccagatacttcttttttttaaagacagagtttc

SEQ ID NO: 27467 - DNA, 224 bp, Homo sapiens
  chr10:125853669-125853893
  hyper
cgcgcccggccgccagagacatctttaaggaacttggcggtctggagccagcccgtacattaatattcaaggccacagcgctggtgagttcggcgccctctgttgtatttttgcatcccgggaaggctggcccggctctttggcccggcgtgttttgcttccgcgggggaggtaaagctctgcaggaccccgatcgccacggcctgccgcagtggcctggagtc

SEQ ID NO: 27468 - DNA, 1264 bp, Homo sapiens
  chr10:133795037-133796301
  binary
cgcccgagtggcgaggccgcgaaccccgggcagtacgcggggtccccacgccccgggctccgcatgcccgcaggaggggtgggtacggaaggggaggatggcgcagcctcgcccggcccgcgatgccccctaggcctccccggcaacctccccttggcgccctcttggccttccccaggcttcccccccgcgccccctcggctcccgcgccgcctcctccgcctcaccctgcaggctctcctcctgcatcccgggcgctccgttctgcgacatggcgccagagggcaactgcggcgatcggagtccgcgccgggctgcgggatgtgcttcagctgcgggcggtgggaaagcggaggtcggagcgccgcggcccagctgcgctcccggactgagcggagccccgcagcccggccggaggaactcacagggcagggcggggccgggcggatctgcggccgcgtcgcccattggccgcgacttggggcctgcgcgtgcgcaggggcgtggggtgcgtgtggcacgtgcggcgcgtgcgcggggcgggtcctgcggtgggcgaggggcagaggcctgcggtgcgcgggacgcgggcggggagaggggcggggcgaggggcgcgcaggcgcgagggcggcagcgaccgcctgaggtgagccggcccgggctggacgccgcgggccgcgtgacgagtgggctgcgcggtcgccgccgcggcgggcggtgggccgggttctcctttgaaggggcggtgggaccggcggactctctgggcactggctaccacggagacgccgctacgcttcggggcggggcccgtctttccatcctgctagtggggaaactgaggcgcggggctggcggcgtccgtgcggggggcgtgaggacgtgcagggaagcggccgctgcggctccgagacggcccgtggggtcgggacctgcgcccggggcgggagctgcgagcggtgggccggagctgagcgtctcgggacgggaccgcgtccccgggtctttgcccgccccgccggggcgcccctgcgtgaacagcggggcccgttgtgtccggggcgtccgcccgcaggaagaagcggaggctcgagcagagtcgaaagagtctgcccgagggaggcgcggaccccaggggcccgggagaggcgcgccgtccgcctctgcggcaaggggcctccggggtgcaaacgcggtgtggggcgggcgtccccggggtgggacgccccgtccacggggcggagtggcgcttggtcgggcc

SEQ ID NO: 27469 - DNA, 527 bp, Homo sapiens; identical to SEQ ID NO: 23760
  chr10:133951484-133952011
  hypo

SEQ ID NO: 27470 - DNA, 446 bp, Homo sapiens
  chr10:134300856-134301302
  hypo
cgcaccaggtgtgggtgcaggaggacgtctggttagaggtcagaggcgtcatccccaaccccggccgatgttatcttacgtgcggggaaaggcaaggactggactcgttcatcttttacggaacgtggtgagtcaggcaagagacccgggccctgtgctccgtcctgttttgtcttcgatgcttctctccggtgagctgcaggtggccacagagtcaggcttgggaagctgtgccgcaagcgggaatgagtggacggggctgctcacgcggctgcttttccgtcacggatgccccacccggtcctgtgcgggaggccctgttgaggtgagctccgccctgccgagtgtagggactttgcctccacctccagggttccacatccttccagtaggacacaggcagacatcgccttgggaggctgaatttgctcaaacggcaaacacac

SEQ ID NO: 27471 - DNA, 184 bp, Homo sapiens
  chr10:134566159-134566343
  hypo
cgtggaggggcacggggcgtggagggggtgcggcatggagggggtgcggcgtggaggcggtgcggcatggaggggtgtgtctagagcatctgggagcaattgtctttcatgtggatccaaagtcctccttttctctcagcattttgacacagagcacgcccctgctgtcggtagccaccatacc

SEQ ID NO: 27472 - DNA, 512 bp, Homo sapiens
  chr10:135087233-135087745
  hypo
cgggagccctggcgttcgtccgccacacccacctgaggccggcacaggtgctgaggctggcggctgagtccgggtacccctctacgtggccctggtagaagcagtggtcctgcgggggaagcaggagaggggtccacaggctgtgcccccatggccccacaggctcggggagggccgcccagcccctacctgcccgcccagctgctccgcccgacccatacctgcccgcgaggctgctccgtcacctcggagccattggcagccgtataggtctctgtgtagccggagcccagcaggtccctggaaaagaagtgctgtgactgcctcggccccctcggtgcagagaggctggcccagaggctggacgccggggacaccagtgtgctggagccaggcccgggcaggggggccgacccgagacccactcacctgttcttccgcaggtggagggtgaagttgtgccctgtggccccaaggacgtagctcaccctctctgggtgcaggccctgagc

SEQ ID NO: 27473 - DNA, 176 bp, Homo sapiens
  chr10:135124053-135124229
  hypo
cgggcgcagcgcctccgcactcacacccctctgggccatgcctgtacctcctgcagcagtcggccgtggtcatccgcactcacacccctcggggccgtgtctgtacctcctgcagccgtcggccgtgctcacacatcatgcagccctggctttccttttgtcctggttggttgtgc

SEQ ID NO: 27474 - DNA, 1476 bp, Homo sapiens
  chr10:16562056-16563532
  hyper
cgcccattccggactcccccaggcctctccactccccagaaagcccgtaagctaccctctgttgcggaggatcccacggccaggggtcgcttcccgcgccgggactccccagcgcacgagctgtccccgggacccagctcccggcttcccgcccctcgagggtcgcgctcgcaggggcgcgcaccgatcgagggtcccagactccggaactgccctctccaggccgcggggcgccctcctgcgcgcacgacccccgcctctccagggtgggacggcgtccccccttgccgtcgctccagggagcccggccgccgcgcccttcctccgcgggctcccacccccatttccggggtctcctccctctcgcccgcaccttcccgcgctccctccccgccctccccgccgcccgcccgcgctcacctggttgtttttgcagagatcagcccacatgctggtgccgtcccctccgcgcatcaggacgtggtaggtgaagaagtagatgcccgggatggagcaggtgaacttgccggtggtggggtcgtagtggtttccgaggttggtgaccacgtcgtcgaacttgagcacctcgtagccttcatgctgccgcttgaggccggcgtagaaggcgatcttgggcaccgtgctgtaggtggcggcgctgatggccccggccgcgttcaggccgggcgccccgggcgggcccggcaggccttggcggcccggctcgcccttctcgcccgggggccccatggggccgggtggcccgggctctccggggggcccgcgcggacccgccttcccgggcctgccggcctcgcctttggggccctggatgaaggtgggcagggactgcatgaggccgcggtcgggcgtggcagcggtgctgggcgccttggtgcccccgtaggggtcgcagaccatgcggcaggtgcccagcatctcgtagtgcgccgacgtgccggccgagctcaccagcaccgggatgaggatcaccagcagcagcaccatcaccacccccagcgccccggcggcgatcaggcgcctcctgctgcccaccagccggctcagcgcggggcgatcctcttgtctgcttttggacagaattttgaaggttgggcggggacctcttcagagccgaaaacaaccccctgcgaaccccaactcccctgggcgtgcgtgcgccggccgctgctgccgactcctgctccccccgcggaggctgcggctggggagggagcgcgggcgcccagtgacttgagccgaagtcccgagcccggggtgggggccgggggaggggtgcgcggggcgccctcgccccccgcgagctccttcgcacctgtggctgcagccggcgccggcgcggccaccgggagggcagagccagccgccgcctcctgagctcgcccgggcagctcacacttttatgccgccgccgcctgcgatcgacttttccgtttttgcagactgcgcctgttc

SEQ ID NO: 27475 - DNA, 1978 bp, Homo sapiens; identical to SEQ ID NO: 22756
  chr10:17270371-17272349
  binary

SEQ ID NO: 27476 - DNA, 1569 bp, Homo sapiens; identical to SEQ ID NO: 26159
  chr10:1778583-1780152
  hyper

SEQ ID NO: 27477 - DNA, 1953 bp, Homo sapiens; identical to SEQ ID NO: 23768
  chr10:22540645-22542598
  binary

SEQ ID NO: 27478 - DNA, 628 bp, Homo sapiens
  chr10:23001886-23002514
  binary
cgaaaaaccagcatggttttctgtcatttccattacgctgaaaaggacatacagacatccatcgaaatcaaaagcagggaaagcgaacttacacttttccccagatgctaagtgactgcagtggctaaggtcatggtcaaaattcacagctcgtttaaactttcctggctgagccaacagctccgatcatgtttcctgatcctatcgaagtggattaaaactgcaggagtttctcgctgtcagatcagcaggaggctatttcagaccctcgaaccgcagtccgcatagcccgcagcggcgcatcctccaatccccgactgtgcgtgacgctaacctttccacgcgttctccagcctttcccacaccccccacagcgggtgcggccaactcgggaccccctccgcccgcgcccgccgggacccccgcctgctgtccccgccccggccgcccttccgcagtcggtgacttctgcctgactccccaaagtggggggaggcgacgaagggaggaagactccccgccaagggctctccagcccgcacagcggcagggcgatgcgggagaagcgcagggatgccgcccgacgccagagccatatttacatcggctgctgctttgccaaaaagcc

SEQ ID NO: 27479 - DNA, 276 bp, Homo sapiens
  chr10:23216840-23217116
  hyper
cgcggacgcacttggctcctcccgcactggccgctgccctcggcgggacaatgggcgccctagcagccccgagcgttcccagggcgcaggcgcggcgcggcgtggcgtcgcctagcaacgaggcacaacaagggactgggggttcgtctgctgggtttgcggagcagctagctactcggcgggatctcccggcaggtaaaggtaaccccgtggggtggggaggcccaaggcagaggcctgaggaaaacctgggaaaggagaaggtgccacgtgggc

SEQ ID NO: 27480 - DNA, 1457 bp, Homo sapiens; identical to SEQ ID NO: 22759
  chr10:23461640-23463097
  binary

SEQ ID NO: 27481 - DNA, 1187 bp, Homo sapiens
  chr10:26726986-26728173
  binary
cggccaactgagcgtggttaaacgtggggagggaggagggtgaggttaccaacctgatggttgagaaagggcctccgcccagcgcgcccttcctccacccccacccgagagacagctgaactccggccgggacgcgcgtgttgccagtccagccctgcaccgcgtcccctgagggcgggctgcaggcggccgggaagccttgcacaaccggcccaaaagaggaagcccagaaagtgctgaagtaaacactttgggagaccgttgcaacataaagcggcctctcagtctttggtggaaccatcactaggccccaatcccttagtccctcttgcgtcgaggctgcaaaatggttccattcgccaggagacgctcctgagagaagggcgcgcgcggcacaggtagggggaggcgcaacgtttcccagaattaaaataaaataaaataaaataaaataaaaatcccttcaaggtggttgtgtagtaggggtgggatgggggagagaaaatcaggcgcagactcgatgagttggagaaagcagcccctaactcggagtcctttacgcatatgtttgtctgtcccactgtctctaaccaggggccttccttgcacctcggagcaaagcagctcggatagcgccacacgtctgcgcgctgcgtgggaagggcagggctgacagcacttcctccccggggcagcgacctggagcccgggtgcggcagtctgcaccgcgcgtcgctttcccggccggagtctcgccgccttcccgcgccccgcagcgccccgcagagcagtcgaggtaagtggcgctcccagtcccgggagccctgggagcgccagcacgggcccctcggggctgtcaggaacccgtttgtcaagcccgtcgggtccgacgccgggggcagctccaggatctggcctcgtgaacgcgtgcccccaggcgtggccctcgagcgcagcgggtccccagggtcccctccgctgatctccactctggacccggctcgcgagggtgggggtgtgagggtttggggttcgggtttgctttttcccgagctattgcaacagatttgacagatttcctgcccaggaaattgctgcaaggtcaaacggggaactgctatgaacccttgcacgtccagcaggtcagcaggtcagcaggtcagcaggtccgggagccccagtctccc

SEQ ID NO: 27482 - DNA, 56 bp, Homo sapiens; identical to SEQ ID NO: 8943
  chr10:27144571-27144627
  hypo

SEQ ID NO: 27483 - DNA, 870 bp, Homo sapiens
  chr10:30347839-30348709
  hyper
cggagcgggagcggggccgcggcgggagccccccaccgtcccgggcagtccagacggccggggcagcgtgggaactgggacctcggggacccagcgcggcggctgtcagctctggggtgaggtccgcgagatctgggcgcgagggcgcgggaggggttggtggacacaggctggggagggcgacttcgagaggggagtgagtgaccccggccccccaggccctccgcgcgccgaggggcgacgcgagcgctaacgccagccgcggcccgcggtgcccgccccgggacccccgcgctccgagcggggcacctgaggggaggggacgcccctcccgggctggcaggcgccctccaccccgaggctgccgggctaggcaccgcgcggggggcccaggcggggctgcgactgggggtgcagacatcccccaccgccagggtggctggaaccggagcgacgtcccagctggagaagttggggggagtgcgggaggctgcgggtgaggcccgcgaagcgccgtgggagcggccctaatggacggtgggagccaggagggttagacgccgggacttaccgagcggctccctcatgccgcctcgcgccgccaccgccgccgctccggccggccggggaccagcgcgacccgccccgcctgcagccgccgaggccgagcatgcccggagaaccgccgtccgccccgcccaccgcccgggcccgccccgcccaccgcccggggctgcctcctctgcgctgagggcggtatccaggccacgagcttcctaggcttttggggtccgcctgcgtgggtcgcgcagaaggcacaagtgagctgaccaccattccctcttttcttgtcacttgggtttgggccac

SEQ ID NO: 27484 - DNA, 2139 bp, Homo sapiens
  chr10:31607954-31610093
  binary
cggttgccgcaaaccgcccggtccctagcaacaaggttccggccgtagagcgagagcctctaggtgtaaggaaggtgatgtcgtaaagccgggagtgtcgtaaaccaggtgcggtggggaggggggaggggtggaggcggaggggtgggggggaagggggagggagggggaggaggtgactcgagcatttagacacaagcgagaggatcatggcggatggccccaggtgtaagcgcagaaagcaggcgaacccgcggcgcaataacggtgagtggcggaggggaccggggagcggcggagtcagggggagctgggcagccggggcgcccccgggggtgaggggggcgagccgggctgggggcagccggggcagggacggcaaagtggagtgggaaagtagaaagtagtgctctctgcccccctccgctgccgccgctgccggagccgcgccgcggccgctcgctctccctgaaccgttatgtctcttacctggtctctctccgcctagcggctcccgccgcccctgccgcctccctggaccgttagccggcgccgacgccgccgcatccccggcgcagggcgggcggccgggacgcactggccacttttctggtcccgggtggagcggctgttgcttctttccgcacttttccccactcttgtgcccttcggcgcctccctctccccctcctcctggccccctcagcgcgattctccctcagcgcccaggcccccgggagccgcggaacaaacttgtgcccggcgctgaccgtgcaaagtggcttccgcgcgccgcggccccggccggcgccgtcgctgtcgctcgggccccgcgactcgggccgggctgtgggcgcgcggcaggcgggctgcggcggcggcgggacggggcggccgcgggttgcgtggggtttgtgcgcgcgtgtgcgcgggcgccggctgtgcgcgccgcgggcggacagggttcggccggcggcggtaaagttgggacccgcgggccgggcgcgctcgcgtaacggggattagaggcgcgggggcgcgggtccctaagcgcccctcctccctggcgcctcccgctgcccggcccagagccccggcctggggactccgcggcgagccccgcgagtggggtccacgtttggcggggcgcggcggggcggcgcggggaacaaggcaggaaaggtacccacttaacgccgccgggagccgcgcggatgggggcgagctgggcggcgggtgtgtttgcggagttgttacctgggcttagagaccgggaagcaccacagacagatccccctcccggggcagacgaggtctctgcgccgggatgggccggtgtgcgtgcgcctcgcgcttttctctttcggtttttggggaagttgttacctgggccggacgcacggagcgctgaagccggataatggggcttggatggcgctctgggtctcgggtggaaggagggtgggggagggggcggacggaccgacggacgcgcggggctgctacttgcaccgcagctgcagtgtttattgatttgtgctgctgtgccaagggaaacacacacccctctgcctggcgtgagagttaaaaaaaaagagagacagcccgagggatcgagacctgaacatgtggtggtggttgcacagtcgccttttccagtttggagagacgttgtaagttgattgtatttctggttatctcggggcgatgctatgctttctctccctctcgtgcagcagcgaaatgtctgctgattgttattgtctggacagttcctgtggcgagaggggcgagacttgtccgcccgggggcggcgggagcgcagggagagcagcccccgcctgcgccgccccggtacctgtttgtataataatgggcggcaacggccctgccgccggccgcagcccaggctatataaggaattacacgtacatttcggaccgaggggctcgctttggttcctgcgttatttttaaaacgacttttaagagaggggcaataaatgcgtctataatgggaccgctgcagcgtcgagaaaacgaggaaatacgtgtttaggagaaaactctctcgtgctcccccagccccaccccccgcgcctgggctccctttctccctcccctctgggatgcgaaacgc

SEQ ID NO: 27485 - DNA, 469 bp, Homo sapiens
  chr10:3160827-3161296
  hypo
cggcatgagtgaaaaggcagacgtttaccgctccttaattaaaaccacagactggggaaggcggccgggtggggaccggcgtggcgtcctgcggaccgcgtggagtttggggtgtctgacatcgttctccacgtggctattttcagcgttctcccggggaagtacttggaagagatcgccacacagatgcgcacgcacagcatcaacgcgctgctgatcatcggtggattcgaggtacgttaccgtttctctcttgccggtcttgcaggtgtgagccgcgccctgtgttggctaaacattaagctacttgttggctactggccacgatccgagatgataggttcccagacccagcggccactggagaattgtagaacagcaggatagcaggtggtaagacgtggcctacgagtggcccagttccagtaaagcaacttaaccgagaagcaaaagcttgactccttaaccc

SEQ ID NO: 27486 - DNA, 566 bp, Homo sapiens; identical to SEQ ID NO: 23773
  chr10:3329552-3330118
  hypo

SEQ ID NO: 27487 - DNA, 849 bp, Homo sapiens
  chr10:49731746-49732595
  hyper
cgtcccggccgtggacttggcggacctgcagccggcgccgcggccagccccgggccctggagggcggaccctcccctccgctctacccactcccgcccaggggccggaccccacccccactcccacatggggaccgaggagccccaggatgcgcccccgcgccccgagtgaaggggagcctccccttccaaagttaggagactcagaggagcagcagccgcacctgagccctttccaaagctgaggcaggtgcgggcggccctggacaccccgtggcgagtccccgaggcggggctggcagcctctggcggcggccgcagggagcggggcgcacgtgcgcgccggagttacctttgggcgctcgcaggtgtcccctccagtccttgcagcagcacagccccatggcagccgcccgcggccccgccgctcggctcctctccccgcctgccgcctgcgccccggggcggcgcggccgaggtccggcccacgggcagtgcccagctgggcgcagggtgcgcgggaccgccggcccgcggctcccgggccctcacactccaccgcggccccgcgcagcgggcatgccggcctccgggcagaccctgctaatcaataggagaacgcgcagatcgcgaccgccgcgccactgcccgcttttatctccgcgcgccggggcggccccgcgctgctccctgccctcgccggcgccctccccacggcccgttactctcccggggtgccgggccgcgcgctctcccaggagccgccagggggcgccacggagccggggctgcctccgcctccctgggagccaagcaggggtggggggccacaccggcctggcctccccgc

SEQ ID NO: 27488 - DNA, 669 bp, Homo sapiens
  chr10:50323163-50323832
  hyper
cgctcctgctgcatctcccctcggggcctgccgctgggaagatctcggctgctgcgagagtacccagccccaggcgaggtcgggacggggaccgcgctcacgggaggcgtcctctgaaccttggggaggcgccgctgcgcccgccagaccctcggcgagcccaccggagcgcgctggcgacagtgacagcgccgccccccgcccgcgcccggaggtggcagggcctccccaccaggcccggagccccggcctccccggcgcggccgcccggcccccacccttcccgctcccgcctggccccgccgcgcttacccggagccggagcccgcgccagcagcgcggccgccgccagtgccagcagccgcatctccccgccgccgcccggcgctgtgacgcgggagagcgccgccgcctggcccggccgccgccagcccgccccgggcccgcgctcgcgcccgcccccggcccgccccttgggccgcctgccacgcggggccggggctgctgggtcccgaggcccgcaccgggcgcgggagccgccgcgcgatcggttcgctccaggatctgtggcgtctcctttcaacagccccatttcccagatgagaaaactgagtttctgcaaggtgatcgctggtgactcacagaacacacagctgcagtgcgaccggc

SEQ ID NO: 27489 - DNA, 207 bp, Homo sapiens
  chr10:518263-518470
  hypo
cgcgtgctgcaggtccacgcccactgcacttctgcctcgcccagtggctgggcacaggcaccgtcctggcacaggtggcagatggacgtattgtatcaccccaccccgtgcttacctgaccgatagcgctcatctcgtgaccctgaagaccgtcggcggtggtagcgagaggcggaggaaggagtgacaggagcccggcgttcttgc

SEQ ID NO: 27490 - DNA, 552 bp, Homo sapiens; identical to SEQ ID NO: 23777
  chr10:5874790-5875342
  hypo

SEQ ID NO: 27491 - DNA, 470 bp, Homo sapiens
  chr10:64578291-64578761
  hyper
cgttcttaccacgtgcgccagcccactccgcctgcgctctggcgggtcccgcggcccccgcgctgaccatgggcaagacgacgcctcggaagggagtccgactcgcatctcgggccctgagtccgaaagaacgggggaaagccgaattatgcaaatgcggatccctgcgatggggctcgggttacggcccccgccggccccttaggtgaggcacccaccggcagcaagcgcgggcgaggcgactgctcgcgcttcgctcctctctgcgcacgtgggcggaccggcaggcgggcgagttgcccgggccgccccgcgactggcgctgctgccaaacccgccggcggtcgccgcgcgccaccccgagggggagctcctggacgcccgagtgcccggccagcagggcgcggagggcaggaccggggctgggggcggggcggggtgcctgagcgagggaaaaccgcgaggtcttc

SEQ ID NO: 27492 - DNA, 4760 bp, Homo sapiens
  chr10:7449896-7454656
  binary
cggtggtcggccgggctcctgcccagtctcggctcctccctcctccccaccagaaggaaaaacttgggcccttcgagaaccctgtggaatgttctttgtaatcaactgtacatccgcttccacggcacggcctcgtgcaaaatcgcgggtttcggggccttggagcaaattgcgcttgtcagcggcgacgtcaggaggacaaggggaggggttcgcggctgaaactgcagcttcgcagcacagagccattttaggctgctccccacctcgcggggcccatgggaaagccggccccgggagggcgcgcccaaacgcaggctggaggagccacggacgcgtcctggccggcgtgtcgccatcgttcagcctcgctgcccaggtgggaggggtcacctgccgcggggtctccaagccagtgccgcttgctcccggcccccacccactgacagcacggcgtccgagtgaccctgtctagcctcgttctgcgctcctgcaaaccacgttgctgcgctaactacaaacctggccaacatgtctttgtaaccctatcatttaaaaacgcttccaggcacctggccgctgccagatcaggttcgcgggcccggaggaggtcctcccacctgcccccgccagccccggggaccgtgcgcggcctccgtgtggcccccgcccacgaggtccctcgggcaggaaccgccgcgcgacctctgttcagcggccgcgtcctggccacgggcgacccctgtcgggaaccctgttcccggctaagctgcgttcccgcattccggtggctctcacccgagctcgcgtttgctggctttccctctggctcctctgcctgaccccgattttgtctccgaactccactcccagatcctccccgccctggaacgccgacctttcccccgcacttcgccgcccactcacatcccccggcgactgcccggcctccatgcccgccaagacaagaagatgcccctctccgatgcgccgagagggttcctaagccgagcaagggacaatttcttccccaaacgctgtccccatcccccaccttccctagagcgcgaaacccaaaagtaaggaaggcaacccctcgcctcgaccctacgtgcttgtctcccagagccgcgcgctcccgcccttctgccccaccccaccaccaccaccaccactttggtcttctccaagcttcggtcccggtcccccacctcccaccccagagcggcgtggaggaaagcaggagcccactattaagtgcagcgcgccccctgcacacacgaaatccggctggcgtctgcagcccgattgcacccaatacccgggacagttagtccttttaataagcacctcctcgccccacctactcggggatctacccgcgcaggatccagcacacacaaggcgagagctagctcgtctcctagaaagacaaaataaatcactccctctgccctcatgtactttacaccacgtgtccgcagtttgtcacgtcaaatcatggcagggtctggttccaagacgcacacacacattcggggtggttctctttgacacacacacccaaaaaaactgcgcacacgcaggcctgcacactaatccacaggcacacacgacagttgcgtttcggtgccctggtccgggccaggggcacttctccatccctttcccccctagcaatggacttgacacacagactctaaccacggaaaaaaaaaaccggacagcccattccttctttttttccccacttaattcgctaaagcgcttcctggggtagccaaagagagtcgaaactaaggggtggaaacttcagctgggttttttcccacctcaaaacctttattttcagtttttaaaagccaccttagcccgccatattgaaactggcacggtttctaaagactccttccccgcagttgtggcgcttccaagaaaacacgagtacggatcaggctctggatgagtgtccggccaccgagaatcagccacttcccaccctccaggatcccccagctccctccagccccttcccaccgcccctggtcaaaatcaataaatacatctcgcagttcctacagttgcattttggcggatttctgcaaaacatacacacacatacacatacccacgcacgcatattaaaaaataaactccagaaccagctcaagtcagcaattttgaaagggggtcgaataagaggagacaaccggaaagcccctaagtgacaggatattactttaaagagaaaataatgaacaaaaagaccatcctcgctggagcacgctccaaaactactactgccaattttatttcagttgctcaggcaaatgtttccaagggagcgattccgaatgtctgcacgatttttacccccatgccggtctccgattccccgtcctcaccatctttttctcccacccaaaccaaaagaaaggggagaccccagcgcggaggagacgcgggagcgcggggtaggtagcagcggcggctgcgtcgctaaaatgagtgcagaaacgaggaaggtgggcggcgggaggggacaggctgcgcccggggaaggaggacactttgcaactccggacggactcccgcacggctcggcttttccgagcccggagacgcaggcgaaggggacccgggaagcaaaaatgacaacctggagcgcacagaggagtttgaagcttcgctcaagtgcagtcgctttcttctcctgcccttctctttcgctcccctgcaccctccccagccttcccccacccgccacctccaaccccagctccctcaggcttccttcctttttttttttttccttttttttcctaggctggaaaaagcccctgaccagcgcactcaacctgcgggccgaagggctgctctccggccagcctgggcgccggggacagcagccggcgcggcgtcctacctggtgaagttcgtcctgccctcggcgtggacccaggccccggtcgccgcccgggagggcaccggcctcgctcgcttgctcgctcgcccgcccttgcccgctcgctccccgcccgccgcctccctcgcgcgcccgctccggtcctccggctcccactacagctcattccaatatggcatcctctctgtgcgcatgctcggcgctcttttttttttttttttttttttttttttaagattttgtgtgtgtgtgtatgtgtgtgcgtgcgcgtgcagcgaactccttcaacgaccttttccagcgcttgcaaaatttcttaagccaattagcctgcgggacgtgatcggctccttccccagccagctccgcgccattccctgcgcctaagcaggcgggcacccccaggaccctgggaccttccacgcccacgcggcctcctccccaccgcgctccccttcctcctttttgtgagctccctccatacatgatctgcagaaagttcccatcgcgggcgtttccgcacacccctccgcaaggacaactgggcaaactcccgtttccctggctgcggttcgtgagctgggtttccaatggctcagtcgaccgtgtgcacaaacttgcgctttatccgccggggatcgctgggagcggagataaattcaatccccagggcaatcttggccccgcccgccccaccccatcctgtgcttaaatagagcctttcttgaagctgcgaacatttccaggccccttgggcagggctggaggggccgaggagagctattcgagggaaaggtgccccgaggggcaggaaattaagttggggctgcccgggcgagctgccaggtagccgtgctcgccacggcgtctcatggggcacctagctagtggcgggcctcatagggcgggaaaagaatcgtcgctcacaccccagcaaaacgtggccctcgacggtccgttggagagccccggcggccgtgagccccgggcagggctggacgtctgcggagccctcgggcactttgtcccgggcgcctggggaggaacgcggagctcccagggccttaggtgcaacggctgcgcagagcccaaacgaaatgtccccagtgcggaaaagccggtgacgccctggtagcaagaccaagagcttccgaagaacgctgcgcccttaactagggggcctcgcagagatgcctgtgtgggcctgcattgtatatttctgcgaaatagcgaatggacacgtttgctcagggtttttatggttgccaaagggggtaaaattacccagtcccccaaatctgtgtcccatgaatccctctcatagtacccctctccagggggccaagaggtcctccaggtccccgtgggttcgcagctccacccgcccttcctcgccctgcatccctaaggagaggtgtccgctctgaagggctaggggccagccatggagtgaggggaccggggctgaccacgcgcggcacagacagaggtcctcaggcgggccctctcctggacggtggggccggagctgatctagaagaaatacggagggacgtgccgagaagccgctctccttcgccgcgaccctggagagcgcctctccacccaaaggatctgccgagctgagagatccagggcgggcgtccgcagccgtgaggccccctgcgccgccagtatgggaagatcctgcctccttacaccttggagaacgctgggcgacgactaaagcgccttccgccggcctgtcactccatgtgacacaggagccacgtgagacccagaagagtccagcgactcgccgcgcggcgcactttaaactctagcctgagtctgc

SEQ ID NO: 27493 - DNA, 882 bp, Homo sapiens; identical to SEQ ID NO: 23029
  chr10:83633664-83634546
  hyper

SEQ ID NO: 27494 - DNA, 822 bp, Homo sapiens
  chr10:92616995-92617817
  binary
cgatgaggtcggtgacgctgacgaagggcatgaccgccacagccaccgagaggtcggccagcgccagggacacgatcaggtagttggagggctggcggagcttcttgacgaagcacacggagatcaccaccaggcagttgcccgcgatcgtcagcagcgtgatgagcgtcaggatggagccgatcacaactttctcgactctgccgtagttgatctgttccccacagccggaggcattgtccgggggcgcgtcccaggtgggcgccgggctggctgtcacctcgctcagcaggtgcggcgcccaggagcccgcgaccgggtcggcgccaccgtcggggctcaagtcgggcagcccgcgccccacttctggcagaaggaaagagcggaggtgcccgtagaggtccgggcggccgctgctgttaacgtccatcatcgcgccgccgtgtgccgctgcccatggagccggcgccccggccacgcgcctccggctgccggccccggggcttcacctcaccggttccgctccgcccggcccagccatggggcccgcgccgaccgctggggggcgcctggctctgtctcggagccccgcactccccggacccccggccgctgcgggtaacgcggcagcgcggcctcacggggactccctgcgggaggcgcttcggcccccgacggacgcctgggacgcgcggagtcgagggagctcgggctgggctccgctggcagctccacagttcgcagcagcagctcggctgcgccgagagcgcccgggcggcagcggcagaagttgcggagtgcgccccgcccctcgcgcccgcc

SEQ ID NO: 27495 - DNA, 1794 bp, Homo sapiens
  chr10:94449625-94451419
  binary
cgagcgcggccccaccccgcggccggcggagcctatcgccgggagcgcggagcgcggataaatgtagcgccgcggcgcgggccagcagctctgcgaggggccggagcgcggcggagccatgcagtacccgcaccccgggccggcggcgggcgccgtgggggtgccgctgtacgcgcccacgccgctgctgcaacccgcacacccgacgcccttttacatcgaggacatcctgggccgcgggcccgccgcgcccacgcccgcccccacgctgccgtcccccaactcctccttcaccagcctcgtgtccccctaccggaccccggtgtacgagcccacgccgatccatccagccttctcgcaccactccgccgccgcgctggccgctgcctacggacccggcggcttcgggggccctctgtaccccttcccgcggacggtgaacgactacacgcacgccctgctccgccacgaccccctgggtaaggcggccgggcgagggtgggggcgaggaagcgccacccggcaggtggcagcgcccgggaggccgagggggcgaagggggcaggcggtagacggctgtggcaaaagcgatggaaaagcagctgtcgggcacgcgcggggacgggaggcgcgcggccggggctgaccgcaccgtgactcagattggttttcctgcaccttgcaggcgtcggggcgcgcgggccggcggtagacctcgcggcgagggcagccgtggaccgcgcgtgttacccggggtggggctcccttagcgggagggacggggaaaggggcgtcgaggcgcccctggccggcccccgtggggcagggatcgcagccgggcccgggtggctacggggctggacctggttcaacaggcttgtgcagtgaaagagcctgaccctttccgttcatacaggaaatcttgagttctcgataggagtaaatctggtttcagaagctgttaagtgttttcctggctgcatgaagcagacccttcccccggagtagtgcacgctgctgattattttatcgacatcctcaatacagacaaattcaggaaacactcgacttctgatagccgggatccgtttttctgatattgttcatttcctctgtgtgggatgtgactttatggcagctaaaataaccagttgcttcctattttttttcgaggctgttttgcaccagtctgaagcctgacgcaagcaaaatctcgaaaaaacaatgctagctttcaaagcgttgaggtgcaggcctgcagacggacggacggaccgaccgacactactttgggagtaggaagcagcagctcctggtcgccagttaggaagggaagcagggacacatagggcatatattccagaacttcggggcttgtcccctcaatgtgcggcctaacaaataagccgcccgtggtccgcgctgtgggtgacccttggcgccttcgaggtctggagccctagggtaaataaggaaacggggcgcctctagagttttaaatgaactctgttattggaagcttcagtagggaccctgaaaacaattaacgtcttaattagcattttaatgtctccattattacggcgcgggctctagctcagccctttaccttaccttctcaccgttaacaggggagggggattgtatttttagttcatctttttatgtttttgagttgttatcctgtctgtctgattccagcctcgagggtttgatgatgcggcccgagcctggctgtggtcgcctgtcggggctggagcgggaccctcagccgggccgggcctgggggctaac

SEQ ID NO: 27496 - DNA, 51 bp, Homo sapiens; identical to SEQ ID NO: 10195
  chr10:97322758-97322809
  hypo

SEQ ID NO: 27497 - DNA, 1147 bp, Homo sapiens; identical to SEQ ID NO: 22765
  chr11:104034057-104035204
  binary

SEQ ID NO: 27498 - DNA, 1273 bp, Homo sapiens
  chr11:111411097-111412370
  binary
cgcacagctggcgaacttggctaaggtcagcgggagaggaggggtgagatgtggtgctagttttaggcacactgtgctcgttatcagattgcctaggggcccgactgaagtattcctccgcccagcgcctcgggcaaacgcgggatctcccagggaagctcggagggggacagggagctggttcccctctgcgactcgcccctctctggctggccgagtgtctggcgccaacctcgctggaggaggctgtcgggggcgggccagccagcggggctgccctcctcgcagtgacgtcccagggggcggaggggcgaccgactgactccgcgccctcccccccgcctcccgtgcggtccgtcggtggcctagagatgctgctgccgcggttgcagttgtcgcgcacgcctctgcccgccagcccgctccaccgccgtagcgcccgagtgtcggggggcgcacccgagtcgggccatgaggccgggaaccgcgctacaggccgtgctgctggccgtgctgctggtggggctgcgggccgcgacgggtcgcctgctgagtggtgagtgcgcgcgctggggcgggggctggtgccggggtgggctcactgcaccccagctgctgctgaccctcttctgggtcgccacgtatgggactagaaggccgtcccatgccccactcccagacgcagcccttcggagtctcttgcgttctgggggcagtcgcacggcgtctgagacccacgccagttcccggagctgcgcagttccctgcgcgtcctggaacgctcgaagcccgttcccagtccagagttatgggggtgggttggagaatgtaggagaggtggggcagtgggcaaacctgccccagtgggtgccccttcggcccgctcctttacacgcatcgaatcagtccttgggaccacccccgcggggcaggcttgccagctggcccccgcctaccgcccgctccgggaggcggccgcagagacagcggggtagggatgctggatccccggtgccgtgggaaccctgcctgttactcctcgtctcttctgcggggttggatggctgggtcgagcgcccggtatgagagcgcttagagatcgggaaagaactccagttagtgtgggacgagccccacctgactccggggaatgactctctgcttccttcctcctgttgtgtcactgcagcctcggatttggacctcagaggaggtaaagtgctctggcttctggcttctttcagttgttctgcatgtcggggggagaacatcc

SEQ ID NO: 27499 - DNA, 939 bp, Homo sapiens; identical to SEQ ID NO: 22768
  chr11:123228638-123229577
  binary

SEQ ID NO: 27500 - DNA, 1291 bp, Homo sapiens; identical to SEQ ID NO: 22769
  chr11:123300826-123302117
  binary

SEQ ID NO: 27501 - DNA, 43 bp, Homo sapiens
  chr11:125757376-125757419
  hyper
cgggcatgctcccgccggcggagaaggcccagacaaaatgtgc

SEQ ID NO: 27502 - DNA, 439 bp, Homo sapiens; identical to SEQ ID NO: 10197
  chr11:126055123-126055562
  hypo

SEQ ID NO: 27503 - DNA, 81 bp, Homo sapiens
  chr11:126083900-126083981
  hypo
cggtgagtctaggcacttggtgatttaaagtagagttgttctcagtataaagaatttatgtggccgggcgcggtggcccac

SEQ ID NO: 27504 - DNA, 1201 bp, Homo sapiens
  chr11:128562635-128563836
  binary
cgtcggactcttaaataaaagtgagcaagtccaaagcgtggtccggagagcgtggacaaggtaacctgttttggatgtccgggagaagggagtccggccgaaagggcccagcccctcgaggctgctccaactggggcgcgcggcggcccaggagggaggcggggaggtctccgggttgggccggggaacgccggcctccaggctgggtagggaggacggtccagagcgcgggcctccgggtctcaccccgggaaaagtctgggtctgctctgcgctgttgcgtgctgcgctcctgggacctgctgactgtcctagagggaacgtcccgcggtagtgtcagttccctggggaccaggaagggcgactcttgcctgggagtcagtgcttgggccgtcgggtccgggtaagcgctgggggtttggctcgagaagatgcggataggtggcctagggcgccgcggatctccgccctctgcgggcaccgggagcccagggtcgaggcgcgccgccccgaggggccccttctcctaacaatgcgcccggaatggagtccgcgccctgacagcgcgggtcagcccgaaaccgcccagaatccgcttcgatgagtgggtgagccgctctgggagtctgccgcgtctcggcagcggagggcctgagtggaaaaattcttattggatgcactttttaatggttggtttgcctcggttttcgtccgagtcttccccggcagtaggcgctgggttacccgcagccctagccaactctccctccataccccccctaccccacccccaaaaagtttgtctccggctggaaaaagcattaatgaacgtatctgtgggaagaaacggaaagtgaatgagtcaggagggccaccttcggccaaccgcctcaggaaaagcaaagaagccaaaggtctttggctttggattttgggggaaggtgatggggggaggttcagacttcgggaatcagggcgcggacgctgggcgtggaccccgtcattgttcccggctagctcttatctcccaggagcaagtatcctgtgtgcgcagcgcatgaatgtgtctgggcatctccgcgtatatttatatagtgtgtgatgcgaaaagcaggaccagcaggggaggaagagggggtgtggggggggagggaagacgagggagagcagaggggagagaagagagaggagagctcgaggc

SEQ ID NO: 27505 - DNA, 1617 bp, Homo sapiens; identical to SEQ ID NO: 23804
  chr11:128563902-128565519
  binary

SEQ ID NO: 27506 - DNA, 256 bp, Homo sapiens
  chr11:130059543-130059799
  hypo
cgagccgcccatgtgtcctggagtcgctctgggcgcacgtgggggaaatggggcccagagctccgcctcaggctcccgctctctccccagcgagggcagcgtcatcgcctactactggtctgagttcagcatcccgcagcacctggtggaggaggccgagcgcgtcatggccgaggagcgcgtagtcatgctgcccccgcgggcgcgctccctgaagtcctttgtggtcacctcagtggtggctttccgtgagtcc

SEQ ID NO: 27507 - DNA, 587 bp, Homo sapiens
  chr11:130060273-130060860
  hypo
cggggtctcagggtcctcccccagctctgcccagccctgcccccacacgtgccctccttcttgtctcctgcgcagacagctgcagctttggcctgcacgcccgcggtgtggagctgatgcgcttcaccacgcccggcttccctgacagcccctaccccgctcatgcccgctgccagtgggccctgcggggggacgccgactcagtgctgagcctcaccttccgcagctttgaccttgcgtcctgcgacgagcgcggcagcgacctggtgacggtgtacaacaccctgagccccatggagccccacgccctggtgcagtgagtaccccggggggcgggtagggctgtgggagcttggcggctgccctgtagggggccagcttcttcaacgattgggatacagtttatgactcttggccgcaggccactgctaaacatccaggcagcaggaggcacgtgtggtgtgatcctcagctgcagctccaggggagtctgggaggtgatttttctcagccttggcaaagcagaggaaggctctatagtccccagataccaaatccagcctgtgcggcctgtgccctgaaccgcc

SEQ ID NO: 27508 - DNA, 255 bp, Homo sapiens; identical to SEQ ID NO: 26197
  chr11:132953051-132953306
  binary

SEQ ID NO: 27509 - DNA, 842 bp, Homo sapiens; identical to SEQ ID NO: 22771
  chr11:133938756-133939598
  binary

SEQ ID NO: 27510 - DNA, 65 bp, Homo sapiens; identical to SEQ ID NO: 10203
  chr11:19247033-19247098
  hypo

SEQ ID NO: 27511 - DNA, 292 bp, Homo sapiens
  chr11:19367825-19368117
  binary
cggtctgtgcctctttgctgtgcctgtctgtccatacgtgtgtatgtgttggtgggggtggtgtaggtggatcggatccgagccaagccgggggcaactaggccaggcctgcggttcccctggctctcgctctcccacgctccggttagctgcgggcggcgggctagggcgcgggcggggagggggcgcccgagcactgggagccgcggtgcctcccgggtgtgcgctccgctgagccggctcctttcttgcctgcaaagggactcaggcggcggcggtggcagcccgcgtc

SEQ ID NO: 27512 - DNA, 896 bp, Homo sapiens
  chr11:20619116-20620012
  hyper
cgagcctgcctgccaggcctgccttctacagttctcgcattcgtcttgagccctctcggaaactggggactgtttaggcagaaacactcgtaggtccccttggcgtcccccaagatgccaagagcctgcggggtgcttctcagcgccagccggaacttgagcaggcacccctgcggaattctcagtcccacccactcagacgaccctcctccagccagagtccaccacagcccaccctaccctcttaaccctcgttcccgacctctccctacgagcgggccccggggagagagcgactgaccctagcgacagcccggcgggaggtggttgggatcttctccagggttcaaaagcgactttctgagccccaatttcctcagctttgcaattggtatagtttctgaaaggccattgctaaatctaaccgagataattcatggatatcccttgcacaatggttgagtattgagatctcaatagacgttagctcaaaactgcaataaaaagcgacctgaaatcctcaaggcgtctcaaaagaaagatctcctcctcctgcccccaccaaaggcaatgcagaccgtgtgtccccagccagctgccctttagaggggctaggcgggaaagccaaccagcggaggcatccaaacactctcgggctctccagaggagcaggagggtgccccttagtgcccccggcgcccgccgcaatctgccactgcagcctacgcctgcggccgcggccgccgcggcattgtcctcccgccgcgtgggacggcccagccgctggcgacggcgcgcaccccgaggcagtgggctgggctgttggcagtagggaagggaaaacgtgctgtctgtggctcctcatccccgaggccaggggttccccgagctagacc

SEQ ID NO: 27513 - DNA, 149 bp, Homo sapiens
  chr11:3169724-3169873
  hypo
cggaggtgagtgcggagtctctttccagcggctgtccaggtggaggagacggggcgctgtctggaaccggcttccatgacggcagggcgggggcaccgtcctctgcacttttgtacatctttgacattttctatcatacgaagccaaac

SEQ ID NO: 27514 - DNA, 112 bp, Homo sapiens
  chr11:33202694-33202806
  hypo
cgctgagtcgcaactgccacattcaggacacatgtctccaacacttacataaaggacttttaggctgggcgcagtggctcacacctgtaattagccgggtgtggtggtgggc

SEQ ID NO: 27515 - DNA, 155 bp, Homo sapiens; identical to SEQ ID NO: 10205
  chr11:36476175-36476330
  hypo

SEQ ID NO: 27516 - DNA, 1390 bp, Homo sapiens; identical to SEQ ID NO: 23809
  chr11:43602408-43603798
  binary

SEQ ID NO: 27517 - DNA, 333 bp, Homo sapiens
  chr11:445940-446273
  hypo
cgtccaccagaccgcctccccctgaggcccaacatgcagcagaggcagctcctccgtccctgcagcctccttttaactgtgggatatggcagccacccgtggagcggtccgggtgacaaagccagcgagagctagggagcgcccaggtgaaatcccacaggcaggtgtgagcaccaattgtcattacctttgccctgggcccctcagagacctgtcctccccccccgcccccaacagcctcctgggcgcggccacagacacagacacagtgtctggacgagcagactcgtccaggcactgctcagaggcagcccctctgggtcagctggagtc

SEQ ID NO: 27518 - DNA, 109 bp, Homo sapiens
  chr11:447610-447719
  hypo
cgcgcccggccttctctgccacagtttttttgtctctaagcgacagtcaaaaatagaacctaagggggtgtgttaagatcacaatagttggcccggcgcggtggctcac

SEQ ID NO: 27519 - DNA, 351 bp, Homo sapiens; identical to SEQ ID NO: 23038
  chr11:45376873-45377224
  hyper

SEQ ID NO: 27520 - DNA, 881 bp, Homo sapiens
  chr11:46316833-46317714
  hyper
cgggagagtcccctctgccgccaccagagacagccaccaaagcgccccacggtaggacgattcgagatggagctgcaaggggatttaaggcccggctcgccctttgagtcggggtcgtcggggagaccctcggtctccacttctccctgcgggggtgggggcggggccgcgctactgatgaggggtttaggacaccgtgagacggccaggccatttctgcctcggccccagacgcagaaggggtcccatgcaggcccgagccagtgcaccctgcgctccctcagccgcgggccgtcggcgcaggccgggaccctcctccgcgcgagccctgcactcctccggtgccctccacgccgccaccggctgctgctcgcagcctcccgccattggccaggagctctgcggctcccaccagtgagcaggccggattccggtgaggggcggccccgggtgttcccgggttaaccctttgtgggccgctccaggacggcggcacccggatccttctctaaaatttaaagggcgggcggctgaggccaggctccaagagagggtgcagccgagaagaggggtacgcaggtctgcaagcaggagagctcgggaacctctcctccaagggagggaagccggcgccggctgcgcgtgacagccgagaaggagcttatattggcacgactataggaaaaagtctttaacgaggagggaaacaaatcataatatgtccttctccggcttcccacccccgttgcctggaaaggcacccctgtaggacgctcaccccctgcagaaccctgtcgccctcagagcgttgacacatggctcccctgaagttcgtgaactcctggccgccgaccccttgctcttgctccccaatttccatc

SEQ ID NO: 27521 - DNA, 771 bp, Homo sapiens; identical to SEQ ID NO: 23810
  chr11:47208495-47209266
  hyper

SEQ ID NO: 27522 - DNA, 433 bp, Homo sapiens; identical to SEQ ID NO: 23455
  chr11:47358910-47359343
  hypo

SEQ ID NO: 27523 - DNA, 688 bp, Homo sapiens
  chr11:492571-493259
  hypo
cgggagccatttgcacccacacccccgggtctgcctcggggccccgggcgtcaaaaagctttacttttagtatttttccttgactacttttggggaaaatttcaagccctctaagtcaagggctgtaatgtggagcacacacaagagcagcctctggggctcagcaggaagacgtccggtgtggccaccgcgcctagcagtcctctttccagtcacggccactcacagctttggcctccgtggccctgcacggatgagttcttccagctgccctgccctgcgtgctgcaggacacatggggccttagcattctgctctttgcaggtggcagctttgatcgctcaggaggaactgccacctgatctccccactgcaggggcccccactccccccctcacgcgctgcgggtcctgtcactccacccacgctgtccatccccgctgatgctctgagccaggtggtagcaggtgggggtggcgccccgctcacggtctccatctgctcttcccgaggagggcgaggcagggcttgtgattaaagtcctgtgttccggcgcccgtgtcccaaaggcagcccctgggagcccttccggcagcaactcaaccccagacagcgcccaggggctctggttcctcacgcgctgagatgctccggactcaccttgggcatctctcgccccaggcctggc

SEQ ID NO: 27524 - DNA, 677 bp, Homo sapiens
  chr11:57194101-57194778
  hyper
cgctcgaattctgaataccgtcccctaaaataatgacagcaactcaaccaggtgcagaggcagggagatttcatacagaagacacaaactcccgctgccaagttggtgttatcttcagtttactgacaatgaaacaaaagctcccatggatttcaggaacttgcccaaggtcacagggctagtttagtcacgacgcaggccattctactgccagaaatacccccaactcccatgaccctcgcctaggactcgcaaacctggtccccgccgcccttcctcgcatcaacttctaccaggaaagcctccgggggccgctccccgccagcctccgcaccccgctccagcctgcggcctgccctccccgcagaggagcccgaggggccaggccgcgctcggcgccccatggcgcccgaaaggggacccttcgccctacccgcctgctccgcgccggggctctccgcgccctttccgcacgggccaggttcgcattcgcgcctctcgcagcccctcccagtcccctgctcgcctccgccccctcctgcccgcccggaaggggctggggcagacctcccactctccatcacttccttcttcttttcccttgctcacagcctcccgcgccctttttacctctccctcttgaaacttctccctctagaaccccctagaaccccagc

SEQ ID NO: 27525 - DNA, 614 bp, Homo sapiens; identical to SEQ ID NO: 23814
  chr11:60718609-60719223
  hyper

SEQ ID NO: 27526 - DNA, 752 bp, Homo sapiens
  chr11:63767705-63768457
  binary
cgggagccgatagccgccggtgatcttggccttgccagtcttacagctctgcagggtccggcactcgtcggtaagcagggggccggcggcccgatgaatgcagccgtccactgcgggaagggcgggcgcgactgagctggcctggcaaggctgcggccccggggtgagcaccctcagtcccgagaagcccctcggcgatgcgaggacccatgcggagccgcgccccaaccccgtggcctccggccgcggccgctgcccccacccccgcccggaatgtttcacatctggggaaaccgaggcgcagagcgggacggccctgggcctggcgggaagtcgcgcaaggaggccggcagggggcgcacccggcccaccctgtcccttccaggccgcgccgccagggcccaggcagggcggctccgggaggcgggggccgccgggacaggaaccgccgcccgagccggggtgacggggaagcttcctccccgacgcccctccctagccctgtcccgggcgcgctgcagggcccgcgaccagtcgctgcctccgcccgggcctcagcgtcggtgcgatcccaaggcccacctccccaggcggcgccccatcacggggcggcggcaaaccctaggacccattttgcggatgaggaaaccgaggccaccttgttacagggtgatcagatctgtagctggagtctgggtcttccagccgcgcggggaggtgagcccgacgcccgggcccgagtctcctggcgc

SEQ ID NO: 27527 - DNA, 300 bp, Homo sapiens; identical to SEQ ID NO: 10211
  chr11:64088230-64088530
  hypo

SEQ ID NO: 27528 - DNA, 706 bp, Homo sapiens
  chr11:66631185-66631891
  hypo
cggtcagggggccctccaagggccgggagcaaaggcaggcgggggctgcagcctctcaccttcacacctcggacgcggaactccgcaagggccctgctcatcttggtggcggccgtggggtggtctttgccgtgggcaatgactttgaccagcagggagtcgtagtggggcgagatgacggctccttggaaggcggaagcattatccaggcggatgcccatgccctctccgctccggaacacctgtgggaagggtgaggcgtgaggacctgcgccagaaactgcggtcaaaagtgccccacccaccccgaggctggccaggtgtgcacccagcagctgctgagagcagagcgtggggtgtctgcaggtgaatcccagctctggctggtcaggttttgctgtttctgccaccaaacccaggagtgcgtcccttctctacgtgccacgcagtcactgctactggctccctgtgaggagctgggagggggcagaggaggaagggaatgcctgccgcagagcgggagaggggcccgggcaggcaggggccagccctgcctctattcccacggacctgctgcacctgcctgagcaaccctctagcctttcagactcatccacgttcgttccacagcacggattgaggtctgctgacccggccgctaaagggcctcgccgtgggctcccagacagcgaggggacggcaggcc

SEQ ID NO: 27529 - DNA, 523 bp, Homo sapiens
  chr11:67895663-67896186
  binary
cgtccgtgtagccttggccgggcccccaagcttcttagaatgccatctaagaaggcagagggggatgagcggcggcggggaggaggggcaggccttgggaagatccactgggtcacagggaagcgaaggcggaccctcctcccccagcgctactgcccgggccgaattccaaggccagcggctgcccgctgagaaggaatccggaccaacgggattctggcttccctctggcccctcctggcgagagcggcgccgggaggagggggcctcagaaggggcgggcaggggcggggcccgcggggtaggcggagctcccaggaaaacagcgggcggggcctcgcgcgaggggcggggttggcggcgaggcgtcccaggacccccattcctccctccgccccggggcttctggggagcggcgcagcttgactgccaccgactgcgggcctccctgccctacaagcccccacccccgcccccccttgggacctggcgaggagttgccccgcaaagttggggctggtgc

SEQ ID NO: 27530 - DNA, 810 bp, Homo sapiens; identical to SEQ ID NO: 23824
  chr11:73072922-73073732
  hypo

SEQ ID NO: 27531 - DNA, 148 bp, Homo sapiens
  chr11:75858225-75858373
  hypo
cgcctgaagctaaggagaggacaggagcacttgggaaggaagcggtctggggggcctaactgagcagcaccctgcctcacaggagagcaagtcacagacgtttcagccccaacgctgccgctcactggctatgtgaccccggcgaggc

SEQ ID NO: 27532 - DNA, 40 bp, Homo sapiens; identical to SEQ ID NO: 10217
  chr11:76164370-76164410
  hypo

SEQ ID NO: 27533 - DNA, 118 bp, Homo sapiens; identical to SEQ ID NO: 10218
  chr11:77383112-77383230
  hypo

SEQ ID NO: 27534 - DNA, 2375 bp, Homo sapiens
  chr11:79150134-79152509
  binary
cggcctcagagctcagtacatgggcaccctcttccccccaccccccaccccggcgattggaatcccgagcttgccccaccaccgccttctacaaagcagcggggtgatctcgtgtgctacaaacaccaagccagtatgcaggttcaggcaaaactctggctgcctccctgcgcccctttcactgcgtcgatggtttacagataactgcatttctataaaccctctctccacggttagggggtgggagggagttagagatcgggtgggggcttggcgcggtactgttgagggctctgcacccaactgagcagtaatacactcatccacatggacgcgggtgcataaatcgccttaacattttgccctgaaagcggagccaatttccaaagttaaggaccacgcagctgaatttccagtactttccaacctcgcctaggcgggggcaggcagagaaggggcgggcagcgggcagctaactcgcccgacccccccgccaagaaggactcactaggtgaaccccccgcccttcacccaagtagttggttgtgtattcctcggttgcgtgtgtgtgtccacacacacacacacacacacacacacacgccgccccactaccttccagtctgctcctccaatgtaacgaccgcatttaaaaatggcaattaaaatgactgaggagctcggtgatcacatttcaacccagagcacatttcccgaagctgggggtgagagtagtcatacagtcacactcacacccgggagccctccaagcgtccatctggcggctgcagcctcagttggctcctagacgaacatcaataccgcggccgggcgcccggtgaggagaggcgggcgccccgcgggttgcagagggcgaggagctggggtcgcatctccaggatctgagctccaaccaccgcccgtgcggggctgctgcagccggcacttgccccgcagggcaggctgcagccgctgaagcccggcgccgcctcgcgggctcctccagcgcccgacgggggcctggggcgagctagtctgcagaggggctgcaggcgaccgggccggggcggggaacgggatccgggagaggcagacgaacctggggcgcgccgcctccctcccacccgcttcccacctccctgccctcccccaacccttgctcccaggctccagtccgcggcgggctccgggggctgcggcggctccaggctccagaacagcttgcctcttcggccacccgcgccctagcctccctcctcctgggccaggggagcaagcaaacatctcccggagccctcggcagccgcgtgagctacccgaaccctgcccgggccagcagtgcagagggcgatggagctggcgaggcgtcgccgcggtccccaaggcgcttttccgtagagcggatcacgccgccttaccgtggctgcaggctgctaccgccggggaagcggcgaggacggcggcagggaggcaaggcgccgcgccggtggctcctctctctctcggcggcgcggctcctctgctccgcgagccgtagcggggcgcccaggaaggagcaggtccgggctctgcgctcagctccagcgagaccaacaatagctcccgcggggagcggagccccagcgagcctccagccgcgcgcgcacgaccggctcccgctcccggccgctcccggccggcgtccctgccagcactgctgccccacatgaaacagctgcaatcccgaggcttctggggggttggggcgggtgtgtgcgcgcgcgtgtgtgagtgtgtgtgtgtgtgtgtgtgtttaatagcttcccttctcttcttcccctccctgcctgctcgcctgcctgcctccgtcccccaccctcgctctcttacacacagaaagagagggcgagcgagagagagacacacacacacacgcacacgcacacgcaggttacatgaatgggaggcggtagccaatcctacgaggccggcgagccgcgcggcgcactggcgctgggagcagggccgcactccggcgcgggggggcgccacgcaggtgatgggcgcctctccgggggccacgcgcggccgctccctcaccccagtctcggttcctctgtctccttcccccttcctctccgccgccttctccatcttctctccttttacctcctttgctttctcgagttctccgagctctctcagttcggtatctttctggtctctttcttcttttaccctccttgcttgctttctcttcccctttctgaaactttctcttttcctttctggactttcttgtacttcctctcctcttgccttttgttctttcctcctcctttggctttctctccaggctccccgtagcacggtctcgtcccctctccctcctcttc

SEQ ID NO: 27535 - DNA, 791 bp, Homo sapiens
  chr11:8189961-8190752
  binary
cgacttaaggtttgctgtaccaattccatttgccttgatttcgtaccaagcggcgcgtcagaaagtacacggaaaacctaaagagggaaacccaactgggaacccttgactcaaagcacgtgaacaaatggtgacgagatgagttaagccagcggggtaagagagaagggactgcgcctaaacgggagtacgcaaggccacctagaggatgcacagacctgcatgcatacgttcctgacccttccagcagcagaaccatctgggccgccacccgctgataacaacggaaccgtgggcattggcccttcaacgccgtctcgcccgccctctccagtcagtttggtggatatttcggtgaaggctgcagactctcagagtcacccctccctcaagcagcgttctccgtactcttcggcgccgggaagctcagagggagctggcctgctcttaccttcaggtgtcggcggcggctcctgccgcttcccgcgggacaggaaggccttgggcagcagcagcgacagagccaggacaagcccagaagccagagcgactctctgcactgtggagtacgccatgactgctcacggtggtcgcaggtgcagacgccagccggaaccggaaccggaaccggagcacgggctgccgctcccgaccgaaccgcgggcggcgcggacggcgtcgcgcgagggacaaggtgcgcgaggcgcacgcatcttcacctccactgtcgggagttgacctgctcctcccgcgtggttacccgtcgctgtaaatggtaccctcgccttccc

SEQ ID NO: 27536 - DNA, 870 bp, Homo sapiens
  chr11:8284161-8285031
  hyper
cgtgccactctcgcaggccgctcccgcacaagtgctaccggccggcggcgggacactttcttcctctgggccaaactcccgcctccgcgctcagagagacagggagctagcgggccggcacaagaggcggctctctttctcaccgagtcacgctcatgcagatgtcccccggagggtccaacccgccttcccctcgcctgccgggcaccctggcgctcgcgccgtcctcccgcgctcccgcttgccccgagctctggagcccgattctccccgaagccgctgatttgctcggcgctcagcgcctctcgggttacgcggcggctggcgcgagggtgatggctgcggtgagagcagcagcctcagacacgaaatgctcagagcgaacctccgcggcgcggagatcgcaagggagccccagcctccgcgcggccccgcggcgcagcacacggccagtgcacagctcctcggctcgcggccgggacccggggggcgtgcggccccgggcgcgtgcagcccggggctcgacctcctccccccgcaagttccgcccggctgtcccccggtacttccccccgccccagccccggcccccagcgcgccgcccgccccgcaatccccgcacagcccagcaggtgtgcgcccgtgtccccgcgtgtgtgtgcctgcgcgccgcggcagggggcgagggggtgaggggcgtcgagaccccggcccgccacctaccgtcctccttgtccagcaccatcatctcgggcgctccgtgtccagccgcagctaggctcggccgggagaagggcgccgactcggggcgcgctttggaggggcggccggtcttcgggcagctagcgggctctaattacccgcttgtcc

SEQ ID NO: 27537 - DNA, 877 bp, Homo sapiens
  chr11:8289532-8290409
  hyper
cgctgggatccgttccgcagtagggtgcggaaggggaacgtgcagacacccagagaggctgggagactggctggcagtgggcactgccgggaagcccgcggtgcgggtcgcagaggcgctccggatgcccgcaaggcggcaagagtccgtgagaaagttcccagccggagcgcgcagggctggcggcctcgttgggaccgggagacttcctaatcccgccgccgccgaagcccgggcgctgagcctggcaccgccgaccccggcaccggcgcacacatcagccgccgcgcttccgggaagccacccatcagccggaggaggcccgcgggtgctgagggctctgccgccgctagcggggtggactccgcagggccagcgccgcagtctccgccccacgtcccgcgtgcccccgggcaccggcaccgggcgccgggcacctaccgtcctcctggtccaacaccatggtcccgacggctccagccggactagcgccgaggatacggaggggcgcgtggctccgactcccgccgccggccgcctgcgctgctcccgccggccccgcgcgggcgccgagtccggagagccgcgaccgccgacgggggcagacggaccggagtccggagcgcagccccgcgggcagggagcgcaggaggagggactggggggaaggcgcgggggcgagacggccaggccgggatcgcgggagcctcgcgagcagcagctgcccgggccgggccgcagccggagcctgagccgcgcgcgcgtccttcctccgcgccggccgtactcgcctcagcagagtgaaggctgcatttcccagggcccctcagattcccctgttaattaaatcaattcattatgctcagatctgattagc

SEQ ID NO: 27538 - DNA, 1236 bp, Homo sapiens; identical to SEQ ID NO: 23828
  chr11:829438-830674
  hyper

SEQ ID NO: 27539 - DNA, 304 bp, Homo sapiens
  chr11:85906179-85906483
  hypo
cggccaccgagggggtcggggaggctgcgcaaggcggtgagccccggcagctggagcagcccccgccccagccgcacccaccgctgccccaggagcagcacgaggaagagatggcagcagaggctggggaagccgtggcgtcccccatggacgacgggtttctgagcctggattcgccctcctatgtcccgtacagggacagaacagaatgggctgatacagatccagtgccgcagaatgatggccccaatcccgtggtccagatcatttatagtgacaaatttagagatgtttgattacttcc

SEQ ID NO: 27540 - DNA, 713 bp, Homo sapiens; identical to SEQ ID NO: 22776
  chr11:8615303-8616016
  binary

SEQ ID NO: 27541 - DNA, 472 bp, Homo sapiens; identical to SEQ ID NO: 23830
  chr11:862613-863085
  hypo

SEQ ID NO: 27542 - DNA, 1021 bp, Homo sapiens
  chr11:9112461-9113482
  binary
cggaacaggcgctgttccgctgacagaaaagtctctggagcccaccccgaagccatcagcagaacttgccggcccccaaagaaagaaacggcaaagctgccaccgcctcgcggatgtgcccggcccggccctcagtttccccgcctacgctgaggcgcgggaccccaaggccagggtccgcaccctcctgcctgctcgccggcgacggtctgactagcaggcgctctggaggcatccggaccggggcgggaaccgtcagcagctccgggtccgaggccgggccgaaggactcagggccccagcggtcgtggcgccttggcccggccggcgggtgaggtcccggggggagcagaggcccccgcggagctgcagccgccagccccgagccccgcgcgcccggctctggactccgccggggacctaaacactcttcctggccctgcctgctgtgccaggtgcgcccccgcggccggacactcaccctcctgcggccccgcggcacggccccgacccggcgggacggcccccgccagcagcagcagtggcggcagcagcagcagcagcagcagcaccgcccaggccgccccgggacggttgcggcccgcgacccccatggatggctcagcggttgcgggcagaggcggcggagtgcgggcggtggcggcggcggcgcggggaggtgtgcgcggacgccctgcccgctgccgctgccacccccggcccggccccgcccgccccccgagccccggcctcattttcacacggtccctcccgggccggggcgggaagcgcaggcgggagcagtgccgccccgcccggcctcctcccgtcccctccccggcctcgggtggagggggcgcggccgcggtggcccgagcgcggctgtcagcctggcggggcggcagcaccgtgcctcgcgccccgcgcagccctggcacccagcccgctgccccccgcatccccgctccgctccaacgctcggagccctcggtgccgcgcctgttccagtgtgttacaactc

SEQ ID NO: 27543 - DNA, 319 bp, Homo sapiens
  chr11:93911562-93911881
  hypo
cgatcctcctgtacctgcccccgctgttctggcgtttcgcagctgctcctcatatttgctcagacttgaagtttatcatggaagaacttgacaaagtttacaaccgtgcaattaaggctgcaaagagtgcgcgtgaccttgacatgagagatggagcctgctcagttccaggtgttaccgagaacttagggcaaaggtaacttagccccagcaggcagctcatcgggttttgtaggacaaattctctgcccttctactgccagtctgggcccagagttctcattgctaggaggcggggcaggagtggaagcagggggac

SEQ ID NO: 27544 - DNA, 1329 bp, Homo sapiens
  chr11:94473438-94474767
  hyper
cgatttcccaagcatcagaggagggcagacataacataacagagcagggaatcgggttagaacgggttatgctctgattttttggaaaatgggcaaacggggcggggactagggaggattccgccagccgggagttgggaggccgcgcgcgcctctgcggagcgtgacggccacggtcgcctagcaacgagcggggatgcgcggggcgcctgggtgggcgaggggtgctcgccgccgccgccgcgcgccctcgggcccccgggaccgcgggaaaacttcgcggctcctcggcgctggggcgtcggcgccaggcccggcagacagagcaatgcgccccgcgggctgagggcagaggatgcggccgcggcccagcgcccggccgggggagccgcggggtggcacgcggggaaagttggcgcgcgcctgaccgcgcctggaagccgcgcggtgccagggccgagttgtcccccaagtttctgcggcgatttgtcactccctggggatctggcggtctgaatcccgcggggcctccggctcagggattctgagcgctgggagagagaagcccgcgcttttcccggggacctgcgcttgagctggtgcttgtgcgggttcgtcctgaatggtagcgattcgagttgttttctgcttttcttctcccccagacagtgagtttgtggaagcctcgcccgcatcctacagcccagacgagttaggtaagtctgctcattttgtcttttatttcttggtcgcaattctgcccgagaactgcgagtttggggggcgtccataggaactcagctagggatggggctggggttggagggcggagggaaagggtcaggggacacctgctgccttcgcggccggaaccggcctttcctcggcgctgtgctttcgggggtggcagggcaagtgtccaatgagccgtgcgtgtgtgtgtgtgtgcgtgcgtgtgcgtgtgtgtgtgtgtgagtgcgtgtgtgtgcgtgttcgtctggggcagtggtgctgctccgaggagcctggcacagcaaacttccagagctggggcttctgaaacctgcgctcatcttgccgggaggacacagcggcgactggttctgacttgccaagtacctggcacgagaaggacgtcgtgtgggtcgtccttaccctgaatttaatgaagtcaggggctgaaaacggcggtgtaatcattaaactgtaagacctaggagctgcttccctccctgatttctattcctcagttagcctgtaggtgtctcgagataggacattccatcctcatgcctgtcatggtaagtggagatttgcgatgggtgaacc

SEQ ID NO: 27545 - DNA, 983 bp, Homo sapiens
  chr11:94501775-94502758
  hyper
cgcgaagaacccagtcgccccgggctccccgggcccctgctgctcacggaagggggcagcttctgggggcccggggctgagatcccagattgttgtttttaagcgggttcccttgccccgctccaggtccagttgcctgcgggccgggcctcagcgtcttgccgccccgcgacccacgttgactgaagttgtggccccggggtttgggccccggggtgctgcgcgcccgacgcggggctggcctttcctgaggggcgcagccatatggccagacactccgaggcgcgcccgcgcccgcgcgcgggtctcgcggcgagggaggggacggaagggggtgtccggtgcagctttccccggcgcgagacaaaggcgcgcgcaccggcccgcccgacgggctctggcgctgtggactggaccctttctgcccgccggccagacccggctctggcgggtgggggcgacgaaagggtcgcaccccagccccagacgctcggatcgcgttagctgctgctccttctttgttctctccccagacaagtttctttgacaaactggagagttacatccagctcccgcttgcctgttagggctgcctttacaataatctgctttcgcggggagaaaatttaaactttccaaatggaactgttttttcttggaatgtgacatttgtggcaggagggagagtggtacgttggccgatgacagccgagcggaacggtggcctagtgccgggacagggaccgagcgtgccccataggcggccgggctggaggacgcggcggcagagcagacgagccctggcgcgcacctctagggcctccgctacctggactgcgctcgcggcgacgtgtccaagtttcccccctcagagccccaggccgagaatcccgggtatctgcgcaaagctcccgcgcctcgcccaccctactcttcctatctttactgatgactaggaagactttccttttccatttttgttc

SEQ ID NO: 27546 - DNA, 721 bp, Homo sapiens
  chr11:985271-985992
  hypo
cgtgcccggcctgtctcagttttgtaaatgcttccagctgggtacacaaatgtgaatgaactatattaaaaatgctctcatgatgtatgggtgcagccgggaggggcagggtgggctgcgggccactggagactggtgagcaccgttctgtcttgcccagaagaccctgcagtgcgaggccgcctgactgagtgcctggagaccatcctgaacaaagcccaagaaccgcccaagtcgaagaaggtccagcactccaacgcgaagaatgccgtgctcttcgaggccatcagcttaatcattcaccatgacaggtgtgtcggctgcctgtggagaggcttcgtctcgcgcacacacacacgttccttctcgttggcacgagactgggcggatcatgtctggtttgtccactccatgggcctccccttcgtcctgcctctgtgctccctgccggatgctttttttctttctgtgcagcccggcccctcctgctctgagctcaccgtggattgctttggtgactgtggtctcatcccacacgagggccttttcctccttcccctgagcatccccactcctgactggcttctcatgtagtggaacagagaggagacgggtggggtggggggtgtgcgcgcatgtcccgtggctttgctggatgtggagccgcacttggtgggtccagggtcgcagggcagtgctggaaacgtctgtgcccatccac

SEQ ID NO: 27547 - DNA, 2679 bp, Homo sapiens
  chr12:104850139-104852818
  binary
cgggaaagctcagctgtcgcctgacccgagggtcgtgcagtttccttaaccctgactttaagtcagccctctttaaccccgactcccaagctgggctgtcctttgaaagaaaaacgaaaccgcccagttctgagcgtcggaaaatgggcactcgctccctgggggtttggggcaacttccccgctacgtcgcccagggattttaaataattgccagccaccagaaaccccctaacccttaattcttccctccgagacccagcccgctgcttgccacttccctctccaaacgctggcgggggtgggtggcagcaccgaggcgattttcttcgtctttttttcctccgggttttgtcatggaaacgctgacacaacctccagacggcggccgagcccggccggggactgagggcttttgggaccctgcgggagcgcggcgcgcacaccgcactccccgggcaacagctggacgcgaccatatcccgggtaggggcggggggagcgcgacgctccgccccggcgctagggtccctccctcctcccggctctccgcaggcgccctcccctcgccgggggccgcgagttgcatttggtaaaacccagccccggaatatatagatcgttggagcgcaatgaagtagcctttggagagaagggagagggcccgtcggacagccacagcggccagcgcagcggcagcggcggcggcaccaccatcaccgctcgcaccccagccgcccggcccgcgaccaggcagcggcggccgccggcgggatcggaggaggcggcggagcggcgaggaggaggagcaggagcgcgcagccagcgggtccacgcatctcagcacttccagaccaactccggcaccttccacacccctgcccgggctgggggctccgagagcggccgcgaagcgactccgatcctccctctgagccttgctcagctctgccccgcgcctcccgggctccggtccgcgcggcggggtccctgctcctgcgccccgggcgcgcttcccggacaccccggtccccgcagccaggacaaagccatgaagccagcgctgctggaagtgatgaggatgaacagaatctgccggatggtgctggccacttgcttgggatcctttatcctggtcatcttctatttccaaagtatgttgcacccaggtagggggcgcgttagcgtggttttgttggatattttcttctctctcgcgctctagctcgctccgcctgatttctgcctcttccaaccctacctctccgccttcggcctcttcggggctcctggctgcccagagctcctggctgcccagatctacccgggtcaccgcgtcgggatggggaggagaagggaaggtgtgcttcgccctcttcttcctaccggctccgggctggaggatgggaccaggaggggcggtagtttttttttttttttttttcttcttctttttttctttgtgtcccttgtctgtctgtctgcgaggtagcagggaaacggagaggtgtgggaagcaaccgggggtgaggggctggtttgaggagaacgaaactccctccctgctgctgccgaggtcggaggatgaaagagttacccggagccggctgctctgcgcccgggcgagccgcctcttcctggttgccgggccgggggcgaagggtgtacgccccggcgaggttgcgagtccctgcagcaggctgggagcccgggactgggctcccacgtgtcccgggctccgcgcagagctgagcaggtgtggagagtggtcgggtgcccagcgttgcccctccaccacgcgccggccgtttgcccccggggtccgggtccgcagtgaccttgcggctggtgccccggggcctgctccagcccccagccctgagctggaaactccgagctcctgggtcacgccttgaccactgcagttttggaggaaactttggccaggtcctgggctgaccgtccgtttgcatcccccacttctgggatccgagcaacgggaatcccccgggcggcgtgggaatgaaccccattcctccggtcccttgtggctcaggcaaagttccacgtccgaaatctggactgggggagggacgaggctcgtcgcttcctaggggtgcgagggaaagtttgggttctggagagggaggggcgccctcgagcgcggcggccgggggtgagcagctcggctgcgaagcccaacaggtagaacgttccgagaagccttccgggtaacgcgggtctccccgccaagccgtggctcccctgctcccttttaccctcccttagcagccccctgccgggccacgttggctcagaaatccattttctacgcctccgagttgcctttctcagcgtagtcacagcaataatttgcttttctaattgcaaggaggagggaggtggaaacgcatttccttccagggaagtggggttggtgtttttcatttttgcctcccgccttctcctttcactgtgtatctaacactttaaacagacgcagtcccgaattcatcaagcctgcgtttgggtcgatggcagaggaataaagctgttctttccatcaaacaggcagggctgcaggctgcagattccttgacagcgcagggacagacggcccctttgccccactcggtctggagcagttgttaaggcagccacactgccaaggatatggtcc

SEQ ID NO: 27548 - DNA, 2239 bp, Homo sapiens
  chr12:111471144-111473383
  binary
cgcggaaactgtgggcggtggtggtgacatttcccacgactcagtggcgcccccgggcggctcccaccctccctccggccggcgcgtctacgcagccccaagtgctggctgcgaccctcggatcccaagcatatctggcgatggagcggcggcagcccgaggcacgtgttgtgtgtgctccgattgcaaaagaaaaaaaaatgcatttcaaactattaacttttttttaagcgtgcaatgccgggagctgggggtagacaggtgcaagcgggggtaggcgccccgcgcgcccgcctcccgcagcgccccctcccaaacttccctttgcattgatcagcacgttacgtcagtattgataagtttgcaaaaagccaaagtcaagtgcaatcgcgcggcacaccgaccccggacttgggggggagatgcagcgagcgctccgcgggcccgggagccggcggcaggcagggcagcggcggcgccggcgcctctcggagaggctgcctccccccaacccctcccctcccaccccatccccggctgcctcccccgggcgggcgccgagctccccgcccggcgcgctccgcccgcgccctccgggggtcgggggggcgcacggctcccgggcccgttggcggcggcggcggcggcggcgcggcggcggcgaggggcagcgggtggcaggaggccggagggcgcccgaggggccccgggccgcggcgctcagggcccgggcggccggcggcggccccggggctggggggagtccagcccggatattgagtgcagccattgagaaaagccaaactcttgtgtgtgcgcgtctcgatagcccccaagatggccgccaatgtgggatcgatgtttcaatattggaagcgatttgatctacggcgactccaggttagtgcgggcagcgccggccgcgcggccgtgaggagcccccgggcgcgccctgggcgcattggggaggtccccgggcgggcaggcggacgccctggggcggcgggcggcggctgccggggctcgccggggctcggccgcccgctgcccatcgataggtattaggaattgatctcgccgctgctctttgttcggttcagtcatcgattagctgccgcgaccatggagaagcgctagtgagccctcggtcggcggagcggccgagcggccaggcggccgggcgaggagcggggaaggcaggggctacggcctcgggcagggggctgctggcgggaacccccggcggtcccccctgagccgcactttgcgcgcctcccaacttcgcggcgcccggggaggccgcggagcgcgccgcttgccagtccgcacccggctggggctccggcgagggagggagggagctggcgggcagggaggaggaggaggagaggaggaggaggaggagagaggaggagggagccggggttggcgaggaggcggctccgcgccccgccgctcgccggcacctcagccttcgccgcccgcctggctgcgcagcccggacgcgccgccacccgggggccgccgccgccgccgccagagccgccgccgccggactggccgcaagcgccggcagacctcttctcctcgggccggggtcttggggttcgtcttgcttcttgcctttacccccccgccccttccatccccttcccaagtctagatgcagacgggcggtggaggtgggcccgggcgctcgcaagtttgcgctcctgcctccagggcggtggagagccgggagcggcgcagagcaggtgactcccagccctcgggcccaagggaacttttaaatgagagatttccttgcttgttctgcctcctgcgtttctccccgctgctcccctcgtctcctctctcccgtctctgcttttcttctgtttctttcctctcttccctgctctttctctctccttccctagggcgactcttcgaaaccccatcactttctccccatcctccctttgtgggagtctgtgtgcctcccctagatttggaggtgttctctgcggaccccgtaggagccggggctgggaggtggaatctcagagaacgcaccgtggaggcgcggctccggcctctgttctttcccggagtgccccggacgcgcctggcaaggccccccagccttggagtctcgcaaagtctcggcgggtgcggcggggatcaggggcgggaaaatggtgcggataacagggcggttagagcatcctgccttgaccgtgacattcgcggaagacgc

SEQ ID NO: 27549 - DNA, 168 bp, Homo sapiens
  chr12:111725459-111725627
  hypo
cgcaggccctgcctaatgacggggcgtgggggctgccggcagatgaaagccaccgccgccttcccgcgcacctgcttacctcggcatggacgcccattgtccaagcccctgccacctaaacaaacaggccacagcagagtaaaacagggaagccgccttgttccagcc

SEQ ID NO: 27550 - DNA, 889 bp, Homo sapiens
  chr12:113494321-113495210
  binary
cggtgactcctaaacatcccactccctgcctcacgctctgcttggggtcagaaggccccttggggtctcgggagggcctggccgaggatttggggcgccccgagactcgcgtgtcagcgccggtggcgctcagggccgagatctgtctcctccccttcctcctcctccgccccctcccctctccctcccggagcacggccgaggcctcctcccacccgcgagatcccggcggccgccagccggctcctgcgtccgtccgtcggccgggcagtctgtccacgcgcggaaagctcggcgcggcggccgaggggcctgggagggaacgggcgcggaggcgggaccgcggctccctcccactccggggggagcccaggaggcggcggtgctggagcgcgagccggagccggagccggagacgaagagaggcggtgagaacgcgggtgcttagggaccccacccccggctcccgctgggggcccgcgagcggctcggggacgtctgggctggggaagcggggctgttacccccagggcgggaggcagagacgatccagctcctggcttcgccccctccgcgacgcgacccccgaggggccctgggccgcgcctgcagcgccgcgcatccccgtgcttcccggcgcaccccagcgcacccggcatccccccggcagggcgagggccccgggggaagggaaggctccgggagccaaggagggcgccccccaggcggagagtctcggaaaaccgcgcccccggcccctgccttccctccaggcctgccccaagggaaagcgggcggggcgaccccgtacgccccccttgctgtcccccttcggttccccattgttctcagccgaatgctctcctgggaaggggggagggggtgctgc

SEQ ID NO: 27551 - DNA, 206 bp, Homo sapiens; identical to SEQ ID NO: 10241
  chr12:121203947-121204153
  hypo

SEQ ID NO: 27552 - DNA, 1088 bp, Homo sapiens
  chr12:129337804-129338892
  binary
cgatggtcctggtccccgtggaagggactgtggtcaccgctggtcctggtccaggtggaaacagaccgcggctaccctggtgatggaccccacggggcacacccgcgccaccccgcacccagggctcgcgccgcccgaggcccccggttcctgtccccctccccgcctggcgccggaacctgcgagctggggcgcggcctcggggaggggcgggcgggacagacccagccgccccggctcccccgccgtccgcgtctgcgccggccccggggcctggtcggcggcggcggggccggtcgatggcccgggcggcggcggcggcatgcggctcctgttcctggcggtgctgcggccacacaccggcaacgcggtcacggcccagcgcgttcggtaggtgcagggcgccggggcctacgaagcctgggccgggggccggggggcggggacgcgggacccggggacgcggggcgctcagccaggccccctccagccgcgccggggccgtcccgagccgcgcgcacaaacggatgggccggtgccgcctgccgggcgcgcgggggtcggtgccttctgcgtggcgcgcgtgtccccgggtctccgtgcggccggcgcattggcctcgcgctctccggaggggactgagcaggtgaacaggcccggagcctgtcgtggaggggcccgggaaggcctcgctgcagaagcaggatgggagcaggatccgcagggatgcgcagcggggtccgcggagctcccggcgggggcgcgtttccaggccggggaccgcggtgccagccctgccctcgcggatcgggtctcggctgtgtgccggcgtccggggtcctgtccccgaagtccctttcccacctcccctctgccctgtctattctcgtcttcctggctggttagctccttcacactcatctttttctgcctttgtcttatttgtttacttgttggtctgtgttctggtcgctggaacgcaagcccggcgggggcccggggaggggccgccgcgttaatcccgccgcctcccacccgcacagcgggcgctcggcctgtattagccggataaacatattccttgaggc

SEQ ID NO: 27553 - DNA, 983 bp, Homo sapiens
  chr12:130646597-130647580
  binary
cggcgtcctcggggtgccggggaccatcccggggaccgccgggaaagggggcgccggcggagaggatagcgagaggcaaagttggaggccaggcagagagagggcgaggagaggcgggcgggactgccggggagggtcgcagcgcgcagagccccgcgcgccaggcgggctgtcccggggctggcgggcgacgcgggcgggactaggcgctgcgccccccgcaggctgggctgcaggccgggggggatcggcccccgcggggcccgggagcccgcggcggggcggcggggaggaggctgccccgggccgctgcgctttctcatgcaaagcagcggcggggcggggcgcgcggcccgggggcggggcctgtcagcgctcggcttttctgcccccctttgcctttttgcgagtcttctcatcccgggacgcaaacctcgaaacagctgccggctggtcccggccgaggccggcgcagggagggaggagccgcccgggctgtgggggcgccgcgagctgggccggcctcggtgtgcccgcgccgccagcccgctccagacgcgccacctgggcgctccaagaagaggccgaagtttgccgcggccgtgagttggagctcgcgccgggccgctgcgccgggagctccgggggcttccctcgcttcccggtattgtttgcaaactttgctgctctccgccgcggcccccaactcggcggacgccgggcgcggagagccgagccgggggcgctgtgcgcagcgctcgggccaggccgggcgggcatgggcgggggcccgagcaggggtggagagccggggccagcagcagcccgtgcccgggagcggcggcgctgaggggcgcggagctccccgcgaggacacgtccaacgccagcatgcagcgcccgggcccccgcctgtggctggtcctgcaggtgatgggctcgtgcgccgccatcagctccatggacatggagcgcccgggcgac

SEQ ID NO: 27554 - DNA, 272 bp, Homo sapiens
  chr12:130821386-130821658
  hypo
cggttgttttgtggctgttgactttgcctccatgaggaaattaactcctatggagggcacctagctcggcgtagacccggtcgctaccacctgcgatgccttggaaatgcagccggcggggcccacctgtggagcctgcagaccggaatctctggtctgtgtcctaaccagccctgcaggtgatcccccgcaggtgaaggctgagaacccctgcggtccacgttggcatgcacccaaggcacaagtcattgaaagctaaatttccaggtaac

SEQ ID NO: 27555 - DNA, 463 bp, Homo sapiens
  chr12:132423564-132424027
  hypo
cgtgagccactatgcccggccctccagatgcatttttaacagctgaattcatgtgtgaaatgacgtaaggtccgcgtagtccttctttctcagagaccagcgtgcgaggcccaagggacccaccttccgtcacccgttctgctttgtttacagggtgtgtccgcagccggccaggtggtatccctgaaggtgtggctgattgacgacattctagaaaagatcaacagccaccttccctctcacattcggattctgggtaagccttgcagtgcaggcggccacacacctggttgtagatggtcttgcagagacacgaggctatgcatgctcctgccttttccaactgtctctgatgcagaagcgtagtcagagttgctttgcagctggttctgaccttcagaaacgggagccactagacaggagtagaaagctgttcatttgcagtgcttgttgctacacgggc

SEQ ID NO: 27556 - DNA, 695 bp, Homo sapiens
  chr12:132986274-132986969
  hypo
cgcagagagccgcggtgccatctccaccctggctttccaggccctggagggcaaaggtcagtcagatggagggagcccggggtccctggcaggagtgtggccaagtcccagcagcgctgccccgagagaggaggacggcgcagctccattgctccacctgcccggctcagggatggaacccagagctgccaccgtcctgtgggtgacggcagaacatctggctgccgggtggcctccgtaaccgccacacacctgcctctgctggaatcacctgaggctctggtgcctcacacggattggccaaaacagggagcggagccgggaaggccacggacatctgtgtggtgtcacgaacaaggtccggccacgtgtgtgggagacgcgggcgccgaggcaggcgccaaactaagcccggccaccaaggggacgcccacaccccacctccgtggtgacccctgaacccccggagctcaccatccacaccagggtgagaggagaggatgggcaaggaaccgtcaaccagaggggatgctcagctgcgtgcacgtggcgggtggtacatgggggctcggggaggcacccagagaggatgcgtgtgtagtgcagaaaatgaggctttggggcccgcacaccgagcccaggacagcacggaggcgggagacactgccaagcccccctcaccctccttgatggac

SEQ ID NO: 27557 - DNA, 915 bp, Homo sapiens
  chr12:133464006-133464921
  binary
cggcccggccgcccgcgcccacgcagccccgcagcccggcctggacgccggcgggcgccccctcccacggccgcaaccaggtcccccttcgccgcccgccgcagccccctcgccagccgcgcttacccccgccccgcgccgaacccggaaccggctgcgccgccgccgctgtcaagagacattgcggctccctcagctgatccgcggggcggggccagaggcctctgcgccccgcgattggctggcggcggcgctcaccaagagcggcagctaaagcggagccgggagtggcccgcgagagtaggcgcgtggagggcgctcggccatctttgatcctgaccaggcgacttcgtcgcctgcggatcacggaagtggctgcggtcggcgccatgttatgttggggcagaagggacggggaacttccggattggaagccccaaggattctgagagccccgctaatctggggatgactcctaggagtagaagacggtccatcttagttgtcacgaggtagtgcacgtggggaccctttcgggtacagttgcacacagtggatcacacagatccgaagtctgaggcacagggcgcggtccgcgagtgggagcggctgcttgtgggcagggtggacgcggggccacgtcttggccggcgttttgcggggtcttcctgttctgaacgcgcgtaacttttgcctcagtatctcacttcttggaatccggcggcgttcacgtgtgtgctccagagaagggcgccagagggtattccctgaaagtgaaaggtcggcgaaagaggagtaaagacggcgagacgcgtccacgcagggggagtctgtgcggtttggaggaacgcgccaatgtctgcactcatgaggagcccccaagggcggttttaagagggtgaagcaggaccgggc

SEQ ID NO: 27558 - DNA, 527 bp, Homo sapiens
  chr12:15374050-15374577
  hyper
cgagcgcgctcagggctcggaatgggtctgcaggaagtcgtcccgaaagagctgcctggacacgtgcgtgacactcacctgttcacactctccaggccaggagagctacggtcctctgcaagttcggaatgggtcccccaagatcgcgaagccctcccacactgcgcagcccaggcttcaggttgcgtttgcgagttgctgggctgcggtcgtgggtgggactcgccgcagaagcaagtgccagtggcccggcgggggtctcctcactcgcgctcgctccgactagcggcggagggactgcggcaggacgcgagctgagcccggccaaggccgctgcgctcagcggccaggatgctgcagtgcggcgcttcggcgccccctactgggggcaggggcaggctcctcccgccgcgctgcctcccaggcttgcgagcttgggtctttaacgtgctgcacccaagacgggcttccctttttcactggttatttccaagcctccaggctcccaccgaagggcggctttcctc

SEQ ID NO: 27559 - DNA, 857 bp, Homo sapiens
  chr12:1639033-1639890
  binary
cgcgtagcaagaaagcggaggacataactctcttcccctctcagagcctcgggccccgcagacgccgaggtgggcgctcgtgccaggatcgcggggcgcgggtacgggctccttgggcgccccgagggggctgctggccggggtaagagccgcggtttcttcggaggatcgggtcgagttccaggagaagggggcagcaggcgtgcggcgccgggagaagggggccgggcggcggagactccccgtccgcacccccgcggcgaggcccccgggccgctctgcttaggggccgagggagccgggcgggaggcaggtgcggaggtcgcggtcccagcgcctgggaggagccctcgggagggtgtcgcggcccggctggtgggcaggagcgagccggggccggcgcggctgtcgggggcggggaggaggcgcgggaggcggggcggaggcggcggcgcccccaggatccactcgcccagcgccgggccctgcactccgagccgcggccgccacccgccccgcagccaacttgggccgaaacttccccgggtcccgcgctccggagcagggcgcgcagcccggcgagatcgacggcggcctcccgagcccgcgcctcgggcccagggcctccctccggatcggccgcaggctgcgcgcccccgaccgtccccgcccgctgagttcgggggtccccggcgcggagcagggagccctccgggcggcaggagggcgcgcagactccgagcgccggggctgcctggccgggctccggtggacacctcggaggctgccccagcatcggggggggggcccgagacgcctcggcgggaccccgggagccgagcacgcccgcccgcgcc

SEQ ID NO: 27560 - DNA, 1913 bp, Homo sapiens
  chr12:24714490-24716403
  binary
cgagatttcccaaacccgcgcttaaagtgacacaacacgtgagtggtcttcacttggtacactgagtgaggtggggggaaaaagtagttgcaattagaattaaagcttccggtctctgaaatccctagaatcctgaaggatgagacttgtttcagaaattccgggcgggagggagggggagtggtagggagaaggattgcagaaagcgaaacaaaaagacgaaagagtcgggaggtgggggtgactaaggttagggggtgggccaggggtcgctctgatatcctagaagggttaaggggctttgtccaacttttagggtctggccttggacattggccgcgatgcccagcacagcccagggttctccccgcactctcctctcgcatcaaccacctccaccgccaccacttacaaaacaataccagcaacagtacgcaggcttcccaacaaaaatagaaagttatcccgtctccgggtcggggtccaagccggcgctccagggtcccccggccagccgcccccggggatgacagggccactccgcgcctcgggccgcctcccacctctccgccacccccagcccagtccccctccctctgtacttgaggaaactccggcggcggccccctccctcctccgcggctctccagctggagccgggaaggagtgctgagtggcgggcccggcgagcggcagaggggagctctgcgccttggaggtctgcccacaacaacatcgggacgaacaacaaagttaaaacgcagcgattcacgcaccttacccggtctcgttaatgcctcctccggcgtgggatgcaaagtggcacagaggcgggctgggggcccccgggaggagactggagatgggttttggtggctcgcctttttcactctgtgtgtgtgtgtctgtgtgtgtgcgtgtgtgccggtgtgtgtgtgtgtgcgcgcgcgtgtccctctctctccccccgtctctcgctcgcccgctcgctcgcgctccccgtgttgctctcaaggacgaggtgaaatccctttgctggtcatgaggcggcttcagagacaaacaacacaatgcgagtgcaaataacaaaaggcaaaaagacagtaggaacaatgggggaggcgagggcagcgcaccagccggcggtcaccgcggcccggcgcccgccccggggggtgcggcgggggcggggggggggcgcgggggcggtgccgggggctcccgctccctccaggtcgcccccgagctcccgcaagcccaccctgacctccttcttgcagctcgccgcccggccgccctctctatccatccgaagggaaggagccccagagttttcttccccgtctgctgcagagtaactagattgtaaataacgcggcgattacccacaccgtgcaggaattttttttttatctgccctccacttaaaggagcgataaaaatgaaatggcaggagtggaaggagccagggagagcgggatatctctagatctcgatggagctcgcatctataaatacgcattcatgtttagtcaagtccctttgtcaacttcttcccggcgcctgagcctcagccgctgctctgcgcccaggacctggcccctcccggccccctagtccagtggtcaggcggtcgggccggcagggagggcgcgcgcggggggctgcggggtccgtggaacctttccgggaggcgagccgcgggctgctgggcgcggaggctggagccgcgagaggttcggctgctgaagcggccactgcctcccagagccaggctccgcgccgcgcgtccccgccgccgccggcactgtgcacccacctactcctcggagattggggtaggggaaaaaagttttgaggcgctctcatctctgcctccggggtggttgaactggtttggttttgtgttaagc

SEQ ID NO: 27561 - DNA, 760 bp, Homo sapiens
  chr12:25055769-25056529
  hyper
cgaaggaggatggtgcaggaaacggcgacaaggcgcccggccaggcccgcgagctaccgagacccgggttccaatcctccccccttccgcaaacgcccgggttcgaggtacctggcgggcaagggccgcagcggagcgaagcgggctggccatggggaggctgcggggacgcggggctgcagagagcggcagtggcacggagcgcgcggctggaagcgaaagcaggcggtgtggccaagccccggcgcacggcccatagggcgctgggtaccacgacctggggccgcgcgccagggccaggcgcagggtacgacgcaacccctccagcatcccttggggaggagcctccaaccgtctcgtcccagtctgtctgcagtcgctaaaaccgaagcggttgtccctgtcaccggggtcgcttgcggaggcccgagaatgcgcgccacgaacgagcgcctttccaagcgcagatatttcgcgagcatccttgtttattaaacaacctctaggtgaatggccgggaagcgcccctcggtcaaggctaaggaaacctcggagaaactacattagggcagcttttccaccgactccaaatccaactgacaaaaagcagtttctgccctcgagagtttgcgggcggggattgacatttgtgcgtctgctcttgtctgccactgaccgctatgtgcaaactgaagggggagaacgtgaatccagcttttagatttccctgcgccacctacccaaaccgaatttgtaactc

SEQ ID NO: 27562 - DNA, 921 bp, Homo sapiens; identical to SEQ ID NO: 22782
  chr12:25101390-25102311
  binary

SEQ ID NO: 27563 - DNA, 221 bp, Homo sapiens; identical to SEQ ID NO: 23862
  chr12:29373882-29374103
  hypo

SEQ ID NO: 27564 - DNA, 519 bp, Homo sapiens
  chr12:2964279-2964798
  hypo
cgtgggggggcatctgtgggcattggagtcggtcagccagcgccagacattgctatcgtagggcctgtcaggctgggtggggaaggtggcaggcagacggcacacatcgagccacgtgtgaaagccccaggtgtgctgggcgccacccttccaagggtggatgagccgctgacgcaccttggacttcatatctgtgcagggcggcagcttcagagccagctggtggtaggcttgccgggtgaagccagggaactcccaggactcgctggggaggaagaactcacgctgagcccacgtttgggagggtgggagggactcgctggcctggaccatctagggagagacaaaagggagcctggggaaggttgtgcagacaggggtgcagaaaggtgggtgaggcactccgctctccttcccaggcacgacctctgccagcccaggattctcatgaggacgcagaagtcctggcagggccgcatctccatccctctccttcccggcggaagttatggctgctgc

SEQ ID NO: 27565 - DNA, 981 bp, Homo sapiens
  chr12:29936124-29937105
  hyper
cgctgagagggcagacagttgagaaactcgatcccaactccccagccggcgcctcccgaaccgccccgagagcccagattagccgggcagtggatcccggagcaaagtgccatgcacatcctggagaggagggaggcgtggagggaaagggcggcaaaaatgaaatgcccccaagtcagtcccgcaacttctcccggtccgagggacgggcggagggtagaggaggcagcggcggctagcgcgaggtgagggactcacttgaaggtgaggacgcagagcggccggtaggacttgtggctggtgttctcggccatgcccttgccccagaagtcgttggtgaagatgccccagcggagcggggcgccgggccgcacgtcggggttgttcacgatcgcccacacgtcgtcgtgcacgaactcgccctgcagggagcggccgtagcacaggcagcttgccccggccagcagcgccgcggccccggccggcgctagcccgcagccccgccgccgggagggtgtgcggtccccgccgccgcctcgggcagaggtggtcaccaccatcgcgccgccgccgccgctgctgccctggcctctcccgggcgtctggcatcctcccctaccggggccccggcggcgcgcggcgtctgcccggaggggggctcgggcatggtgctgcggcagctggacccgccgcgagctccccgcgctccgccgccgcctgcgccgcggagttggcccagctgcaaataaacagcagtccccccgcctcccccggccatcgccacctcctccgccccactgcgcatgcccgctcgctctctcttccaccgccccccaatcccgggacgcgggccggttcccccgcacagcccggcgccctctgcccccggcccgccttgcttgcaggtggaccggggttcgcggcgcgcggctgcccgggagctgcggggaaggacaccccaggttcccacttgcggtgtcc

SEQ ID NO: 27566 - DNA, 161 bp, Homo sapiens; identical to SEQ ID NO: 10252
  chr12:30861053-30861214
  hypo

SEQ ID NO: 27567 - DNA, 164 bp, Homo sapiens; identical to SEQ ID NO: 10253
  chr12:32864298-32864462
  hypo

SEQ ID NO: 27568 - DNA, 427 bp, Homo sapiens
  chr12:3414071-3414498
  hypo
cgagggcagggagtcacgcggcctcacacatccctgtgtctctgtctgtgtgtgctggcgccgcacgactgctgggccacttgcttgtaaaatggggccaacaaaaggacctgcgccctgggccatcgtgcggactgaaagaggtgattcatggaaagcaattagaagagagcctggcgcagcacccgcagttaatgagagacacttttgtgatcatcgtcgtgtgaatgcaggtgcgcgtgcccgtgtcatttacatccatggggtgctgctgggaggcctgacgctagccctggctctgcagccactgctttctgggggtcggtctcctgcctgagatgcaggttggggttctaactgttcccggcctgtgtgagggcctgcgttcgcgtgcactggtgccctgcaggtcttggtcggtgacacc

SEQ ID NO: 27569 - DNA, 766 bp, Homo sapiens
  chr12:41086129-41086895
  hyper
cgctggtcctgggggtgagagtgatatccctgttgtccaatcagagaagcgggtttccctgtggtccccgccccactttccctgctgccccaataaccgccctaaaaggccgggcttctgctgtcaagtagccagggtgggctccgccgaggcgaggaggggcgccggtggggagatgcgctcccaggtgtttgcagcggaagtgggaaacctgtagggtatggtccagctgtgccgcaccgaggcgagcaggagcagggaacaggtaggaagctggacttttccttctttgcagataaaataaagaatgcgcatttccatgctgttgcttcccttcccccagccccgcccagccctcgtcacccccaaatctcctgtggtccctgcagctctcgccgtgcggcgcgggaaggactggggcggaggtggctggggtgcggggaagcaggggtgcgggatgccggagccctggggtgccgggcaaggcaggacggcagtgccctagaagagggctccgagctcggggtctgtgtctcgtcaactttcctttcggaggctgccgccgccagcgccgggaactcgccccagggatgccatatcgcctcggcaggggaggggtggggaagcagagaggtcggcagcccggggcctgcaggtctttttctcccgacgccggcccgcacctgctcatctttcccatcccacctgggcgcctggctagcgcatcccggaaaacctgggagcggttgcggagaggggaggaagc

SEQ ID NO: 27570 - DNA, 819 bp, Homo sapiens
  chr12:41582155-41582974
  binary
cgccgccgcgagacggctgccccgggggtggcccggggaaggcaggggggctcggagaagacggactctgctttcgctccccctttcttccccatccctaacatgggctttgccctggagcgcttcgcagaagccgtggacccggctctggagtgcaaactgtgcggccaggtgcttgaagagcccctgtgcacgccgtgcgggcacgtcttctgcgccagctgcctgttgccctgggcggtgcggaggcgccggtgcccgctgcagtgccagcccttggcgcccggcgagctgtaccgggtgctgccgctgcgcagcctcatccagaagctgcgagtccagtgcgactaccgcgcccgcggctgcggccactcggtcaggctgcacgagctggaggcgcacgtcgagcactgcgacttcggccctgcccgccggctccgcagccgcgggggctgcgcttcggggctgggcggtggtgaggtgcccgcgcgggggggctgcggtccgacacccagggctggccggggcgggggcgcgcgcggggggccgccgggcggccgctggggccgcgggcggggacccgggcctcgggtcctcgcctggaggcggcgcgagaaggcgctgctggcgcagctctgggcgctgcagggcgaggtgcagctcacggcgcgcaggtaccaggagaagttcacccaatacatggctcacgtccgcaacttcgtcggcgacctcggtggcggccaccgcagggtaagcaaaggggggtgggcaccgcgggcatggtcgattggggtgggaaaaggagcggttctttctgac

SEQ ID NO: 27571 - DNA, 1457 bp, Homo sapiens
  chr12:5018337-5019794
  binary
cgacttgcttctcagattattcccaattagcaccaagttggcagacaaccccacaaacccacgaagccttcggtcccccacaagtcacattccctgtatttcagaataatcggatcgtaagaaaacttcaagtcccatcgtaggttaaagagggacaggctcttagtaccgccgccgcccagtaaaactacatggaacaaacccagggatcctcatctgcacagctctgcccaaagtctgcagctctgcgagtccagccggcgggggaagctgggtgggccccgcagagagcaagggccttcttgggggaggagcgggatggggcgcagagcagtgcgatcgaagagggttactgtgggactgcacaaaagcaaacccgtcggaggagttttgccagaaacaccaccgcctgcattgcgtcggacctgaccatttccaatgtgaaattcccggggaaggtcgcgagccgctaggggccgttcgtgggcggggcggcgggccacaggggaagtagagttagcggtcggcttttctggtaggagaggaaaaagctgtgctggcaagggtgggaactgaatgacaaccccgctctcttccaaaccaccccctcatattttccatccacctcctcgctcctgccctcccccgccctccccaacccacgcccgggtgggccaatcgctgctcggtattccaggcgctttctcaggtttctgctgatcttgcagcgcccagaaatggaccgagcggacccgccgccgcacgcaccctgctccactccaagctcctaagggctcctggcgcgccgcgtagccttggcgaggtccgcgctggggtgcggagagcgaagggaactggagagccatgtagatccaggctctcgcccgcccgcctccttcgggatcgaatcaagggctcccatagtgttaggagggggcgagagtgctgtttatcgtcatttgcctcggagcttcgagagagggtggtattttgcttttccgccccgcatcctccggaactccctgcaccggagagaggacggcgtctccaggttgctggcaaccggtgagaatgggggtagggaaggaacattttcgccgtagctgctccgtaaagcgattgtccaactgagaggggcgtcggacgagtggaccagggcggcgagtttgcccggcgcgtctcggatgctgctgcggcggccgccgcggctcccgccagggcactgcaaagacgacctgccgcattcccactcgggctctccgctgactcagcaccgcccctgcgccaagccagccggccaggtagggggttccccagctcggggatgcagaagcgggggttggggggaccgggtgggggaggccgggggtgcggggatgctgtccgggaccctgagcttcccccggcgtctctcggcgcttttccgatctctagtttaacgaagttgtaaacagatc

SEQ ID NO: 27572 - DNA, 806 bp, Homo sapiens
  chr12:5019846-5020652
  binary
cgggtgtctgcgtgtcgtctgtccgtgtgtgtgtgatagccctagcaaacgtccagtgctttctcaagctagaggtctgtgttcttcggtgtctgtaggtccgtcccatctgaatgcttctgattttctacccccgtatcactttctatttctctgcagcgtgcatcgatcgccctggtgggagcttagaaggcggcaggcgaagaggggtaggaggggggagagccgaggagaagcagagagggtggcaggcgtggggatctgccgagccggcactgcaccgggtcctaggaaggctctcggaggggaggggaggccagggcgacccccgaagcaatggcccagtccgctagaacggcactgcgttaaggcacctgggatcaggaagaaatatctaaacaacaacaacagaaaaccaacaaacccccaaacccaaacccaaccctctgcaaaaagctgcacccggcccgcaggcgagggggattccaaactgagtgaaaggcagggtggaggggaaggcagcgagaggcaaagtcgcagatctcccgacctgctcgtgttgaagcacctccccctgggcgtgagggagacgcgcgctccggtgggggggccgcttgggtcccccccacccctggtccctggctgcttcccaccccgggctctctcctggcctcccacccccgcgcccggcttccaccatgacggtgatgtctggggagaacgtggacgaggcttcggccgccccgggccacccccaggatggcagctacccccggcaggccgaccacgacgaccacgagtgctgc

SEQ ID NO: 27573 - DNA, 598 bp, Homo sapiens; identical to SEQ ID NO: 25035
  chr12:50297476-50298074
  hyper

SEQ ID NO: 27574 - DNA, 915 bp, Homo sapiens
  chr12:50354878-50355793
  hyper
cggcctgggagagggcgcctccggggatccgttgcctagtccaggtactgcccagctaccgggcgtcgaggattgcgaagcgtcggggcaggctggcacggtgcccacttttcccaaaacgccagccttccaagcccagaagctcgcccggcccaggccgggagcggcccacgtcggacggccggaccgccctgcaggacccagcccggccgcccgcccccgccgccggcggtgagggaggtgagcggcgccgacctgcgggacgagcatcactccgacccagccgggggtgaggcgggtcaggatgctccggtcgcaggaggaaaaggaggagctggaccaaaagcccgaagagaagaaaaggggaaggccgcgcacggagcgcggtaaaggccggcggagctagacgccccgaggtcggagtgaagcgccgggaccgagccccgtctcccagggagtccggggcgcacggcaccgaggagagcgcgggagccaacctgggcgcatcatgcgcagggcccgggacgctgggccggtctacaccgccgcctgggtcacgtggcccggacgggccggcggctgccccggccggggggcgggggtcgcgccggggttgcgctggacgacggagagcggcgggcccgcagcggcctggagcctcccaacccgcgcgccgcgctggcccccgagcgtaggagccgccccctgcccccccgcgccggccccgcgcccggccgcccgccccctatatagcgcgccccagcagggcccgcgccaggccgccagcctcggagtgggcgcgggacagtgcgcggcgccccgcagccaggcccccgcccccgccgcatccacctcctccgccgcctgcgacccaacgggcgccccccgccgcggcagctgccgccgggcccccgc

SEQ ID NO: 27575 - DNA, 1389 bp, Homo sapiens; identical to SEQ ID NO: 23870
  chr12:52400270-52401659
  binary

SEQ ID NO: 27576 - DNA, 762 bp, Homo sapiens
  chr12:52626747-52627509
  hyper
cgggaagccttccctcactgagtccgtttccaatgggctggaactgcggtcccccgctgttctctgcggccgtctagggatggcgctcctgcctactccggaccatccctgcttggactgaaagcctgggcttcggcggggcgggcgggcagagggcggagggcggccccaggaggggcctggcagcagagaaaggtggcccgcggcagccccgcccctacctgtggaagcccagccgcccgctcccgcggataaaaggcgcggagtgtccccgaggtcagcgagtgcgcgctcctcctcgcccgccgctaggtccatcccggcccagccaccatgtccatccacttcagctccccggtattcacctcgcgctcagccgccttctcgggccgcggcgcccaggtgcgcctgagctccgctcgccccggcggccttggcagcagcagcctctacggcctcggcgcctcacggccgcgcgtggccgtgcgctctgcctatgggggcccggtgggcgccggcatccgcgaggtcaccattaaccagagcctgctggccccgctgcggctggacgccgacccctccctccagcgggtgcgccaggaggagagcgagcagatcaagaccctcaacaacaagtttgcctccttcatcgacaaggtgagcgggactggacctcgcctctcctcgagccgcgctccagaccacaccagccgccctaactagccctgcctgcgcgcgggccaggcgctggggagcactgcc

SEQ ID NO: 27577 - DNA, 1154 bp, Homo sapiens
  chr12:54366668-54367822
  hyper
cgcccatcccaccgcccaccccaccccaaccctctctctcctcctttgctcgtgctgtggtatggagagaaggggagtgacgagagaaaaacgaatacaaatctgcaattgattttcataatgtttctgcggtgtttgcaaaccaatcgcctgaacgtccccgatcttacctaagagagaacccctcctacgtctgcgaagtgctccgaactgatatatgacaatatctactttggatcacgtgctcagagagagagagactaagacggataacgcgtcatctcgccttcccaaattttcccccctcgctagaccgggtccaaaacctccatccggagccggcaggagaggagaacgatgtttaactcggtcaacctgggcaacttctgctctccgtcgcgcaaggagaggggcgcagatttcggcgagcgagggagctgcgcctccaacctctatctgcccagttgcacttactacatgcccgagttctccacggtctcctccttcctgccccaggccccctctcgtcagatctcctatccctactcggcccaagtgcccccggtccgggaggtctcctacggcctggagccatccggcaagtggcaccatcggaacagctactcctcctgctatgcggcggccgacgagcttatgcaccgggagtgcctgcctccttccaccgtcaccgagatcctcatgaaaaacgaaggctcctacggcggccaccaccaccccagcgccccgcacgcaacccccgccggcttctactcctcagtcaacaagaacagcgtcctgcctcaagccttcgaccgtttcttcgacaacgcctactgcggtggcggcgacccgcccgccgagcccccctgctccggcaagggcgaggccaagggggagcccgaggcacccccggcctcgggactggcgtcccgggctgaggcgggtgccgaggcggaggctgaggaggagaacacaaatcccagctcgtccggttcagcccactccgtggccaaggagccggccaaaggagccgcccccagtaggtagcagcggccggggaacgggcgggcagcgagggagggagcgagagagggagggcgagagaaggggggaggcaaggggagcggggacggcctcgtgttttgggtcagtcc

SEQ ID NO: 27578 - DNA, 1386 bp, Homo sapiens
  chr12:54368271-54369657
  hyper
cgcgggtcctcgagcagaaacccaagcaactctggggtcagcggcgacaggggaatggggcgaggcggcgcaggactccactgcgttccaggcgggggtctgggcgtttctcccgggtccgcggccttagtgcttgcctagaactgcggtgtggaaggcgctgccccgcgggcttcccggggcgccagggccccggaagcggctctctggtgtctcggtgcctgctggccggcttcctccccgcctcccgactgctctcgccagatttcactgcttcgcgcctgttctcagctttccccccagatttctgggggaggggttgggctttccgaaccactaggagggcggcccaggaagggcccgagggcggagggggagcagacagggggcccgaggggacgcacgtgtacctggagggctttccttctgtcccagaccctgtcagccgcggctctcgcctgagaactggggacggggtggcgcagtggcgggggggtggggacccgctagacctggcagggggtcgaggcttgcccgggtgctgcggctgcaggagagccagccgcctggcgggagggctgcccgcggtgggctaggagaagggccgctgagcgctcagcgggctggggtcgcccgggtctcacgtgtctctctcccccctctcctcgcacttgccccctcccctccctccagacgccccccgcacccgcaagaagcgctgcccttattcgaaattccagatccgggaactggagcgagagtttttcttcaacgtgtatatcaacaaagagaagcggctgcagctgtcccggatgctgaacctgacggaccgacaagtgaaaatttggtttcagaacagaaggatgaaagaaaagaaactgagcagagaccggctgcagtatttctcgggaaatcctctgctgtaacctgcagaccgggcccttttgggggcggggggaggggaaaattattttattttatttttattttttattttctaactcgtcttctttccgccggtggaaaactggactgtggccagggctggcccccaccgctgtggccggcactccattccggaacctcctggaccctctatctgactctcgctgtgggacagggaccgggcctggaaagggggtgaagggaagtgtctgatgcacggcgagtgaacaccgttggcgccgaggccaagactttgatttaaaagaaaacacacctcggcgacaatgtcttgctgctcggattaggtgggggaggggcgacagtagtgagcgcctgagccgaacaatcctcgaactaaaagccttcccttgcccatgtgaaaagatccgctaagacagcatgtctgccagcggaaacttctcgagctcccccctctacccc

SEQ ID NO: 27579 - DNA, 956 bp, Homo sapiens; identical to SEQ ID NO: 23051
  chr12:54379055-54380011
  hyper

SEQ ID NO: 27580 - DNA, 1240 bp, Homo sapiens
  chr12:54519801-54521041
  hyper
cgtggtccctcgtaccaatcgatcgaattctagtcgcaattctctgtctgtccctcggctctggggagaaagggggggctgtggcgtgggggctgaggaggggctaaggcgggaggggcgcctcatcccttcaccctcccttttcgccatgtgggggccctgagcgccgccccagaagaggtcgagggaatgttgtgggctggggcacaccagcacggcagaaactggagaaagcgagagacgtcgccagggacccagggacctctccctccagttccccgggcccgcccggccctgatggccactcacgctatagcgcccactctgtcctgggccatcccgcgccagcagtgtagcccccagcccgggcgcctgaatgctctccctccggatcgctgctcgggtccccactttggcgaccgtgcccccgagtcctgcttccccggggcctgctctgtatcaggcgcctgcgccttcaagggtacccggcccgcctgccctccccaagagccgagtttgcgctcctcccggaatcgtttgagagaaggacaaacttttggcaggatggaaatctagatgagcctgtccggagcaggtaagctgggcccgggacgggtgcgattcagcccgagaacaatctgtctctccccgtcccggtctctccctccccttacccctgtttcccctgcaggctgacatattaatctgccttcccccgggagaaatttgggctggggttgggcttctgtcagatgcatggggtcagagcagctttcctccccgagtttagggactaaggtggtagctggcaggggagggggagggttgcttccgaaactgaggattgaggggagggttaggggccgagaaacccagagtctgagggagacgacttctttcctcaaacgcaacttgggggaacttcggaaaagttttttgaggggagatggagaagggagcggagttggggtttcgagggctaaagtgggagagagggtgctccgcttcccgtactgaaggaaggatgtgtgtgcttattccccagtcgggaccgattaccagcctagaaaaacccagccgcgtcccaaacccgctcaccccagcaggcccttagagacgcttggagatccccagacacgccccgcggaaagggaaggaaatgccagcccgagttgccgactctgccgggacggggcgggggatccgcccagagcggtcccctgctgtcctgggcccttac

SEQ ID NO: 27581 - DNA, 299 bp, Homo sapiens; identical to SEQ ID NO: 10268
  chr12:6334298-6334597
  hypo

SEQ ID NO: 27582 - DNA, 917 bp, Homo sapiens; identical to SEQ ID NO: 26283
  chr12:64062220-64063137
  hyper

SEQ ID NO: 27583 - DNA, 91 bp, Homo sapiens
  chr12:6623491-6623582
  hypo
cgccccactcgggaagccataacacacctgcttggtgtagccttgacccgttataaccatatgctcagtaagttaccagtcgctttgcccc

SEQ ID NO: 27584 - DNA, 712 bp, Homo sapiens
  chr12:66582719-66583431
  binary
cgcctagccgtggggcacggtgggctcctgggagctctgagctctgggctttctccagttcgcactctgcttgtctcggcagctccgtccccaccgcagaggtgtgaaggggcgcaaagccagcgaagggagaacccgggtcgggtaacccccaggcctggccaggcggacgcaggggcatctcgggcgaggcgcgccttgcgtcacgtgggcaccgcccctgcagtgaccggagaacggcgtgttcctagggctctgctgccgtcgtggaagcaggatttccgcggttgtgtaacggcctgtcgcaggcgtgcagggacctggactccgcctcgtccccggggctcgggcagccgagccatggcggggaactgtggggcccgcggcgcgctgtcggcgcacacgctgctgttcgacctgccgcccgcgctgctcggagagctctgcgctgttctggacagctgcgacggcgcgctgggctggcgcggcctgggtgagtcggcggggaccggccgggggcggcgggggagcccagcgcgccgcggggcccgctcggcgtcgccctgcatggctggggtccctcgcggggctggcgcggcctccgggaagttcccgccagggagccggccccctcctttcctgggttggatgcagagactccctgggacccagatgccttccctcccttctctttcaaagaattttgggtatc

SEQ ID NO: 27585 - DNA, 268 bp, Homo sapiens
  chr12:70087465-70087733
  hypo
cgtggtccattgtgggaaatcttttgtacacagcagtgctcaccgagcgaaagatgagcagggaggtgagattgacgtagcgcatcagcgtccttctaagcaggcgcccgtgctcgtcgcttccgtgaacactgctagagatgaggaacattagcctgtctggccagggcaaattcacaaactggttccaccatcggttcactaccagagtaacataaaaccctgtagaataacaggaaattataaagcagtttcttacagcagacac

SEQ ID NO: 27586 - DNA, 563 bp, Homo sapiens; identical to SEQ ID NO: 22786
  chr12:8171309-8171872
  binary

SEQ ID NO: 27587 - DNA, 72 bp, Homo sapiens; identical to SEQ ID NO: 10269
  chr12:8906544-8906616
  hypo

SEQ ID NO: 27588 - DNA, 141 bp, Homo sapiens
  chr12:93710959-93711100
  hypo
cgacccaggactcccgcttctctttacaccatatactgttctttatgtgccgctgtttttctctttatagtttttctaggacaaaaaccaagctccatcagaaggttaaacctgtgtcaggtttacagtccaatgaccgcc

SEQ ID NO: 27589 - DNA, 1120 bp, Homo sapiens
  chr12:95941858-95942978
  hyper
cgaaggccatcgggaatggctttaggaagctgattttcaagctttaagcggcagcaggtgccggcagcgcggggaccgatcgatggagagaaggcgggcaagacgccgggaagcgcattcctcctcaaccgagtgccacaaccgccctcccgaagtgccccggggcttcgagcatcacctcgcggtaatccgggagggtggagggatgcggctggacccgggcgttgcgtgctccacacagcgcccagcccgtgccagccccgcgcccacctctccacgacgctcgtgccgggatcagcgcgaagccccttccagtccccgaagccctcgcccgcgcccgttctcccccagctcgccccctccagcccgctgcgccttgccgcagcatctccgggcactctgaggctgccgccgggacagggtcggagcgccgcagaacccaccgaaacttcccaggggggcaattcaaaattcgccggacgcgtcgccgccgcgcgcccctcggctcattcccttccgcgcgcccgcagccccaggctctccctctctcaggaccccccagcgccctgcgcggcgagaataggcccccaggtgcctcccggccccgggggctgccgtcgcacgtccgctcccgcaggggtcctcactccgccaatcgccgcggccgcgcgccctcgcgcacactcaccagcccgagccggggcggccatcttagcgctcaccccggccccccgccccccggttcggcggccgcgacgacccggtgcggcggctacgacagccgtgacgcgcagcaggccccgccccctcccacagccccacccctgcgccggctcttcgcgggcaccgagaacctgccggtggccgccttccgcgcctcgtgggggggtcggggccacggacggtccccggcgccgcaagtgggtctgcgcgaacaacaagcactgcctccccgggcgggcttcgcacctgtagtgccgtcgggacacgggagggtaaacccagcgtgtcctgtgtgcctgtgagccgcagaatcatccacggacgtcgttagtccttcctggaatttctgcgatttacacaacgtcgaattgtttggcagaaacgcgtggcaaactcc

SEQ ID NO: 27590 - DNA, 738 bp, Homo sapiens
  chr12:96883072-96883810
  hyper
cgtcatcattatcgttattaagtggccaacatggataaagagtatagtctggatttgtgaccttaaatttttggctctaatattcgccagcgctctgctcagaacattctctgttcgcatttcatacagcggtgccagcgcacaaccaggcaacgccctcaggagcatcattgttttctggacctggttctttctcgctctgccctccaggggccgctgtgtttctcggaatgcgcgcgggatgcccggttgccacgagaccgtcgccaggcaaccgcgtgtacacatactccaggcgggccggggcgcgtcaatatggcggcgcagggctccccctcgagctctccgtcagacgactctaccacctcggggtctctgccagaactgccgccgacctccaccgcgacttcgaggtcgcccccagagtcgaaggggagctcccggagctcgctgcttcagtggacctgccccgaggactcattgcccctagccgtgttttatgggccgctggacgcgaaaaacccgctcctggcctcttgtgagaaggagatccaggagttgttaggctttatgaggaaaaagaaggctttagccaccacggaggaagagaagcacgaattccgccggcgttggtaagcgctggcggggcactggggagggcgccggccagaggagggacccctggaaagggctggaggatgcaggtggtggccccagagatggttcagcgttgcggac

SEQ ID NO: 27591 - DNA, 775 bp, Homo sapiens
  chr13:102068457-102069232
  binary
cgggtggaggcgcccctccccacccctcccccgcgcggggcccccgcccgcagcccctctagcagcccctctcgcagccccagcgcccctgagccgtcctggcccggaccggccaaggaactaacgagcgcgcatcgcgggcctcgggcgcagggcacggagccggccgcgccgcagcctcccgggcaccggcggcggtgaccaacctgtaaccccagcgctcagagctgtcatggtgcccgcgggcggcggcggcggcgacagtgggcgaccggcaggatcagtgccaggcgcggcgcccagggcgggcggggacgcgggcccctcacctacggcggctcagctcaggcagcgcgctcggcccggctggggccgcggctcacgctcgccgtgtcactcactgagcgccgccgccgccgggcaggctgggggaggggtgggagccggagttttcgggcctttaaaaaattattattttatttaaatttttaaagttagctttgctacagggactgcagtgatgccgaagggcgggcaccgcagaggaggctgcgccgcagttggtggggagcgccagggtcggtactggcagttccttcttgccggctgccacccgcagtcagtctcacagcaacagctaggctctcatctgcgagctcctctcgggggtctttcgtactcaacagcacggcggcggtgtgcacgggagtccgccgggcacacgcggggtacacttaagtgcactgccaggaggccgggagcccagcgtgcgagc

SEQ ID NO: 27592 - DNA, 841 bp, Homo sapiens
  chr13:102569155-102569996
  binary
cgggacccatcgccctctccgcggggcgcggggccaggcgcgcagatgcgcccagggcgcagccggacgatcccgggaagccggacgtcgtggccgccgccgcttggccacgtccgagtggagagcgggaccgcggctgcgggcgctgctggtcaccgctcgtcgcaggaaccccggcgggggtcgccaccgccactcgcgctgccttctcgccctgcccggctcccgggcgggaggtagagccggccggcggctccccgggcgccggctggagggcgggtcccggcagggtctctgcgcgtccgtcggtccgggtcgcgctgggcaggactcagcgccgggctccagctgcccgcgggccggtgccgccgccggcgccgcccgctctcggcttctgccggtgattgtcaagtgctttggaaatcagcatctggagagaccaatcttctcccctgagatctctaatcaaacgctccgttcccaccccactacaccccctccacctatgtggtccccctcctgatgtacctcttcagaaagaaacaaaacgtataggtaataatgatttaaaaataataagaaagaaagctaagatggattgcagggatggggtgctaagaggccgagccaaagcaggtggaattgaaggaacatcggggcgctttttcttagatgcaactcgctggttcccgagccttccgcggcttggttggggcttctcggtcttaacgtggttaccggtgcactgaaactctcagcagcggttggagggcgaggtggtttccgccctccctgctaatccctccagcaccaacgcccccccgtcgccacccccaacccc

SEQ ID NO: 27593 - DNA, 790 bp, Homo sapiens
  chr13:103046539-103047329
  binary
cgccagctcccttccctttccttcagatgggtctcgggtccagagctggcgcccgctagcgggaggccagaccgggagggccaaggcagccacctgtggctttcccatccctcaggtccagcagtgcacatggggtgcccccgcgtcaacgccggaggagtgaccttgcaaacccgcgccccgcgggcggcagagccggccgctcactgcccggtccccggccaccacggaagagcgaagatctctgccagggcaggagccctagccccgacccgcgccccaagtctctcccgcgcggcggcttccggccgccatggtttccatagcaacaacagcacaagctgccgggtcccagagacgccctagggtcagaggtcatctccgtggcaacggaaacttcccgcgctacggcggctccaacgggccgcttccgccgcattgcgtagcgaagcccccggcgagccgaggctgggagcgcggtgatggccggtccccgtgagcagagggcagcggcggcgggaccggggactctgggccaatgggtaaagccaggaggaagcccgtgcctggcccgttgggctccctcctcctcagagccgaagcagtccacactcggaacccagcttcacccggattaccgaggggttccacgcctggaggcagagctgcagcgtgggcccgctcgcggctttgcagaaaacaaataatgacacacttctctggaagcccggggcctgggcccagagccgtggcttctgccaaactttctggtcccggacaccaactcccc

SEQ ID NO: 27594 - DNA, 510 bp, Homo sapiens; identical to SEQ ID NO: 26295
  chr13:108518148-108518658
  binary

SEQ ID NO: 27595 - DNA, 1411 bp, Homo sapiens
  chr13:108519212-108520623
  binary
cgaccccatcctctgtagagtgggaaacaataatggagagagagagagagagagagacggaggaggctggtgctggtggccggcggcgaggctgggtgcagggggcgatggtggaggtgacagggtggctggcgcggctccggtcacccaggcattgtcagcgcgcgggtccccatggccccgcggagcccagcccgctctcccctgccaggggcatgccgcgcctccgctgcccactgacggcgcccggagcgcctcccctcctcctcctcctcctcctcttcttctcctcctcttcctcctccttcctttccttctccttcttcttctcctccgcctcccgctcctgctccgcgctggctctcccagagtccggagcctgggctgcctccggcggggcgctccctcccccccaccccccaccccgcgctctaagtgctgccgccgccgccgccgccgccgccgctgccgcagggccgcccgcgggcgccgccgccggggctccgactgctgacgccgcctcccgcggagctccgggccgaatcgcctgggctgggcctcccgagagccacagtcatcttcagtccgcgggctaagttgccgccatcttcgtcctggagaaacacttttttggggggagcgctggcttttgcgtcatctcctcccgcgccgagctcgctccatcctggcgcagtggcgccggctcggcccgggaggagggagaaggcgcgcgggggcgggcggcggcggggccgcggggcccgggggcccccgcccggctccccgggctcaggcgcctgctctttcctttctgtccccctgtccacgatattttgttttaatcactgaagagaaaaataaaagtcagactgcggacggcatggccggtgaggctcctcgcggccgcgccgcccgcacgctctggctccgggaagcgtccgagttgcaggcgcccgggcagaggtctctactggtgcgagggtctgggcagagtcctctcaactaaggaccgagccacttcggatggaaggtgggggtccgcggaggaagctcgaattggctagaggagggatgaggtgacatttggtctctgaatgcgtctcggatcccggaccgcgagatccatcgctcccagtgcgtgcagttattccgtcctgctgtgtgacacgggagaatggcgcgcacgcctgtgcacctgcatcgaccgtgtagctgcctgggtgacagccacccatttgtctatgttttctttcctattctaaagtaaacgattagaagtggcctcatagagtcttaggaagaaacagtaagccctgtgccacccggggtcactgcctagccctgccctccgcgcgcaccgtccgcgtctccgagggctcctcctcggacctggaccctctggagcggcttc

SEQ ID NO: 27596 - DNA, 968 bp, Homo sapiens
  chr13:110958724-110959692
  binary
cgcgccttaggcagcagtcgtgggaaagctcagatacagctgtttccaggcaaagggcccagagcttttcagcctcagccaccagggtctccagacaaggagaaatacgcccaaagctgctcccaggggctaggagctcggagctcccagtgtgggtctctgagcagcgcggggtgggcgctcccggccctccagcccccaactccctcgcgcacccgggacgggtgaaggcgcccagctgccgagcatacccgcgacgcgggttcaaatcccgccggctcccaggcaccctcaccccgccacagcgcgggctgtttctcctcccttccccggaggaattccttaactctccagtacccataccataacaaaggaggctcggtccaccaatgcgcgatcgtagcctacagggacccccaacgaaccccggcccagagaatgcacctggccgtgccacgcgcgacccccgaggggcaggcggacgggtccaggcgcggacaaaggggcctctcggggcgcccaagctcggggcgggacgccgggagcggagctggccgggaactcaccttcgcagcggcccggctgtgctcctcgtggagcagaagggcggcgggcagcagcagcagccagacgctgagccggggccccatggtggcgcgcccgaggcggcgagggacggctgcccggcgtgcgggggccgcggcggacagctagctctcggaaggccggacttccagcgctacgcaccgtcccgggtgcggcggctccaagcggagacctgagcgcggcgggccgagctccccaatttgttggcgctgccccctcccccccggcggtgcgcgggcggcgcctcaaaggggaggaccctgcggcgcgggtaagaggcggcgggagcgcgcggcccgggagtgtggctgcagtgcgccgggacaccagggctccgcgctccgcactcaagaggctcccgc

SEQ ID NO: 27597 - DNA, 199 bp, Homo sapiens; identical to SEQ ID NO: 10277
  chr13:111006048-111006247
  hypo

SEQ ID NO: 27598 - DNA, 849 bp, Homo sapiens
  chr13:111277855-111278704
  hypo
cggggcccagctccagaggcagggaggccctgtgggctgtgtgtgacaggtttgcagaaggtggaaacgaagggcctctgagcaataacaagacccttcctgcactcggcacatatgtctggtgccaggccctagcctgtgttccatgggtcagcgtggaactgggcaggcaaaaacctgcccccgtggggctcccccagaccgcctatgctatagagcttgctgtgtggaggtgttctctctgccgtccaggattgtggccactgagggcttgaaatgtggctgggaggtgcgggagcagagcgtttgctcttgtttacttttcattgtgtgtgtttgcaccgactggattgggctgtgctgctctggagacaagggagaggaggatgtcaggtggtgaaggaaccgtagagagcggcagcagggagggggctgtgagagtgggcagaggggcagttggggcggcagcacagtgtgatgacgcctgggtcgagcccggcctctccacaccagagaggagccggcgcggagctccaggtgcggtgctgtgatgtgtcgggtgaccaagaggtgcagggctgggccccacagggtgtggggctgctgtcagggctgtggctctggccctgagtaagcagggcagggccagtgtgggtcataaaggctcctacgcggctgtggggctgggccggaggctgtggtaaggacctgtgggagggaagggtgcagtcagatggtgagaggggccggattctgggtatgtttggaaagtttgggggtggaatttgccgacagattggattggaaaaggcaaggggcacagactccaccaagggttttggtctgagc

SEQ ID NO: 27599 - DNA, 119 bp, Homo sapiens
  chr13:111363839-111363958
  hypo
cgtgagccaccgcgtccggccaagtgttatagtcttttgtgcagaccaagtagtggccaataaatcttgtagaaactaaagtactcatttgcttttaactaggccaagactagaatagc

SEQ ID NO: 27600 - DNA, 922 bp, Homo sapiens; identical to SEQ ID NO: 26300
  chr13:112760441-112761363
  hyper

SEQ ID NO: 27601 - DNA, 715 bp, Homo sapiens; identical to SEQ ID NO: 23889
  chr13:114074589-114075304
  hypo

SEQ ID NO: 27602 - DNA, 729 bp, Homo sapiens
  chr13:114189691-114190420
  hypo
cgcacctgggcaccgtcaccattgtcccaacagtgcacctgtgcaccgtcactgttcagcccggcaggtgctcttcctgctgtttatcccagagaaatgaagccgtgttcacacagtagcctgtacacaggtgtttatagcagctttattcgtattagccataaacagtccaaaggtacttcagtgggtaaataaatgttcaacaaactgagctatgtccataccacggaacgccacccagcagtaaaaccaccggcacacacctccgagaactgcgcagagtgggcaggcagcccccaaaggctgcgtactgtgtggttctttttatgtcacatttatgaggcgagaagattctgaagttgaggaaaggctcgtggttcccaggaattgaggatgggcagtctggggaggggctggggatggcactcgctgtcttcgctgtgtctgtatcggcacctgagtgggggtctggggaggggatggggatggcattcgctgtgtttgctgtgtctatatcggcacctgagtcggggtctggggagggactggggatggatggcactcgctgtctttgctgtgtccgtatcagcacctgagtgggatcttgtgctgtaatttggcaagatgttaccattggggaaactaaagggtaatgaggactttgtattactcttaaaactgcaggttaatatataattatctcaaaataaaaagtttccggctgggcgc

SEQ ID NO: 27603 - DNA, 221 bp, Homo sapiens; identical to SEQ ID NO: 10285
  chr13:114300515-114300736
  hypo

SEQ ID NO: 27604 - DNA, 531 bp, Homo sapiens; identical to SEQ ID NO: 23469
  chr13:114497796-114498327
  hypo

SEQ ID NO: 27605 - DNA, 133 bp, Homo sapiens; identical to SEQ ID NO: 10286
  chr13:114887185-114887318
  hypo

SEQ ID NO: 27606 - DNA, 188 bp, Homo sapiens
  chr13:114917508-114917696
  hypo
cgccttgaggaacggcatcgtctgtgctgaagcaggcagcgcccagctgacgactgtcaatgcagccctagcaaacacggccacgctgccctccatccagggtcctgtccagtgctgtgctaagcacttcacgtggtgacagctagctgcacaccaggcacggtcaggtgcttagcgtttattaagtc

SEQ ID NO: 27607 - DNA, 1353 bp, Homo sapiens
  chr13:23733462-23734815
  binary
cgcctccaagagctaactaaagtgcagcataaactgcatgcagcattgttttcaccacagcaaacccttcggggtgcctcctagcggcggatggagaactagcattgcgcgagagtgagtaaactgtgataaacccaaggggtttgcgggggacaggctgggtggcaagacttttaaaggctcgcaaatggaaccactccctccagagggactatctaaatctcctcaggtgctgaccctttctgacagtaaaggacgagggccagaagtgtaaagattgtggtcccgcgctccaagcccaagatgcgttcagcaggagtagttgggttggaaagaaggcacccagcgtctgcagcgaaggactcgcgtgggagcgagaaatgtccctgcccagtgccccgcgcgctggatcgcgggggcgagtctgagggtggagaggccgccgggtggaggcgcgcaggggtgcgtgggtgggtgcggaaggagtgcagggtatggaggggaatcttggggcggcgcgaaggaggagcgcttggaaaggcgcggtgtttggtcacagaggggctcggagtgggagtgcaggggtgcggggagggagtgcagggacgcggggagggagtggaggggtggggacgtgctggaggggcgcgcctcgatagaactggagaaactggaaaagtggaggggcggggcagtggctggaggaacctctgaagcgacgcggggaatatgtgaaggagtgctatgttggaacttggaggggaggggggatgctggagaggcacacggtgatggacatggaaggacccgggaggtgtggagtggtgggcccggcccgtcgcgggaaggacacagagggacataggctgccctggagaggcgctttcggacatctggaggggcgcatagtgctgggacttggcggcgcctggggcggaggggcgcgccggatccagccgggcgcgctcgggggccgggcgcagtgggagttgacgggcgtccagccggcggcgccctgggctcggctaggcgcaggacggccctggcagcggtgcagcagcccaggctagttcctggggggtccctggtccccgcctccccgcgcgccccggccagcaccgcccggagtccgggcggggaagtgggcgcccgcggcttgggaagctgctcccccgccctggagcagagtcgtcgctgcggtcgctgaggaaggacggagcagaggcccgcgctgtctggggagaagactgtggtgtcatcccgtcgggaatgaagggaaatgcagcggctgtttgcgccccgggactccaagaagtacagcaggtaaagagaatagccacggcccgccacttc

SEQ ID NO: 27608 - DNA, 1474 bp, Homo sapiens
  chr13:25744652-25746126
  binary
cgtcagaaaacatcaaacaaatacgatctgccgacgggtctgagggtggatcgacagaggcagggtctggggcggcgggcgcccggccgctgccgccttcggagtcgacaagggggaccgtctttacgggaacggcccccgtcctggaagcgtcctctgccgtgcggacctccccgggccccggctcggcgcgccgatgccccgcggcgtcctctccccgggcgccggtgtcgccggggtgcgcgaggccctctgcctctcggcagctccgcgctggggcgcggtcggcgggggcgggcacctcctctccccctgcgggctcacctgctgggtctcgcggggcgtcctggctgggctcctccggctcgcgcgcggctctgggcgtctcctccttgacgcactccaggctggcggtgagcgagccgggtaggatcaagccgcccccgggcgcgcgcccctccgcggcctccgccttggcccgcttgtctttcctgtgccagcgcatgccgctgaacagcccccgcagcccccgcttttgtttgccgccggccttgctcgcgtccacaggctctcccttgccgttttccgagcgcccgttcttcttcagcagcgagaagaagctgtgcgacttggccaccgagctgctggcgagggagcccccgccgggccctgcggctctggggggccccgggttcggccgccccccgccgcccccgccgctgtcgcccccgccgcgcggctcctccttcctgccgctctccagcaccagcacctcggcaagtccgtcgtgggtcctgctcctcaccagccccgtcggacccgagcttttcccgtcccctttgtttttgaccccaaaaatgctgggcatggtgccacccgatttcctcttcttgaataatttgaaggcagctttattaatcttccccgacggcggctcggcggccggcgtttcggcggcacagtcacaatgcaagtccatgtctgccgcgagggtcccggtcccggccccggcctccgccttcctcctgcagacccccacggacgcgccagctccgccgcgctcgctgacagccccgccgccgccgcggctccggctcgtctccatggaaaccgcgcgggataagccgctttcgtcagcagtgggctcgcgccaggccactgtcacccgtattctaaatcaacctgagccgcgctcgccgccgccgctgcaaaagaaacacacataaaagaccatcttccctcccgcaagggcttatataataccctaacccacttccatccgacttggctcggcgctgcatggcgtttttgtggcaggagcaggcaacacagccgcgagctgattgcagaaattcgagtcgtaattatggaattcaaattccctcaactctcacccaccttcggattccttctctagactcgctcttcacgggagcgcaaccatggatcacgaaatgcctctaaaaacgacaac

SEQ ID NO: 27609 - DNA, 1765 bp, Homo sapiens
  chr13:26624610-26626375
  binary
cgtgagggtgaattagggacccacaccgaccaaataataagccagaaggcagactccgcctcctggtcctaggccctttcctgaatttccccccttcaaactcccaggtccctgacgtccaggcaacgccaaccgtcctccctttcgcgctgggcgcaggccgccctacctgccgagccgtcggggccgtctttgtccgcccggccaggctcgccagcgccctgctggcggtcattgtcgcagccgccctggtccaggcgcgcctcggcgctggagcagcagtagcgcaacgcgcagctgccgcagcagatggtggcgtcgccgccgtcgaagcgctcgggacactggaagccgatgcgccagacgccctgcgcgtccagccagccgtggcagtactcgccgctggccctcgcccccgccgccagcagcgcagccagcagcagctgcaggagcgaagcggcgttccaggatgaggagacggacgagcggcgagcgccccacatggcaccaccctgggcgcggacagcgcgtctccagagagcgcaggacggtctccgagaagtcgtggccccggcgacccccgggcctcgtcactgactgtcccgcggcgctttccgcgcgggccactcccctctgccgcgacgcccaggaggcgacgacgccgggccctaggtccaggagctcctaagccatccccgtcctcagccggtggcccggtccccttagggactgccttatgagttgcactcgctgatggaaatctcgggatgcagtcagaaggcccccggggctgtcgtccggaagcctctggaggtttcactggcaaccggaccctccctgagcatccccgaagggatgctcactcgagccgaatgaccgctgggcgcgccgccgcggacctggagccagggctctgcgcagggtttaagcctcagggtcccgcgcgcgaatcagggcccgtctcccctcctttattccctcctcgggcgggtagaaggggcgaaggcgggcagtgcacgcaaggctctgggcagcaagtgacgcagccggccgcgctcagcctcctctgccccgaacttggtccgcatggctccggccgggccgcccgggcagcccacgggggtgcagccccgacgctccactcggcggggccgacggccaatcttcccagcacgtcgccgagggagcgctcctgaccccgggaacgtccaggacgcaggcgagggtcctgcgcgcccccagccgcagtcccgggagcctgcccagctggcggcggccgcggctgctgctgggcgcggatccaggcgggcggctcgccccggttccccttctccgcctccccggctgcagcgcggtcccacaggagcccggcagcctccggccggctctccctctcccggtcgctgcctcgccctcgggaggtgtgcgcaccgatggaagcctcccacggaagtttctttcctccgggctacgggagaagccgagcgcagcagccgcccacagcctcgcctcgccccgcccggcgccagaccagctccgactccgctcgctgccgcgctgagccgcgctcttatagaggccggcggctccccggcgcgcatgcgcgctgcgcggctcccccccacccccgacctcagggacgcccgcgggcgccgggcagcccctcactttcctaccccgggcaaggagaaaggtgtggccaagggcggggtctgcctgctggaataggcgcgggaggaaacccaacctaagcaatccaggcctc

SEQ ID NO: 27610 - DNA, 733 bp, Homo sapiens
  chr13:28549512-28550245
  hyper
cgtatcccagttaagttacacaggtgagtgacaagcccgggtcggctcctgagttctcatccggagctgcgctctcccgtctctttactgggagcgttctcctgccggggcttggacatttccaagggaagtgaaaatccacaaagctgcccccacttcgtaagggcctgtgcctggagggtcgtcgggttacagaaattgaaatcagctctttgccttccaactcttcttggccttgccaccgcgattggttttgttttctttgtttttaacgaattggtaagtaaaatattagttgttcaccctgaaatctgccctaaccacttccgtaccccctgaagctcgctgggcgcgccctgggctgtccttccctgagcagccgggcctagagtcaaggcgcgatgattgccgcgcaagctagggtccacgcggccggggctcctctcccgcctcgggcgcaccagaggccagaaagcggaaagcggctctgccaggccaaggccgacagaaaccgagagcatgtcgctatttgccggagagaactgccctgccaggctgccacaggtgacttgcccgcgcgagccacggcctctgcgcagagctcctcccgaaggggagagtcagagccacccgcgggtttggtcggggctcttcccagcccggcgtccacgccccgcgtcctgcgctcgcccttgcggctgcttatgctcaggtgtttcggaagaggcgccgc

SEQ ID NO: 27611 - DNA, 243 bp, Homo sapiens; identical to SEQ ID NO: 10291
  chr13:28745848-28746091
  hypo

SEQ ID NO: 27612 - DNA, 1000 bp, Homo sapiens; identical to SEQ ID NO: 25070
  chr13:29106323-29107323
  hyper

SEQ ID NO: 27613 - DNA, 231 bp, Homo sapiens
  chr13:31742932-31743163
  hypo
cgccggctggtgcctcccaactcccaaagctcctttcgcctgggttctggtgtgccatccatgcttacgcatctctctgtgcccagtgccctgcactaagccaggtgtgtagccggccctcacgctgttagctgctgttaaatgccagcactccgccccacccaactctgttgtggctcctccgactgccagcacggctacgtcatcaaacaggtgctcccaatcattccc

SEQ ID NO: 27614 - DNA, 1303 bp, Homo sapiens
  chr13:36919871-36921174
  hyper
cgcgcaatccatcccaatataaccgcagttgttcgtgggccttcttgcagagaaaggctgcccaaccttgacggggccatgggcgctgcgggagggcaaaagaccacagagatctgcgaagccaaagtaaacaacggggttggggcggcgagaatgatcaatagcgatgctccgaaaggactccgcgataggaatcgagcgggaaggattccctccatcctaacagtccatgggttaagaggccgaagcttccctaaataccacactcccgcgagagaagggactgagaacaacttctcaaactattctctctcgaaatcgctcccttcctcgaaaattccatctctgagactcggatgaggtccccaccccctccacccttgtcccgtgaccgtcgcccgctcagcctcccagccgagtccgcggggcctggggcgcccaccccgcccacccaagggaccgcgcaggggtgaactcccccgcgccccacctgcgccttccagacctcgggcgccccggcgttgcctcgagagctccctgcgcggccgccgcggcacggaccagctcccactcccttacactgggcgccgctgcgctcgccgggggccggtcccgaggttcccaaggcctcgcgcgcgcgcttgccgtggcaaccaagacgttccacgacgcgcgctctcgaacgcttcgcgtcacgcggccgcgcggccccgcccgtcggcctcgctcccgccacagagcccgcagcacgccgccgccgcagcctaggtcacgtgagtacccacgcgcgcgtcttgccagcggattcatcaccggcctgctcagactaggttctgcccactctgaccttctaaatggtacgtgggaggacgtccgtccccttcggacccaagagtcaccgtaacactctagaaggggagaaaaggagcgagggcggcaggcgacagagaacctcgcgagtcagcggccccgcgcagacccccccaggcacggtcccctgcggccacgtcggctgctcggcgcctgcgcaatctctttctctccagcgaaaccgaggcctccggagagcctagtagagagtgtgggcagtgagcgcttgtagccgctagagggagcgctgggcacagtgcacgagagacaataaaggctgattatcccctcaatgtctctgcagcctgagctttgtgacttctgtatccagagcacagttaatttccaaaagcccgcctgcaccacgtgttttaagtcttggtgtgtgtgtaaagtctatatcactatcataaaactgttagttcctgattcc

SEQ ID NO: 27615 - DNA, 1420 bp, Homo sapiens; identical to SEQ ID NO: 22793
  chr13:37005451-37006871
  binary

SEQ ID NO: 27616 - DNA, 86 bp, Homo sapiens; identical to SEQ ID NO: 10292
  chr13:43620991-43621077
  hypo

SEQ ID NO: 27617 - DNA, 155 bp, Homo sapiens; identical to SEQ ID NO: 23907
  chr13:46661291-46661446
  hypo

SEQ ID NO: 27618 - DNA, 72 bp, Homo sapiens; identical to SEQ ID NO: 10293
  chr13:46948519-46948591
  hypo

SEQ ID NO: 27619 - DNA, 804 bp, Homo sapiens
  chr13:53313164-53313968
  hyper
cgtgactgtcgctccccttccagaagtagaaggccccgatggccccaaagagcagcagcacagctcccgaaatgaggaccacggctcccaccttgagcagccgcgcggggctggagggcttcaccgtcagcgtagcgtacgcctgcgggccggggcgggagagggaccgtcgcgtttgtgccgccagcacctgcggcccccagcgcacccgggccccacgcggtagcccccagggagtggggagtcgggcgggaaacagctcgcccgggctcctacgggtgcccctttcgccgcgctccctcccgagggtcctttgcagtcgggcgtggaagtgggatgagcaaaccccgcagcacagggccttcgccccaggacctgcaccctctaccggccacgggacgtccctccgcacccgcctgtggatgccgtgacccctgcacactcatacgcgtggggcgacatcccacccacacatttgggacccaaatttatccccccgccaacacacccattcggtggcacgcacccctgagtccgaactgtggaacctgatactcacacaacccaggccctgcgtgtggaatccctggcggtactcaccggggggctgcagaattccacgtcatcaggtcccaccagggcaatgggaactttgtcggagttctctgtcatgtttgcggcgggaggagtgaggcacttggagactccctgggcaccctgggatctgtcccgctgccccgacgtgcagggcatttcaacgccgcgcgcacacacggtgcacggtcccgcctgggccagcccagc

SEQ ID NO: 27620 - DNA, 1466 bp, Homo sapiens
  chr13:79169684-79171150
  binary
cgggcgcttcttctctccagcccttggttcgccggagcaggatgctggtctcaacactagggctatgtcggcttctcaccgaaccgagattttcaatttcagctttgcgattcaggattccacttgaattccccaggacgaaagcctagcggccaggctgcatttcgccccgggtataaatccctgccggataaattcaaatctgtagcagggttttggtaatatgcatcttagcaacaaaacaaaaaccaacctcgtatgccttccagttctttttaaaacgtgtacggcagttgtgaaagttttgtggtgcttgagactgttgacttatgcaactggggagagggtttttttaaccgctttgagatattggtccatcccttttctctcagaacgtcctcaagggcacgtaagagttggaggtgacctccgggagcgcctaattttgagccgcggaacttcggcccacttctccgaggggaccaggcgcgcgccaatacgcatgtgcgggctctgagcgctcagagcgcgcctcttccttcccggctccccgcggtgcgcacccgctggccactctgcgcacgcgcgccgggtgccccggcctaaggccgttgacctcgggttctccccggcacagtcgaatccacgccagggccctcaggccggtagctgtcctgcagtccgagcggagctgcgacctcgggcagctggaagcctgtgggctgctgcttctccaggcaggcggcggagggatgcaggcaggatgagcggcggtcccttcgccgccacccggagaaccgcggctggtgcccttgaaggccctgggatgcctgggttgggtgggtgagtgaacgagaaccctgagtgagtgaggggagggcgggtcccctcctggcttcaaattcaacccaatcagctctgccgatggtttgaaactgcacacgccgacccacccgccccgaagtctgaaagttatgccctggagacctgcgagctgcggagtgcagctggagagggagctgccccacgaggaggcctccagaataactcccggagtcggaacagcgctgggctgctgaagtttgcagcctccggatccgcgccccgccctgcagatccaccggatttcggggagggaatcggggggctgcccgtcctcccgtaaagctgacttgacaacaattacgaaagtttttaattagctccttgttataattcattttatttccagaactctccgaccataaattattcaaagagtaagccaacccgagcggggcggccgcgcgccttccccacgcgcgccgggctggctctggccgctcagctcacccgatgccccgtgagccagccccgcgccagaagccgcggtggcaggaaggtttgatcaaacattaaataacgtaatgtttgcgacaaggcttatctcacaagtggaaaagaggacctcgcgagaattagaattc

SEQ ID NO: 27621 - DNA, 1320 bp, Homo sapiens
  chr13:93879790-93881110
  hyper
cggagctgcggagaggtccgccaggcgtacggtgccaagggattcagcctggcggacatcccctaccaggagatcgcaggtaagcgcgggcgcgctgcaggggcaggctgcagccctcggctgccgcacgtcccactggccgcccggcgtccccttccttccccctgttgctgagttggtgctcactttctgccaccgctatgggactccgcgtctccgtgttgggcggcggatgctcctgcggcttcttcggcgggggaaggtgtgcgtctccgccgcctcattgtgtgcacacgcgggagcaccctggctcccgcctcccgctgctctcgcgcccttctaccccttagttgatggctcaggcccggctggccagggagcccgggtcactccggggcggctgcaaggcgcagacggagagccgagccgggcgctcactccgcgttctggttcgggcaaacttggaagaactgcgaccgcagtttgcccagcgccacagtctgagtggcgccttctccactcccgcccttgcgccggcaggggcggtggagagacgcggagggctcccccagcccctctctcccctatccgtccttcgggcgacagagcgcccggcgctcgggccgggggcgggcaaggctgggagggaccctcgccggggacctggcctctggacgccggcgtttcaaggctggtttggggacttcacgggctgcctgtttcagatgtggggcgggctttcccgttagggttcctcagtgcttccccagttgctgttggccactcagggcccggggacaccctgccacccggtctggagccggcctcgtctgccagcgaacagccaactttagcgggtggctcagctggggattcgggtccgggttcgggggccccgtgtcccccgcatgcccggccactggcattgctccaccaagagcttgagagcgcccaccctttctctcggcgccagtgtgtgtagcacttggtctccgacaacttgcgcggcagtctgggtgcttgttttccggctcttagctccaaccgaatccgagcttctctggggctctgtgaatgaaacgtgtcggggagagataatcctttggctgctaaagaacagaactgagagaggccgagggaggccaggagatgctgcgagggcgcgggctgctcaaaccgggcagctgaagtccttagtgacctcagatcgtcaagtcaaaacgctgaatttccaccagcctctgtctgctttttgccaaataactggtggatggatgaaaagcattttgcagatatcttagaacatcacagtttcgatac

SEQ ID NO: 27622 - DNA, 1490 bp, Homo sapiens
  chr13:95364195-95365685
  binary
cgagttgtgcatcttggggttctcctgggccatcttgcgccgctgagcccgcgaccacaccatgaaggcgttcatgggccgcttgacgtggtccaccggcttggacatgctctcgccctgccgcggctgcagcccgccgcctcccgggccctcgccctcggcccggaggaaatcaatgttggctgcccgcggagacccgctcggccggccggggctcgtcgcgccccggcgtcgctcccgccccggaggagggggctgggggaccagcccagggccacgccgcgccccgggccgccttagtgtctccggccgagcgctcgagcaggttgtctctgggacactctaacttctcggcggtgccccctccccgcggcggcagtttgccctttacgttctttgggtccttcgtctgcagtggcgtttgctggtgagctccccgcaggtagcggcggccgggcagagcgctcctcctcctcggtcgttctctcttaaatgcaaagcgtccccaaaagttgcgtcgcggagactcctcgaagttgagccgaggagcccgccgccgcgtgctgccaagtgccaaagggggctctcagcggctggagtgtttgggttctcctcggtgactttctcatttgacagaagcagatgggggtggggaaggcggggaggtggccctggaggaggaagaggagggggaggcggaggagtgtccaggcgtgccacgagaacgcagagcgcagcaatggatataaatacaaatacagcagcaccagcctgtcttcttggctccgggcagggtgcgccgatgggaaacccccaatcggctgggtgattttttttttttggaggggggagctgtcccccgcagcacctgcctctcgagtcttcctctcccgctgctggactgacgggtggggcgaggaaggagggtggatgaggcttgagcaagcgttggtcgcccggcctcagaggaagttctcccggctcgccgaggagccgcgtccggccgtcccctgggccatgccggctctgttcgctccgagccccttcaggcgcgcctgccgacttagggctcccggagctcgccggccgcggagggcagcgcagcctccacgcggcgccgcaggcctggcaccggccgcgtccccgcctcgctcttctcggcagccgcctggcacttgcaactaacttcgcccaagtttcctgcgccgcggcgcccctctcggcgcgctcctgggagcgtgcgcccgcgagtccgccgcgcccggggcccctctgtcctcgctgctgtggccagagccgagccggcgcaggggcggaggtgctgcaggagagttaaggaaaacgggccatcacctcagttcgcaggtccgcgctgtggcacctcccgctctccccactcccgcggcgcagggggccccttcccagcccaggccgccctctgcaccggctcaggtgagtgtggctacctgcatgtgtgcgcgcccggagcc

SEQ ID NO: 27623 - DNA, 1284 bp, Homo sapiens
  chr13:95619776-95621060
  binary
cgtttatgacacttgaaaacagattggagagtgggttttgctcgggcgacttgattgtctttcaagttggcgttaagagttttcaacaggtctccttccctgccagccgggaccccgggggtccctcggagcagggcgggtgggaccgctcggcctccttctctcgcccgcacgggcgccgccgcagacccggagcaggcacccggcggccgccgcgtgggctgcagcttagcctcctctgcgggcgcccggcagggctgcgcggccgagactcggggcgccggcgccggggcggccgggagctctgtcatttggcaactccctgcagactgatgacacggcgctttccatggtcgagccccacaaagtgtagggctgcggggcgcacctggctgggctcctaattacccggcctgggacgcacggggcagccgcggagggtggcgcctggggtcgggccggggtccccttcgccgcagtcccgcccacccgcagcctccgaggggtcccggccagggcgttctccacacgctcggctacctgcaggggttcgccactgcaagccgggccagtagaagtttgggggcgaaggcagagagcatttccttctcggcttttggcgcctccacgctgcacagaggcaggggcgactctgcaggccccgtttcccccatcctcccctccaccccagttccccgcaggacgtaggcgccgtccctagctcccccttctgtcctcgccctaacaccgcagggcctctcctggggatgtggggtcctgcgtgcttttgggggctacaaaaagtgggggccgtcgcagagcagagggaagctaggagcgggcaacgaattgaatcctggagacccgggaggagcgaggctgctgccgtccccggggaaagggcgacttcggcggggataccccgtgccaggccctgcaactcccgggccctcgggaatgggatgggggaggcgcggggtgcgcgcagctcccggtgatgttaaggcgtccgatggagacttgggttatttgcttcgcgtatcctcccctgttcctctgcaccgagctcctggctgccgctgcggccgctgtgtgcccgaggggcggctctgtaacccggctccaggcatttcttaggtttcccatccccgccctccaagctcccgggagcgcctgctccgctgcccgcagacaggcgtcgttcaaacctcagctctgctcggtctgcattcatggaccccagatcttcaccctaggatttccatctcagcatttcacgttccc

SEQ ID NO: 27624 - DNA, 991 bp, Homo sapiens
  chr13:96296233-96297224
  hyper
cgtggggcgtcgtgccgctgaccacccctttccccttgcgtggatctcggtcacaagatggccggaacaggaaagaagggggcatgctttcccgttccctccctcccccatcccgggcagggcccccagccttgcgcggcgcctcaagtcccaggcgcatggcaccgccgggcagccgaaccagcagacaaaagccgagagacgcgggttccaggggaacctcggcgcccttccttggaaggcaaacaggcagtgggggcagcggcggctactccagctggatctgcagaggctcggctcgcagcctggagaggcaggagggccggcttcgcgggtatcgggatgccccgtcagccacctcctgtgggcgcctggcgcatccccggtctcggctcaccccagctgcgcgctcctgggcgggtgccgggcgctgcaggcgggcgggggcgacacaggggacccagaccccagggtcgctgctgacgcgggccgggcccgcggaggccgaggagcagcaaagcggagagaggcaggccggctccttcttgcagggcgcaggatgaaacgtgtctggtctgggcaagttgtggcgaggcgggtcgactggcgccgctctagggccttccagactccggaccacggacgactcaggataccccacccccctcccgccccctcccctccgcgatctccctccggcctcttccctcggtgtcccggctcctctggcaactgggcgggaccgcgagcgtctagaccgcagcgctaaaatgcgctcagccaatccggcagctggcgcagacacgtggttcgggggcgcgctccgttgctggccctggatgctaaccctaggaaggcttttcaaagagaaaccagattcgctcctacccggttgttggtctggccctcagcaagctaatttcccagaggagcttcaggtgaattatcttccaaaaagagatgcgttttaatcgcagaagtctgcagatgc

SEQ ID NO: 27625 - DNA, 166 bp, Homo sapiens; identical to SEQ ID NO: 23916
  chr13:99851637-99851803
  hypo

SEQ ID NO: 27626 - DNA, 1554 bp, Homo sapiens
  chr14:100437458-100439012
  binary
cgccggtgacctcgacggccctcggatcagggatgccccgagtccgagcgggcagggtgctcagcagggccaggtgatgggaatcatggggccatcgagcacggaccctggctcccccggtggcctctgtgagctctggggtcaggcggggactggaggagcgtccgcgccgggagggagcgcaccgcgccacgtgcccgcccggcgccccgcccccaccccggccacgcccctcgcgcttccctcaaagccccgcccctcagccccgccactctcgtccgccccgcccctcgcagcctcaagctcagcgctcccggaggcgcggacggtggggccccgcgccttttgtgtcgggctttgaccgccgcgcgcgctcattcacctcagcggccgcgggcggaggggcgcacgcgcgcgcagtcccctcggagggcggtggggcgaacagcaacgcgcgtaccctagctcttggctgctgtgctgagactagcccgcgcgcccgcgcgcctctccctcgaggactcggagccgcccgcgcactcgccaggggccgccgccccgagtctcaggcggacgcgcacgcgttcccgccgcccggaccccagccggctcgccccccgcccccccatcccccggcggcggcccccaggcacgcgcccgcgcacacgccggcccgggcacgcgcccgccaagatggcaggggccggggcccagctgtcagtcgccgccgccgcggcccttccccgcagctagcggccccgacgcccacccggagaagatgagcccccgctgccccccgcagcccagtcagacgcggagccgccgcgcccggggccggctcccccgctagcgcccgcgtcccgcgccccgccgccgccgccgccgccgccgggtcgcccctggcccggcgcgcccgtccccggcagcgacaatgaggtgagtcggggccggcgcctcgtgggaggtggcagcggccagcgtcggaggggctgggctgggggcccgcggtgcccccgagggcgggaggggggctccacgggcgcgggggcttccagagaaccgcgggggctctgcagagattcgggggcattcagagcgcgggaatggcttcgcgagagccgtgggggcgtctggagagccgggagggtctgcagggcttgtggggggcagtgttctgcaaggggcaggcggcgctggctttggctgcttgtggggtcctcttaggctccggggggcctgcggcggcctgggaggcagacccccgcgggcaggtgtggccgtgtcccgaccgcgcgaggaccgaagttggcggaagcccctgtgcggtgccttccagcccggaggaggctggcctgaagcccccaggcgttgccgaagcctccccctgccagcgcccagagccgcgtttgggcttttacaggtgtagtttcccctcgacttggagcccgtcaaccccttcgtctcctaattctcaaccccccttttttttcttcttgcacgccagtaaagtgcaaggcccccaaatgtaccgctcgttgatgtatcacccagctc

SEQ ID NO: 27627 - DNA, 277 bp, Homo sapiens
  chr14:100591023-100591300
  hypo
cgtgaaggagtgagccaccagacgccaggtgtaagcgtacaggcgtggatggctaaatgggtacttcatttctctcgaaactgcttcatcacccgcagtgctgaattctgtaccccagggcccaatccaagctgtgtggggtcactggccgtccgggaatgggcataccgcctggcggtcggggtgtgaacagcaggggacacacacacaagcacatacacttgtcccaaggcaggaccacacacatagctgcccccagacgagaccacgtacggac

SEQ ID NO: 27628 - DNA, 411 bp, Homo sapiens
  chr14:100644271-100644682
  hypo
cgcggttccccccccgggagcattgatacccccgcccctgggagcattgatcctcctgcccctgcagcccggagcccggagcagcccacgttgctcccgctgcggcccagcccagcccagcccagcccagcccagcccagtgccgcgcctgtcctcgaacctggcccaacgctcgccgggagcagggacctgcgtgcagctatggaaccgaggcgcgggctgcgggatcccgccctacctcccataaaccagggcccgagataagggagtcccagagggccaggggagtcgcgggcccagcgtctcagtgggcacgaatttcttactttaacctcttttctgtcgaccccatctgtccccacctgggaggagggggagcaacaggccccttcccggtcgagttcagggctc

SEQ ID NO: 27629 - DNA, 975 bp, Homo sapiens
  chr14:101925019-101925994
  hyper
cggccaggcagagcctgcgacccgcggcgccccccgcggcctcggcgacagcccggttcccacgtcggcgacggcgtgggtggtcccgcccgcccgggagggctccgagtcttggccgcccggggcgcggggcctgagagcgagtgtctgcgccgcgctgcccgccgcgccagtttccgaggtcgcccgcgggctcatgccctgcgccctggggccccggggaccttctccaagccggcctgacctggtggaggctgtgcgctgcgctcggggaaggccgggctggtgccgggggcagcgggtcccagctctgaagtgccagcgccggcgccccactccccgcctgctacggtgctctcgcccggaaaggcccgaggccctggaaggagccccgcgggggggcgccgtctggagcagccctcaggggcgccgggctgccgcgacgcagtggctgtaattgcttcggggtacctggggatcgatggcgtggcccagccgggtgtctgcgcctctgaggttgcaaatctggaaccagttaggatgcgggaggcagataataaaaagccaaatgggcgccaggtggaggagtgagctccgcacgttccatcaggtggcccgggccgcgcgctcgggcggcggcagagtctctggggcactcggggcgggcggcagcaggtgggacccgcggcccgacccgcgctagggccgcccaccccctcggaccccggccgggtctctccacagcctccgtgcgcgtcccagaaggaaaatgctagcaaaccggaaggccgcacggggccgagccggcctcagcccggccaggagaggccgtcggtgccccgaggaggaaggggacccggcccgggacggccgccccgcggtacccaggaaggacgcccgccgttcccagcaccccagcgtctgaaaaatgaatgtgaactccgcaagcgtgctcccgcggacattttacatgtc

SEQ ID NO: 27630 - DNA, 85 bp, Homo sapiens; identical to SEQ ID NO: 6896
  chr14:105472075-105472160
  hypo

SEQ ID NO: 27631 - DNA, 833 bp, Homo sapiens
  chr14:21439074-21439907
  hyper
cgcaatggaaagctcgtggcatacagcaggcgctcattatttgaagcctcttcattctcctgcttcctcggtggttaaggaggcttttggaagttcaagtccgtctcagctaagaaccaggagacacggctttggtgcctctcggcccgctgggtctcggcggcgcagcgtcccctgccggccactgtggcggcggctggaatcagcctcagcacttaaggggccgcgcgggaggagttgccccacctccaggcagctctttccagagcagtgagggcaagtctggggattatctccataaaggaagcgaggtggctcggtggaggggcttcagatccccttcccaggaccctgtgacccgccatcggaagagagtggacctcattctatttcaatgtctgcatagtacagacatttgctgtgggcaaatcggacccatgagcccagagagcatcatcccgggaaagctttcccgaagcacaggcttccctgcaccaccatacacgcgcacacccgcacgcgctcactcccccagccctcctcccctccctcactcccgccctggaagaagcggggagctgaggggagaggtggaaccagcagagaaacgggccgggcaggagcccgcaccagcccggcttgggacaccgcagccgctcctgccctctgctggctggaaggcgcacttacacattgcggtcatcgcggatcgccgagggccgctggtgccgctctgccgccaaggacgctcagccattggagtagaagtgagagaggccgcgggctgagtagagaggggtgaggattccggaaaggaagcatcgtcaggaagc

SEQ ID NO: 27632 - DNA, 1426 bp, Homo sapiens; identical to SEQ ID NO: 26344
  chr14:51560302-51561728
  binary

SEQ ID NO: 27633 - DNA, 142 bp, Homo sapiens; identical to SEQ ID NO: 23943
  chr14:58599581-58599723
  hypo

SEQ ID NO: 27634 - DNA, 196 bp, Homo sapiens; identical to SEQ ID NO: 10301
  chr14:62105869-62106065
  binary

SEQ ID NO: 27635 - DNA, 834 bp, Homo sapiens; identical to SEQ ID NO: 26355
  chr14:62583679-62584513
  hyper

SEQ ID NO: 27636 - DNA, 179 bp, Homo sapiens
  chr14:65406266-65406445
  hypo
cggctgtagcgtcggaagggctctccctccggccctatgaggaacttctcaaagttccaggccacatctgagcggcgcacagggctccaaatgatgagcttgggatcggtcatgagggaaaatgggtcatcataagggtaggggagcttgtccttcaggtaggcgaagacaggatgctc

SEQ ID NO: 27637 - DNA, 1758 bp, Homo sapiens; identical to SEQ ID NO: 26357
  chr14:70654358-70656116
  binary

SEQ ID NO: 27638 - DNA, 148 bp, Homo sapiens; identical to SEQ ID NO: 6907
  chr14:73238412-73238560
  hypo

SEQ ID NO: 27639 - DNA, 972 bp, Homo sapiens
  chr14:77606947-77607919
  hyper
cgaagagcgttttcatttgaggcgaaattaaaatccccccttcgcgcccgcctcccgccctcctgctgagagaaacccaaacaaccctcatggcgccgaaatcctttccatgccgacaagcccgccctgggcgcacgagtggatgcttggccagcctttcctgggatcgaccccgccgccgtgctcagccctcaccacgtccccatcccaccccacgcctcacagccggggttcctggccagcttcggaagccaccgagaaataggattccgtgcgcccgagagaacttttccaggggctaaggaatcggccagccggaggcgcgagaaaagttctgggaaggcggttgcacctaggatgggtggatgccacggggcctccgtccaggctgtcccgtccgcacgggtcgactggtcaccttggaatcccctttgcaggtcccagcgccccccgggaacccgcagcctccgcggagagcgtgggcctctccctaccgctggggcgcagcgcagtgcacgcctgagggtggtcgccgggggctgggcacgcccccagtcctgcgccgccgggggctgcggcggtgctgcccaccccagagagccctcggcctggggctccggcgaagcaagtgccttcccggcgccggtcgccaggggggcgcgggagcagccagatgcgccgcagcgctgggaaggcggcgaaggacaggggctaggggagtgaggggcgctcggcaggcagcctcagccctggccctgcgcgggagaagggacagcagagaccgcccgtggggccccggggtgtagggagctgtccgttcagccctggcgcccgcctcgcccgcggcagagggcggcacagccggagccttggaaagaccggcagcgccggcagccgcgggcttctcggccactgcctcccggacgcacgggaagccgccccccgcgccgccgccgccgcactgccgccgtc

SEQ ID NO: 27640 - DNA, 986 bp, Homo sapiens
  chr14:96342497-96343483
  binary
cgcggagagggaagcggagggaggagcttggcccgcagccgccggccctccccgcactggagctccccctcccctccctccccgcccctcggctgccgcagcccggctcgcagcgcgcgtcagcgggggctccccggagcgagtcgctaggtaacggggctggctccgcagacgcggggccggggaagcccgcgcgcgtcatcagcagcggcgccgcggggcggggggcgcagagaccctccccaatcccggcctgccaccacctggctcgcgcgcagccccggcccagaatgccttaacctgcgccgattgctgccgccgaggtgcccctcccctgtagggaccccgacgccgccagccccttcctcctttcccgcaggtgcgcactgctgtgcttgcggccgggtgggcgccccgccgctgcggtcgcggtcgccgctggtaagctgcgctctggggcttggggcaggaagcagtggggggcgctcgaagagcagggcagctacggccaccgtggccgccggaccggccatgtgctaaagtttctggggctcggcgccccgctgggcgcgcagcgcggggagcagacgcgccgtgggtggggcagcgcggtgctgctggcgcccggcccccgcggggtgcagctctgcgcgttctcatgctgtctctctctctttccctccgcgctgcctctccgaggtcctcccgccgagccccggcgcggggcatgaggagcccccgggtgccgcccagagaccagcaggctgcgcgcacacctagccagcggcagacggggacatgagcagcgcgcacggggtcccgcgcccggcggccagccctatccggcggcggccagcgggtcaacgctgcccgggagaatgaggcaggagccggcggcagcctcctttttttccttctcctcgccttcctgcggctccggcgctccgggtccgggccgggctgcggctctgctgcgtgccccgcgc

SEQ ID NO: 27641 - DNA, 627 bp, Homo sapiens
  chr15:100913438-100914065
  hyper
cgacccccgctgcgaggggtttcccgcgggaggtggacgaagcgtgggccaggacaggcgcctggcactggggtttcagagccgcgagtaggccctgaaggccgggagggaccgccagtccccactggaagccgcttccgtgcagcccgggacaggtgcgcggcgcccctcgccttcgcctccgcttctgctcttcccctcgcggccccgcgcgcccgcgccctccgcccagaccccggtgcagcccggccaggcgcggcggcggcggcgtctccagcgagggaaggtcgtcctcacgcgctccggcctcagggcgcctctccgcccggcctcgcagccttcccgtcctgcccacggccgaggccgcggctgtcggggtggcctggacgggtgcagggctgggcgggggcggcaggacttgaaccggcgcctgctctcgcggaggcagcagcagagctcacccctttctcgggaaatggtttatcgtggataaaacgcagtccccaaagcgaaggtccgacgggcggccagacgcaccccggggaccttcaggtggacacacggggcctccgcgcgccgagccgcgagggaagaggggcggcgggagggagggagcagtgggcggcc

SEQ ID NO: 27642 - DNA, 940 bp, Homo sapiens
  chr15:26107877-26108817
  hyper
cgtgatggccaggatgaagagcaccggcgccagtgccaggccgggctggaaggcgttcaccgccggcacgaagttgagcagcgcgatgaagacaaagtacacgttggccgggcggtggaactgctcgaacaggttcttgggcaggaaggacagcagcgtgtacttggtagtcttgagccggttgtcggccaggtgctgggcacacccgcgccgccgtcgccgctcgcccttggccgcgccagccgcagggtcctcggcgcccgggggcggcagcaggttggagcgcaccgtgcgcgtcctgccctctcggcgcctccgccgtcccggaggcccgggctcctcggtccccgccggctcccgctccatggccgcgtgtcgccgcgcccggctcctccgccgctcacgcccgcccgcgccggcctcttaggttatcatcactcgcggcccgggcgcggcggtgcgagctccccgcctgcgggacgcacggagaccgcggtcagcgcgccgcctggccggcccagcgcgcccagcccgcgcccagccccgtccactcccgtccagccccgccgcccggccgcagtccccagggcgcaagctgggcgggtgccgcacagagcccccttgtcctcgccgcccgcccccggcccgggtcgtttccgccgcggtggccacggccccgccctcgttccgcgcccggactgggccacgccggatagcgggaaacaaaaaaagcccgagctggaaacttcagagaggtttagtttcgtttcccagaagcatcagttcggtcccaaaacgctgcaaacgcgcgctgcctgcagtaggagagaggaaaccgcgaagcgcgagaaaaggcgcccccgtccccaagcagcccgcgcgcccttccaggggccagacctgctccatcctggacggcgaaacgacctcgggagacccc

SEQ ID NO: 27643 - DNA, 1370 bp, Homo sapiens
  chr15:28351681-28353051
  hyper
cgttgtccccaagggtctctccaccctccgggccccggcctccggccccgcctggcatgaggagcggggagcgcacagcagggtgggggcaccgggcgcacgcggggaatttccccacgaccacggccacgccaaatgcctgaacctccacggctgccggcaacagcgagcgcagggagggggctgtgcgcgcgggggccctggtggcggagcaggcatcaccccgagagcgccgaggtttgtggtcgcaaccccgggagcaccgctgcgggaggagcggcgtggccgggcagaggcgacttcctcgcaggcagtaccgggccccgcggccgcctccgggcctgtcctggtgccccgggcttccacccggcgggctggcgtgcgggggctggtcttcgccgagatcctgctgggagcgggctctggccccacggtgagcccggccccagcctcggtgatgcgcttcgctgccgcgcggggagggagagtccggcagggtcacgaggcgccggccccggggccgcttgaaacccgaagagaccccgctcgctcgcgcgcccgccggacgaatcctcgcggaggtcccggggcgcagccggcgtgagggtggggtctcatcgcaggggcgccgggagcctccccgctccgctagctcaaccaaggaccgctcagaggggctctcaccctgaacctcggcttttctaaaggaagggcagaccccagatttcccccttctcttctcgaacgtgctttgggtgtttttctgctttcttttttggcaagtcaggacagcgcacagtgcacggagctccgaagctctctcagctactcccggatttctggttaaacctgagggtgagcccgaaagaccgctgccgccggcggccaccccagcgcgggtccgctgagaatggaaacagcaagtgcgcgccggccaggccgccacctctccctcctccaacagcccgggcagccgcaggggccagccccgggccagccagggcccagcacaaaatgccttccagcgacagcagcgccggaagccccttctgaggtcgtggataagcctccgcgcaggggccccgcgctcagcccaccccgcatgcctccgcgccagggcctgctggtgggtggccgcctgccccgggctatcccgggctgggcactggcgccgatcccgcctcgcttgtggagctgcatttggggggaaagatggaccggcagcgtgggacgcagagccaggccaggccgcacgggctgtgcacaaagatatgcccgacaggcggggagaaggcatggcccaccggctcaggagaaagtcctggaggggaggcagtccgcccctggggacaacgcggggggccgtattc

SEQ ID NO: 27644 - DNA, 250 bp, Homo sapiens; identical to SEQ ID NO: 10306
  chr15:31561317-31561567
  hypo

SEQ ID NO: 27645 - DNA, 185 bp, Homo sapiens; identical to SEQ ID NO: 10307
  chr15:31564302-31564487
  hypo

SEQ ID NO: 27646 - DNA, 218 bp, Homo sapiens; identical to SEQ ID NO: 10308
  chr15:31668823-31669041
  hypo

SEQ ID NO: 27647 - DNA, 1108 bp, Homo sapiens
  chr15:45669920-45671028
  binary
cggagcgattccagtactagaagcatgggagggtctgctgccagggcagccgagggcggggagcgcagaaactctgcttacaggctgcactcgccccgactcctctccagacgtgggatcccatgttatacttggagtgaatctggtcgctcgctccccgtccccgattcccactttgcttgcctcttctccccatccatctaccccacacgcattttccagaaatctccccaactcgacgcccactcaggctactgaaccccaataacgccacccttttactaagaggagcctccgtcgtcccaaccccttgctccgagcgggaagcttggtgcagcgcaccaaggtccggtagaggggggcggcgccccctgcgccgtgggccagcaggccgcggacgcgcagacagcaagtggaccccaagggctggagccgcaacgcaagttccccctgactgggggacgccgcccagctcctggagcctgcgaaggctcttgaagctgagcttcccagggataccagaagggacactctcgtgcaattccggctagggaaagcgagggaaggtggcggctccgggcagggagcgagcgagtgctccacgccgcccgcaggatcgagtgagtcacgcggccgccagacgaggccggtggcgcacgcacccgagatccgatgtagtgcaccgcctcggcgccgcggctcccgccgcgcagacaccgcacccgcagcatcgccctggcccggctggtccacgcgcggaatgttcctggcctctgggccgcgtcggtccaagccttcccgagagcgcgcccggagcggggtgggcgggcgcgcggggcccgaggccttttgtagccgcgctccgccccggccgccccccgcggccccattggctgccgggaacaggtggtggggccggcgtagcgccccgaattaggaactgtcgggaagcgccgcggccgctggctcgagcctccgatgcttgcccttttttagccagcggggccactgacggcttctgttgcacgtccggacccggacccagacccgagcgtcgcaagaaggcccgttggagtctcgcgcaactgggcaggacgcgacttctgac

SEQ ID NO: 27648 - DNA, 1927 bp, Homo sapiens
  chr15:48936649-48938576
  binary
cgaacggggtggggactaaacaaccctagcacctctaaggtgcccccaggaggtcttgccaaggagtcttccacagggagagtcatcctgcccgttgttctggatcttgaaacttgggagacccacaccaaaggagggaaccggttcctttaccctttaagcgcgtcgtgtcctccaccgcctcttctcttggcccgactggctctggtttccttcacgttcccagcctccaaattggcgtccgccccatggctcgtgtaggacgctaaaagcacggtaaatcccagggcgatctccagcagacgccctcgacgcatgatgccgagccgccaccggctcccgccgcctcttgccgcgcccggggctcggtctgcggccgccgctgcgccctgaagcgcaccgcgccgccggggtcccgctatcccgccgcccgtcccccgggccgggctcctcccgccttctccaggcgctgctcccacttcaggcggcccctgccagctgcaacacagagacaaatccccgaggcggggagactttcagggcatcgggatgctgaagcctcgcggtccccattcccaagcccaacccgtgcgccgcctgcgcgtggcgcagttaatttgggtaagggaagaccgtttggtccacagctggctggaaagcccaggcccccggcggcagcagccccggccgatccctcggcctcccgggccccgccagaagagcgcggcgcaaagtacccatatccccagcggtcctaagccccgggcgagctctctgggtttattttttttagcggcacgaattgcgcgcgatgcgcgctctgaacgccccactcctcagcctgccctctccgccaggctggaagccagccgcgccgtccccgccgactccgggcgatgccaccgccccccgaacatctgacgcggagcccggcaccaagagccccgggccaggaagctgtcaggcaggggagggccagcgccagctgtggacgttccgggacagcccctcaccccagtccctgtccctgccctcggcgcggcgcaaacgcaaaagcctccgtggccgcagctccagccccggtggccgcccgacccccgtcgggaccccggctgcacccactggagaagcggcggctccgactcccgaggaggcggcggcggctgctcccagtcgtggccgctacagccactgctcggctccgctcgcagctgtcccagctgtggctcctgtccgcttgtggcacccacagtctctgccgcggctcccgcagccccctcctttccccacctcttcaagtatcgtccgcgcagcggtttctcgcgagagaaatactttttttaaaaaaagaaagaaaaagaaaatgacaccccctccttcgtcgccctcatcaccaccccaccccccggccccatccatcctccctttccactcccctttgccagcctccgcctcggtgcggggcctctcgctcgcaggattagcgcagtgggaggaggcagaggtgatcaggtcctgcccggcctgggactttttgtcttgaggtggggaggggagaaatgggaagaggtggagtagcggttttagcccgctctgcggctgcgaggtttagatccgagattaacctctcccgcgataggtgaagccctaccggagcagaaagctgttccacctgcaccaagaatgcgcgctggagacggttgccccggaggccctggcccgagagaaaaccagtccccgctgcccgcgcctcccggtagcgcgctccctgcgcctctcccgccggacactcagcagacgccggaggccgggaggctaagactgggcgcgtcgcaggccgggaccgcggcagaggctgctgtgccgaccgaggagagggctctgccgcccccacttgccctgggtgtcgagagcccactccagacgc

SEQ ID NO: 27649 - DNA, 987 bp, Homo sapiens; identical to SEQ ID NO: 23088
  chr15:53080201-53081188
  hyper

SEQ ID NO: 27650 - DNA, 1888 bp, Homo sapiens
  chr15:53081247-53083135
  hyper
cgcgccggtcaccgaagggttgggctcccgggctgtgcccaggagttgcccgtggccctgggcgttcaggtgggcgtggggatggtgcggaggaaggccgttgatgggcaccatgccggccgaggtgggcgtgaggtgctgctccccgtggcggccgagcatggccgggtggtgggcttcgaagccgttgggggtgagcatcttgtcggtgggcatggcggcccccgggtgggcatagtgggggagcccttgctgggagttgtggatgctgcccagaccggagctggagaggggcgagaggctctggcccatgccggccacgtccttgtggtagggggtatagaggttattcatggaggccagcccgcgctcatcccgcatgagcgtgaagctaccgctcacgttgcccgccaggcgctggtggtggtgcgggtggtggtggtgatggtggtggtggtgatggtgggggaacttgtccgagactgtggagatgggaggcagcggctgcagaggggtcaaggtggtgtaggtggtgggcatgctcatacctgggggagtctcgcaggccatggtcatggtgggatgcagggggccggccaggctgtgctcaggggcccggtggtggtggtggtaatctccgccgccgctgccgccgtccagcagggacgccatgcccatggagcgcgggtgcgcggggggcaggtggctgccgcggtgcgccacggagctgcgcgcgtgggggctgccgcccagcaggtcggcaggggcgggcaccggctcatggctcaccccgtgcagctcgccgatcgcttccatggtcagctgcgcgttcatcgtgatccgggcgagcaggcggcggacacaacatcgatgtggccaggcagaggcggcgaggggcgcacggagtccggtcttcacatcggctgctggcgactgttgccttccttcctctcactgtggggctctgtctctctctctctctctctccgtgtgtgtgtgtccgtgtgtgcgtgtgcgtgtgtgtgtgtgtgtgtgtctcgccttccctcttaccccccaccttcccctctgcgtcctcggcttttttttttttaatattaatttccaaagaggatccgcgccgttgggagagcgcagtgccccagcccgcccgcctcggccacctctcgcccctctctttcttaaaattctgaggtctccggctcccctgccgcggcccgcgcgcctgccgcgtctgctgcctgcccgccccgctggccagcttgagccatggctctgttactgttacagactctgtggccgcggttcggtagccgccgccgccgccgccgcagcggcccgccctcacgcccgccaggcgcagcgcgcatgcgcgaggcccgcccccgccccctaggtcgcggcgcgccaggcccttggcgtcccggtacaaatgaaggagggggcccagcgccttccctgcggcgctggatggccagggagctgcgggcacgtgcgaaagattggcgcagagcgcgacctggggccgccgctgcaatcccaggagactcgcgcctggctcgctcgcctcccttgcttgagtgggctctgtcctcccagcccggggacgctcgtgtcgggcttctagcggctggagtgctgtgcttggagacatcgcccctctctctccagttgctgcttcccggtgcagcttgcccggggagctggggactgtgtcatcaccccttcggctctagcccactaagctttatttcccggggggctgctgggagtgcgctttcccacccttgaattcacggcctattgggggatgggggttggggtggggtggggtgcagattgcttaaagggctgggtccgtttggcggccgttgacccggcacccttc

SEQ ID NO: 27651 - DNA, 227 bp, Homo sapiens
  chr15:57618478-57618705
  hypo
cgtgctgccactctataaactctcacgagggtcgccggtcggtccactaggaggtcgaaggccttcatcaggtagacgacggggttgggcagccaagtctgcgatgacagtgctggcatgtggcgcgggggcgcagggtacacatccttgtctcagctgtcccacatggcagcagtgagcgcggacttcgctcctggatgcgctgccctggcctccacctcggtccc

SEQ ID NO: 27652 - DNA, 221 bp, Homo sapiens
  chr15:72412074-72412295
  hypo
cgagactccgtccccgcccccagaaaaaaaagatggaggtcatttaactacagagaggcttggagatggaatgagaaacttgagcggcgttatgtttggaataactggtctgggaaatgggagaaggagccactcttgcctttctcttcagcactgttcattcctcagtgtttatcaggtccaaattagttacttgtctctttgctctcccgttcccttcc

SEQ ID NO: 27653 - DNA, 384 bp, Homo sapiens
  chr15:77906720-77907104
  hypo
cgggcatggagtcgttgccgcccgcgttggccgcgatgcacaggtacgtgccgttgtcctgtacctgggcgtagcgcacctccagcgtgccatcagggaagactgtgagccgcccattgctcttggctgagaccaggtgctttcggggtgagagccagaggatggcgggcggcgggtcgccatcggcccggcacacaaactgcaccgtgtggccctcgtccacaaacacctgctgggccttgcggtcccggatgcgggcgcggcggcaggtgaagtagttgggcagtagcacatcagggaagtccttgaactccttgccctggacaaactcgggcgtggcgcacgtgggctgctgccggttgaagttgagccgccagcggcgcc

SEQ ID NO: 27654 - DNA, 238 bp, Homo sapiens; identical to SEQ ID NO: 10317
  chr15:79163927-79164165
  hypo

SEQ ID NO: 27655 - DNA, 2466 bp, Homo sapiens
  chr15:79381742-79384208
  binary
cgcccgggctccctgttagagccaggcctggctcttcagccttgcagctcaggaaaccagagcgcagcgctatagccgcgactgcggcggcggcggcggcgcagggggcgggggaggagagaagcgcccacttcgtcccgctgcctccgcagcagccctggccctagccccggcgcatcagagcggtccttgggaatctttgggcttgttgctccggcggccgccagctgggagcccaccaccgctcgatggtaccgaaccgacccgtgtagccccataaccccagcccaactccgaggagctagcgcagaccgctctccgccctcagctgcggcgaggcaagggctggcagcgctcggacgcctccgtcttgcccttcccatgcctaagcgcggggaattacacgttcccggtgtagaacagacgatcggggctattagggctgggcggtgggagtgggggttgggagcaccatttttggctggacgtgtgtccagactcatcgtctctggtccttaggaccccatcttcctctgcatctccaggtgtcggcccctctgtacccgcctcccacggggctcgtccggcgaagggcagccgcagcccacatctactccccgccctcaatccctgccccctctgcccgccgcagtcactcgcctggctgggagcaagcctcccctctcgctgagggtgcagagagcgcctagggcgccaagagtagaggggccaaagttcaagcgccatcagccagccgaaggccctgagcccccagggccgcggccgggacgcagggaggtcaggacgcgacgctcgcctcacctgtttctccagcggctccttggccgacagcgccggcttgggggagggcgcgcggtcgcagacgcagccctccagcaggtaaagccccgagggccgcgagctcgagtcgctctcgaagtagaagagcaggttctgcagcagcgcgaaccacttggtttgccattttgtgttgtccgaactccgcttgctcaggtagcctttgcgcgtgccgtccttgcgcgccagcagtcccagggacgcgacgtggccatcattcagccggatccccttctgcatggtgctcagaggccagcgagaccccacgcgcttacatcttctccgcgcagcagccccccgtccgtgcgcgctgcgcgctgcctctctctggcgctcgctcgctcgctccctctagctctcccctccccccaaatatctacactccaggatctggcgccgagccgcggcttcttgaatccagatataccattccccgctggaacctcttctccgctccgcagagccccagtacccggaagatgccgcccgaccctcctccggtgccgggcaaactgagggactggcgatctgcgcgctggcgaggggcaggcggagtcatgtgacgccgatccctcgaagagcccgtttcagcagcgcggacagggacacacgcacgcagccccgccgaggcgcagagccgcgcgcaggctgcaacttggtgcctcctccccctccccagacacacacacacgcacacgcacacgcacacactcaaaccctgccctccctcccctcatctccccttctctccctcggatgttaaaaagcaaatcagatcaattttcgtttaacccaatgaaaccccgaaggctcgccatcccgggagtttgcgtctttgcgccccaccgcggcgcactgtagacctggggttaagtgccagttgtcattttctcctccaaaggctcgccccccccccccactttatttctaatacgaggtggaaggaggaaggtgggtggcgaaatagagctgcaaaagcgtccagtcctagtctttgcatagtcagccgggtcacattgaattccagcatccggctgcactcccggcggcttccccagctacctgaggacagtacagggggtgagatggggtggtggttggtgaacgttggttactttattttatattattttattttgagagttgccataattaccggcgccaccccccgtgcaccctgaggtctggttggcgagccgctgctgggagttttctgcaaataccccccaaagcctgaaggcgggcttcaaacgcaggcgccggggaccatgggagccttcaaatagctgcgctggcgcaatgataccttaatgatagattttccgttcttatttttagctctcattcgcctacacagttacacggcatttatccgagaacgtcacagcgcccgcatgctgcaccgggagggcgcgcgggccgccgggcgagccgggagctggggcggggagcgcgcatcgctgtctgccgcagagggcagcgagctcgccccgacccggagcaagccgcgcctggcccgggcgctttgcagcggggatgggtgcccgcgcagccctgtgaaggaaagacaccatctttccgcacggaaactgcgtatacccctccccc

SEQ ID NO: 27656 - DNA, 787 bp, Homo sapiens; identical to SEQ ID NO: 26402
  chr15:83316286-83317073
  binary

SEQ ID NO: 27657 - DNA, 1105 bp, Homo sapiens
  chr15:83775836-83776941
  binary
cggatgccggctccgtgcagcagcccgccgatggctactggagcggagaggttccgaggtttcaggggcattttgtcctttcccacttctgggccgtgggctcccccatagacgatcccgcgggcccttcctcctctgacaccctcggatctggttccacctttcccggaccgcagctcagccccgcgcctctccagctcttcgatgaccggttcccggccgtgccccgggccctccctcggagcgcgcgccgccaggggcacctgtccctgcgcgggggtgtcgccgcccctcggcgccgccgggcgcttgccgctgagccgtggcgcccctggcaggagcactgcaaggacgcctcccgggactgcaccgcggccctgcgcacttggggcgacggggccaggcgcgggggacggctgcgggctgggagggcgcgcggaggagacaccgctgaggggacgccgctgagggcgccacgcggggggcgcggctgaggcgcctcgaagggcaagcgccaagggggcgcgggcgccgccggaagctggggcggggcgcccagcgggatgcggtgaagggcgagcggcgcggcggctgcgatgagtgcctctgcggccaccggggtcttcgtgctgtccctctcggccatcccggtcacctatgtcttcaaccacctggcggcccagcatgagtgagtgagccggcgcggcgggggtcgcgccgaggggcggcgggagttggctcgccgcgacgggagcctcgcaacttttccgagggggctgggaccgtccgccgcgggacagaggttcgtggccgcaggggctccccgcgcctggccagactaggggggcgccccaggggtcgcacgggccgggtcttggagccgggccctgaggtgcccaggctggcgcatttcgggatgttggtgccagcaccgcgccaggtgcccggggtcacaggcgtcaatacggccatgcccctgccctggaggggcccaggggccggtggggagcggaacaaacacggacactacgaacctggccgtgtcagctcgtttgtgccttgttctttttgcatctcacgggaacgtttccatgtatggactttc

SEQ ID NO: 27658 - DNA, 1889 bp, Homo sapiens
  chr15:83951722-83953611
  binary
cgtctgggccgctttaaatgccctggccttcagaggactgaggcgagcacagccataaaaccaggggacgttaccgaacccccgagcgtctgatgccccccgccccccaaccacacacaacttcactcacacaattaaggctgggagatggcattccacttaactgtcagactcggagcggtggcagccccgcagccacaaagagatgccttaaatgagaagaacatgtttctacaccgcatttgtgaaagtttggctcggagctacgcgctgattaatatcagatctccttcactcgcctcgccacaatcttgtcacatctggctgacaaatcccgaggaactccggcaaagccaggcggcggcggggctccgggtctgggcggcggctccggaggagcagcgggagaccccgcagcggcctcctccttctccgcccgcggcccccagcctcgccgccgccgcccggctcccagcacggaaccgacggggcgctcccgagacgggcgagccacgcgctcgcaggtcccaaggccaggctgggcgggactgttaagggagctcgaagtcgggggccgggggcttcccgtcccggcgcttcccatgcaaacccctgaaggaagcggcaggcgcagccgcgggctccgcagcccaggcccacttcctgtcactccaggaaaacctcggagcggcggacgcggctcggcccggcttccagcccagagcccaagcgccttagccccgtcccagcgctttctgaaagacgggccacctcgcgcggagccgcgacaaggactccagggtccgcagtgaagctggtcaaatctgccccgcacacggtcaacgctcggtctgtgtcccggaagctttcggaccggacctgtctaaatagcgactttcagtcgtgggttttttgttcttgtgggtttgttttgttttttgttgttgttgttgctctacaaaagatttgtcccgcagtggacgggagcctcctcacggccgcccgcccgtctccgcagttctcctcagtgaccggaggctgccgcgcgccccgttctccagagaaacaatccccggagagaaagacggccagtgtgaaatatcagctgtttcacaaattctgaggtaaaagaaaaaaaaaaaaagaaggggtcgacccccacaggtggaaacagcaagtcctaacgtcctgggctgaagcctggggtgcgggcggcagagagtggcgtgtagggtacccgccgagtgccgccgccgatttccacaggctggcccgccggcacctccgacgcgcccgcagatccggcgcggagaccgtttgccagctccgggacgtcgggcagggacgggtcccagagccccaacccccccgccgccgcctcccggccggagaccacggtccctcccgccgcgcctcggggccgcgctgccgcgcaggtagccagctggccctcgggaggtggccctcgggtacccacgggagccggagcccagcggcgtcccgggccgcctgctccgcgcacagagaatccccgcgcccgcggagggcgccgcgcttacctcggccatcctgcgaccgctgcggtgccggggctgccggcgcgtctcccgggcccgggccgccccgcgtccgccccggctcggcgggcgccgccgcatccacgctccggccgtcggggcgcgacccggcgaagtgggcggctccccaagcgcccaggctgcgcagcacgatggccgcccccgccgcgcaccgcgtgtgcccgcacgcccgccccctgcgccccggggacgcctctccgcccctccccctgcccctccgcccaccgcgcggtcgccccacgccgcgggcgctgcttcgccgcccgggaggccgcctcccgccccgggacc

SEQ ID NO: 27659 - DNA, 1494 bp, Homo sapiens
  chr15:88798893-88800387
  binary
cggggtcctctccggggagaggcacacacacgcatagccggatcgcgcctcgccagggccggagtcacctggaatgcgcagccggagagcatctcccgagccagagcgagcctgacgcgcgcccagcgggcggcgggcagcggcgagctggggcgggcggagggccggctcccggccgcgggtgggcaggagggagacgcagagcgcgggggaggcaggctggggagcggccgcctgacttacatggaagtgatattccttgagatgtccgtgatgttgatactggcgttcccattgctgttccctgaatcctgcccttccaggagggggaagaggttcccatcgtccggccgccggcaattgatctcagtcttgctgcagacacaatttgcagggcaagccagcacggagcccacatagtccagccagacgcttcccagcaagaaaatccgccagaaactacacttggctgggcaaagagagacatccatctccgatcgctgcttctaaaaaagaggaggaggagaggagaggggggtggggtggggggagtggggagagcagggggggaaggaaacaaagacggcgagggaggggggaagggggagggggggcctctgcctttgaaacgccgagcgatcagatgcaaaatccttcagcgtctgaaaccatcgcggacgccgccgccgccgccgccgccgccgggtgggagccgcgaggagcgcctagtggcgcggtctgccgggcatggtggccggctcggcgatcgctgactcgccgggtccgggggctctggaagcgaggcgcgctctccgactccgagactttgcagggttgcaacagacggtggggaggcaaaaaaaaaaaaggaaaaggaaaaaatggtgctaaagtcaccaagtcccacctactgggcagaattaaaacggacacaccacgcacctgcaaaacacacacactcactctcacacatacacacacccggagcccgaggaaaggaagagaaggaagatgcagtaggagctgcagcagccgccgcgaatggctcgccgcgcggctgcagaaatgtacaagtgctccgagccttacgaaacgcacgggttatcggagcgtcttcctcggctccctccctcccttcctccctccctcctcccctccctcgtcgcggcctcctccccccgccccccgcccgggctgggagcggcaggagagcggaatctccccctccctcccctccccacacccgtctctctccccgcctgtcctctccctcctccccacccacccacccacccactcgccggctcgcggctgtagccggcaccgccacccgcagcctcgcggcagcccgcccgctccacgcctcgcagcgcggcgcccgctagccgcagcccgggggaaaccgagaccgaagggaaaaagttgcatttgagattgcgagggtcggggctggggagggagagttggcgagctggctgcacgacacggaaaggc

SEQ ID NO: 27660 - DNA, 876 bp, Homo sapiens
  chr15:89346018-89346894
  binary
cggggaatttgaagacccagagactcgcagctccccgtgagcctccccgctgacgccttacctccccctctccaccatcccctgccatcccggtgtacgccacccccaaaaaaactttcagccagctcctcggtgagggtcgttccaaatcgtggccgacagtagcgggctgcaccctccttagatcgcgtcgtggccagcctcagctgcagaaccccgccgggcgcccgggagccctgtcccgccgcggcggcctcagagtccgggcacttggggattctctgagggtgcagccctcctgggcccctccgactgcggagctgccgaccgcaatgcagatgcgggccctccagcccttctcgcgccgccttcctcccgccagccccggagctgccgggtccgcgccgccccggggagcgctcctctcccgccctgagcgcaggccggcttccccatcggcgcgccggtccggagccagggtccagcgcgctccagacgcctctgccttcccctccccctgtcggccgcccctcggtccctgggggtggggtttccctttgcgctcgccccctcccgcccccacccctcacgggccctcccctcccccgcccgtccctatgtatgtgtcacagcgcgccatgcccgcccgcccgcccacctacctccccgccgctccagagggggctcgcagagctgaggacgcgcgcagcgctgctcaaggtctctctctctcagcaccctcgccggccggcgtctgacgcgggtgccagggtctccgggcacctttcagtgtccattccctcagccagccaggactccgcaacccagcagttgccgctgcggccacagcccgaggggacctgcggacaggacgcc

SEQ ID NO: 27661 - DNA, 1843 bp, Homo sapiens
  chr16:10275580-10277423
  hyper
cgcagcgccccctggtgcccctcctgcacttcgccgctgggctccctcccgctttccctctccctctctagcctgatccctctcccgctctccctccggtcgagtctccctcctccccggcccaaggagccctgatctccctctgggacgtacctgtagcccgagaaggtcgaggatgcagtggggcgcgctgcgcgcacgagcatctcggccgcctcagcagccaccgggtttagcgggttcccgcatgctgcggccccagcgcgctcccctggctgtcccgcgctgtccgcatcgcccccacggggggcggctatcccagccggaggctctgcagcagggctctaacggggcggaggagagaaggagaggcagggtcagcccaccaacgaggggagggagggttgaggggaaggctgcagtctgcagtgctcacaagcccccctatgcgcccaggggggctagacaagaggggggaagctgaagcccgatgcccacgacgcccccagtgcggatcctcagcccctgtggctgatagcgggagctccactccagggtgcacaggagaatgggagccccaggttggccacccacgagaagctaactgggcacctccacccgcaccccctaccacctccccagcgccggctgctgggagttgtgcgaccgggagctgctgagcgagggaggtagggagagaaagaggaggtaacgagggtgggggggcgctggctgagtttgtgacgagccagcagtaggagagggggagggaaggacgcgggctcccgcggtcccggttccccgagggaggtggatctttcccacgcagcgaccctcttgtgatcctgccgcttcctccctcttcaggcctcccacctccccccttcccaagggggcctcccaggcccggcgtcccgcgctagcactcaccgcagcctctctccacatagttctcagcagtggccgctcctggtcatctccagggctgatggctgcggccgcgattctcagcgctcacccggtcccatgatccggccaagccctaggagctcccctccaagatccctagctccgcttcctgccccactccggacggcaactgcccggtcctctgagcgcgccggagcaccctctccgcaacccagctccgggctggtgtgtttgagggcgagtgtgtgtgtgagtgtgggagcgcgctcgcgtgtggccggggatccccgcggtccccggccgagagaggcgcgggcggggaaaggcagctccctccgggcccttcgctgctgggccagctccgcgccgggcgttcggctccccacttcccagcgggagtccggtgagcgcctggacaccctggttcacagcactggcaaagccgggttcccggggcgtctttctgctgcggtcgcctccgaggaagaggagaaggaaggtagcggcgccctccacaccaacttagggacttgttctcagccggcgagacgcagtagcccccgctcaagcccaagaggcttcgagctccggcgggcgaaagcgtctcctgcccgcagcctctctcctaggtgggtcgagacagaccccgcagtccctcggcggcgacgcggagcgcggccacccgttccgagagcgcacggcggcaaataaggccaggataggtggctggctggcgacgggggcgcctgcggcggcgcgcgctgctgtccgtggtgttggaaccacgctctccgcccgctcccgggcgtctggtgcggctgaagaatcaattattcagatctctgctaccgcttcctcctcccccagtgcctcgcgctgggtacagttatccccctccacgcacaggcgcgcc

SEQ ID NO: 27662 - DNA, 667 bp, Homo sapiens
  chr16:10479686-10480353
  hyper
cgctatggcgggtaagccccggtggctgaccggaagaagcgcccacggaggcgaaccccaggcgcccctcagcctacttccatttcccctcgcgacccttcgccccgcccactctagctggctgtgcctgactggctgggctgccgcatattcgcgctgccattggtccataatcagctgggggtgggcgtagggagacctacttcagcaggtcctggccggaccagcattgttaacggctgcggttcgaagtggctgtgggtattgctgcggctggtgcgtcgtcgctctaggtacgttggggccgggcgagtgtcctgcgagagcggcgattggcggggtggcggctctaggagcgtcggtcgcctctctgagggccggccccggaggcctcggagcgccgggcctaccggacgtttgcggcgaagctgccctgactgaaaagcgtccgcggggccgtctgacaggtccgggaagaggcccctgaggggcggacgggcgcgtctccaccgttttcgcagagggatactggtgaagcgggagtggtgtgcggcctcaggtccgggcggcactggggttagggactgcggagggaagtggtgcgtgttttttgtcctgaggggtaagtaaaagctcgctcttgtccggaatgctttcagaaattaac

SEQ ID NO: 27663 - DNA, 91 bp, Homo sapiens
  chr16:15767635-15767726
  hypo
cggcatgaggcaccgcacctggctctgggtgtttggtgaaggaaagtaatttggaagcagagcaggaatagaatcgagagagcacgggaac

SEQ ID NO: 27664 - DNA, 353 bp, Homo sapiens
  chr16:15820563-15820916
  hypo
cgcctctcctccaggaacgcaactagaggaaaggacttgccttgcagcaagagagacctcagcgagccgggaagaggctcctccccacagaactgggcaccacccagcactgcccaccacaccaccgcgccacctcctcacctgcagcttgtggactttgtcattgagctccgcccgggcccgctccccatcgctgcacttggactgcagctcctgcacctgcgcctccagcttcttcttcttatgttccacctcctgcttggcctggcccaggacccgcagctccccggccaggtctgcgttctctttctccagcgtctgcttattcttgtctaggttcgccttggcctggc

SEQ ID NO: 27665 - DNA, 709 bp, Homo sapiens
  chr16:1807721-1808430
  hypo
cgtctgcggtgtctccctcgccgctctctccctcgcccacgctggggggcttttggagactgggtacctgccacaccctgccacacacactctcctcttcacaggcctgcatcatgggggctgcggggggcctgccctcctgatgggcgatgggagcagagggcagcaggcttccgggtcagggctcggcaacacagccctgggctggaccacggcgcctgggcctggttccctgcaggcctctgcctgggcacacggggcaccgggacctgctggaggctgctccctctctctcctgccctgcaacatgggagcagccgaatcattgctgggttttctgtaataagaatgtattgttagttccagtccctaattgacctttgtcccttccttcccctgcctctctgtgcgtcgctggactcgccaggggagttctcaggtgagtatctcactctcctgtctgtctcccctctgtgtgacggggggagtgggtggacgggggatgccccgagctatcccgtcaccgtggctgtgtggactgccccccacgtcgccgcagcgcctctgcttctgctcgcagccaccgccgctcggaagcttgttcggtttgctccaccagccacttgacaatgacctggatatccaacccccccagcctgaggagtcccccgcgggccatttctgaaggccctgcggagccctaagccac

SEQ ID NO: 27666 - DNA, 922 bp, Homo sapiens
  chr16:19566591-19567513
  hyper
cgtcttcgctccgccgccttctggagtcctttctgcccctagaggacgcaggtgagctaagcagcagtcatgccctttaccatcatgacgcccgcaggcgggaccacccggcactgtagacagctgccctttacaatcatgactcatagaaactacggcactctggccgtggccgacgttgctcctccgaagcatggcgccggcgggagttgtaacccgggctgtccggagcggggagctgcccctcacaagcatggcgtcagctgaaaatgaagcctgtgctgtgcggagcgtcgcctgcccctcacaagcatggcgtctgcagaaggtgctgtgcggccgctgcggggcggccagctgcccttcacaaacatggcggccgaggggtgcggggagtggcggggtaaggatgggaagccgagcagacggccccagaacaagcggtcatgtgactgggaagatggccgtctttccttggtaaggaagcagcggcgggtgggctttggagaggggctgtccttacttgtgatggggtcggcctgggtctgagagtgtgaattcctctctgtcgggttctggtggtcgaccggccacccccaagttgtcttgaccgtagaatccctggccgctaccgcggtccagcggagcaatctgaagccagactggcgggttcttggttctctccccgtctgctgcctctctgcgccttccacgggcccctgtccattcattccctaaagaaaacttgagtttccaggcttccgcgtccccagaagttggcgcgggttctggggtcgctggatgagggtaatggtggactcagcttttaaagtctggacgagtcgggagatctggctgttggtcagtttcctcagctcctctgttcacctggagacttgcttttctcatctgtaaaatggcc

SEQ ID NO: 27667 - DNA, 280 bp, Homo sapiens; identical to SEQ ID NO: 8003
  chr16:2035689-2035969
  hypo

SEQ ID NO: 27668 - DNA, 1159 bp, Homo sapiens
  chr16:2141860-2143019
  hypo
cgtagcccccgctgtcatacacggcacaggagccccaggaccatgccctgccggagaggggtggcgtgggtgccgcaccccagcccttccggcaccccggagccaggctggtcaggaggccgcggcactcctggagaactactcccttgtccttggcgtagacgcccggggccctcgctctgctcaccccagcagatccggcgctgaataggcccacgtccccgagccattgtgaggactctcccagccaacgtcgtaatcgctggtgctgaagcctcctgcggccgagcacgtgtggaccctggggccgggagggtctgggtagagtgctgaaacacacagagccccaggccggggccagggcctcatcaaaacccaacaggagtgtttcctgctggccagctcgcctgagctctggttcggcgccaccccagggaaccctcccagcagccatcaattagacaacgttaccatctctcatatacagagaaggaaacggcggtgttaagagggcaaaggtcacacagctagggagcagggctgatgccagagctccgctaaaggctgctctctcaacaagaggaacgatttaagtcttggggcacgccctgccagctcaccttcctgcagccgcacctgccgcagccgtgggggccccagctctgggctggactggttcccgtggacgtagggcagcagcacgtgggccatccatggccagagctcctcagacctgccacagcatcagtcacacgctccagcccctactgccccatgcccgcctcgagtgagcggccaccagagacccagggaacatggctcccactgccctgctggccacggctagacctgggcttctcagccttatcctggggatgttctggggcagacagttgtctgtcatgggcccgtcctgtgcactgcaagacacggacctgtgtccctcccctctgcctactgatgccagcagcacctacctccagttctagcagccacaaaggtatctacacatgtccacatgtcccctagggtctggctggactaaaggcaaaactaaagcccagaagacagaccagtgcaccggatgcccgtaccgcgtgatggccaggaaggcccggctgtgcagctcctgcttgatggcgctttgcagacggtaggc

SEQ ID NO: 27669 - DNA, 1379 bp, Homo sapiens; identical to SEQ ID NO: 26427
  chr16:23847172-23848551
  binary

SEQ ID NO: 27670 - DNA, 219 bp, Homo sapiens; identical to SEQ ID NO: 10331
  chr16:24849506-24849725
  hypo

SEQ ID NO: 27671 - DNA, 147 bp, Homo sapiens
  chr16:300218-300365
  hypo
cgcgcccggccaggaatctatgttttaaacatttcacacatcccttccttggggacatggtggctagatttgctgaattaatggccgtctcctcttcttccagccctggccccagcccctcaggccctggcaatgaggcactcctac

SEQ ID NO: 27672 - DNA, 368 bp, Homo sapiens; identical to SEQ ID NO: 24003
  chr16:30124512-30124880
  hypo

SEQ ID NO: 27673 - DNA, 276 bp, Homo sapiens; identical to SEQ ID NO: 10332
  chr16:31142715-31142991
  hypo

SEQ ID NO: 27674 - DNA, 139 bp, Homo sapiens
  chr16:3211823-3211962
  hypo
cgtagtgaaaccccacctctgcaaaacaattttaaaagttagcagggcgtggtggtgcgcgcctgtgatccaagctactcctgtgtctgaggcaggaggatcgcttgagcctgtctcaaataaacaaagggcggggcgc

SEQ ID NO: 27675 - DNA, 917 bp, Homo sapiens; identical to SEQ ID NO: 22809
  chr16:3232535-3233452
  binary

SEQ ID NO: 27676 - DNA, 937 bp, Homo sapiens; identical to SEQ ID NO: 22810
  chr16:3233501-3234438
  binary

SEQ ID NO: 27677 - DNA, 370 bp, Homo sapiens; identical to SEQ ID NO: 23096
  chr16:3237723-3238093
  hyper

SEQ ID NO: 27678 - DNA, 1770 bp, Homo sapiens; identical to SEQ ID NO: 23097
  chr16:3238154-3239924
  hyper

SEQ ID NO: 27679 - DNA, 783 bp, Homo sapiens
  chr16:3355112-3355895
  hyper
cgaggaggcggcgacgagcccagcaacagctcgagcacggccggccgggccgcgggaagcccgagaacgcggcgcgcgcagctgggaggcgacccttacccggcgaggctcccgggaccaaacgccgcccgacagccacgcagaacagacgcggcagtgcgacgcctcccccactggggacacgagacagcgacagccacgcggtgagccggtacaaggccctctaggcttcagcgggtctggatactcggtggcattaacccttccctaccgccggggaagacagcagtttctctggcgaggaagtaggccgggctcaggcgccttagccagagggcgggcctgcgccaccctcggaaagcgtcacttccacttccggccggcgctctggctctgtacctggacagggctgcggtaggccagcggtgggctggcggttgcgctcctcagatcggcggcctttcgggcggtggcttgcgtttgagcctcagaaagcgaggagcggcctccacggaagccaagctggccgaggtaaccgagaagcggcttcccctatggcttcgaccctggagccgctggagcggcggcggccgcagggaggcagccattttccgtaggcggtggccgcggcgcttccgggccgcgcggctggagcctgaggcggggccaccgtcgggcacgagaaaccattctctccccgcttttcgcagctgtatcccagaggcgcggctgaagctcgctgggacactgcccgcttgcccagtgcccacgggcacgcctgtc

SEQ ID NO: 27680 - DNA, 465 bp, Homo sapiens
  chr16:4310368-4310833
  hypo
cgtggcctagggagaggcttccgccattcaagatcacctgtccccttcccggtccccagagcccactcccgggcgcctcctgctcacctgggtccgcagctgctgctgttcccgctccagcttctcctggtgcagcagcctcacctgttcctgctgctgctgcagctgcacctgctgcgcaatcaccttgagcttttccgggtacatgtgggcctccagcgagcgcacctggaggcaggacaacctgggctcagggccaaggccgggagcacaccctgccctgtcagtctcacagcagctcattcactcctgctgaaaaccctagcacagggcgggcccctctcaacagaggccagaagcctttccagagcccttcagcccccggctcctctcgcctcccacctcggcctccactggaccatgctccctcctgcccgagtctttgcctatgctattccctctgcc

SEQ ID NO: 27681 - DNA, 981 bp, Homo sapiens
  chr16:56224379-56225360
  binary
cgtttcgaagggggaggacaggagaatttagtgcaaagacggcctccaccaaacgaaaccgtccaacatttgcaaaagcttttaaaataaactgctcagggatcaggggtttgctggaaactcccggtcgcttgaagccctgtccctccactccgggcaccctggcctccccagggtgggcacccctcctgcacggagagcggcggctgggatctcggagcagggtcggctatggccctggaggcagcggctcacagagaaaaagctctggcttttctccgcccgctgcgttcctcttcttacagcctcgggtgtcacatattaggtgctcaataaatgtggacataggaaacgaaaagtccgaatctgtccttacgcccccaaggcgaattctggggcgcgcgggtttattccgacccactaccacatcgcgtttcctgaggtaacccggcctcggctctgcggccccagcggctggagagccacggagaaggcgggctacgggcgacaagatggagagccggcccgagagggacagaggccgcgctggcagcgagctggggggcccacctgaccgtcctgcgggcagcccggccccgcgctcccattgacaaggaggtccgcgccgccggcgcgtggggcgggggcggaggcggggtggggcgccccggcgcgcgcccggccccactccccgcccccgccagtcccgcaagcacccaccccgggggagccgcgggccgggagggcgctggggggaggggcaggccgctccgcgagcgcgtgtgcgcgccgccgccggctgacgcgaactccggcgcgcgcctcccccgccccgcgccctccccgtcccgggggcccggcgcgcggccctgctgacgtcagctggcggcccgcggagccgggtgcgcagagccgctggcgcactcgcgcgctgcgctggcctcctccccgccccgggcccaggcgcgcgcgcgcttgttc

SEQ ID NO: 27682 - DNA, 364 bp, Homo sapiens
  chr16:56228284-56228648
  binary
cgaggggggacgttttaaaacttcagaagtctgtaatcagcagtggcggactcggagcccagtagaagccccagccacctgagctggatgaggtttcaggcgttgcaagtggtggacagcgcccagccgaggccggaaaagtcgatggggctcagttcggcgacgctcggctaggttcggtgcggtctgggcgcggggctcggagggagtcggcggtgttcggagccgagtcggtgctccggcggagagagccgagccgcttcggagggggtcgaaagcattcggaaatactcgggggaggggagtgcgcaggaggggaaggaggagggggagaggccagagtctgcaaattaactttgcatcc

SEQ ID NO: 27683 - DNA, 1525 bp, Homo sapiens
  chr16:58497229-58498754
  binary
cggcagcgccgtcccctcccccgggaacccgacgccgcgcggccacagggggcctggaggggcgggcagggcctcgcagcgcacccagcacagtccgcgcggcggagcgggtgagaagtcggcgggggcgcggatcgaccggggtgtcccccaggctccgcgtcgcggtccccgctcgccctcccgcccgcccaccgggcaccccagccgcgcagaaggcggaagccacgcgcgagggaccgcggtccgtccgggactagccccaggcccggcaccgccccgcgggccgagcgcccacacccgccaaacccacgcgggcacgcccccgcggcgcaccgcccccagcccggcctccgcccctgcagccgcgggcacgcggaggggctcctggctgcccgcacctgcacccgcgcgtcggcggcgccgaagccccgctccccgcctgcgcgtctgtctcgtccgcatctccgcggtgagtcggcggcgccctcgcccctgagcccagggccagcttctctcgccgccgcggctgctgcgcgcgtccccgcccagcccagcccagccccgagcacgaccccagccccacgcacgaccctagccccgcgagtcccgcaccgactcgctcccgccccatttcgcctccgcgggggcggcgccccctcctccccgcggctcccgctctccttcctcgccttcccggccgcgctggggacccccagccgccgtccgcgaccccccaccgcgacgcccggaggcggcggggtctctttgttcgggcggcgggcacgggggaccacctcccacggtgtcaccgcacccaccccgcgcccttcctccgcctcctggagttcaccgggaccaggtggcggcgggtgcctttttgggggtgcgcggccatgcaattggtggatttttttaaaccgttttggaggggggagcgcggcgttgggggcgggagagcgctcctggctgtgagctgctcctgccgcttcgctccgcgctctcctgccgctccgctccgggtctcccgcgctcctctccccggctcggccgagcgcgctgccccgacgccgccacccagagccgggccgcgccgggcgccgagatgaaggtgctgggacaccggctggagctgctcacaggtaccgcccgcctgccccgcagccggccgccactttccgagttggagcggactccgggcgcggcggccggggactggggcggctcgggtctgagcaggaaggggtgcggaccccaactaagtcctagttttgtgctacctgtttgtgtgcggagcccagccccgggagaggacttgaggttgtggcgagtccctggcgctggcgtccgggctgcgggagcaccggtcagggggtggccccatggggtctctgaccagcggagctcggattaggaccctgaaagctagctcagggctcctgccctccaatcagtgtcgcttgtcccctaagaaaggacccgtgggcttctggcaggacccgcgccatggacctcttatttctgc

SEQ ID NO: 27684 - DNA, 988 bp, Homo sapiens
  chr16:66638030-66639018
  binary
cgcgcgcgcgcgcgtgtgtgtgtgtctgtgtgtgtgcctggagctgcgcttgcaggtctgagagtcctctgagaatgggttgggggaggcgggtgcaggaccgaggcctggaacagccaacaaagaggccctggaggagggtggggctggccggggacaggaggggtggccaagaaagtcgcaagaaaactccggcccccaagaaaaagagagggcatgggttgcggagccgacatcacggccggggtctttgctgtttagacgcctgggttcccggatcccagacacgcgcacgggcaggaagttagaccggagacagcgagtatagacagcccttctggataggggcagacgggtgggagctccgaaggggtgccggggcggtgatcgggaggtctccagcggcccgaaccagggtgaagaagaaggtggagtctgcggaggccccaggccggggagggggcgggtcgggcccagcatcccccgcagccggggtccgagggggaggggcgggctggaggagcgggtgggggcggggcggggcgtggcggcgggggatgcgcccctgcgcgagccagtgtcgcctgccctccttccgcacagcccgggtttccgcttccctccgggcgcgagaagaggggagccaggccgagccccggccctaccgccgccgccgccatgtggcccccagaccccgaccccgacccggaccccgagcctgccggcggctcccgtcccggccccgcggtccccgggctccgcgccctgctgccggcgcgggctttcctctgctctctcaaaggccgcctcctgctggccgagtcggtgagtgcggcgggaccctcggccgccccgctaggactgcgcggctcctttcggaggaggacgtcggggcgcgggtggggtccgggggcggccgccgtgctccgataccccctctccgcgccgcctcggccgacttctctcgggcgcctggcgaagttgggtc

SEQ ID NO: 27685 - DNA, 907 bp, Homo sapiens
  chr16:67197294-67198201
  hyper
cgcgcgtccccgctgcccaacgaagcctgggtcgcgttgcgccgccgccaccctgggctggcagtggagctggagctggagcccgcgctgcccgctgagagcgtgacgcgcgtcctgcagccagccgtccccgtggctgcgctgcgcctcaacctctcaggcgacaccgtaggcccagtgcgcttcgcagcacaccactacgccgcaaccctgtgcgcgctcgaggtgcgcgcagccgcttcggccgagctgaacgccgcgctggaggagctggcggcgcgctgcgcggccctgcgcgaggtgcattgtttctgcgtggtgagccactcggtgctggacgccttccgcgcgcactgcccgcgcctgcgcacctataccctcaagctcacgcgcgagccgcatccctggaggcctacgctcgtggcgtgattgggcgacttctctcccccgtccccgtggacgtaagcgctctgagagggaacggggggggtgtccaggcgcgccccgagtgctagtgccttcttttgggattgttgccccccgggtctttaccgagttgggaactgtgatggcatcgggaccagtcctgggcgccctgagaccactcgctgctctcaccctctgcagacgccccacccgctcggtcctggacacactgcccccctctcttgcctccacccctctgcggactctgcagctccgcggccccggcgcagggagagggagggcacgggcgcgggccgggcctcaagggtgagtgtgaaataaacaaatcctgcagtgtttctgcgtcctattaaaggcggggtcggatctgaaagggaaggacagggaacgcgcggggtaccggaggagccatcccggcagaggttgggtttcctcaagagcctctggacgacacagctgc

SEQ ID NO: 27686 - DNA, 260 bp, Homo sapiens; identical to SEQ ID NO: 10340
  chr16:67709104-67709364
  hypo

SEQ ID NO: 27687 - DNA, 231 bp, Homo sapiens
  chr16:71715666-71715897
  hypo
cgaggcctccgggtctttctaactgcatgaagttgtgtcgcaagttgaggtaggtaatatcttgactatagaagagatgctcaggaacctcctcgaggctgtaacacgagagatccacggtactgattcgctgggacaccacctgaataatgtcaaagagaagagccttctgagctagtactggatgtctatcacccagcaaagaatggaatggcatttacacaaaaagac

SEQ ID NO: 27688 - DNA, 250 bp, Homo sapiens
  chr16:85485696-85485946
  hypo
cgccagagagacccgtgtccggcgcgaataattggattttaatgaaacgaatgggagtgctgaagccgtttgccaccctggcctgcatcggggccccgcaattaagccgattatgttttgagagtcaagctgtctgactcctcgcgtccctaatgtgatgatgtttgatggccctgccagcgcggttatttatttatttacccaaccctcatgagctgggacgtgccagtgggccccggtaattaacagc

SEQ ID NO: 27689 - DNA, 408 bp, Homo sapiens; identical to SEQ ID NO: 24028
  chr16:85679161-85679569
  hypo

SEQ ID NO: 27690 - DNA, 274 bp, Homo sapiens; identical to SEQ ID NO: 10345
  chr16:87444932-87445206
  hypo

SEQ ID NO: 27691 - DNA, 929 bp, Homo sapiens
  chr16:89119921-89120850
  hypo
cgggcatcggggagacgaggtgttggggacagagccggcggtcatagcctccagctcctcttcctgcatggagtgacctggcgccgcgaggtggagctggtgtccgagccctgaggatgaggctgctccctccgcaaggtgggcgaggagccaggaagagccaagggagtggccaccctgccctgacggccaccaacggccaccacgtcaccctagaagacaacccaagcccgtctccccacacctcgcggatggtgcagtgcagagagaaggccgggcgggtgctggggggcccatctccccgagccttgcaaatagtgcagtgcagggagaaggccgggcgggtgctggggggcccgtctccctgtgactcgtggacggtgcggtgcagggagaagggcgggcaggtgctggaggactgagtgaggcccctccaggatggctccctgcccctccatgcgctgggtcctcgggccaggacaggttgcatctgggtcaccagccccctcacacccgctcgcctgaaggcggccgaccctggccactggtcgcctggtggcagaagcctcttctgggcattttcaggcaccgcaatgctcttcacagcgttaactttttttttatccaaccaaggacaacctcagcttcagaaagccctggaatgccccacaatggacaagcaaggaacaccctccgggacggaccgcgagactcggccctgagatgcctcaataccctggacaccccagaacctcagattgcgtggctggggctcctgcggccaccctgctccccagaacctcgtcgtcttcccggtgccctgcggcaggaacacagggctggagccgacccccagggcatggctgggagctgcgggagtgaacggggagttaacccccagggcatggctgggagctgcgggagtgaac

SEQ ID NO: 27692 - DNA, 315 bp, Homo sapiens; identical to SEQ ID NO: 10346
  chr16:89169100-89169415
  hypo

SEQ ID NO: 27693 - DNA, 542 bp, Homo sapiens; identical to SEQ ID NO: 10347
  chr16:89169538-89170080
  hypo

SEQ ID NO: 27694 - DNA, 516 bp, Homo sapiens
  chr16:89409913-89410429
  hypo
cgagcaaatgagacagagctcgaggtgggctggaggcatgtgagggtgcacgcgaaacacagtgcctcctcttggagttgccagaattcacctcgttcagaacctcaccccagtcagaaaacacaaggcagcaactggccggaacttggtcagtcacatccataaaccaccaattaccttcacagaccacgactaacaggtttattacagatgagtcacagctcatgttttcaaggaagggtctccaactgagcagtcaccagtgcagcctgcgtcagggcgcgcctccctccagcggtccccgcgtcgcccatgtctgacacagtttatgcttcgcaggcggtaaggctccgctcctcactcccatggaccaacagagtagggaaaacgaaggcacgttggaaactacggatcacgggctgttttgggtgtgggaaatccacccacccacactcacggccagctctgaccgactgaacccaggggcacatcacagacataaatatcggtgcaggc

SEQ ID NO: 27695 - DNA, 70 bp, Homo sapiens; identical to SEQ ID NO: 10349
  chr16:89504482-89504552
  hypo

SEQ ID NO: 27696 - DNA, 148 bp, Homo sapiens
  chr16:89575936-89576084
  hypo
cgtgagccaccgcgcccggccataaaacatatttaaatgggaaaatgtttatcttgaaaggagaactctgaaagtatatacttgttaactggtttggtacctggaaatgttctacaaggagccactctctggtgacagcaggagcccc

SEQ ID NO: 27697 - DNA, 426 bp, Homo sapiens; identical to SEQ ID NO: 25208
  chr16:89883921-89884347
  hypo

SEQ ID NO: 27698 - DNA, 1365 bp, Homo sapiens; identical to SEQ ID NO: 25209
  chr16:89899939-89901304
  hypo

SEQ ID NO: 27699 - DNA, 513 bp, Homo sapiens
  chr16:9005277-9005790
  hypo
cgagccacatgctgagtgacaagctctcaatccaacacggaattgtatatccagagtgtatggagagctcgtcctgctccggtcatgaaggaaaaacgcaactgcacaacactgaaaacagcgctgtcacgctccggacacatgcggtacaggacagggatccctgaagggacaaatgagagccccgtgatgggcccagctctgctgaaagtttacaggctgcagcccggagaaggcaaacccagacagagccaagaagtgagaatgagaggagctcaagggagcgggaacctgctgggcagagtagcctaaagcagaatgctgcccagaaagcgagatctggggatgtgcagtttcttccgaagctgtcagtgagaactgatcagtgaactcgaggaaattacctggggcaaggaaaagaaccagcaagaggatgaggattggggggaacaaccttcagagctcacgacaggctgggaagtctgtgttcccaccagccaccgtggaaaaacc

SEQ ID NO: 27700 - DNA, 881 bp, Homo sapiens; identical to SEQ ID NO: 24043
  chr17:10632714-10633595
  binary

SEQ ID NO: 27701 - DNA, 298 bp, Homo sapiens
  chr17:1412249-1412547
  hypo
cgtggggcagagggcggggaacagtctgcagacccaggctcactcgtggcggtcagcgtggggcagagggcggggaacagtctgcagacccaggctcactcgtgggggtcagcgtggggcagagggcggggagcggtctgcagacccaggctcactcgtgggggttagtgggggttagcgtggggcagagggcggggaacggtctgccagacccaggctcactcgtggtccaggatgtttgggatgtctcgcccctcacaattctgcatctccaggatccggtcaaagtgctccagcc

SEQ ID NO: 27702 - DNA, 553 bp, Homo sapiens
  chr17:27044400-27044953
  hyper
cggggccacggggaccctacgggagtccgcggtctcggagacgctacgaccaccgcgggccacggagatgaaacaatcacccggggccgcggcgagcccaaaatcacccgggccctgggcgtcccgaagatgactctggggcgaggagactcttcggccgccaattgggggcggggagtcccgtctggtgggggccgggcccgcgcagaccctacgattacgcggggccggatagttcctacgattacgcggggccggatggttcctacaataacccggggccgcggagacccgacgtcatctcggggctgaggctgccctaccattacagagcggcccgggggcgcggagcggccccgccacacggggtcagtgtgggcaggggcggcgctgccaaggcccgcaggccgctggaggagggggcgaggggcccagtccggctacagggcctcgagtcccactccgctcgggctccgccaacgctgtaacacgatccccggaaattcctggagaagggccgccccccgcccctctcctggcggctccaggcctc

SEQ ID NO: 27703 - DNA, 807 bp, Homo sapiens; identical to SEQ ID NO: 24058
  chr17:27940157-27940964
  hyper

SEQ ID NO: 27704 - DNA, 632 bp, Homo sapiens
  chr17:28088027-28088659
  hyper
cgcacggagacctccaggcaagcaggatgcgcgctcgccctcgcttgattgtttgctccccaggatgctggggaaagcggctgctgaaagagcaaactttctgagcgttcgcggaggcggagggcgcgcggcggactcacagctggttgatggcgttctgcgagatgaccgcgttggcggagaagtaaggaatcatgtcggggccaccgaggctgcaggtgcaagcgaggggcgccttcctcttgcgggccaacgtgctcagggtcatggggccggctcaaagtgcacaactccgcatcctggcctctgctctgctccggcacgaggcgcaggctgcgcgtgcacccggcggcggaggcgggcccgccgggtcgcgcggaggcagccgccgaagccccagggctcggcggtagagtccggactgacgggcgtcgccagcagttcgcccccacccgcgtccggggcgggacgggcgggtcctgagagcggagagggtaggcccggccggcgccccgccccagatctcgggacgcccgcgcggatcccgcagcgcgcgtcacagcctttagggcatccggcggccccaagacactgctgcctcggtaagggagtgaagctactcaagggtggac

SEQ ID NO: 27705 - DNA, 256 bp, Homo sapiens
  chr17:30846472-30846728
  hyper
cgccgggtgggctctggcggcggcggcgggggcggaggctgcggcttcgagcgcgacgcggtcgccaaggcaacgccggccccagcgcccgcggctgaaacgaagccgctgcccgagcccgagcgccagcgcacacgccctccttgcagccccccgcagccccggccggccgcgcttctccgcctcgccgccgacagcccctcccagcccgcctgcccgccctccttccggctgtttttgtttgtctgtctttccc

SEQ ID NO: 27706 - DNA, 1485 bp, Homo sapiens
  chr17:32907385-32908870
  binary
cgcgctggagcggaggagcgagccttgcgaggggacaaacatctggccgcccgcctcgggcatccggtctgggcgtcgcctagggtggtggcgaccggcgtcgccagtttcagcaccgcacggaaacttttccttctccagatggattaaagttgtctggattttctctttctttgagaaagacagcattcatttgcacctgacctgggatttttatgctgggctgctgcaggggcttggaggaagaaagcggcgctatccatgtgcggttactaccgaaaccgaggaaactggggattgcgttggaagtcggcaccctcgagtgagttcggattcgagctgggccgtgaggccgggagattcagcactgggctctaggtagcccccgggacgcccgcggccaccgggctccggactgcacgtgcagctccccccgcgcctcgcagatcctgcagggggcaccagctgggggaggtggaggctcctcccgcccggagctgcgcccccaccggctccgagggtgtagccgccagcgcctgggacgccccctccccgcaaagtgtccccgaattgcactctctggtcccggagctgcatctgagacagccgggcgccacggcagccctgagttggatgtgaccaagcccagcctggggccaagtcgtcgtcgactgttgctctctcggacccctcccgcccccgcctcggccatggccccggggatgtcgggccgcggcggcgccgccctgctctgcctctcagcgctactcgcccacggtaagtgtcgcggcgcggactgggggtgaggatgcggcaggcgccactggagggggtacggggaagactggggagaggagcacccacaccccctggactcgcagccgccactccgggtttggcgtctctggctgcagctcgagttaccgccagcccccgagccctccggcgagctcagctgaggggaccgagcccggcgccagaaaagggtggggggagggtgtcgctccagtcctctcctggttataaagaagggttcgaacccgaaggtctggggtcgtgtccgcccacggaaatctagagggatccgagggatcctccggatcgcgtccaggccgccccccgcccccgtctctccctgcagccggccgggctgggggctgttgggatccgccgggatcgcgtctttcctcgccccgggcgcgcaggccggtgcggggccgcgccgcccgtcgcctcgcttcctgcggcggtcctcgggaagggaagtggactgactccgggccggggagccgccgcggctcgcacgcccgcggtcctgtgagctgcatctaaatggccggcttaggcgagcccggagggcgggggtctgggcacccgcacaggccggggcggtgggccgcgggccgcgcgcggagggagcgggctccgcgctctcgcattctgcaatctgttgcgtctgctccccaggctcgccccgggctccgc

SEQ ID NO: 27707 - DNA, 1615 bp, Homo sapiens
  chr17:33700165-33701780
  hyper
cggttcctgctccgcgccccgcagaaaccgcggctggctggccaggggctcttccaacttccagcgggagcaggtgcacaggtcaggcccgccccgcccctaatgccttctacccccattacccacccccgccccgcccgccagtcctccatagtccgctttttagggaacctgctgagcaaactagctgggcccccggacaggggagaaaagcacagatacccccactccactccacccccagcccctccgcacccctccagcccctccccacaccccacaccctggctggggtggggtgggaagggtgctgctcccttctcgaacctggcactcgagttacagcccgacgcggattcggctgggctagaccctgaagcacgggtagaaacgcaactccggagtcccaggctgggggcaaggaccctctctgacctctcaagctccagcgcttccgaagcccccttagcgtttccctggaggcgcccaggtcgagtccttatatactagcgggttggcgccatcccacgcacatcccacgcaggagatgcaagagccaatgggcgggtctgctaagcccgcgaactctgccgcgttaaattgcctagaagctcccacccttctgactgttgccacgtagttcttagtttccgggaatttggggattttttcctcccccttcttcccacccttcctccgtctcctcgctccctccatccatctctccctccctatcatctatctattcatctatctggattacagcaaaacaaagaataaagattatgaagaaagagaagaacttcccaggcccaagcagctgtcggctcctgcgctcccaacggggtggccgtttccttcctcgcaccctcttctctcccggtgcctgcggtcccaccttccagatacccctcggagagtccagctgagctctcgccagagctttccccttccaacccgctcgacttgcccagatcccaagctgggcttctctctccatcgccccagaaagtgggtcttggagaccgaggcaagaatttgggcctccgcttctgttccagaccccggaccccttgccaaaatgcggcagatgtgcagattgggccgcgcttggttcctggctgggtttatggagcctgcggctgaggcaggctccgcagaccccgagccagagtgggatttaacggcggccggtgcgctgtgcttggtcaaccccggtaaccgtcacgctgctagtgatatgaaaaaaacctgccagcgttctgcttttctgccccgctgcagtctttagcacccgccaggattctgtccgagtgtttggattttgtaatcctcctgtctttggccaactccccatccttggcggagcgctcgcccttggccgggctccgtgctgccagccttgcggaaccctaggcccgggcggctctgtcggaggcccacttctcactgatgcggagtggcccgagggtgggagcagcggttaatgccgcactgattaatacaggctccagtgaaagcgaaagtaagaaaataaaacggatttcattatacatatacaatgtgtgtatggatacatgtacatacatattacacttatgtgtatgttacgcac

SEQ ID NO: 27708 - DNA, 463 bp, Homo sapiens
  chr17:33775294-33775757
  hyper
cgcaacgggggaagcctccaggacgcacttggctctgcctgtttgttccgcccccgcggaaaccgctgctcgctgggcaggggctttctgttttgcagccggaacaggaacacagatagcccgccaagccgccggcgacaccttccaacccctttagctctccgcaccgtccctccccaccgccccgcctccacccgcgccgcgatcaagtcctcatagccttttagggaatttgctcagcaaactagccgaaccccaaaggcaggggagaagcacgcaaataccccgactccaccggctggccggagctggggggcgggggttgctctcctagcttgctccccatccgagtcaacgccagtccagggtcgtgccggactagaccctagggcgtgggtacaaacgggagctccgcagtccccgtaggagcagggaccctctcttacctctcaagctccagcgc

SEQ ID NO: 27709 - DNA, 717 bp, Homo sapiens; identical to SEQ ID NO: 10364
  chr17:33814248-33814965
  binary

SEQ ID NO: 27710 - DNA, 727 bp, Homo sapiens; identical to SEQ ID NO: 23104
  chr17:37321167-37321894
  hyper

SEQ ID NO: 27711 - DNA, 665 bp, Homo sapiens; identical to SEQ ID NO: 25229
  chr17:37365986-37366651
  hyper

SEQ ID NO: 27712 - DNA, 1647 bp, Homo sapiens
  chr17:37380796-37382443
  binary
cgccaggagtctgggctccgcctgccttcgcggggagtaatttattcatggtgactccctcaggagtaacaatcatccataattagggttaatgatgacattcattaattacgatgacttctctttttgcttctacccgctccccctcctctggtcccgctcccgtggtggggcgcggggctgcctgtctttctggtctggagccacaaccgcaggcccccgtcctcgcccgtgaccgacggccggcgctgctgcaggccccctcgcggactccgcagctgcgcacccccggccgcggcctcgcgtccccgagcccaacagggctaggagcggggaatgcaggactgcggaggggcagggagagacgccctgagacgcggagataaacacccggagacgccgggagagacggggagagacgcacacagagacaccaagacacagacacgcaggttgtagagacaaattcagagacacgagcgaggatagaggcgcggactgagcccgggactgggacccggcggccgctggagggtgcgcctcgcacgcacagccgggcgcgtaccccgcccgcaccgctccacgcgcgccctccggcctcgctgcgcccatctctccaacgaagaccagtggccgcctccccagaaggtcgcgatggcgcgcgcgggcgtgcggtgccggtgtgatcgggggctccttgtggcccctcgtcgccaacccactcctacccccgggagcggcgcggagcctcagtggtcacgcgggcctcgcgaccgcgaccctaggacgcccgggcccacaggaggaccccgccgggaagagggcgcccgggcccggggcgcggacaggccttgcgccccccaagttaccttggtttcctggagggcggagacggtccctggggggctgtgggtggccgcgtcatccggttcgttctccttctcgctcatctcggtcatggttcggggagaggggaggagagggtgccgagatccgacggcaggcccaccgcgggcaggctgcgggtggcgggcgtctccgggactctgaagccgttctccagaggctgcccccagttagcccccggcacggcagcccccaacccgcgggagcgggcagagaaagttgccggggtggcgggcgaggggaggccaccacgctgagccgcaggagcgggacgaccccgggcgcgaggaccgagggtctgcagaggatgctgctcgcagcgcggggaggagggaagtggggccgcggggatgagccgagggagggagccaaggagctgtccgtgtccagccggctccgccgtccgctgcgcccgccccccatcccctcccctcccccgccggccccagcccggcacccggcggcccctccgcccagtcctcgccgcccaactttgatttaggaggtcgcctggtcccgccccctgccctacgccgctcccccgcgcagccctgcaaatcaggctctcagctattggctgcctcggtggccaggagggcgaactgggcggagtcttggggggctcgacacgatggggcggggcttggcggggaaagaagcggaggagggagtttcacactgaaaaacccgggatggaggggcgtgaccagattgagggaagcttggggagatcatagtagc

SEQ ID NO: 27713 - DNA, 198 bp, Homo sapiens
  chr17:37794000-37794198
  hyper
cgttccctcaccccgcatttttgggttagtcaatgtctcctggttttcttcgtaccgctctgacagtcggtcaaagtcccgcttcacgttttcctctgtcgcccaacccctcgctctgtacactgaatctcagtggtcttattttcccccacggcttcagctttacaccaactaaatacccagatccacatcttcagc

SEQ ID NO: 27714 - DNA, 137 bp, Homo sapiens; identical to SEQ ID NO: 10367
  chr17:4144975-4145112
  hypo

SEQ ID NO: 27715 - DNA, 522 bp, Homo sapiens
  chr17:43047449-43047971
  hyper
cgcgatagagtctctaggtaccgtttactgcccaaagcccaggggtagggggctcagggcagccagacctccctaggctcaggaagagtagtcttcagcgctcggctgtcaggcaatccggtccccggttccccacggcggtctcctcggtgtgccccaccaagagcgacagggctggtgacccgaggggcgcgtgcgcggtcgtcagcctgggatttgcacggacccccttctccctagtacgctcgctcgggggcccctcctctgctacgccgctggggctcgcccgccacccacagccctcgcagagccctccgggcacaccgcggctggccgcccggggccaaggatggggcgggagcgcccacccacccccgcgccggccggggcatccaagaggcgcgctcgcagccacacggcgccccgcctcccgctccgaaaaagctcctgctcccctggcgcggtgtggcgtctccgtcagcccagccggattctccccgcttcgctggagtggaaaataac

SEQ ID NO: 27716 - DNA, 629 bp, Homo sapiens
  chr17:46124683-46125312
  binary
cgcatcagctgcgttaaaatcaccccagcaggcaggttatccggccgccactccagggtcattaaatcagactctccagtgggacctcggaattcgtagcttagcaagctccccaagtgatgctgggagtaaactaacgtttgagagtcacaaacatgttttggcaatataaccagatgggactggagaaattaaaaaatgagaaacatccctaaaaaagcaagactaagctgcgtgggaggccaaacgaggggggtcctttgggctgtttctaccatgacaaaaatcgccattaccccacacctctcacaccgccaacgttccgccaacgttccgccaacgtcccaccaccctcatgatatccgtccgcggtactgctccagcgaaggtacccttgcctgggccatgaggcgcaaccgtccctcacagctggggtggcttctccaggttcgcaccgaggggaagttggggtaccggtttccgccgccagcacccaagatggcggcacgagcgtcgcaaccacaagaaccacatgcttcgtgtcccgcctcagcattctcgggtctcactagacttttgcaagtcactgtgggaaccctcaaggcgagggtgttccgcactctggcggc

SEQ ID NO: 27717 - DNA, 1855 bp, Homo sapiens
  chr17:46620299-46622154
  hyper
cgctaattcagtaatacctgaattttagcaaaacacataagtctatgcgactgagggtgggagaggctcgatttttccagtagacggccaaggagcgcgggggtcgaaaggaccgggaggaggaaacaggttagggaaactgcaggtcgatggcacagagcgtactggtgaaaaaatccagctcttcctcggaaaaagggaccgggctgtcgagagaaccctgtaggctaggggagaggcctccggatagctggagacaggagtcggccgcgaagaagttgaggtcgggaaggaaaggtgaatcctggcgccccgagaagacgtcttctggcaatggcccgggctccagcccgccggccccgcgcagcgcgcagccgggactcgacgcgcctgcgccctctaagcgaacggctaaaggccgggggtccgcgcttaaggcccccggcaccacctccggcgggtgacagcaggcttcccacgccgcccgcgaggcggaggggccgcccgggctggccgcgggttcctcggcagggtcgcagatgtcctccagggctcccgggcaggcaggctccccatccggcggctctcggtgctgcgtctgccgcttgtgcttcatgcgccggttctgaaaccagactttgacctgcctttcggtgaggtccagcaaggccgcgatctcgacgcggcgtggccggcacaggtacttattaaagtggaattccttctccagttccagcagctgcgtgttggtgtaagccgtgcgcagcctgcgcgccccgccgccaccagcctccggcagtcccaggccatctgcagggaaaacaggctcggcgtcatagcgggccgtgtactcagcccaacctcagttcggactaccccatcctccaaaaccagtatcacctctccccttcctcgccaccccacccccgcccccaccccaaagccgctcgctttactgcttttgggttttcttctctccctctctagtctacagccccggcccgggtcagggcaaagcattcagagccgcccacgggccacgcagggggcggagagcggctcccttcggcgccggaacctcagatccccctcccaagccctcccagtggacccctcaattcggaactttccaactcaaccggagcgagggtcagaaagattgttcttcacccctcttcctccctagctctgaattcttcctcttctcctagagttggggcagaaaggaccgaatcttttctgcttctagggtctatcccagcaacaacatactcattcccctacacagatacgggtgaaaacctcaatcaaatcattttcttctagcagaaaaaaaggcgtttccccaaccagcttccaaaatcagccatagggagagaaagagagagagagacagaaaaaaaaaaagacgctgttagcggccaggcctgaaccccagtgggatattctacttccccatcccaggaatggagggggtaaggaaccccaacaggctcgccaccattttttttaaacctccttccactgctttttctccccctcttctagctgcccctcaccccacccccaccacgcttaccgacctgcaggcgatccgaccccggaggccggaacggcggaggcggccggagaaggagacgtggcggattggctgggtttcttggcggatttcttctctttcatccaagggaactcgggggccgggggggcagcggggagtggcggcggcggtggcggcggcagagcaggcccatcttcggctcgcttttggctcctgggtctctgaagggtggaggcgccgggctggaggctggggaaggtttgctcgaaaggaggaggaggaggaattaatgtc

SEQ ID NO: 27718 - DNA, 411 bp, Homo sapiens
  chr17:46755594-46756005
  hyper
cgctccccgcctgctccaggtggccggcaccctagacggggcaggaagggcaggcgccaagcctcaagtctcaaacacggtgcggggctgcgcggcaaggagaaacccaggagatgctcggggtcggggcccagggcagggaaaaccctcagctctggtcaaaagccaagtgagcgaaggaggcgatgcaacgtcaccctggtggccaaggcaggcacccaggtctcgaggttccaggagagggacgcgctgtgaccaccagccccctaggctcctgtctgctcgatgagcgtccactcgccagttccagccgcgagcgcccccagcactcccggagctgggccgggcgccgccttccctcgggcggccggcaggggtcagtgtttggccgcaggtgaacagacagcggcc

SEQ ID NO: 27719 - DNA, 967 bp, Homo sapiens; identical to SEQ ID NO: 26489
  chr17:47572986-47573953
  binary

SEQ ID NO: 27720 - DNA, 988 bp, Homo sapiens
  chr17:47573968-47574956
  binary
cgccgctgcctgcctgcgagtctggggctgcgcgccgctccccacctagctgcgcgacccgagcgccgcgcccaccgcgctccgtgggctcccgcgcctcgaagggtcgggatccggtctgagcctctcctggctctcggtgcaagccgctgggcacctaacgagacgggggcgcccggacgcctcggattctgtagcgcggtatcccgggccaccgactcggcaaaggtcggcgggtcctccgggtggtccgacgagattgtcagatgtggcctgctttatggccatgaaccgaatgccctggaaggtctggcaacggaggaggcgtcttcactctccccgccagcatctttcatcagagcactgcgccccaaattccggctttacagatacggagactgaggctctgagagtttaaacgacttggccaagatctcacagcaagttgggccagagtcgtggctagactccccgacctgattcccagctcggtactcccccaccttttcagggggcagccgctgtcccagctcggggtcacggctgcgtttcccagcagggcggggggggttgacactgtccccagagtccgtcggcggtagagcctgcgggtgaggtgggcagagattctgtccgggtgcgggccccagcccgaaagctcagccccagttccctggagctgtcaggacctgtggctgcgtccggggatttgggagcgaccgcgggcacgtctgctgactaacgccgctggttagagacgctgctcagacgcgggtgggcgagcgtagaccaggagagcggggaggagggaccggatcccagaggggcaacgacttgggctccgggtctgggcaagagcgagggtccccgcgcgaagacccaaggaaggaggggagctgggcgtggaggacctgggcgcttgggaaggtgtaccccgacaggaacctgccgtctgcagcccctgcggctcccgcctccgcctcggcgc

SEQ ID NO: 27721 - DNA, 576 bp, Homo sapiens
  chr17:47987524-47988100
  hyper
cggaggtgagaggaaccgcgaggcagcagcggtgtggggaaggcactcagctttcctggaggagcggctcccggtggcggcgggctgcctggaggaggaggcagggccaggctgggcgctgaggaggccgccccggtggcgctcccacgacccgggcaaggcagtctgggcgccgtctccggtctcggggcctgcggtcggggcaccgcggtgccgcgtttgagccggtcagctccctgcggaaattacaggggcgctcggcgctgcggtcgcgccccccggggcagcgcccgctggttggaggcgtttaaattgaaagcagctttggggagagggggcggacgcgggccgccgagcaaggggagggggcggcccggcacagcgaccccattgtctgtgcccgccgaggggtggaaccttgcggtgagctcggcgcggcgccccctccccgagctccggcccagcggcgctctcagctggttcccacgctgcgcagcgctggccacgacccctcgtcccttctccacctgggtctgcctcttggctcgctgactgcaagcctggcagcgcgcacgc

SEQ ID NO: 27722 - DNA, 120 bp, Homo sapiens; identical to SEQ ID NO: 10373
  chr17:48845008-48845128
  hypo

SEQ ID NO: 27723 - DNA, 104 bp, Homo sapiens; identical to SEQ ID NO: 24074
  chr17:49229457-49229561
  hypo

SEQ ID NO: 27724 - DNA, 465 bp, Homo sapiens; identical to SEQ ID NO: 26496
  chr17:56326822-56327287
  binary

SEQ ID NO: 27725 - DNA, 787 bp, Homo sapiens; identical to SEQ ID NO: 10375
  chr17:56429059-56429846
  binary

SEQ ID NO: 27726 - DNA, 1406 bp, Homo sapiens; identical to SEQ ID NO: 26498
  chr17:56832961-56834367
  binary

SEQ ID NO: 27727 - DNA, 144 bp, Homo sapiens; identical to SEQ ID NO: 24075
  chr17:57297033-57297177
  hypo

SEQ ID NO: 27728 - DNA, 738 bp, Homo sapiens; identical to SEQ ID NO: 24077
  chr17:61777761-61778499
  binary

SEQ ID NO: 27729 - DNA, 220 bp, Homo sapiens; identical to SEQ ID NO: 10379
  chr17:63152527-63152747
  hypo

SEQ ID NO: 27730 - DNA, 999 bp, Homo sapiens; identical to SEQ ID NO: 23108
  chr17:70215682-70216681
  hyper

SEQ ID NO: 27731 - DNA, 685 bp, Homo sapiens
  chr17:71160730-71161415
  binary
cgcccggggctggcccacggtaaacacagctttgctaacttgtttggctaaggaaatcacagaggtcccggtataagtctgggtcaccccggccgccactccagctgcctagaatatatgggtggaagggaatcgactctgtgaaatcagagggaaaatagcgcttgtccttgccatgagtcttgaggagaccgaaaacgcttaaccttttacgcccccgcaggcgggtcccctctctccccgctccccggctgtctgtaagctctgcctgcggccacccgcaggcgtttcagccggtctcacccctgtccttctgcaggacccgggaggaggggttgggggggcggagcgaagccgctgtgacgtagcgggaggggggcgtggggaaatgtgccgaggggcccgggctggctgggccagtcccagcggcgcagccacccatgcgcgcgcgctcgcaagaccaccagcgcccagagccccagtctgaggcttggcgccgggggtctgcgggcgaggggagctctctacgtgcgaggggctagcgggagccggcacaagagggtcgaggagccaggaaccccaaacgtccggcgccaggcgctagccaagctgctgcgcgccccggcgcccagctggctcggggacagccgctgggtgtcggagaccggagctagcggattgcagc

SEQ ID NO: 27732 - DNA, 969 bp, Homo sapiens
  chr17:71161494-71162463
  binary
cgagaagcgcacttgggcacctgtgtgcatctgcgctgatggtggtgtgcccatccgagtgcctgagcttaggtcccggtgcgtgattctccgctcttgtgccttttggggtgattgtagtaggaatgaacgacaacgggtacccttgcctgagtaagggggctgtgggtagagtgtgctggaacggacgtgtcctcgcagcctcatgcccgtgtgcgtggcgtgtgccctttagcccgagatttcaggtagctgcgacgggtgacaacttctctcccagccccctacaaaagagacctggcgcgaggggagcgaggccgtgagatgccagctggggctcctgcgggagcgcacccggagatccgagcctgccagaggcaggcggcgggcgcagagcggagaaagaggggcttctctccctagacgctgaacgatctaggatccgtccccgtcccccacctcgggacagaaaggacagtttgtctaggtttggagagaaaaaaccactgcataggccgtgcccaaaagccgctggccaagtcccccaagcgactgtcttctgcgccccgatgtctctgtcctcagcgccccccccccacacccggcacccctgctgtgcgtttcgatactgggcgtgctggcgccacaatctccgctcttgcctcgtcttcctggaaatggcacagagttctttgggaaacccttgctctgaggatcagcgagttggatggccaggaggaggactttctgtgccagccgggagcaaccggctccgcggtcctgacactcgcccctccatttctcaaccccgtaggccagcaccgccccggcttttcccaggcgctcacgcgccgcggtggccctcaggggcttttgtcaccctgccagtgggggctctcgctctagccgcacagagaccaagccgggttctgcaggccctgagggaggcggggggtgggaagtgaatgc

SEQ ID NO: 27733 - DNA, 818 bp, Homo sapiens
  chr17:72931833-72932651
  hyper
cgagcccccgggagggtaattaacgagggattaatgagatttccaaagtcaacagaaaaatcgatgggccgcggagcccgagcggcggctgcgcagtcccgctgggggagggcgtcgcgggcatcggtctcacctggacggacgatccgctcagcgcccgcagtcggtggttagcccacggcgatgcctctcccggcctcaggtaagcccggagcgccggcggaactttcccagcttgcgcaccccagacactggcacatactacccacccccccaaaaggggggttcacaagtaggggctgcagggattggaacgggaaagcggggtgactgtggagaggtgaactccctttaatctgaggccggcccctccacccgccccgcaacccgcgctccgcgcccctactcctttccgtggacccggggagcacagagggcctcagggcgcgactcctcccggccgggtccacacagcagaaagcgcggaggcctggggtgtgaggttggttggggctgtctggacgcccggtctggggcacgcaggaagcggctgccccggccccgcagtccctaaaatggctcggaaggaaatcccgagggcgcccgcactcagcagcctcctcggagccggccctgcgctgctgggccgggcgccgggcccgacggctccgcggctttcatcgccaatccagccgagacccacaaaccagtccagtgtcccggccctcccttggactggcgtcgcgcccaggggcgtgccagggggcggcagagtactgcttgtcagttccaggtgcccttgccccagccttctgccc

SEQ ID NO: 27734 - DNA, 968 bp, Homo sapiens; identical to SEQ ID NO: 24081
  chr17:73584153-73585121
  binary

SEQ ID NO: 27735 - DNA, 365 bp, Homo sapiens
  chr17:73607997-73608362
  hypo
cgagtgcctgccgcctgaggttcctgcccggcccagcctgactctcccagcagacattgacctgttccctttctccagcttcgtcgccatcggctttcaggtgggcgcccaggcctaagctcttcccgctggcctcaccgctctgagttagcacctgcctgacagatgctgcgtttttttccccgctgtcagctcttgccctccttcctccccagcctttggggctgtgagtagcgctgaattgctctgaaaataaccgttgaatgtaattgtctcaccatagagcgttactggagataacagttggtgttattgaatgggagacgttatttagatccacgatgccacacctttgttgtacctgc

SEQ ID NO: 27736 - DNA, 1124 bp, Homo sapiens
  chr17:73612827-73613951
  hypo
cgcccgggccccgtgcctgtgcccgtgcagccatccaggtgggcccccacggggaggtggccagggctgtcccgctcctcggggaatcaccctatgaacttagtgacctcttgcttctcccacgaggcctcccaaagctttcctgaggaaaatcgaccccaaggacgaggctctggccaagctgggtatcaacggtgcccactcgtccccgccggtgagcaccccagcctgtctcccccagagtgtgtgctgctgcactggggagctcaaggctctctggggcgaacttggccttgtgctgtgactcagcccgtgtactttctccgtatccccccagatgctgtcccccagcccaggaaagggccccccgccagctgtggctcctcgacccaaggccccgctacagcttgggccctctagctccatcaaggaaaagcaggggccccttctggacctgtttggccagaagctgcctattgcccacacacccccacctccaccagcgccaccactgcctctgcccgaggacccagggaccctttcagcagagcgtcgttgtaaggaaccacatttctcctgcgccgtgggcttcactggggcagaggcagggttcgcacagactctcggtgcccagggctgaaggcatttctgcgtggctgaggccagctgttcgggcttctggactttggagccatacgtagctggggagtcccagcttccgcgttcccacccagggcagggcctgggcatctttggggctgtcatcgagaggctgtcacacacagggtgttgtccctgacacatacccgacagctctgtgaggaagttagtggccctggctgacatggtcatagaagacccacgagcctcacggacgccagggaaagtttagggcccaaaatggaggcaggagatggtgccatggaaggagtaaggcagctggaggttgggagagccgggcccttggaaggctcgtggggatgaaggtcttccctcccgtgcccccatcactctggctctgcagcccctcactgaggctcctcaccccctcctctctgccaggcttgacacagcccgtggaggaccagggggtctccacccagctactcgcgccctctggcagc

SEQ ID NO: 27737 - DNA, 689 bp, Homo sapiens; identical to SEQ ID NO: 10387
  chr17:75213347-75214036
  hypo

SEQ ID NO: 27738 - DNA, 1804 bp, Homo sapiens; identical to SEQ ID NO: 24086
  chr17:75368688-75370492
  binary

SEQ ID NO: 27739 - DNA, 605 bp, Homo sapiens
  chr17:76227764-76228369
  binary
cgggggttcagggaaattaaggaacgtgcccagggacccggggccagcccgtggggacgctgggattggagcccaagccccaggttcgccgcgcggctctcgacttcctctcctttcccccaggggcgagctcagcgaccgcagagaggtggggtcgatctccctgcgaccccagggggcccgcgaggccagtgcgcgggcaggagcggggacgtgctcagaagagccgggcgccgccgcgcccgcccgccccccgtcccccggctcccggctccgcgcgccccccgccgcccccggggccctgctacccccgacccgtcccctcccgccggccgcccccatggcccggctgggcgcgctgctcctggccgccgccctgggtgcactgctcagcttcgcgctcctggccgccgcggtcgccagcgactactggtacatcctggaggtggcggacgccggcaatggcagcgcctggcccgggcgcgcagagctgctctcctcgcactcggggctctggcgcatctgcgaaggtaaccggccaccgcgccggccctcctccctccgcgacctcgtccctccgacacccccttaaccccgccctgctc

SEQ ID NO: 27740 - DNA, 687 bp, Homo sapiens
  chr17:76991011-76991698
  hypo
cggttttggaggcaaatgcaggaggaagcaggttcccagcgactgggctgtggaagccacactgtgggctggggcaggcgtctcttacctggcggctggatgccggcagcagcccgcagggcgttgtagttggacacccagttctcgtggtccacgctgcccttgtagcccaccaccttcacccactccgggttctcgttcaccacatcacccgtagtggtcgtccactccttgcccaggccgcccacgtacagacgctcgtccttcactgccagccattcggccttgaagcctggccaagcagagtgtccttaggccccgcacccagctcccgccgcacccctgcacctggctcccacccggccccgcacctgtccttagaccccgcacctgactcccgcccggctccacacctgcctcccctccggcccgcacctggctcccgcccagggccggccggctgccctcccctcagctcctgaaggttcagtgaccactctcaagtctcctctgatccccaactccccgctcctcaagctgtaaccccaaccttaggattatccttaaaggctagaaaagctgaaaagtgacagcactctgaaggggcacgtgtgtcccaggggagtgcgggtgctgccctcggccacacctgaggtctcaccgagcatcactctaactccagtggcc

SEQ ID NO: 27741 - DNA, 834 bp, Homo sapiens
  chr17:76992727-76993561
  hypo
cgtggtcttgagaacctttgaaggtgtaaaaagggcgtgttcccagaggctccgagagcagcagcggatacagccgaaaacatcttggagagattccccacgtctcccacaggcctctagcgataagctcttcctcctagaaactgctcagtgtgaagtgacagtaggctatgctcctggctaagggtaagggggccgcaggtcagagcaagagggagacgtgctccctcaccacatccctggcttctaggtgtgtgaattctttaccatgtgcctgtgtttgccagccaggccctgagctcccactccccacccacacctccataaaacctcagggtccagttacctttctccacggtgccgtcgccgtcggacagaatcacccagggcacggctttgctgccttcgatctggtagacgacccccgtccggtcatccacggagtagagtttcccattgaaaacaatcaggtcggatagctccatgcctctccccttctccgccaggtgggactccaggaccccatggtctttgtcccattccacggccaccttgtccccactgtctgacagggtcaggtagccctttttcaggtaactgaaccaggtgttttcctcttgggcccttgactctgtgtccaggtctgcgataactgcgattcgataccgaatcccagccggtgtcctttgtgggggagacagggggtaggtgtcattgtaccagttggcgggcgcctggccgagcctccagttgtgtgcattgtgggtggggggcctgccgggggccgggcggtgggagcagagcagccagaggatggcagcacccacaaagaac

SEQ ID NO: 27742 - DNA, 507 bp, Homo sapiens
  chr17:77002655-77003162
  hypo
cgcacagcttcagaaccctctacggtttgcagttactgccttgtaaagaggctgtgtctgcttaatttgtatcatcgatgttacacctggaggaattttagccaaaaggcgaccttctcagttgaaaggcacattccaaatggcaccacacatctgggaaggtgtccttttccagagtgtgtgaaaataacgggatgggatcatcgccccatggacctggatcagggctgccttccacaccgcggtggcacctgcacgagcccacctgcttactgccaccttctctcctcacgctttcctccaggctcggctcccgggacacaaaggccgaatcgccaggactttcactcaacccggcaacaccctcagagccattctggggggtcccagtctcacctctgccccactcccacatggtggcatcacgcactgtcttaagtcttaagccagacttcaacgccttcttcacttcccataaaaccatcccagaggaacgcggggagcagc

SEQ ID NO: 27743 - DNA, 116 bp, Homo sapiens; identical to SEQ ID NO: 10391
  chr17:77070114-77070230
  hypo

SEQ ID NO: 27744 - DNA, 377 bp, Homo sapiens; identical to SEQ ID NO: 10392
  chr17:77073688-77074065
  hypo

SEQ ID NO: 27745 - DNA, 375 bp, Homo sapiens; identical to SEQ ID NO: 10393
  chr17:77074650-77075025
  hypo

SEQ ID NO: 27746 - DNA, 822 bp, Homo sapiens
  chr17:77178580-77179402
  binary
cgcattgggtggcagcgcaggacccccgtcccctcccccaacgccccggccggccggcgggcaggcggctgctgatgctctgtgcgcacctccccacggggcatcctggggatctggtggctcagagtcgccgactttcctgcccccacccaaccccaactcgccagccggagcttcctgcgcagcccccaagattgcaaaagtctggccccagccccctccccggccagagctcctggggcctccctcgccaggcgggtggcccacctcccccgcctccccggaggcccggcgcgcggtctgcgctgcagcagagctcggcgcccccgccgccacctctgcgcgccccccggctttcccgacgctgccagggaggatgccccgctccccgccccgagtccccagcggcccggcgcgaagttccccaaagtgacccgggcgccgagaacccccgccccctcccctcgggcttccccggagactccgcccgccgccccctcccgcgccttcggaaaagttgcgagcgacgccccaaactccggcccccccgcctcgcgccgcgcgcgccctgggcgcccccgcgctcggccgccgcgcaggggcgcagttccccctaccccagccccggcgccatgacgcggggagcgcagcgggggccaccggtggcggcggcggcgcagaggcggccaagtgcggggcgtgggcggcagcgcggggcgcacgtgcgccgggccgggggccggggccgggcggggggccgcttacctgttggaggtagaggaaggcgggcgggcagggcacggagtgcgggagcatgctgcc

SEQ ID NO: 27747 - DNA, 194 bp, Homo sapiens
  chr17:80535279-80535473
  hypo
cgagcaggctcctaccccgcctgtggcccaacctgcatgcagggcgtggcgggcggccgggttaaggtctcgcagccaaagctgcggcgtgctcactgcccagtcagggcagcacctgcgtgccaggcccagccctgggttagggccccgccgggccctctgtgcataccgccgacactgcgggccaaggtctc

SEQ ID NO: 27748 - DNA, 870 bp, Homo sapiens; identical to SEQ ID NO: 22816
  chr17:8868587-8869457
  binary

SEQ ID NO: 27749 - DNA, 900 bp, Homo sapiens
  chr17:8906203-8907103
  binary
cgcatcctatcttggcccagctccactggagcccgagcggcggggcgcagggtgcgagcgggaggctggtgttctgcccgcgatgggcaggggagccgggtggccgcggggcgaggagccgcgagggccgggccggcgtgacaccacctggcggagtctcggggaagagtcttaaaggcgcgcgctcctccgtgccccgcgcactcgaacgggagccgcggagagctcgcctcccgctgccgccggcgcctcggggaggtaagtgccacccgcggatcccgagtcgcggccgggtgggggcggcccgcggctgccccgcgctcgggaagctctggctggggctgcggtcggagggcggcgcccaagttttcttgaaggcctcggagggcagctggagcggcgtagagcctgcgcggggatggcgggggtggccgcgggccggggccgtctgggggcggccatcccgggcggtgcgtggaaaagtaggcactggtgcgcggcgaggggcgcacgccagagccccagccccgcgtcctgcgcacttggcgcgctctggccgcggtcccggcgagccccagcctgctccgggccgcgaccccggctccgcgccttcctgcccgcccgggtcctttgtagcccgctggccccgcggtcgcgcacggtcacgccggcaggtcgcgctcggcggccggccaagccagccccggccctgccgcgcccgcgccccgggccaccccgcccggccccctcggcgctgcacccctcgctttccccatctccagccgctcgctattttcacacctcccggtgccccggccccggcgcctgattcagtgcttagtaattaatttggcgtttcagaatggtcagcgggctggataatgggtgcattcatccccc

SEQ ID NO: 27750 - DNA, 1472 bp, Homo sapiens
  chr18:25756638-25758110
  binary
cgcgagcttgctcggccccgaagaaggagcagaggggacccgcaatccagcccctagagccccgccaggaaaggcgcgagagacctactggccccggcaaccctgccccggcgcccggacggagcccgatgcctgcgcagctaccggccgcgcggcgcggcgcggcgcggcgtggcacctcccttcccgggtgcgcagcccggccccgcagcggcgcggggaacaaagggacccggcgccgcccgccccaccccgcccgtggcccggcccgcggggaccgccgcgtacctgaagcagggccgccagcagcggcagcagggtccgcagcgctcccgctatccggcacatggaggcggagaggggccgagcgaagagccggaggaggcggcggcggcggcggcggcggcggaggaggaggaggcagcggcagcaccaacagcggcgcggagaaacggctccaggcagtttccacccccttcccttcccctcccctccccacccccttcttcgctgctctccgctccccgccaatggagagcgagctgatgacaaatagcgggccgcggagtccgcgggactcgcaccaggagtaataaaacagacccagagatcaaggagctggggagggggcgggggaacagggagggagagcgtgtgagcgtctgcgagtgtgtggaggcggctgctgtggcagcgcaggcggctcggctccggcccggagcgcagcggaagccgcgagggatgcagcggcggggaccttggccggtggaggatgtggaggtggaagtggagcggatggcgctccccaagagctccgccacgcgaggtttcgggctcgtggttttgcttcctccgggtccccgctccagggccgctcggcgcgacgaagacgccggggacagcgccgcggggagggcgctccgggtcgtgcgtgctgcacccacaaagagcagcagtcccgccactccgcgcctccgctgcgtgggggccgaggggcgcttctcggctcctctttccggtcccccggcgagttggagactgttctccggcctcggccgcaagggggtgaggcgaggggccggcgcggtctctcccgccgcggctccgtcccgcgcagctgctgccgcagccgcccctgctgcccgcgcaccggcacccgcccgccggtcctcgccctgcgccgctcactcgcgcgcgccgccctccgtcgccgaccgcgcaccccgctcggcctccgctgcgcgacctgggcgagccgccgccgctctccccgcgctcgccccacgcgctgcctggctgcgcggcccgctcccctctcctattcctcccgccgccgccgccgccctcgcccccgcctccctcctccgccgagcctccccgcccgcgtcgtggccaatcggaggccaccaagctgcggctgtagccggccggatccgcggcagccgcccgcccccgccccgccgaagcgcccc

SEQ ID NO: 27751 - DNA, 964 bp, Homo sapiens
  chr18:2847440-2848404
  binary
cgggcggctccctctgcgggggaccgcgcgctccgcagccggcgcctcaggcagagctgactccgggggcgtgggcgcagagagcgtcccgcagacccgggcgatccgaaaacgactcccaggaattccatgagcccctgggaccatgggtgcttttctttcccgtcttggtcgggtccaggcgcgcgctctccagaggcgcacccgggcaccctccggcgtctgctcggtgaagctcccgcctccgcagagggcgacgggcccccccgaccctcgctcggtctggtgccgcagtcccctctcccctggcctcattgttctccgggtttaccccgtgcccctctccctctctctcctgcaccccaggaactggtgcgcctacatcgtgaacaagaatgtgagctgctccgtgctggagggaagtgagagttttattcaggctcagtacaactgtgcctggaaccagatgccctgtccgtcggcgctggtgtaagtcctggagccggggagcgggcggggcgcgcccgggccggggcggtgggggtggggtggggttgctgcgctgggctccagtccctccggtaaatcccttccagatccggtgaaaagcccgcagcggaaaagcgctccgagcgctcgcggggcaccggccacgctgggctatttagggagtgggtgctgcccgagtgagtggggaggatgcgcgcgcctcgggagtgtggggtcgcgggggcgtaggagaggatgaacaaagctcccactcccacttctgttttctccctttcaatgtttgtttgtaacataaggcagctgaatctaattggatccatattgtgtgttctggggcacacagaagattccaaaatgtatactgctaaagactattccgtataggattcgctgagaggtttggctaagtagtgttctaaaacgagtgagttctgtccgtatgtccccataaaac

SEQ ID NO: 27752 - DNA, 1197 bp, Homo sapiens; identical to SEQ ID NO: 22822
  chr18:44335955-44337152
  binary

SEQ ID NO: 27753 - DNA, 323 bp, Homo sapiens; identical to SEQ ID NO: 10397
  chr18:46287816-46288139
  hypo

SEQ ID NO: 27754 - DNA, 1375 bp, Homo sapiens
  chr18:53254628-53256003
  binary
cgatcaaactggtaacatccactataaaaccaaatcagggaaagaaaaaaaaaaagccgctcttcagcgcatcattttatgcaacaggaggtagagcgagaaatgaatggatcacagagaaaagagaaactactgagaacgatccgatctcaactttccccccaccctgcaccccacccccctcgcacactcacactcgcacacgcacacacactcgcacacaccactcccctccgcttttcaaagtagctatcaagaaattaaagatgagcgtctctggagtgaaaacacgtccaaagggggaggggtggggtgacagggttggggggagcggagtggagggtcgggtcctctaattgtccagcaccctaatttgtgaaagaaaggggttataaaaattaaagtcaggcccctggcaaagtcctcggtccctccgagggggcatcaaggggaggggcgggggggctggcggcgagggggagggaagcggcgggaggggaaggggtgtctcttctgggagcgccgggcgccgggagcccgcggcgcgggaggcgcggagccgcgtgcggggccgccgagcccgaaccccgcgccgccgggcgcctccgccccgccgagccccgcaggcgccggtacctaccgcccgcgcgcgagaaggggctctccgtgcaccgccggcgccgaggcggcgttcatgtctaaccgccgccgccaccgccgccgcctgctcctgcgcccgctcccgcgcctgctgcctccccgccgccgccgccgccgccgccactacagatccgcagacacacagccaagatccctgactcttaacaccaactctcttctccggggaggggaggggacggagggaaggggggagggggaaacacgccgaggcgcacggaattgcaagttcagcaaagaaatgggtgggggggctccggcggggagacgcgacttgctccgggtcgggcaggctaggatgcatccccctcgcacccaccccgaggggaaaaaaaaaaaatctcaacacctcccccgcctcgccaaaaaatacaaacgaaaattcatcgagcacctcatttttcctcagatcgtcagttacaatctgaagcctgaacagttcagtttttgcccgttgcatccctcggaggcactttgaaatttattcgagtttacatcccctcacttctttctttctcttactctcgttccctctcactcacacatccacacacggcaaagcaagtttatactaggctgcaaatacacgtgatgcaaaaagactttgccaagaggaacaatatttttctttttcgtctataaatcaagccacattttcctggggagattttcgtttcggtagttttgcgttgggggc

SEQ ID NO: 27755 - DNA, 1113 bp, Homo sapiens; identical to SEQ ID NO: 25301
  chr18:53446783-53447896
  hyper

SEQ ID NO: 27756 - DNA, 1413 bp, Homo sapiens
  chr18:7567478-7568891
  binary
cgggtcccgggcaggggaaggggagaggcggcgagctcagcaaccggaaccgagggaagattttggctccgcgggctcgccctccgctccctctgccagcggcgccagacgccgagtggggccagggacaggggaggaggacccaggaccctgtgcccgcgcccctggagccgctggagttcggacttctgcaactgttggcactttgggggcttggcttagcgctctgctgtttacccgtctctcctcgctgcctcggaaccaaagctcccggccccctccgccctcgcgcgcccacccaccgccgccggggagcggcccggcccgcactcagcaccatgaggggacttgggacttgcctggcgactttggccggacttttgctaactgcggcgggcgagacgttctcaggtaagcgggaccgcctctgccgcccccgaggcgcgcgggccggcgcgggacgcccgggacgccgacagctccctggtggtagagccctaaggctggcgtcggggccgggcggggggcgcggcgggccggacaccgcttctgcctgtgagccgggcgctgggcgaggggccgtggggctggcaggcacccagtcctcgggcgggcggagcggacggaccccgagggcgagctccccagccgggactgccagctcggccgccgtccttccgcggcctgggctagtgctcaaggttgggcggcttgcactcttgagtccctggccggctgcaaaaggaacagcagaaaactttgcttgaagttcccagttgcagccgccgggccgcctggcgtaggcgctgcgcggtccccgccgaccccgagcagcggccgggcccaggccgctggtgttcggctgcgcccgcagcgatcgccgggaactggcggccgctccggcggcggcgatctcccggtgccctgccctccctgtcgccccctgcccggcgcggctggcgaccccgggaggtccccgcggtcgtgcagcgtctgcggagaggctggggggagttcctcgccggtcccagcggtagggcttggcggccgcggagggaagcgggcaggtccccaggccctggccacggccctgcgccccgctgggctccccctccccaccctcgtccccctagcggagcgccgcggccagctgcaacttgttcatccagcccggctgcccgggggtcccaggtgggaaggagaggcactggcggtgtgcgagcaagcgtgtgagtgtgtgcgcgtgtgtgcctgcacgcgcgcgcgggggcgttctaagcccagaggaacccctcacggagaggatctgtggatcggagtcgggggtccggcgtgggggcgaacccggcacgctgtcacaggggtttacaaccaggatgacctttattacctgggtgacacaggtggatagac

SEQ ID NO: 27757 - DNA, 1173 bp, Homo sapiens; identical to SEQ ID NO: 25316
  chr19:1004547-1005720
  hypo

SEQ ID NO: 27758 - DNA, 818 bp, Homo sapiens
  chr19:10400300-10401118
  binary
cggggctcggagtccagcttattatcatggcatctcagccagggctggggtaggggtttgggaagggcaacccagcatcccccgatcccagagtcgcggccggggatgacgcgagagagcgtggtcgcccccagaaggccctgggccatcatgccggcctccacgtagaccccaggggtcgctcactcctgccagctcgccttcaccaaggccaggagcttagcgcacgctcgcctcccgcccccccgccgcctctgccgccgccccctccttggaaaccaagttaccaacgttaaaccaatccccaagcgcaactctgcctcccccacaccccacccgccgcgccgcgcggagccgtcctctagcccagctcctcggctcgcgctctcctcgcctcctgtgctttccccgccgcggcgatgccagggccttcgccagggctgcgccgggcgctactcggcctctgggctgctctgggcctggggctcttcggcctctcaggtaagagccccgctctggttcggggtggacagggcgggggcggagtccctggacctgagaaacggcctcctgtccctcccagctctgccctcgcctcgctcccacgcctctgcccccacctcgagcctgagtcttctccccttccccctcctccccaacacacacccgagccccagcttcctgactcctcgatagcccctacccgcttcgagatcctaggtgttcttccgcacccaacccttcgccctggagacccagtgtctctcctgtccgctccccgggtacctccttacgctgtgctgtgcaccatggtccac

SEQ ID NO: 27759 - DNA, 987 bp, Homo sapiens
  chr19:10530654-10531641
  binary
cgacactgaaaacacagacaaccctcggaagaggccacgtgcgcgcacatcccgccccgggcccgcaccatcactatcctccgacgcacagacaggagatcccacacactctgccgccgcccgctgcaggtaccgcgccggtggcactaggaccactcctcaaaaactgccccccgccaggggtagcggcgaggacacgccaacaccggactccgccctcgccatgatggaccgactgactgacactctggcaaccagtccggtgtctgcttccagatcggattaaccgtttaactccttcgtgcctgtgcgcgccgcggccaagcagggtgctttgaagacagacgagttccagcgccccctcccagcccggagcggggatctgcgtgggcgggaagggcccccctccttaggtagctgccccccgctggcccggacggaggaggaggggggcggcgctgacagccgcggcgggcggggggcggggaggggcgggacggggcggaggagccggggctggcgccgagcgggccgcggaacgcggagcgcggagcgcggagagcgccgccgggcactgagcagagctccaggcgccgaaaggaagctgcagagcccggcccgggggcgattggcccgcagcgcccccgggtctgtccccggggcgccatggccctaccgcggccgggcgcacccgcggggccctgggctcgctggcttgcgcgcagctgagcggggtgtaggttggaagggccagggccccctggggcgcaagtgggggccggcgccatggaacccccgaccgtcccctcggaaaggagcctgtctctgtcactgcccgggccccgggagggccaggccaccctgaagcctcccccgcagcacctgtggcggcagcctcggacccccatccgtatccagcagcgcggctactccgacagcgcggagcgcgccgagcgggagcggcagccgcaccggcccatagagcgc

SEQ ID NO: 27760 - DNA, 637 bp, Homo sapiens
  chr19:10823276-10823913
  hypo
cgactgcgtcttccccacacggacagcggtgaggctctggcagaaggaggtcagggcgggagacgggtgggggactagggaggcaaggttaggggtggggggtggggagaatgaagccctgggtgacgcccctttccctgcccttcctctcccacagcgctttggctctgccctggtgcccactgggaacctgcagttgaggaagaaggtgtttgagaaggacttcggccccatagacccggagtgcacctgccccacgtgccaaaagtaggcaggatggcactgggagctggggcagggcatggaggggacagggcctggccgtgctgagctgtcccctgccgctctacaggcacagccgcgccttcctgcacgcactgctgcacagtgacaacacggccgcgctgcaccacctcacggtccacaacatcgcctaccaggtgagccagtgcccggggcaaggtgggcgggggtgtcctaggtgcgtatgccccacgctgacctcccctccccgcagctgcagctcatgagcgccgtccgcaccagcatcgtggagaagcgcttcccggacttcgtgcgggacttcatgggcgccatgtacggggatcccaccctctgtcccacctgggccactgac

SEQ ID NO: 27761 - DNA, 183 bp, Homo sapiens
  chr19:10872413-10872596
  hypo
cgccagctctcagcttggcctcccaagactcctcactttcgtcctctggccccgcccaacctggcaagaaggcgtgtctccagtgagagacagcagccgatgggcccaccacctcttctttatgagctctgctatttcgtacgccaccgatgggccaatgggctgccacctctgggttcaggc

SEQ ID NO: 27762 - DNA, 763 bp, Homo sapiens
  chr19:11592879-11593642
  binary
cgttcctgcacgccctttaggctccagactgtcagagagcgccaccagcgaggagagcctaatttgcccaatcaggggcggcccttgagataaccagttactggaagatgccctagagatcgagccaatgggagtgcgcgcaccaggggatgctgccacgcctggaaagggcaggccaatcgcagtggcccgcgcaataggggcggtggcggtgcagatccccgggtggcccctcttgggctcgccggggcgacctggctgcgggcgctaggggccccaagcgatggtctgttccccaccccgtgttcctcccggtttccgtcatcggaaactgagctaggaggggggctgctcctgggcgcgcggaccccgctgcggttcccatggaaacctgccggctccggcagtgcggggagagtggaggggacctgcctcgcggggggagggagctcgcgggggcggccccagcggccggactcgctcatccttgccgattcttctgtccccggctggggtagccccccggtccgcagcaggaactgaggcatagctggggccccgcctcatcccccgaactggtgaggaaccggcggggccaatctgcgcgtggcgccacagggctcccccgggcacgtgcctgagctcgcggctgcggtccccagggtcacgtggctgcggccaccagggcctacgcgcctcgcacgccacctagcggccgcgcctcgctccccgcccctctctctagcggcccgcaggaggcggc

SEQ ID NO: 27763 - DNA, 644 bp, Homo sapiens; identical to SEQ ID NO: 23132
  chr19:12203028-12203672
  hyper

SEQ ID NO: 27764 - DNA, 905 bp, Homo sapiens
  chr19:12266891-12267796
  binary
cgaatttctgggctgaagcaatccccccgcctcaacctgccaggcgtgacccactgcgcctggccttcaatttagtttttcaggaaaaaaggggggactggggaccccgcagcccaccgctcctcccacacgaaccacacacccgaggcaggattgcctccatgaccctcccgtggtctccgcacaatctggggagacgcgggactacgggcgcggagctccccagagagggctccggggccggggccagggccggggtcgcagtcgcagcgcagagacgggacaggacgcctggggtcccggctgccggcccaaccccaccctgcggccgaagggaccgagggccgagctacgccagggggactccgctctgcagacccgaagtcgctgcaggaaggcctgggtcctgctagagccggttcgagccggttcctcccggcccctcccccgtctcgggacccccggccccgcacactcaccatttcccggcttccaggtgtcctggcctcctctccacggatccctctaacagtccagtcacagtgcgggcgatggagcgacagaagctatggcggaggcacctggtccctctcggggccggaaaaccgagatcccgacctccctttggtgcaagacgcctgggagtcaggaaagcgggaatgcggcctccccttccccggatggacagttggcaggaccccgccccagcgcccctgattggatgaggctccagtccccgtcccatcggtcctgagtgacagcggaagccctgggtaacaaggcccggcagaaccgaaatgacctgttccaaccacagattatctaagcgagctccctccctgcgtcttgctctttgggtatttgcatttcagccaaatttgctccgaattgctagagggggtacc

SEQ ID NO: 27765 - DNA, 572 bp, Homo sapiens
  chr19:1449921-1450493
  binary
cggggcacccccttccctcgggggggtttcgccccccgcactcacggcccctgagcccgcgcggaggcccgacgccccgcggccgacgccggtccccgccccgggccgccattggctgttgccatggcaccagcccgtcttcccgcgccctcattggctgtctcacccgcatccctcatcccgcatcctcccccgctcgcggtggtctcgcccagcgctaggagcggcagcgccgcctgcccaggcccggaccgggctttgtccgccccggagcccctgcccgcgccgcggagaccccggagcccgcgcgctccgaggccaccccgggccgggatttccggtggggcccgcggagccgcgcagagggaggaggccccagacccaggcgccccgccagcccagctgcacgtaagcgggtgtgtgtcctcggggaggagggcaggggcgcgacctccgcctcgcgtcgaggtttccatccctggctctcagcattgcccgtcagcacagactctggaccctccatttccccagagtgggagctggaggggaaactgagtcccggtgagctgggc

SEQ ID NO: 27766 - DNA, 361 bp, Homo sapiens
  chr19:15292270-15292631
  hypo
cgcagtgggtaccaagctgaggactcccccaagtcgttgctgtccccacttcgtcccaggtcccaggccccatcccaagccagagtccctgctctccaagcagaggccccgcccacctggggctgcagtcgggcaggtcctgttcgcagtggaagcctccgtagcctggcgggcaggtgcaggtgaaggaggccacgtggtcggtacaggtgcccgggccgcaggggttgctcaggcactcatccacatcgcgggcgcatcgtgggccggcgaaaccagggaggcaggagcaggaaaaggagcccacgccgtcttggcacgagccaccgttcaggcatgggtctgcggacaggaggaaggc

SEQ ID NO: 27767 - DNA, 376 bp, Homo sapiens; identical to SEQ ID NO: 7082
  chr19:17172577-17172953
  hypo

SEQ ID NO: 27768 - DNA, 719 bp, Homo sapiens
  chr19:17392397-17393116
  binary
cgtagctccacccactcgagccgggtgccttcgcgtttcccgtttttaaatgagatagtggcacacccggtggcatcctcccacccgggctcttatcggcggtcccagaccctgcttgagcgcctccgggtgtcaagggcccctgaggacactaaagctctcgaaccccgatgtggacccccgtgcggcgcggggcagcctggctgggaaccctgctcggccctggagaggggccccccgagccgaggggaggagcggcgcatgcccacaagccccccgcgggaagtaggaaatcgaccgaccaggcggtgcgcttcggacccagccagggcatgtgctcggaggcccgcctggctcgcaggttgcgggatgcgctgcgggaggaggagccgtggtgagggcggggccgggggcgggccaggagtgggggtctttggccggggtccactctgaccgcggtgtttgcagggcagtagaggagctgctgcgctgcggcgcggaccctaatttggtgctagaggacggcgcagcggctgtgcacttggcggccggagcccggcacccgcgcggcctgcgttgcctcggggccctactgcgccaaggcggggaccccaacgctcggtaagatagagcctgggtccggggcggggtctccccaagccgaagtctgggaatccgggaaggggcgccccatcatcccgggccaggcctcggggctc

SEQ ID NO: 27769 - DNA, 1931 bp, Homo sapiens
  chr19:1753216-1755147
  binary
cgcgaaatcggagactctgggtcgaggcccccagccccacctgggcagagtctgtcctcggacccccgcccgctgtcccccgggtacggcctgccccagcgggcgcgggcgggcgcagtggccagggacgccgaagccccaagtctggccgacttcggcctgcttggtgctcgagtggggccggggcgggcggagagcgaggctgcgggaggcagcggtggcaggagcgggtgggcgggggcgctgacgtcagacccgggcccgggcgccggcggccgctcccctgccacatcctggtggccgcgctcgcagccgggccgggccgtgcgccgcgcagcctggcagcctcgcgcgcagccaccggggagcgggcgggagtcatgcagcggccttgagcactaggggccggcgctgaggagcgcgcgcggcgggagggcagccgagcatggagctgagcctggagagcctggggggcctgcacagcgtggcccacgcgcaggcgggcgagctgctgagcccgggccacgcgcgctcggcggcggcgcagcaccgcggcctggtggcgcccgggcgcccgggcctggtggccggcatggcgagcctgctggacggcggcggcggcggcggcggtgggggcgccgggggcgcgggcggcgcgggcagcgcgggcggcggcgcggacttccgcggggaactggcgggcccgctgcacccggcaatgggcatggcctgcgaggcgccgggcctgggcggcacctacacgacgctcacgcccctgcagcacctgccgccgctcgcggccgtggccgacaagttccaccagcacgcggcggccgcggccgtggccggggcgcacggcggccatccccacgcgcacccgcacccggcggccgcgccgcccccgccacccccgccgcagcgtctggcggccagcgtgagcggcagcttcaccctcatgcgcgacgagcgggcggcgctcgcctccgtgggccacctctacggaccctacggcaaggagctgcccgccatggggtcgccgctgtcgccgctgcccaacgcgctgccgcccgcgctgcacggcgccccgcagcccccgccgccgccaccacccccgccgctggccgcctacggcccgccaggccacctggctggggacaagctgctgccgcccgccgccttcgagccgcacgccgcgctgctgggacgcgcggaggacgcactggcccgcgggctgcccggaggcggcggcggcacaggcagcggcggagcgggcagcgggagcgccgcggggctgctggcgccgctgggcgggctggcggcggccggggcgcacgggccgcacgggggaggcggcggccccggcgggagcggcggcggccccagcgcgggcgcagcggccgaggagatcaacaccaaggaggtggcgcagcgcatcacggcggagctgaagcgctacagcatcccgcaggcaatcttcgcgcagcggatcctgtgtcgctctcagggcacgctctccgacctgctgcgcaaccccaagccgtggagcaagctcaaatccggccgcgagaccttccgcaggatgtggaagtggctgcaggagccagagttccagcgcatgtcggcgctgcgcttggcaggtaggagcgtggcgcgcagggccagaccctgggggcgccggctctggactcccgagcacctagcggggcggcggccgatgcccggggccagcgccccaagccccgcccgtgcgccccggcagcccgggaccccctatcaggaagctagaccgcgatccgcgccgctgcccgtttgtaccgttgccaaaagggagaaagggattgtgccgcctccccgccccccggtcgccgcttctgcccctttcgggagcgcgtaggggttctctagtccttgttagactgctgggaggctcc

SEQ ID NO: 27770 - DNA, 1116 bp, Homo sapiens
  chr19:1757112-1758228
  hyper
cgcaggcgagaagtcccatggggggggggtgggctccccgcagccgggtcagcagcacccagcacccgccctgagtggacaccgcctgcttcgcctgcacctgaccctgcacccaggtgggtgttcgctcctgccgaccccacagccatccaggcctccgccgtcccctttctgccacggggagagttgcagatggggaaacaggctccgtttgtgcctcgccttcctgacttgtgacaatgacaaacagtctcagctctgggagtctgggtttcctgtcgaggaagggagagttagaacagtcgccgtctcaggggtgcgtgggggaaccggaggggtgagcgcagctcctggcaccccgagcctcccgcagggcgctggggcgttgaggatgataaacccggaccacgctgcccgcctgctctctgccgggtccgctgcccacgccgtggccccgccgcgcggccccgcggccgcggggttcacgccgtcaaccttgcgcacctgtcgcgtctcaggtgccctgggggccgcgtctacaccaccggactccgcctggggcgtaagaggtggcgggggcgagggccgcggggtcactaggctccggcccaggcctttagttccggtcgctgcgcaaatgaaaagcggttaagtggcggcaaatcgcggcggttagggggagacggccggatgcgtccccatctccacctaacacggcgacgccccaacgctggtgctcggaaagggaactctgcccccgccccgcccccgcaccatttcaaccccgcagcagaggactcgccgccctttctactccggcatccccattccccgctccgcgagcaccgcgggcctccccaggcctcctccaaggagaactttgcgccccgggtctcccgtcgcgcttgcccggctcggggcgggccacgcgtttccgcaggtgccgagtgtcctgccgggcgccggggccaggacagagacggggacagggagggagaaagacccgcaggtgcagacggagagggagggggagacggggagatggagagagagggaggggtcgcgagacaaaaccagagagtggggagggagagaccgggagcgggagaaacagac

SEQ ID NO: 27771 - DNA, 500 bp, Homo sapiens; identical to SEQ ID NO: 24139
  chr19:18117804-18118304
  binary

SEQ ID NO: 27772 - DNA, 593 bp, Homo sapiens; identical to SEQ ID NO: 23550
  chr19:18989674-18990267
  hypo

SEQ ID NO: 27773 - DNA, 152 bp, Homo sapiens
  chr19:19042719-19042871
  hypo
cgaggcgcggtctccacagttgcccgggccaggtgggggtctctcggagggaggggtgccctcacccgctgccgcagccgctcggcctctgcacgctgagcctccagctgctgcctccactgggctgcggcggcgttggcctctcgcagggc

SEQ ID NO: 27774 - DNA, 1106 bp, Homo sapiens
  chr19:1969650-1970756
  hypo
cgcccgcccaccggccgcagtgatgttctagccacagaggagccaagacctcaggtttccagagacttgggatttgcacggcagcagagtcaccgtggagaggccagggtatcacaaacttatggattttgacaagaaaggagggaaaggggagacggaggagggccggagaatgtccaaggccggcgggggccggagcagccacggcatccggagctcggggaccagctcgggggtcctgatggtgggccccaacttccgcgtcggcaagaagatcggctgcggcaacttcggggagctccgcctaggtgaggccctgctcggtggtaggtggggtcgggaggctgctggcagggccgccccgagtcaccggagcctctggtggggccgcccggggtcactggagcctctggcggggccgccccatgtcactggcaggtgcgttgaatcatcagtccgtcgtggtgcgagtgccacttcccttcgaggaggttctgtggggagagtgggtttctggccctgtcaccttttcgggaaacagttctgttgggaggcaggtggcccagagcaggccaggccacgccgcaaggagcccgatgttaagttgtgaatgactttcatggcccatgtgcacgctgggcgaagccccggctttaacggcaggtgcctgcccggcactcagctcgtgggaggtcttggccagcccggagctggcgtcaggtggctggagtgactgttctgtggtgatgatactgctgtgtgccactcccagcttcaccatgtaaaaggccgcacctggcccacctggctccgtcccttctgctcacaccaacctctcccgggtcggggtctgattgcccgggcaggcgtgaggagcagggccgaggactgagcctctcattggccaggggtgccttccctggggtgggggtgcctgaagatgaccatcaggcctgggggagctctgagcacctttggggccgttcccagtctgtgattagctgggccagggagctgaatcatccccggaaatgtggttaaatttattgctggtgctgccggagctcctgcgggagggcatttggcgtctgttgctggggttgtcc

SEQ ID NO: 27775 - DNA, 293 bp, Homo sapiens; identical to SEQ ID NO: 23138
  chr19:22018435-22018728
  hyper

SEQ ID NO: 27776 - DNA, 630 bp, Homo sapiens; identical to SEQ ID NO: 26596
  chr19:22034394-22035024
  hyper

SEQ ID NO: 27777 - DNA, 1363 bp, Homo sapiens
  chr19:2289696-2291059
  binary
cgggttggtagacgggagcccatccccccatccttgcagcccgcacccccaccccccagctcagccaccatagcagggacaggaagacgggttgaaatctttagaaaacgcttgagaaactgcaaaaaagacgcatgctgatgaaaaacagtcctgcggttgggcgtctacaaaaaaaggggaagttctgcctggggagcgccgtgcagccgtccccttcccctccgggaaatgcataggtggacacgcgagcggccggcccgcgggggaggggaggggagggtccgccctggggacccctcagatcatcttcatgttgaacttgcgcgcgcctccctggcccgccgcggcggccggcccatccaccttgcggaaggagtactccaccgagaagttgtttttgtgctgcccgcggccgcggctccacacgaacagcagcacgaagcagaagaggaccacgcccaggaaggtgatgcagcccatggcggtggacaccaggatggtggtgaggtcgagcggcgcgcgcagggccgccagcgtctcgttgtgggcctcgcccggggtccggttggcggccggctcggggcgcacggtcagcgtggcgaagtaggtgtcgttgccgcccgcgttgctggccacgcacgtgtaggtgccgctgtcctgcggccgcgcgtcctggatctccagcgtccccccggggagcacgcgcgcccggcccgcgctggtggccgtcaccggccggtgctggggggtcacccaggccacggtgggcgccggctcgccctcggcgcggcagaggaagcggacgtcttcgcccgcggtggccgtgacgcgctgcagccgccgctcccggatcttgggtttgcggcacacgaagtactcgaacagcacggagtccggcaggtttcgcagcgcgtcgccgcgcacctcggccggggtggcgcaggccggcagccgcccgtcgaagttgagggtcttgcgacgctgcacgatccacagcaggcgacagtcgcaggccagcgggttcccgtccacgcgcagcgtctctagcgtgttcaccgagtggaaggtgctctcctccaacgtggagagcaggttgttggagaggttgagcaggcggatctggcgcaggcccaggaaggcctgcggctccaccacagccagcagggccccggccaggtgcagctcgcgcaggcggaccaggtcccggaacgacccccgcggcaccgtgctgatggggttgtgcgacagattgaggcaggtgaggtgcgcctggtgccgcagcgcggcggccggcacggcggtgatgttggtgtgggtgaccgacagcgaggtcaggttcaggccccgcaggctgcccgcc

SEQ ID NO: 27778 - DNA, 3146 bp, Homo sapiens
  chr19:30015587-30018733
  binary
cgaggaaactgaaaggcaggcactggaggcaagaagggctggccccgggcacccgctggcgaggacagccttggagagggcctgcagctcctcccctctgagctgtgctgcgctggccgcctggaccagggtggctgctggagagtgttttccctctgggtttccttctccttggctcccagggaatcctctggcggtgcctccgggaggctggtagccggggaagcaggcacgtgaatccaccgggctgccccaccccaacctgaggtcagagctgaggcgtaggggccggggtaggggcagaggtgccgaaacgcactagctggggactcccgggggaaggagataggagagacccaaggcgagccttaggactcgcccctatgactatgactacgcgctgcgtccgaaccacatgtccaccccgcatttgccttcggggaccagaccgcgctccctcagatggctggggagggagcagactccgggtgaaggctgggggaggtaccgggatgccgagtacgccagagcaggcgggggatgggttccggcttcctgccgcctcggcatctcgctttgcaccgggcaaagaaggggccacgaccggcgaagagcgcgtggagacacagggacccgcgatccaggggcaggaaccccgccccctcccggaaacctcccgggccctgagtcgtgcccggcgctccccaccccaccccacccccgccgcccctgccgtcactcacggccgctgcgggctggctagcgtgtgcgctctccgcgccgcaggcacctgctcgctgggcgctgtgcgctcacttctccctcgcgcactgcagactcccggcgctgccgccgccacccagcgtagtctccggctgggcacagcgttccgcccttctcgcggccccgggcgcccacccatccgtcatggcccaggcctgggccaaacagcggggcagctggttgcccaaactggggtaaggagttgagggctgggagctgcagagaggaccgagggacacacggggagcagggatgagcggccgtctcgagccgtgcagactgggaagaagccagggagagtttgggtgggaggactcccaacccaagcgggtgcggggcggggctgtactccaaccagaaagacggtggtccctccgagcgacccccgaggagagagggggagcgctctggggcgggggcggggcgggctgtggcaggagaggggagggcgggggcgatgcagcggtggaggcggcttggcgcccagccactgaccgccccctcccttcccctcccctccccctctccccgcctctctccggctccgggtccgccacgccggacccgctctccccgcgctgcgctgggtcggacgccaggtctgcgcgccgcggctgagcgcccactcgccctgcggaaagagccgcggaggaaccggcgggggcggctgcgggagccgaaggaggtggcaatcgggagcagaaccagaaggagacagggaggcagaagctcgcggctccgtggcacgcactccctcggccagggatgggtcccggcgcggcccagcccctgcccggcccgccgggcagagactgaaccgcggatccccaccgtcctgtggacgaccggacagagagaggcactgaccgatcgccagcagcctcccggtgggaccgcgtctcctgcacaccccgcgcagcgccccccgccggagccgcaccgggcaagccggcgagggagcggggctgattggcggccgccggcggccaggggagggggcgccgcgcggggccatggcaggctcggaggcgtcctagcccgagccggagccgatccgagcccacgcggccgccgcctctccgctcccgggcccccgccgccaccgcgccccccgcgggagatggaacagcggaaccggctcggtgccctcggatacctgccgcctctgctgctgcatgccctgctgctcttcgtggccgacggtgagcgcgggaactttgctgccgctgtggactcgggggggtctttgctggggccgccaccgagaagaagaagaaagagaacgaaccgggaagcttcgcggtctccagcaatcccgctgtgcagcctgggcccggaggggtagggagaggcgagcggcgaagggtcgccgcagcagcagcgccgcgcccgagtcgttcccagtcccgccggggccccggctgcggaaaggatgcctgcggggagcgggagtaggcgcgccccagccaggctctggcggtgcggccaggggcgggggagaagcacgagtcgcccctgccgccccgccccatccggagggaagcagtaggcagccgatggccggtccctgcctcggccctgcagccgcttccccgaactttgctagcccctccggccgtgcgccagggagcagctgcggggtggggggcacaaggccagccagccagagaccgactgcctcgctttaggttgccccaggcccccgacctacagctggtcacgcctctctctctctccccacccccagctgcattcacagaagtccccaaagatgtgacagtacgggagggagacgacatcgaaatgccctgcgcgttccgggccagcggagccacctcgtattcgctggagattcagtggtggtacctcaaggagccaccccgggagctgctgcacgagctggcgctcagcgtgccgggcgcccggagcaaggtaacccgccgcccacgcggtaccggcgcgcgcccggctcgcgcccggggcggcgaaggctaacccagggagggaagcagcgggcttcactcgcgcagggcgccgccctgtggcgcagcccatcttccaccttcgcatcccaaagcatcttcaaagtcagcagtggttacccccaaacctgtcaattattttgacagcatcgctgttcccaccacctcccagaactccattcacgcccagcccctaaagagccacacctcagcctggtcgcttgctcgtgctcgctggctgcggccctctgatgggtgctgggtagtgaaggaagcccccttggtcccatcaggctctccccgccctctgccactttgaggaccccagggctcccacggctgcgttccagaggccaccagaaaaccgagtaccggaaagcc

SEQ ID NO: 27779 - DNA, 199 bp, Homo sapiens; identical to SEQ ID NO: 24150
  chr19:3219527-3219726
  hypo

SEQ ID NO: 27780 - DNA, 860 bp, Homo sapiens
  chr19:34972926-34973786
  hyper
cgggctggccctgcgggagctggagcccgggtgcggctctcccggtcgggggcggcgggggccgcggcctgggcctggagacgaggcggcgcccgcgctgggccgcagagggaagggcagcggcggccccgaggccggggcggacggactgagccgcggggagcggggtccccggcgcgcggcggttccggagctcagcgcgcagcctgcgggcagcccacgggccagcctggcggggtccgacggcggcggcggtggcggcagcgcccgatccagcggcatcagcctgggctacgaccagcgccacggcagcccgcgctccggtcgctcggacccgcgtcccggtcccgggccgccttcggtgggcagcgcccgctccagcgtttccagcctcggctcccggggctcggccggcgcctacgctgacttcctcccgcccggcgcctgccccgcgcccgctcgctccccggagcctgcggggccggctcccttcccgctgcctgcactcccgctgccccctggccgggagggcggcccaagcgcggccgagcggcggctggaggcgctcacccgggagctggagcgggcgctcgaggcgcgcacggcgcgggactacttcggtgagctcgctcggcccggcagttccctgcgcgcatggctggggtccggggttccgagactgcctcgggtaggcggccggatcagcggaggagagcacggggctggctgggggtgcagcagtgcacggggttgggacgaggaaggtgcatcccctggggactggggagcgcaaagggtgagtgagtgcgcctggatccccagcagcggcttcacccctgcctctgggtcccccgacacac

SEQ ID NO: 27781 - DNA, 704 bp, Homo sapiens
  chr19:36449871-36450575
  hyper
cgacggacgtctgtgttttatgtttccagggctgccgcttcatcacggctttctcggaaaacgggggcgctgagaagcccaacttccagctatatatgtcgccaccgcccacagggcccccgacggcgatgctggtgacagcgctccctgcgtgggcgccactctccccgtgctccccgcgcctgcagccaggcacgacggtgtgggtgtgcccgcccggggcagaggagctgcagggctcgcggcaggcggcgctgtgcaagcagcgacgtcgcggcccgaggaagtggaggcggtgaacgcgcgtgggcgcgcctcccgggacacggcgctggctctgcggcgctacctgctgggcactccctaatcgatggtgacgccgtcgctgccgcccggcgaccggcacaaggagtttgcggtggtggcgggcgctgggcccacgctcttgaggcgcctcaagccccctaagcctgttctgctggaccgcgtaggccaccctgcccgctggccccatccattgagccttgaaggcttccagaggcgctgcagttgcagagagcaggagacctatccggcacccgcgtcgtggccgcccatcctgtcgcgctgctggctggcctcagttgtctgcaagcgagaagcaaggcctgtggccacgcgtttggacgaccgccgccccagggtcgctggagtggtctccacac

SEQ ID NO: 27782 - DNA, 794 bp, Homo sapiens
  chr19:36822257-36823051
  hyper
cgggtcactccctcccaggcgtgcaacaaaacacctgcctagaaatcaaaaggcgttttacccgagtgggctgaaaaagccccgtttttacctttaatctggagacaatacgggtcagaggtcaggaaactacatcagcgccagtgcgagcgcccacgagtccggtggacggatgagaaacggccggggggcagcctgagtcccagttcccgccgtggcaatggccaatttcccacccgtggacgcaaaaggccaggactccacgctgctgaccctccagcgtcccatgtccggcaggcacgtggccgaatagcccaagactgaggactcacacttcccactttgcacctggaggccacctgcagaccaaccttgcgccaggcttccggaaatgggagggcgggcttccggaaacggcggccaatgggaaacgtgatcagatgttactaggcagacagtccgtttccaggcaacacagaagaaaggaacgcgctcagtcagcctcaaatagacggagatttcagccaatggatgtgcaggttccctccacattagccaataagaagtgcttggggcctacctgcctacaagcacagcaaaagctttcctgcgcatttttgcgctggaatggctacctgccgcgccaaatcaaaatttacaatcacccttggtgctgtttcctgcactttcttggagatttgcaccaggcgctggagaccctcccacctggcccatgcctgccacccggtgaacaccaagacccaaccttctgcaccaccagtcttgttgtcagc

SEQ ID NO: 27783 - DNA, 856 bp, Homo sapiens; identical to SEQ ID NO: 22832
  chr19:36909065-36909921
  binary

SEQ ID NO: 27784 - DNA, 1065 bp, Homo sapiens
  chr19:37095634-37096699
  hyper
cgctgtcacaggatcactgataacagcatgacacattcatagtcaccgctcagcgccgtcacacaaacggccccgcccccactcagtcccgcgggcccaatcggggacagtcagggctgtcccgggctgtgcacctgctgtgcacacacaccccctgctgtgcacaccccccgcccccccgggaccatcacaggcgcgcccactcacaccaccacacacggacgcagccacagaacggcacacacaaacacaatcacacagtctccctccccagcaggtgacttgcacacaggcctggggcttctgcctccacaaaccctctccgcgtcccatgaacccaggtcccctgccgtgagctcttctcgcatccagacccgggtcacctcaactcaccacatggaaaacgaacaccaggtcaacggaaaagggagccggggtcctggcagaagcgtagtgccagccgcaatagggcggccgtgggtgcaaacggaggggagcgccggcagctagcaccgcgcggcgactaacgggccgccccggagactcctgggagctcaggcccacgcgcgagtgcgcaggcgcagacgactcaccctgggccgggggtgaggcttggtgggtgccaggggtgctgaggaggccaaggagggcactgggagctccgttccgggagagctgtctaaggacgcggaaccgggtggggaggccagggaggtaaccaagagtccgagccgggcctggaaattctgaggaggaaaccgggaccgcggtatccagacgctccgatctgtacgagccgggcctcgggcgtggtccatgggcgtgaccttgagggtgacccggagcgagctccgcgaagggggattttgcccgttctgatcccgcggaagcgccatcgctggcggcgggtccccgcgcggagcgggcgctgtgtgttcgcgcgcgcgggcgcgcgctgaataggggtggcctcctgcgcccaacctgctgcattttaggtgcttgcctctctttgggatgttgtggccgattgtgtgtgaaaagtgaacggagtagtgttgctgc

SEQ ID NO: 27785 - DNA, 604 bp, Homo sapiens; identical to SEQ ID NO: 23149
  chr19:37288206-37288810
  hyper

SEQ ID NO: 27786 - DNA, 799 bp, Homo sapiens; identical to SEQ ID NO: 23153
  chr19:37463952-37464751
  hyper

SEQ ID NO: 27787 - DNA, 828 bp, Homo sapiens
  chr19:3785511-3786339
  binary
cgaccgctagtggctgggaagtgggcggtgctggggggtgagtctcggcccctccaagatgcgcctcccatgaaatcctccagtcccacgtgtactcacacgcatacggatgcatgcacacgcacagaaacacacagggctcggacacagctgcgcgcagacaagcaaaggaccacgtccacgtggaaacaggtgtgcgcacacgtccccgcgcatccgcgcgcacaagcgctccacacctgggaacgtgcgcacctgtcccccgcccccggcacacacacagccgccccacactggaacacctgggcgccagcgccgggccactcgggcacgcagggcgctacgcagggccgcgcacacgcttttcggccacacgcgcacagccctccacgtggacgcgcgggtacacacgcccggggctcgtagccgcgcacacccgcacccaggaaaccccagccaccaccacgcggggtccgatcgcctctgagcaccctccgccccagccgcgcacccgctgcgcgcccgggacgcgcacactcgcgcacacaccggcccttcctgcgcacgtcccgggcccacccccgcctagagccctcggggtttccccccaccccggcctcggggtctctccacgtctccccgccgacgtgctcacctgctcagggggcgcccccgagccgcgccccgcgcccgcccccaggagggcctccgcgagccggctgcacaccccgaggcggtcccggctgcacaacttggagcgagttgctccgtttcctcattttgggggcgaagaagggtcggggagtgggggaaagcgggaggcgccgc

SEQ ID NO: 27788 - DNA, 485 bp, Homo sapiens
  chr19:39151314-39151799
  hypo
cgcgagccaccatgcccgacccatggactcacttgtataatcttgtgaagcaggtgttgttacccttacatgcagaaatggatccatgggcctttaagccacttgcccctgtgacagtgccaggatttgaatgtagaagttgaggctttcaagtttatgctgttatttctacactacactgaagtctagtgattgggaatggctttgcgagcgggtggtgaggggaggagtgtgcagtgcaggtacttcagatggagaggaaggtctcaaagaggtggcatttcagctgttccttaacggatgagaaagagagaaccaagagagcaccagaggaacgcgcttccaacagagaaaaccaagcaagggggcccccgaggagcagaaaggcccgagtggtcagagcggagcccgtggaagagatgggcacagccagattgcttagagctgtgttgttagaagtgctgatgagtctacattcaacttgc

SEQ ID NO: 27789 - DNA, 121 bp, Homo sapiens
  chr19:39305794-39305915
  hypo
cgaacgccaccctcaaccccagggcaggcagggagaccaggaagccttgcaacccagagggaccccagcgacttttgctcactccctccgccccggaattccttgtgcccctcgcctgccc

SEQ ID NO: 27790 - DNA, 404 bp, Homo sapiens
  chr19:39306241-39306645
  hypo
cgcgagggctctcagagcttggagaaggtgacggttttcagttccttgttctcagtcgtggcctggaccgacttcacgaggtcttgggtctgcagcatgctcatgttccaggacgcctggtaccgagggtgttgagagagaacgaggagagagattagcaggggccaatcaggataaagcatgagagcaccctgcaccctggttggtcgcctggggttagaggagggctgtgattggtcggagcgtgcaccttaccacgtagttgaggctctcggccaccgaatggtcgcgggaatacagcaggttgaccttggtgctctgcaccgccacggggctcttgctggaaatctcggccgccagcgctaaggcagcatccagcatgacctctttgtctgggaacaccc

SEQ ID NO: 27791 - DNA, 418 bp, Homo sapiens; identical to SEQ ID NO: 10433
  chr19:3966086-3966504
  hypo

SEQ ID NO: 27792 - DNA, 351 bp, Homo sapiens
  chr19:3966587-3966938
  hypo
cgggtggcacataagccccgtcattcactctgccagggcgcctcctccatgctggagtggacttcggccccggggacacagggcaccatatgcaccagcacccagtcacacctgcggccgctgcacacctggacaacctggttctgtaaaccacgcctttccctgttttgctattgccaaccagatttcaggttctgccactgagtcctcctacagcaacagcagaccacagccgcccacctccagacagcccccggtctcactggccacagacttgctccttagaggcaaggccactggcaggctctcagttcctctacggaatgtgaaacgtgcctcatctccccagcc

SEQ ID NO: 27793 - DNA, 746 bp, Homo sapiens
  chr19:407139-407885
  hypo
cgagcagcgtgtcccgcttgaggctgctgcccttgttcaccaccttgatcctgagggccagtttccggacgctggcgggccccaggccgtcgaagaagaaatcctcgttgaagacggggcggcggctgttcttcacgatggtgctgcgctgcttctgcagcttgcccggcaccaggcacaggcccacgcagcagttgatgctgcgggcgtcgcacaggcggtcgtagaggccctcggcggccagcaggtgcacccgcaggcgggcctggccggcctcgtactcggccagcagccgcacgctgccccgagggcccacgtggaccgtgtgctccccacgcgcctggcccgactcggggccaggttccgggggtgcccggcgggtcaggcggcgccggctcccggggctggcgtccggggtgctgtcgtccgcagacagggagccgtggcggcccacggagtgccggagctggctcaccttggcctggctgtcctgggcgaaacctttgagcagagacacggagcgggacagcagaggggacccgaagggggaggactcggccgaggaccctgtgtcgctctccccgccactgaagtagcggccggggctcatgagggccccgccagcctccctggggcccccatcacccccgttggccttggcagctgcccggcggcgcccggcccctggggagcccacctgggccagagccccgtgctcactgtggaacagagactccttgcgcctc

SEQ ID NO: 27794 - DNA, 841 bp, Homo sapiens
  chr19:41119120-41119961
  hyper
cgccagagagtctgggagtagggcctgggttccagggcaaagccggctggaaaggtggaggcgggaccaaggcgctgtgggaggagcttagaaacctggcattggtgggggcggggttactgcgatgtgggcggagcttgtctgggaggccgggtcccgtgactccgcccaatctcccgcgtaccctagacgtgaacgagtgcctggagggcgatttctgcttccctcacggcgagtgcctcaacactgacggctcctttgcctgtacttgtgcccctggctaccgacccggaccccgcggagcctcttgcctcggttcgtacccgggctgatcctggccccggaaagggtgggcttagggcaggaaaaggcgggacggggagaagagggcgaaaaggggaaaacgagtttttagccggggtattccagcaggatcagggggcagctggtgggagtctcgaggcagtgagggggggcggggcgtggagatgaaagggccgagtctgggtatttggaccgtgattgtaaagaagctgttctaaacccgtcggggggcggtgtttgcagggagggaagtagcgtgaggcaggttggggaaggcgtgagaggcctaggagagccgaggggcggtggaggggtgtggcctagaatgttaggcggagcgggaggtgggccgggccttcggacgccctgtcccgcagacgttgacgagtgcagcgaggaggacctttgccagagcggcatctgtaccaacaccgacggctccttcgagtgcatctgtcctccgggacaccgcgctggcccggacctcgcctcctgcctcggtgagaggccccgcccc

SEQ ID NO: 27795 - DNA, 441 bp, Homo sapiens; identical to SEQ ID NO: 22838
  chr19:42028298-42028739
  binary

SEQ ID NO: 27796 - DNA, 899 bp, Homo sapiens
  chr19:42408218-42409117
  hypo
cgagggcccactgacgtggcgggtgactaaggacaaggcagtgggtgagtgccagagcagctgcctagtgcagggtgttggggcagtgagccaagggcggggagggggtcgcgcgggggcacgccgtgtgagcactgctcgccccgtagaggtgcatgtgctgctgctggacgacctgctgctgctgctccagcgccaggacgagcggctgctgctcaagtcccatagccggacactgacgcccacgcccgatggcaagaccatgctgcggcccgtgctgcggctcacctccgccatgacccgcgaggtggccaccggtgagtgcagccactgcatggcccagggcagagggtgtcttttttgggcagagctgcctgtggagtggggagcagaaccctctagagagccagggagccagcattctagcaaagaggttgagaagtaggtggaggtgggcagggcggggccaggcctagagggtttataagtgaggtaggaactgctgcaggtgtttgcacagaggcgtgtcttgtgtaaacaaggagaagaaaggccaggagtccagtgaggagggatttgtaaacatactactaggaagttgcaccagggccacaaacactggaagcggctggagggtgggagtggctggaggggtttcgttaggtaagccagggtacatgcccgattccataaggaggtgtgagaggtggggctcaggaggacacatcgggccctggatattagcagacagtgagtggtgagttgagccatgggagccctgagagcgccaccactgtgggtgacttctccagcttgtgcttagggaggggcaggcactggggggacctgggctctgagccccatctccccctctccctgcagatcacaaagccttctac

SEQ ID NO: 27797 - DNA, 504 bp, Homo sapiens
  chr19:42460873-42461377
  hypo
cgggatccctccccgggcttgtgatgggacggcgctgtgggcccgagcagcagagccgtgcaggacaggcatgggcaggggtggggcagctggcccgggaggccggcaggtcccagaagacacctcacacgggttccatctgcagctcctccccgtccacagcctcaatctggtggaaggcagcgtgggagccgatgaccaccagggtggctcctgcaggaaagccggcagctcagggccacactcctgcacctggctcccaccatccaccccagctgctcagaccctgtactcacccagcacccagaagacggccgagcccgcaccagccagccagaagaaggggaaggagatgcctccagccagagcatactgatgcgctgggctcacctctcggcctgggggcagatggcattggggtgctgttccgactctccatgccctctcccagagtaacccctgctgccccccaacaatccgtacaagctccaggttctcgggatc

SEQ ID NO: 27798 - DNA, 283 bp, Homo sapiens; identical to SEQ ID NO: 26650
  chr19:4555911-4556194
  hypo

SEQ ID NO: 27799 - DNA, 1283 bp, Homo sapiens
  chr19:45655296-45656579
  hyper
cggcttgccctgaggcacggcccgacgggggcgccctggaggcgctgttggcccggtgggcagcgtggggggtatcgcgggtaggggacttgggcgggctgggcggcttgagcgcgctgacggctcggatgagacccatgcgccggcggatggagtggtccaggttgaccgtgcagcgcagcaggctctgcgcctcggccacggtgaaggggaagtcggcgcccaggaagcgctcgaagagctcggggtcgccgtccaggtcgagcacgttctgcaacgccttggtcatggtgtgcagctcgcggctgttgtcgcggaaaacgtcccagaggcgcgcgcggccctcgggcgcgcccccggtctgctgccggtcctccaggcactgcagcgcccagctcaggcggcacggccactggttggcgagcaccacccacgccaccgcctggcgcggcgtggggcccccaaagtccccctgctgctgctgctgctgcagcaggcgcacggtgatgggcacggtgttgacgatgcgccgcatggacaccacgttgtcgggcacgtactcgtagaggcagtcgcgctcgtcgtgaaggcagaagagcgcctcctggattcgccgcgccgcctcgtcgtcgatgcggccctgcccgcgctccgtccccgcctgcgcctgcaccgccagcagctgcgcgctctcgcccccggcgtcccccggcagccacggcttgcgcgtcatctcgcggtacaacaggtcgtcgcggctctgcaccgcatcgtgcaggaactgcagcttggtgcggcggcccataatgggcacagagaagggcagcgtgacagtgcggttgaggaagaggtagccgttatcggccgtgcccttcatgttgcccgcgctctctaggcacgcggccaggatgctggggtccacgaccaggatgaagatgaagggcgcgtggctgtcggacagcagcgtgttgatggcgttgagcacgcccaccacgcgctccgggtagcacgtgtccagcccggtgacctccagcaccacgcgcagcctgcgccgctggtagatctccaggaagcacaggaagtcggtgagcagctccacctccttcttcacctcgcacatgaaacccagctggctgccgaacttttcacgcgacaccagccgctcgatcttcttgcgctggcttacgaacaggtgcttgcccaccgagtacacggccatgagcagccccgagcccgacagtgtggtggccgcgccgccaaacaccttgagcaggctgccgctc

SEQ ID NO: 27800 - DNA, 247 bp, Homo sapiens
  chr19:45851208-45851455
  hypo
cgcaggagcagcagctgctcagcagggtggctatgagatccctgcccgccttcggaccctgcataacctcgtgatccagtacgcggggcagggccgctatgaggtggcggtgcctctgtgccgccaggccttggaggacctggagcgcagctcgggccactgccaccctgacgtggccaccatgctcaacatcctggcgctggtgtaccggtgagcactgcggccagccatggctgggggcaggaac

SEQ ID NO: 27801 - DNA, 602 bp, Homo sapiens; identical to SEQ ID NO: 25385
  chr19:46379840-46380442
  hyper

SEQ ID NO: 27802 - DNA, 306 bp, Homo sapiens
  chr19:47593053-47593359
  hypo
cgggtgatctctccggtctcctgtgccatgcacatgcagagcctggcccttctttgtacacttatcccaaccctaagtgaccaaacttgaggttctgtgagaccaggccaccggggttggcccgggtggctccgatgccccagaggagaaactgtaagggcagggctcacctcggccgcggctgctgccctccttggcacgccggtactggttcagctctttggtgaagtcgtcatagtcctccttgcccatgtcctcctcctcgtcgccctcatattccccatactgctcattctcgtagtcctc

SEQ ID NO: 27803 - DNA, 476 bp, Homo sapiens; identical to SEQ ID NO: 24179
  chr19:48150921-48151397
  hypo

SEQ ID NO: 27804 - DNA, 280 bp, Homo sapiens
  chr19:491326-491606
  hypo
cgacgtcgtgtaaacaccagctctctagtctcaaacccggcgagggcggttcatagacaatttcagtctctcgacgcgacgccgtgtggcttgtgcccttctagccacctagaccctcgggagaggcctgtgcggctcctggctgggcccccgtcttcaaagcagcttttgagtggccctttgacccgtgagacagggccgtggaagctggggtgagcctggagatgcccccgggagcaccaaggcgtcagagcagctgaccagggccccaggcctcgcc

SEQ ID NO: 27805 - DNA, 573 bp, Homo sapiens
  chr19:49242357-49242930
  binary
cgcgcaggtgctccgcccgccactcgccgcttcccacgcccgccgccgcgggccggcccagagcgtcgcacaaagcgaaggcgtccacgcagctgctctcgccggggccaccgccggggctgcctgctaggccgtagcgctctagcgcctcggccacgagctcgcgcgccgtggagcgcgccgtggccagcacgctcttgtagttggcgcccgatgccagtccggcgccgaagatcttgaggacccccggaggcgccgtggcgcgggtagccagcgggggctcgggggccacgcccgccgccagctccggcagcttcttctcgctggcccagcgctgcgcgccccccggggtcccagggcctcctgcgccgctggaccccgtggtcccggtccccgagccccggaagagctgggagatgcgcttggcgcggctaccggaggctcccccggccgccttgacagcgcccactcgccgcagctccacgtgcggcgggggcggaggtagcggctcgctgctgcggctccccgtgtccgacgaagaagacctgggagtccgccggggaacagagtcgc

SEQ ID NO: 27806 - DNA, 843 bp, Homo sapiens
  chr19:50316211-50317054
  hyper
cgaacccccttcggtttagatacaggcgtccaaggccccacctgctgacgggcgggggcgccgccgcgactgctcctgcagaatagggggaccccgctggaggccgcgaggcacagcagatgcacagtgccgcccgtcccctcctcccccatttaggactcccaccgcggtccctcacgtggggactgtcagtgcgggtcttggagcatggcggtaatcagagtaactcggcctgtggtccggagccgccagagggcgagatggggagctgattggaagaggattaacttcccgccttcttcacccaactcaaacagaccctcaaaccctattcaggcacctcccccaaacccattaggttctcttccgccctagccggaagtcacggtacccctaacaaagatggcggcaaattgaatttgcaaagctttctagtttctccgaggaggtaaagagaaccaagaagccggattgaagatgatgactgcgccaaggcgttgcctagccaccatcctgtaggctttgatgatttacattctaaacggaaaaaacagctgtgcccggatcaaagattgcgatggtcccaaagcattgcctagcaaccacattccctgtaggtttccagtatatagtagtaaacaatgtgccctactcaaagatggcgaccgtggcggggcgttgccaagcaaccaccattcagcctgatatccattccaaggctgtaaacagctgtgccctgctcaaagatggcggcacgtcgaagtccgagcaccctccttggggcgaaatcgagaaaaacaccatctcccctacaaccttcgagggtggttgagtccagcgatc

SEQ ID NO: 27807 - DNA, 1181 bp, Homo sapiens
  chr19:50815289-50816470
  hyper
cggcagcttctgcattgggcggttcatgcacccagggtgggcgtgggggaggcttggggaaggggccacgccgacccctccctccctgccctgcgggtgggctgagaagacccgccattagcaccagagttggacgatttgcagacctcccctccccacactgtctccgaaccccgcccccatccctgagagcgccccctcaccactccccccaccagcgacaggctaggcccgccccgcccacatttgagtgagagaaacttattgctctgtgtgtgtgtgtgtgtgtgttggggagggtgagccgcggagctcaggaagaccccccgccattcattcctccccaatcgccccgccccctggcccgtgtccgtgcgttcccggagcgcaggaggggtgcgacatgcgtgtggggggcgcgtcatgcagcgcatgcgtgtaggtgcaggcaccctggcggccggggggaaaagggggagccggacttggaaagagtccctttagctcgctctctccctccccgaatcccacactattgacttgggggatggggtgggaggggaggagaatcacgttttgtagaagtttatcatgattgtggttattttgaaaagctgaactcaaaagctgggtacgtgtggcggactggcgagcagggggagacgttgggaagaggtcagtaccctttggaaaagaccctcaccccctttccccgcctccttcggctttcgtgaaggtcaggggaaacgggggggcttgttaaagaagttgaaccctttggcaatataatcagtccccaccccgtaccctggtgtctggagcccctagccctttgccccgcccccaccaaaacccgccccacccctcacccctgcttcaccagggtttagggtccgagggaaggatgggggggactcaaaatgccccttgcataggaatcgttgcatcgagaatcgtgctcagtgacgccccccatccaccctcgggtggggggttcctgaggccgtgggagcagagggagggaggtggctaattccgtgggaccccggctccaaaaggggggtccgctaaagagtctgggaccggtgtggtctctgggcttgggggaggtagcgcatccttgagccaggataggaggtgggaaatgattttccacccgcgagcgtgacgcggtgaggacc

SEQ ID NO: 27808 - DNA, 735 bp, Homo sapiens
  chr19:50818439-50819174
  hyper
cggatgacaagagacagatggacagagatggaccaaggagatggagagagaaagtgaacaaatcggggagtcagtcaacatcgatgagaaagggggagacatcggggaggggggagagactccggattaggaggcaggttggtgcccaccgagcctcccccgccccattcccaccacagtccaccgcccttccccccctccactggtcccctcacctgaggcaaaaggtggggggcagcaaggcgggatggtgggcggcaggggcgtggggaggggctgggtggaatgcatgtgggagcagccagcggagagggcagggaacggtgcggccgccgtagcggggctgggggctgacctagttgtagggaaagagagcaggcagggggtggggtctgcaagggggctgagtggagcgaagctggcagtgcccttggggaatccgatgagaactccaggagcagtgggggggggtggggggggagggaggctcctccagaagattctaaggacggggtcgggggtggggggcggtgaggcggagggctggggagagggacatctttaaagggtccaagaaggctctgagcttctgacgggtgcgggaaggctctcacaggcatctcacagctaatgggactcaagatccagcaacagtgtgtgtggtttctgcaaagcctggggctgcctgcagggttctgcacccccgcagggagctctgtggcttttccaggcaac

SEQ ID NO: 27809 - DNA, 1380 bp, Homo sapiens
  chr19:51161615-51162995
  hyper
cggggcgacagtggagtgacagcttgggggggcggggccaggagggactagataagagcgagattggtgcagagccactgaggggcggggccaagagtgagcgcggttggaggtaaggtccggtgagatcagagagaaggagggatctcgagtgagtaggggcccgagtttgagtgacccagtagtgaccgggatagaggtctgagcctggaaaggcagctgtgagggggtggaagagactgagcacatagtaggtgtggggccaggggtgatagggtggggacaggcctggagtgcctagggtagagcgcagcctgcagtcgccagtggagggtcgggcctttgggcggtttgagatggagcctcgacagacagtgattaggacgcagaaccaggctaagagagcgtaaggagcctagagcgacccaggcgagagggcagggctggaggggagtttagggacggagcgatggtccgctggaccagggcctgtaaacgactccagggaccaggcagggactcttcgacgatcaaagccagggctgaaacgacctgcgagttccttttccgtccccaccccccttacaggtggctcatcgcggtcacggacttccagacgcgctcgcgcttgctgcgctccgggctcagtccccgcgggcttgcgcaccagatcgtgcgccacgacgacctcctgctgggcgactaccgcctgcacctgcgccgctccctggtccggcggcgcatgctcgaggccctgggggcggagccgaacgaggaggcctgacgcccgggcgggccccggcagcgcttgcgcaccgccccgcgggctggggccacccacccggagccccggaggacagggggcgttgccttcccaggaaggaggcggggccggctcgagggggtggatactgtgagtttaattataaagaatgacctggtacaaaagccatttctctctgcaaaatcttggtggggagtcaggggaagggaggtgatggggggtaggaatgaacccccatgttataatcccgcgtccctaatcttcctccagtccctgtacgtggacgcctgggtcccaatcccttgagggatgaactgaagcccgcgaaagggaagacctgggcaccggggctttcagcgcgtgccgagccctgtctcagcgagaatcagacgtcctcatccgcccccctcctcttcccctcccacccccccttggaagacaattctcgggcttttatttcaggttttttttctggatttttttgtgtgttctaggggttttgtgttttttttttctgttttttatattttcttcttttgttattgttcctctttttgctttttctctcctctccaccccgcgctgtccccgcattc

SEQ ID NO: 27810 - DNA, 1347 bp, Homo sapiens
  chr19:5292628-5293975
  hyper
cgtggggtccacaggcccgagaggagcggaaacaaatggatggaggtaaacttcctgcgattttcgggggtggctaagagcagggattcctgccatgcaccccccaccgctacctgccccctctgcggtcctgttgcctcctccgccttctgcgaagtccccagtcacagctcccccgggctggcagcgaaggctgccccgcgcctggctccgcccccgggaggtgggggaggagagggggtggggggaggaggtcgggctgggggccaggcgggggaggggaccctgcggagcataacggtctggagttttccaaagtgcaagcgacgggcctgaatgggggggcgccaggcagcagcaggcccaagctggccctggagggcggccggcacggtcaggcccgcgctgggctgtggggacccccgtggtccccagcctcggagcctggagggggcgcgacaagagagacaaagcccggggcggcccgggcctcggggtggaagggggtcccgggcgcactcaccccgcggctcggagatcgggcccaggccccgcgaggcctccacagggcccgccgcagccgctccccgcgtccctcggtccgcccggagcgcggcgcgcagcgaagactcgggagaggcctcggcctggggagctcggcctgggggcggggcaaggggcggggctgtagggggcggggttgcagtgggcggggctgcaggggacgggccccgaggagggggattggggggcagggcggggccccggccggaagtggggcggggggaccagaggggagccccatctggaggcgcggagagcctccgcaggagtccatgaaacactgagcgaaggggcgccccagggagggcacgacccaagacccctccctcccgaagacgtctcacggggagcctctacactgctcctcgcttccccagctctgatcgtagccatggcaacgcatgaggaggctggatgccggacagggcggcggagggctccccaaacacacccaactacaggaggtcggagaaggggcagagttcccctcccagtctgggtgggaccggaggcacggtgatgggggcggggggcgtcccctcttccccctcttagaccagagggtaggggagaggtgcgggcgcagaggcttccctcccgctgggggtccaggggaatgaatggggggacaccgtggcagaggcccccaccctcgccacaagcctgaggagggggcggagagcacagggccagattggaaacagatggggccgccgtgccaggcccgcgacaccggagcagagggagaggaggagggagagggaggggcagacctgtccgggc

SEQ ID NO: 27811 - DNA, 189 bp, Homo sapiens
  chr19:56015143-56015332
  hyper
cgctcccgcaggagagtctcgccgcaagcgtcctttcccgccttttttttttctggcgctcagcacgcatgcgcaggcgcggtgggcccgggaatggagggacgggatggggcaggcgttcatctgcctcgcacctcgtgacgtcacaggcgcgctgcgcctcctgattggccagccggcgcatcgccc

SEQ ID NO: 27812 - DNA, 746 bp, Homo sapiens
  chr19:56199006-56199752
  hypo
cgctggcctcacctgtgccccacgctgcccttccatctgcccatcccctcagaaggccgcttacccacccaagtccgtcaatccctgctggttctctcgtcctttcctcactcataaccccagatggtcacccttcggccccgctctgccacccacatgctccctggagcatcccatgcacccagccctgctgggcacaccacacgggggccagcctgggggcccctggacccggtgcaggtggggccgccagacagctgcctgctgcggctccgggcaaggggagccagggcctgctcgtcagggagaggcctgggcctggggagtgggttgggtggggacacaagtacaggacacaggtgcaaggcggcgtcttggagctggagcagacagaacttgctgaccagtgcacagtggttgggagggcggggcaggagaggcagggtccgccctggggctttggaggctggggcaatggccctgtgctcggcgggcctagggcctggttggagcctgtcctctgcactgtggaggggggcaagggtccacaggccttgggggtggagagaacagtgtcaggacagagtttgagggtaggcggggttgctgagaggatgctgcagtggaggccggggatatctcagcagcctcctggagggtccggccctgccttcctgtgtcctctctctcccttcccctcctgctcttggaaccaagggctcctcgctagcccactccctaacccc

SEQ ID NO: 27813 - DNA, 406 bp, Homo sapiens
  chr19:56200283-56200689
  hypo
cgtggccgcagagcagcggggaggaggagctgcagctccagctggccctggccatgagcaaggaggaggccgaccaggtactgggcgtgcagctggggctgtctgtccgccacccgcctccacgcctcacttcaggctccctcccagccaggcgtgggcctggccctcactgtcgctgctccacatgctgtcactcgtctcctccccagtcctgcctcatcctcaccccgccgtccctctgcgtgtcactctctgcctgtccctcactggttcagggacccccagccctctctttcttcggctctatctgaccctggctctgcctctgactctgcctctggcccctcccgtcatgcccctcacactctctctcccccagcccccgtcctgcggccccgaggacgac

SEQ ID NO: 27814 - DNA, 225 bp, Homo sapiens
  chr19:56727708-56727933
  hypo
cgccctccgctcgttatcgtgttgagaatgaaatgagaggacatgcttggcacctggagatgattggatattacagctgtgcgccataagggcaaatggttccattgtttgatgagccgtcctggcggtgggtgggtcggtcacttctaaacagataaggaatggctagaaagctcttgtaccaaaccagcttgaagcaacctcacccacaccgaatccctccac

SEQ ID NO: 27815 - DNA, 641 bp, Homo sapiens
  chr19:56728484-56729125
  binary
cgcgtggagacccagcatgactgctgactgattgcaagtccccaggagggctttatttttgcttttcaacatcctgttctgcaggttccttggctctttttgcccgtatgccgaagagccgggcattgggacgggccatgcggagactagcgaaggctttgaaattcttctcctcgatgatgactccagctttctccttctaggcattccggttgggcatgaccggtcctgtcagccgagcggccagtttcagttcttcagcagaactgtctcccttctcggaggccgagggcttcccggggaagcggatgcgtttggagcggggctccttcagccgccgcacgttggcctgcagggactgcgcctcctcggatccgcagaaatgccggcgtccgggcccccttcttcgcgtgccggccaccctgagctcctccaggcggaggccgcggccgtgcgcaccttcgtgtggtaccgaaccgtggggcagcgcacgatgggccggatgggccccgacgcggggcaggggcgaggcggcgcgccttggcttgcccggcctggcgcctgcggatcttctgggccggctggttgaaccgcttggccacgcgccgctgcagtccttggggaagcggggcttcgagatc

SEQ ID NO: 27816 - DNA, 600 bp, Homo sapiens; identical to SEQ ID NO: 22846
  chr19:56879394-56879994
  binary

SEQ ID NO: 27817 - DNA, 839 bp, Homo sapiens
  chr19:57683163-57684002
  hyper
cggctccgcaagtatgttggtctccctgagagagtggggcctgcaacctgctgggcgcaggcgccttgagctgccacgtctgcccttttaccggcttgggtgcaggcaagggaaatgcgtccccgggccggggggcgcgagcgggggtccggggccgcgagctggggtccggggagcgcgagcgggggtccggggggcgggggccgcgggccgcgaggggggcgggggccgcgagggggcggggcgtgcgagggggcgggggcgtgcgagggggcgggggcgcgcgagggggcggggcgcgcgagggggcggggcgcgcgagggggcggggcgcgcgagggggcggggcgcgcgagggggcggggcgcgcgagggggcggggcgcgcgagggggcggggcgcgcgagggggcggggcgcgcgagggggcggggcgcgccgggctcgtcctctccgcggcgctcagtggcagcagggagggccggtgagatgccagagcaaggtagggtcctgtatttggggaccgctgacgtttgggtccccctcccgcggctgttagcgctgcgtggcccgagacctgcggtcgggcggggattaaggctgctttccggagggccccggccgcgtggtcgccctgccagagcggttgatgtcaggcagtgctgggaggcgttgctctccgggttcgcttctctcctgttgtcctaactctgcatctctcccgggtgaatcacagagctgtaaactaaaaatcaaattctaagctcccagccaactgaatggacccctcctctcagctaagagcatggcaaacttaaccggaaacactagttcggccgc

SEQ ID NO: 27818 - DNA, 728 bp, Homo sapiens; identical to SEQ ID NO: 23170
  chr19:57702696-57703424
  hyper

SEQ ID NO: 27819 - DNA, 538 bp, Homo sapiens; identical to SEQ ID NO: 26688
  chr19:57751590-57752128
  hyper

SEQ ID NO: 27820 - DNA, 869 bp, Homo sapiens; identical to SEQ ID NO: 22849
  chr19:57831543-57832412
  binary

SEQ ID NO: 27821 - DNA, 834 bp, Homo sapiens; identical to SEQ ID NO: 23171
  chr19:57862401-57863235
  hyper

SEQ ID NO: 27822 - DNA, 883 bp, Homo sapiens; identical to SEQ ID NO: 23172
  chr19:57874412-57875295
  hyper

SEQ ID NO: 27823 - DNA, 706 bp, Homo sapiens; identical to SEQ ID NO: 22850
  chr19:58038572-58039278
  binary

SEQ ID NO: 27824 - DNA, 912 bp, Homo sapiens; identical to SEQ ID NO: 26697
  chr19:58094913-58095825
  hyper

SEQ ID NO: 27825 - DNA, 790 bp, Homo sapiens; identical to SEQ ID NO: 22851
  chr19:58125385-58126175
  binary

SEQ ID NO: 27826 - DNA, 881 bp, Homo sapiens; identical to SEQ ID NO: 22852
  chr19:58238341-58239222
  binary

SEQ ID NO: 27827 - DNA, 775 bp, Homo sapiens; identical to SEQ ID NO: 22853
  chr19:58951083-58951858
  binary

SEQ ID NO: 27828 - DNA, 311 bp, Homo sapiens; identical to SEQ ID NO: 10471
  chr19:5938115-5938426
  hypo

SEQ ID NO: 27829 - DNA, 944 bp, Homo sapiens
  chr19:6590260-6591204
  binary
cggcgcgcactggtgattttatttcattttatttttttttactcttaagacttcttaaagaggaagcaggtctgaaccagcggggaacgtgaagtcgagaccttcaaaagaacttcttcgtttcccgaatcgttttcctggatgtcactgggcgcgagagcaccgcgcgcagcggactctctacgctgcaaaggcgcccggcgcggtccccaaagggacccctcccccacccggagcgagtggctggggccatcccgtcctaggaggccccaggaagcccccacgcccagccttgtgaagcccccagcagcctctgagtcagcctgccgggggaacaccagagccgagtcatcttccatttccatgtgtgcctacctttcccatcccgggatctccctgtacctcctggcagggctgcctgtctcgtagcccctacaccgggcagcctggtccccgcctcgcctccctgttctggtctctgtctctgccctaccagatcttcctctctggcctctttgtacccatctcattctgtcttttcggtcacgcgcctctctatgttttcttcccaacttttccatctcaactcaccccaagtgactcgagcggcagctgctgctgagcctgtgcgaagcgctggatgcacaccacgaggcagatcaccaagcccgcgaccaatgggaccaaagcagcccgcaggacgcacccatagggcctgcgccgcaccgagcagcccgaaccctcctccggcatcgccgcggcgatcacctccgctagcgcaggaggggcgatgggggcgcggagcgctgccgagaaggaaggaaggaaactgcagccccctcccggggctcctgggcgtctacttgcttcaacctgtcaggggaccagcctgcccctctctggggatgtccggccggtcgaggggagggacttgagcaattggc

SEQ ID NO: 27830 - DNA, 250 bp, Homo sapiens; identical to SEQ ID NO: 10474
  chr19:7493749-7493999
  hypo

SEQ ID NO: 27831 - DNA, 240 bp, Homo sapiens
  chr19:752096-752336
  hypo
cgctgtgtgacctcagatgagcaggttctcctctctgggtcccagctccctctctcgaaaaccggagtcgaaaacggttccaaggtgttgcaggaagagtctcaggacgccgaggtccttagccaccgccgggccttgcaggggccatcttccgtcctggggctcttcccccgagggcagcgccgctgcccaagaatgccggccatgagagccgccgtggatccaggggtttttttggcc

SEQ ID NO: 27832 - DNA, 685 bp, Homo sapiens; identical to SEQ ID NO: 10475
  chr19:8274278-8274963
  binary

SEQ ID NO: 27833 - DNA, 1383 bp, Homo sapiens
  chr2:100937779-100939162
  hyper
cgaaagcccaaagcctcgggcccaccggccagctccccaccccgctgctgggccggacaggtgtaggggaggcggacccgccccgcagccgactcacccagctccagggcctggtcgcacctgagcagcgcggcctccggctgctgctggcgctgcaggctccgcgcctggcctgccagcctgcgcagccggcactcggccgggaagcacttctccagcaggccgctcagcaccacgttcacgcgccgcacctgcggccgcgcgggccctggctccacgcagcgcttgcagactgtgagcccgcagggcagcgtcaccggcttatgcagcagccgccggcagcgcgggcagccgagcaggtcgcggggcgcgcggggctccggggccggccctccctcgccgggcgcctcgggctcgccgcccgggttctccgcggacagcggccggtcgcgcaggcccacggcgcgcaccaggccgcccgccagctcttccagctcctccggccgcagcgccccgagccgcgcggcgccgcggaacgcgcccagggcttcggggaggcggccggcgcgggccagcgcgtcccccagcctcaggcacaggccgcggtccggctgcgccagcccggctagcatggagcgaaagagctcggctgccatctcgtagtcgcccgcgcggaaggcctcgtcgccctcctctaagcgctgggcgatcggctccgcgcggtcgcagccaggacactggggcggcggcggcggcgggaccggctcggggctcatcaccgcggggctgcgacgacgcgggtccggagcgaaggcgcggagcagggaggatgcgctgctgctgggaactggccggcgggagcgcggtctcagccctcgccagcagccacgcgcgtctgggggcggcgcgctgcgagcggctgagaccgcgggcgggggcgggcgcctggcttgggcagcgtcctcagcgcggtgtgggcggcgagccccgcagggctgcaatcgttccggggtgggggccgggacaggcaccgcgggcgcaatctgagcccctgcccacgcgcagcggcctctcagtcccgccggcttaggtaacccaggtcgctgcggtaacgcagtgaccgcgctccaggtccgcgtctcttgcgatgcttcccccactcgcctgagggctcctgcgcgactgcgcgcgcgtcctctgcctgccgcctccccgcagaggtgccggggccctgggagcaggtggccttggccgcgggctgctggcgcgccggcaccgcggcacctgctcttccccagaggcctggccgcccccacaacctgtggctccgcttaagcaagaacccaggaaaagtcaccaaacgcatcacgcatctctagcttc

SEQ ID NO: 27834 - DNA, 850 bp, Homo sapiens; identical to SEQ ID NO: 26714
  chr2:101033445-101034295
  binary

SEQ ID NO: 27835 - DNA, 530 bp, Homo sapiens; identical to SEQ ID NO: 24213
  chr2:10152958-10153488
  hypo

SEQ ID NO: 27836 - DNA, 166 bp, Homo sapiens; identical to SEQ ID NO: 10478
  chr2:10155780-10155946
  hypo

SEQ ID NO: 27837 - DNA, 384 bp, Homo sapiens; identical to SEQ ID NO: 24217
  chr2:10156251-10156635
  hypo

SEQ ID NO: 27838 - DNA, 486 bp, Homo sapiens
  chr2:106959115-106959601
  hypo
cgcttcacgtgctccaggcagagacgagctcaagagcctctggtctctgctgcgggtggcgaggggcggctggaacagcatacttcagtcgttccgtgtcagcctccacccctggtagcaccagagcctcccaggcgtccccgcagtccgagccagccttagcacccagcgctttcttgctgtcgcctggttgttcccgcggcggccgagctcagcacctctcacactccctgcctctcgaggactctgcttgttcctcatcacagcacggttgctctcgcacccaaggcggtgtccccccagcgcctcaccacgatcgcggcagagatctcctgcagggcgtccgggccttgggaaggcatcgccatctcccgcagcgccctcccggactagcgcagcaggctggcatcgcttcctgaggtttggccccaagttttacggcttaatgaggcacataaatagataaattgtcttcatcacgtcagc

SEQ ID NO: 27839 - DNA, 188 bp, Homo sapiens
  chr2:106959841-106960029
  hypo
cgtggtccccacggaagcggtgagaacgcacctggccggctcagccacacggcacggtggcctaggccctgctgcgggctctggatccagcggtcacggtttcactgagagggcgcctcccaggggctgctccggcccagggcagggcattgcaggggtgatgggacagccctgcttttgagaggcgc

SEQ ID NO: 27840 - DNA, 200 bp, Homo sapiens; identical to SEQ ID NO: 10482
  chr2:10742503-10742703
  hypo

SEQ ID NO: 27841 - DNA, 561 bp, Homo sapiens
  chr2:109647974-109648535
  binary
cggctctgcccgcctcgccgggctgcaccgagtccgcgggtctctagcgcacggcctggccccacgtgcggcgaggagggcgcagtgaagttctgctgtgtgcaccccctgcagctcggccgggaagcgcccgctggaggaacggagagcgccgcttcagcgtcggccacgtgggccgggctctgccggtggcaacctggacgcgctgcgggcgccggcgagacctgcgccaacgcctacctccgggccacaggcgggataaagctgccccactttgcccccagcgaagagaaccctccttcctctaagtattttcttcagcaactaagcttttctgtttgctcaatttcttgtcccgtgagcgctaccacccaccccccgccaccttcttcccctccccccacatccgttcactctctttgaccttttgccaaaactctgaacgctcgctgccctccctcccatttcctcaccgcgtttcaggagctgtaagttcttggtgttcaaaccccctacggttacgtaaacagaactctgcagttatcttctttccctttcttc

SEQ ID NO: 27842 - DNA, 702 bp, Homo sapiens
  chr2:120281422-120282124
  hyper
cgggcggctccagaatttccgtgtaggagagtttcagaagccagaccagaggaaggggtcggtggtgggcacagggattcatcttagagccgccttcgtctggcgcgcacgatgtttttctttgggaaagggtccctccggagaagagctgggagagattaatgttgggaggattgggagggaagagtccctattcctcatgggaagatctgctagtccctctccacctgcatcctgcccgaggccggagaaagggcgagactgtcgctccctcgggtccccagcctgcagaagggcgcagtactcaccgagtgcgcggcgcaggcgagcagcaccggcagtagtagctgctgcagcggcggcgacaggtggggacgcatggtgcccgcacgttccccgagggcgccccgacgtccgcctgcccgtgccctctgcccgctcgggagctcagcgccccgcgcagggtcccgggctccggccggccgctgcgccccgaggagccatggctgagccacccgacctgcggcgggccccgggactgctcctcctcggaccaggtggccgcgcgcgctaagccgcccgccccattgatcaggacgcggctttgccggcgcgcctcctccacccggcagggactggcgcggggtcggcgcggaggctggcaggggaggaggcagagggagggcgcggggacccggagtc

SEQ ID NO: 27843 - DNA, 119 bp, Homo sapiens; identical to SEQ ID NO: 10486
  chr2:120754234-120754353
  hypo

SEQ ID NO: 27844 - DNA, 1016 bp, Homo sapiens
  chr2:127413347-127414363
  binary
cgcccagctatccagcggccgcgcagccagccaagatttcaacacaggtctgccctatttggtcaccatccccgacagtgctgggccaggccatcatgtcacattggggagttttccctgcactccagggggaattctcaaccacaacctctgtatccggtagtggcagatggaaagagaaacggttagaaaagcgtggttcttgcgcaggaaagttggagcaaagaagagttcagaagtgggcgggtgtgtgtttaaaaaaaaaaaagggggtggaaaccccaccagccaagtctgcagaaaaaaaataaatgaagtctgcctatctccgggccagagcccctcccctcggcccgcgcgggaggagtgtgacccaggtgccgcttcctctcgccgccgagggtcaggagcccgggagcgcgaccctcccccggcccggcctggcccggcctggccagtccccgcggtctctgcccgggctgacgcccaggaatgtggtcgacgagaagccccaacagcacggcgtggcctctcagcctcggtgagtacccgccgtggggaagggtcctggggacccactggaggccgcggcccgcagcagccaggggccgagccacggccacggacgccctggtgtcccggtccgtgccgggcctccaggcggaggaggcgtccgctgggctcagatccccgactccagccccggttccccggcgcctgggctgcgcggagtccctgtcccgcgtcccggacccctacgcgcagcctccacgcgctccgagctggagaagccgccagcccgccctcccagggcgtgtcgcccgctttctgtttctttgtgcggggcatgtgaaatgtgtggggccagaattgtctccctaaagaacagttaggtgagagttcacatcacaagttgcttctgtgctgctccccagccagggtccgaccggccaggctccggtgaactccaggcaactccagccttgcccagggacttgctcgctccgctgggcgcc

SEQ ID NO: 27845 - DNA, 987 bp, Homo sapiens
  chr2:12856411-12857398
  hyper
cgggggcaagcggtgacaccaactaaaaggaagcaatggatttccttttaaatggagaggaggatgtcggagagataccatgaaacgaattctcgaaactccaggcagcaataccgatgaaagcgcattcttccaaaacagagctcctcattcagggccacatctgagcctgggggcccaatgctcagagcgtgcctggctttctggggaaaagcgccaggaacatgaacgagctacgaagagctggagcgggcgctgcgggagcagcgtgtggggaacggctcgggagtcgctgctggtaaccccggcccagccgcccgcagctgggctcgcagccggctcgcagccgacacccagggtgctgcgcccggggccccgggccgcggaaggatatttcactttgtttacctccccggccgggcgagggagctgcgaggccggtgctggcgcccccggcacggagctgcaatggcagcggcgcggggagccgcccgaggactggcagcggcggggctgattgatgggcgcccggcgcaatgaggggggcccgggcgggggcggggcggggccggctctgggctgagccagtcgcgggggcggcggggggggggcggaggctccgtggaaatgtgtcggtgacattgaatggggagaccgagcgcgagcgaggcgcgcgcgcgcacacgcgcactcacggccccgctcgctccgagatccccggccacgtaagtaactattaataccgcctcgccgggggatgcgggcgtgctgagcgcggggattggcctcgggcaccgtcggccgtcccctttaatttttaaatacacggtcccctcttttctctggggggggcaagcaagaaatcaaagaaggaggagacaagccgtcaattttctccaaaacaaaccccaccgggcaatttggtctcggggtagggggagacggggtgattgcaaattattccaggacgagatccagttctccagc

SEQ ID NO: 27846 - DNA, 722 bp, Homo sapiens
  chr2:12857960-12858682
  binary
cgcgttgggactgagtcgccgccgtgagctccccgaagactgcacaaactaccgcgggctcctccgccccgtctgcgattcggaagccggcctgggggtcgcgtcgggagccctggcgctgcagctccgcaccttagcagcccgggtactcatccagatccacgccggggacacacacacagagtaactaaaagtgcggcgattctgcacatcgccgactgctttggggtaacaaaaagacccgagttgcctgccgaccgaggacccccgggagccgggctcggagcagacgaggtatccggcggcgcccatttgggggcttctaactctttctccacgcagcccctcttctgtcccctcccctctcgctcccttttaaaatcagtggcaccgaggcgcctgcagccgcactcgccagcgactcatctctccagcgggtttttttttgtttgtcgtgtgcgatcctcacactcatgaacatacacaggtctacccccatcacaatagcgagatatgggagatcgcggaacaaaacccaggatttcgaagagttgtcgtctataaggtccgcggagcccagccagagtttcagcccgaacctcggctccccgagcccgcccgagactccgaacttgtcgcattgcgtttcttgtatcgggaaatacttattgttggaacctctggagggagaccacgtttttcgtgccgtgcatctgcacagc

SEQ ID NO: 27847 - DNA, 1453 bp, Homo sapiens; identical to SEQ ID NO: 22859
  chr2:135475603-135477056
  binary

SEQ ID NO: 27848 - DNA, 1005 bp, Homo sapiens
  chr2:144694306-144695311
  binary
cggtgtttctggttttgcttagtgcgtcttcatcgtattccctcgctgaggactgagcctggccgactcagggaaccgagttcaatgaaatcctcagacgcataaagcacagggtgccggcccaccgagctgcgctcccttcccgggggtgcccgagagagagcacgcgagcccggcgcagccaaacccgggcaggggtgggtccccaccgcgtgtgcgtgtgccagcctgggagtgtcggcgcgagcgtggcgggtgcgtgccggtgtgtgtgcgtgacagcgcgcgcgtggcagggagttcgcgcgccagggtgcgcgtgccagcgcgggtgtgcgagggagtgcgcgcgggtgggagcgccaggggctggcggggcccgcgccctgggacgagcccctcgtgctccggctctgcgctcccgcagcgcccacgcagccgagaggagtgggtgatgacttcgtgacctcaacgtcctcccccgtccctcgacatgttcccgcgcctgaaaggtgcagaaaactccccccaccgctctggacgagactgagctaggcgtcgagggcgggcgccgccgcagaccggagctcgggctcgctggccgctcaggcgcagcggtgtggagggaacggacgcgcggcaaggcgacccgctctgggcaacgcgggcgcagctgccccgacgcaaggcactagctggtcgggggctcgggcgagccggggccggcgtgccggggcgtgcgctctctcggcaggcgagcgccgggctccgcggaggtccctgcgcccactgcctgcttctccgcccggcgacccggagtccccaggctgcggtgcgccaggccagacctgaccgagggcggaagacccgagcggcagggaggcagaaagaaaagaggtagcaagccccagacaagggatccttaattacagataaaaggcaaacaaaaccgtacaccacattttccacgtgtcagctgacggccgcgacaaaaggaaacagaac

SEQ ID NO: 27849 - DNA, 2594 bp, Homo sapiens; identical to SEQ ID NO: 22862
  chr2:145273332-145275926
  binary

SEQ ID NO: 27850 - DNA, 1051 bp, Homo sapiens; identical to SEQ ID NO: 25433
  chr2:145281217-145282268
  binary

SEQ ID NO: 27851 - DNA, 1792 bp, Homo sapiens
  chr2:149632592-149634384
  binary
cggttccggcttgggcagccagaccggacttgcaggctcttggaggtcgcatcctgtccttcccccggcaggtagagtgactacaagtcccgggatgcgcagcgctcggagtcgggcgggggccgggcggacctctacggtgacgtcaccgtcccggggcgggccaggggagggcggggcggaggggcgggtctcaaggcggcagagcgcgctggtgctgatgcaggatggctgagcgcgcaggagcccgggaggtctgagccgggcgaggctcgctccctgcgcatcgcctcctccgcccgccgcgtggtcgcgggcaggtgggccggggggcgctgggcaggggcggggcagggccagggcaggccggtctgcagccggaggggccggagcggagaagctgcccaccttcccgggctcggagcggccggggctgctcagccggccgggctcgcgatgacctgctgagaagcgtcgtcggaggctgcaggaggcggcctagctgtgggcggtgcagctcgcggcctcctccctcgtcgttcccggccccggccccccacccatccccgtgccccctccctaccgccggccgagatggcggatccagccgaatgcagcatcaaagtgatgtgccggttccggcccctcaacgaagcggagatcctccgcggggacaaattcatccccaaatttaaaggcgatgagaccgtggtgatcggggtaagtggctggggcgtctgccttccctgctgctccgcgccgcagctgggcgccccgacgccccagacgcagcggaggtgtttaggccgccccctcggacattcccgcggggctggcctctcgggtggacctgaccagagacccctcgccccgcgcactatggttccctcccgggcgggtggagaggcggccgggagcggcgggccgggcgggggtggcgggggtggggatggggggcgaagacgggctcggcgccgccattgttcgccgggtgggggcccgggtgggcccattgttccccacgctcgcctcgccgcgtgggtagtgtgttcgggtgaccctcaagccgggtgcccaggccccctttaaagtgtgagctctgcaacccgcaaatgcttctgggcatcaatcaattcgatttaccaaacgccttgcctcttcttctcacgaccctagcaaaaaagaaagaaaaaggggtacaggaaaatttctagtcgcgtctcggagctcccgcggcagtgtagacgcggctccccgcggtgttacacctggctccgcgcgcggaaggcggagggttgggggagtactggtggcctcggtgtcccctggaggcctggtgtgtctcccgcttcctctcacgcctggctgccctggatgtggagtcccggcttgatccctcccctctgggatgacctccctcccatgtctgcagaccctctgatgcgcctcacgctgggtggagaggaggctgtgtccacatctgtggggcgagggggctcagagcgcagtagccccctgtgccaagagcagaagttacttcgtgcggctcggacccccctccctctctatctcccttccccaccttttctcccccaccccctccccctacttagctccctctctgcagctggggctgctggtagggggagggaacaccaatggattgtagttcttaaaggaatctgtcagatgaaacaaaccagctcggtcccccgccccttccccgcccgctgtccgtagcgtgtgtggctgatggtgccccctttgtatgcgagccgcgtggggagggacc

SEQ ID NO: 27852 - DNA, 170 bp, Homo sapiens; identical to SEQ ID NO: 10496
  chr2:152295736-152295906
  hypo

SEQ ID NO: 27853 - DNA, 127 bp, Homo sapiens; identical to SEQ ID NO: 10497
  chr2:170569589-170569716
  hypo

SEQ ID NO: 27854 - DNA, 181 bp, Homo sapiens; identical to SEQ ID NO: 24230
  chr2:170681727-170681908
  hypo

SEQ ID NO: 27855 - DNA, 75 bp, Homo sapiens
  chr2:172367036-172367111
  hypo
cgcatgcagggaggcggggtctgggaaatgtaaagtccagtttacgtgacaccatacaaagtcactgtgtaacgc

SEQ ID NO: 27856 - DNA, 1341 bp, Homo sapiens
  chr2:175546713-175548054
  binary
cgactgggtcagctgctttcccttacactcacaacgctaacagttctttctttaaaaagaaaagtatgtatagtagaaaaaggtaggggacgcgagactgaagtgaagctgtctctggagagttcgggggatcaccccccctcaacccccgtccccactccgggcgaaaagcactgaccgggactggagatgtctctaaggtcgacgcagacccctaacgcgcgcgtctacgccgacctggggcgagcgggccgcccgggagggccgggagggaggcgggctggagcgcgggaggggcacggttcccatagacaggcaggcgggcggtgccagaacttgagccggccccaggggatgcccgaacgtccccctctgtcctagctggggtgtaggtgcagccccagggcatcgccgcgaagcccctgctcgagacctacggagatagtgggtcccgagccccacggggcggccccgggtccgcggagtccagcggtgagctcagcccgaggcgcgggacccaggctgtccacggccccttcctccccgggccatcagcgggcagcagaacgcgcgggccgctggcctggaattgcgcccctcccgaggccgcgcgcccgcgcccaccgctcgcaggggacgcggcctcgacgtccccagccgccccacccgcgtcaccggtgccaggcggcacttccgtgccccgccgtcgagcccagcccctcccggcgtctcccccggcccccgggagcccggaacccgggtcgcgccagaggcgacgcgtcccttaccgcgcagcggctccggacgactccgcagccccgcgccgcgctgggcattttttctgggaaacttctcccggggtccgcagggctgagccgggcgggcaggaaaagcgctcagcgccgggaggctgcgaccatccgggaacttcgccgagatgtgggccctcccctccggcgccgccgcccccccgccgccccgccacatgtggacgcgccgcgaggccccgccggcccgcgccctgccctccgcgcgcccgcctgccccgccagcaatggggctctgcgcctgcagcttcggcccgcagaggatcgcggcggggcgggatggtcggggctggagtccgcagtttcctcagtcccgctcccctgcgcggcgaggggaccgaggcaagaggacaggagtttgcagaggggcgggaactggaaggggagtctagcccagggcctttccccccaactcttgaatcttctccaccttcttgcggctgctggcggggggatcgggtgggggtgttccctctgttcgagccggaaggaacgccttttcccacgctttccc

SEQ ID NO: 27857 - DNA, 1776 bp, Homo sapiens; identical to SEQ ID NO: 22868
  chr2:182321353-182323129
  binary

SEQ ID NO: 27858 - DNA, 759 bp, Homo sapiens
  chr2:185463044-185463803
  binary
cggcagcggcgccgcgcggggcgctcccactcgcgctcgggctggcgcggccgcgggtcccggcggcggggtgggcgggggaggcagcgggtgacagatgtactcctctgacagctctcagtatcagcccagtggctccctgccattggctcagtgcaatggaccggcaacgccgctcactataataacactcatgcctgccagcagcagcaactccgagtgcaggcgccgagcgcgggggatgctgccgccgccgccgcttctgctgccgcgcgggcggctcccgcagccccgctccgcccggccaccgcgcgggcactgactcccgctcggttccgtttcgccggcccggccccctcctaggctggaatcctcccgcggggctcgtcgtcccgacgcgaatctgaggagaaacaggagcgagagactgaggggagagcgcggcgagcatgcggaggcgggggagcctcggcgctcaccacagaggggtgcagtgagccagtctccagaggacgtgccgggggtggctgcgtgccctcgtggcgggttcccagcccaccgtcgccggccccggcgcgctgcggctgtgggcgcggggtgcgtggaagcggcggctgcggcggaggaggcggcggctgccccatggagtgttactacattgtcatcagctccacgcatctcagcaacggacactttcgcaacatcaagggagttttccggggccctctcagcaagaacgggaacaaaactctggtaatc

SEQ ID NO: 27859 - DNA, 990 bp, Homo sapiens; identical to SEQ ID NO: 26770
  chr2:193059466-193060456
  binary

SEQ ID NO: 27860 - DNA, 132 bp, Homo sapiens; identical to SEQ ID NO: 10500
  chr2:201828586-201828718
  hyper

SEQ ID NO: 27861 - DNA, 938 bp, Homo sapiens
  chr2:207307880-207308818
  binary
cggctggttgttttctcccgatcatccctgtctctggcctggaaacccccgtactctctttcttctggcttatccgtgactgccggctccccctccaccgcccccatcttttgaggtaccacccgtcacctccgatgctgcttgggctgctgcatcactctgctgctttacccccttccccgccccccaacaaagcatgcgcagtgcgttccgggccaggcaacagcagcagcacagcatccagcaacagcatcagcacccgaagccccgctcgggcgcgctctcggggggcggggcgcacgcccgctccgcgcgtccccgcgccgctcgctcccgcgcgtccccgcgccgctcgctcccgcgcgccgcctcagcatcctcaggcccggcggcagcccccgcagtcgctgaagcggccgcgcccgccgggggagggagtagccgctggggaggctccaagttggcggagcggcgaggacccctggactcctctgcgtcccgccccgggagtggctgcgaggctaggcgagccgggaaagggggcgccgcccagccccgagccccgcgccccgtgccccgagcccggagccccctgcccgccgcggcaccatgcgcgccgagccggcgtgaccggctccgcccgcggccgccccgcagctagcccggcgctctcgccggccacacggagcggcgcccgggagctatgagccatgaagccgcccggcagcagctcgcggcagccgcccctggcgggctgcagccttgccggcgcttcctgcggcccccaacgcggccccgccggctcggtgcctgccagcgccccggcccgcacgccgccctgccgcctgcttctcgtccttctcctgctgcctccgctcgccgcctcgtcccggccccgcgcctggggggctgctgcgcccagcggtgggtatggcccc

SEQ ID NO: 27862 - DNA, 1600 bp, Homo sapiens
  chr2:225906006-225907606
  binary
cggattccggtccaccaaacgcaggccaagagcgcggctgctgagccccggtcttgctgtgaggctgttgttcccactcgcttcccgtttccactagagttgatttgtctcttgccacctctccccggcagtgtggacctactgcaacgcaggaacatctgggttggtatggataggatcctagcatcagatgctggctgctgccccagggacttcccgcggaaatcacccagcacttagaagccgtttcaataaggaagtaaccagtaaagcattgctggtgggagaaccccgcgaaacatcttagaaaaatatcagaaaccgctggagacctaatgacccacgtctcctccagcctgtgttcctcagccctttctggaggagtattaagtggtttgtgggtttttaccctgcggtgggagggctgttccaagtacatctatttctgcgatagttaacgtcggggggccccagctctaaccagggcgaggaccacggactgcatccctctctctcagcgcactggtctgtttactggagggtgagagggacgcgcagacctccggactcaggggttctgttctgtagatccccccaccccacccggggtctctggcactcgtatcacttagcaccagtgtgactggcggtgcattccggccccctcgcgccccattaaagcccctgcacatcctctcccacgctgcgcttctgctacccacgcagctgctcctctgagcgtcccgcgtgcacaaacgcgcccccggtccttacgcgtcggtggcgctgcctcgctgaggtggcgccgggggagcccgcagaggcggcgggggagggagtgcggaggagaggacccgtgagctgcggggacctgggcccgccgagcttttggggaagctgggctccgttccccccgggcgcctggggcgcgcgggaaggcgcggaggacgcgccgcactcacccgctgctgctgccggctgctgactgccaccgcggcggcggacgcggcgctgtgccggagctcggccgcctgcccaggtctcaacaggctccgggtgaacctgcgggtccgctcaccggccatcgccggtcacgccaatcgcgccgcgggcccggggcgcgcctcccgccggtcttccccgcgccaaccttctctatccacccgccgttcaggaagcggaactcggagccttcccccccctcttcctcgctcaactcgcaagaggcgggtttttctctcttgcacccccactcttcccacccccttccctcctctgaagcttctcgaagactttccaaactctgcgctcccccgggcgcgcgcggccaactcggctggcggccgggccctgcagcggcgcatctggagcgggcgtcgcgggacgcgtgtggggcggctcctgcccgcgccgcccacacgggctcagctggccggccggggctgtccacgccgcccgggggaactgcaggctgcgggggagggcggggggcggccgccgaggggctccgggcggggcctgtccaaggccgtcgcctgtccaaggccgtcagcctcatttggaggttgctgggagagttggagccctggatgcatttgcc

SEQ ID NO: 27863 - DNA, 177 bp, Homo sapiens
  chr2:232283630-232283807
  hypo
cggggccccgggagtcgcaggcaccctgcctggacgctgttgtggggcctgaacgaagttcactgctgccggcgcccaaaagcgctcgctccagctcctgcacctgctcaactgtgtgctccctttcacgagggtcggaatgcggtggatctgagagagtggagtctgatcccgccc

SEQ ID NO: 27864 - DNA, 1255 bp, Homo sapiens
  chr2:232790030-232791285
  binary
cggctcgcgcgcctccgaaggccggctgggcggcgggcggtcccgggccgggctggggctgggcgtcgggtgggccgtactcaccgccgccagggggcgccgcactaacatcccaggccgctcatggagccgattcggtccagcttgaggccgaagcagcccttggacaagcccttcttgttggctcctttgtatttgcgcgcgttggggtgctcttgcagaaggcgagcccacgctgcccgcgacttggtgtccacgcgcaggtcccggagcagtcgcgaccggtcgcccttgagattggcgcccccgcccccgggagccttgtcgcccttcttctgaccgccgcccgcagcctgcggctcggccagctcctctgccggcggggttcgcgggacctgtccgaggaaagagcgggcaggtgaagggacacgcggctgcagcacgggggactctgatgctccagccccacgcgcccgccggcgcggggtgtccctcccaagcccagagccgcccccaccgatgccggccagcttggccccgcatccacctgccacgcggccgccttcgccgctccctccggaagccccctgccctccctttgctgctcgccgggcaggccacactggggtagggggctgcgcatgggccgatgttctccggaggctggagaagtggacccccgaatccgcgcttcgagggctccccggctctcgcccacgcgcatctcggaggagacagccgcctgccttccctctctcctgggtcctgcgcgccgcattctccaagcccccagcctcccacgcctctcccaggctcggcgtccccacgacagcacccaccttcggcggcgccccgggcttggcttcggagggccggagggagagcagcgtgagcagcagggcgcaggccagcagctgggagagatgcatggtgccgctggggtcgaggggcgcacacgggcggcagcgagggcgcgcaggtcggcgggcagaccagcagggggatgcggagcaggctggctgggctgcagggcgagcagggtcccagtgctgcgcggcgccggctgggtgcgctctgagcccgtgactctgctcgcgcctttataatccaacctgccgctgatgtcatcctcccgcccaccgggccgcccgggccaatgacaccacgcacgcggccgcgccgagggccgggagggggccgcgggggctcccctcccttatcccaccccggagggatcccgcggctcggcgggctc

SEQ ID NO: 27865 - DNA, 774 bp, Homo sapiens
  chr2:232791318-232792092
  hyper
cgcacaggggaactccatttgcagcgagcgcgcgccctggcctgccgagcatcggtgcgcctggtgccctgtgcacccactaggtcctcatcgcactcactctacctggaagggatacgtagccctctttgcaggtgcaaagacaggctcagaggaatgaagtcacttgcccaaagtcatacaggcataaagttggcgctgcccgaaatccacgcagccctgcttgtcgccaaactcttccctgggcacctgacagccgcgggatggcattgcagctccgcctttcacctgccggtcagggcgggagcgcagaccacagcgacgtcgttaggttggggaggcagaggatggggttggaggactggggtgggaggcgcagggagagcggggttcgcctgggccgcaggggggagcgcaagtcttccacactggagagtgcaggggtgtcgccagcctgagtgtttgagcgcaaggcgggaacgaggggactgcgagcgcggaaccaagatattcatgctcatgcgtgtgctccgcggcatcgtatgctcgccagttactgctctaggttcacgttcagccggtttcggccacacagaacgtcccggggtctgactccgctggtgaactccctctgtgggaacaatgcgcacctgaccttgcctgcacccacgcgaggatccgctgctgggggaagcccgctccagtatcctgtgcactttcacaggctggggagagagcttcctagccagcggcccagtccagcctctgccagcc

SEQ ID NO: 27866 - DNA, 135 bp, Homo sapiens; identical to SEQ ID NO: 10508
  chr2:234206672-234206807
  hypo

SEQ ID NO: 27867 - DNA, 108 bp, Homo sapiens; identical to SEQ ID NO: 10509
  chr2:239188890-239188998
  hypo

SEQ ID NO: 27868 - DNA, 193 bp, Homo sapiens; identical to SEQ ID NO: 10510
  chr2:239316302-239316495
  hypo

SEQ ID NO: 27869 - DNA, 110 bp, Homo sapiens
  chr2:240965878-240965988
  hypo
cgattgtaaaacagtgggaatgcagctgtgtaaactacggccggttctatggatgtttctataattgaagaattgctttttgtcaaaaatacggattcccggtccccaac

SEQ ID NO: 27870 - DNA, 224 bp, Homo sapiens
  chr2:241157285-241157509
  hypo
cgcctttccgcacctgctgtagtccaaccacacgggcactgggcggtggccttgatctcagtccccgttgctcacggggtctcagatcccacctgtgaggggctgtgctgacccgaggccccttccaggacccgcggggttcacaattcaagtgactcaggccctagaaggcttgtaccatacaagtgcaggttgacgccccatagcagggctcacagctttgc

SEQ ID NO: 27871 - DNA, 781 bp, Homo sapiens; identical to SEQ ID NO: 23571
  chr2:241541936-241542717
  hypo

SEQ ID NO: 27872 - DNA, 120 bp, Homo sapiens
  chr2:241543433-241543553
  hypo
cgccccggctcacacctgctggccagcgtatttactccttgctggctgcaccctctcagcagtggctgtgtagaccataaccctgggaacacctgcggggagaagcgcccttggcctggc

SEQ ID NO: 27873 - DNA, 642 bp, Homo sapiens
  chr2:241864772-241865414
  hypo
cgcgtcaccccgccccgcgaaaggcacctccctcccagcccctggcaccttgtctcaggcattgagggacgggccaaggttgcagagccagagccaggagagctcggggcaggggcagatatcgcagggaggcaggagggcactgggctggcacctgggagagccaccttgatgctggcactcagtttaggggtcctttgtggggcccatggcaggtgggggcagagcagcggctgtgcacctgagcccaggtcagttaggcccagagggtttggggttccattcaagccccttgacttggggactctgagcgcctctcttaggagaggcttcctacccccaccatgccctgtgggttctctgtccaggagcaccggcctctgtcaggtgaacgcgctcctgcgggagcagctggaacatatgaagaaggccaatgacgcgctgggccgggagctggccgggatgacgggcagcgtgcagcgcctgcagggcgagctggagctgaggcgctgggcccagagacaggtgctcccccaacccttgctcacctcatggcggccgcctgtctgggtgcctatggctgggtagcaggcagggacatggtgagggtgcactggctcagtggctgtccctcttggggac

SEQ ID NO: 27874 - DNA, 373 bp, Homo sapiens
  chr2:242436371-242436744
  hypo
cgggtgtcacccaccctcggggggctgtggctggatcagcaggctgcccaggacctggacccgagtggctgcttcccgctggggcctccacatgggctggggccaacgtccctcgaccgtgctcctccctttgccgtcctcaggcaggccctgccttcaccacctctcacccacatcctccatcctccctccccaggctccaggtggggctcctggagggcacacctgggcccaagcccgctggccacgccctgggcacacagatcctggctgtatcacatttctgaggacggtgctgactgcccatcagcaggtgacgttgatgcagggtcacgtgactaaccagggcggcacctgcccggggatggacccc

SEQ ID NO: 27875 - DNA, 783 bp, Homo sapiens; identical to SEQ ID NO: 24253
  chr2:24272450-24273233
  hyper

SEQ ID NO: 27876 - DNA, 432 bp, Homo sapiens
  chr2:242735082-242735514
  hypo
cgcagaagtggcccaatggcagagcaggagctccgctctcagtgtggggcctcgtttgggtttgggaaaacatgtcctctctcacgaagacgtgggtgtctccagcgggaccctgatcccgcgtggggcgcatggccctctctgctctgcggcccctctcgctctcctctctgtgcctgggaattctagtgtttactgggccttggccgctgggagcctcttcaaggtggttccattttgacgtaaggactggaggggtgcattgaagaattgtagagtgcaggtgaagggagggcctggaagctcctgtcccgtctcctagaagcgtggctgtggtggcactggcattggagtctgaggtgccgcgtgtgccgtgaggatgaagtgtgagaaattttgggaggtcctagttctaccatccccagtgtcttc

SEQ ID NO: 27877 - DNA, 771 bp, Homo sapiens
  chr2:27484883-27485654
  binary
cggacggtcagccgacagacaagatggcccacgggggtgggcagggaggtcggacggccgctcagaggggcaggtggacggtggcggcaggcgcgggggccggcggggcgcgttggcggttctcctgccacccccggcccgctgtcccggccgctccgcgcgcctcatttcacacctcgccgcccccggccccgtctgtgcggagccgggaatacccccgctgcccagaccgcacctgctccttcctcgccgccccctcgcttcccggcggccgcccgccccccaggggcccgcaagacccgcgcggagcccggcccatcctcgggccccggcgcccacagctggccgcggctggagggggcgcgcggaggggagcccccggggcctacagagggagctctgaagcctgggcagcgaggcgctcccgccctgggcccggggcaatgcggaccttggcgcaccgggcgagggctccggcccgaccgagcggcagctgctcccagggaaggcaggcgccgcgggggtggcggaggggtccggcggcctgggacgccggccggaggggagtgagaggccgcttcacccgaggaagtcaggcggccgggaggaggcgtagccggctgtgtagggctgggcgctccgtgtggccagaggggatgaagcggggtgcagcggagcgagggacccgcggtgcgctggggcggccgccggggcccgcgccgagagagacaacgaaatggacggagggtagtagggtggcgcccccgggcc

SEQ ID NO: 27878 - DNA, 229 bp, Homo sapiens; identical to SEQ ID NO: 10518
  chr2:27668586-27668815
  hypo

SEQ ID NO: 27879 - DNA, 1182 bp, Homo sapiens
  chr2:29337909-29339091
  binary
cgtgggtgtagcacggattaggccttttacagcaagcgctgccagcagggaactggtggatgtactcttgaccacgctcggctggactctggggagcccaagacgggtaagactaggtccccggccccagcagctggtgggggcgccgcaggttagagacgtgaggccgcgaggctgagggctgtgaaggcggtgggcacgcacggcgtgccggggccgcctggcttcgcggcgggggaggtaacactgcgacaccccgcagacgctgtcagccggggtcgcggccccgcgtgcgcccgatcatctgactgctggggagtgcgggggcgcgggagccaggcgagccagcgcaggcgcgcgctgcctcctccgtccccaccgagtccccagcgcgtgcgcggggccgtggccgaggcctgcgcgccgcccggccgcctgcactgcgcgcgcgcccaccccgcgtgggaggcagcgggaggggcccggagaggtgtggagcggcgcggcgggaggctccgtgggcggccacgggagacagcgccggcgggagcgcgcctctcggcctttcctccgcgcccccgcgtccccagccggccgctccgagaggacccggaggaggcaggtgggccgggggcgcgcggggcccccccgggccgcgggctggccggcggcggggttggggccggggtgggcggccctgggggcccgcggggaggtcagtggccccgggagggtcgcgcagaggcgctgggggctgtggaagccccgcggccgcctcccgtgggcaccggtgtcgctggccgcggggaggccttctcggggcggagcggcccacccggcggggatggggactcctcgtggcggccgctgacggacggcccaactttaggttgaggggcgcggggtgtgcgggacccggcggcggagctgggctctgggccacgaccgccagccgcggctgccccgagagtccccgcacgcgcagtggctttccaacgcggcctcttcccatttctcacttgactccccttgcgcattaaattgtcgagaaacctttggccagtgggtcttcaaagctaaaccaaatggctgtccttgcagtccttggctacctgagatcccttaattctgaaccatccgcacctgggaggggaagttgaaaggagcgctggagctgagccc

SEQ ID NO: 27880 - DNA, 1227 bp, Homo sapiens
  chr2:30143623-30144850
  binary
cggctccttccacctgatctccagaggactgtgcgtgcgcgcaagtctcttgctttcccccaactgcacggaggcgagcaggagtctaaatgaaacagacctggaagctcaggggcgagtccagagacactcaagcacactgggctcactggctgggaccttgagcctcccgctctccgcgccgagtgccgcgcccccgtctgtagctcgctgcgctcggtacagaggaactactatggttgaagggaggtggcagttgggtaccgtcctctcctgccccccgcagtcggagctggggtctgtcccctctcggggcagcctccaatctctgcaacttttaaggctgagaacggcggctcccagctgctgcacgctgtcctggccgccttttgcgttccttttggctcctccaagctcttctgcccggtctgggcgggaaccgagggcggaggctgccgtcttgcgcaccctcaagctatctctccgctgcgggaaggcttcggactgtctgcctgctgaacttctgggcgtgaatcccagcccccgcgctgcgcaagtttgcagcgtccttgctctcaccggcgcctcggctcctcagagttcgcaggcactggagcggccccggcggcagcagctgagggcgttcagggcaggggcgcccgaaatcttgccgccccctcctcacccatcatcagcgcccgcggctttgggtggccgaccagagggcggccggaaagcacctcggtgccccgcgaccctccgaacagaggcggcgggaggtaccagctgctaccaccgctgccgcccccagagccgctggatcgcatctgcctgggcgcccgccacttgcagctggctgagccgcgcgagcgcgcgcagggagggggcggggcccggagggggcggggctcacaagccaactccgcgctgctgcccgacccacgcagtccggcctcgccccgccccacccgcaccctccaaccaatggcgtggctcgatcggctcctatgcaaatctgcagaggcctcggcattcattgagaaaaggagtgagcccgccccaccctccctctgttccctctccagtctcttgttcttcccctcctctagattccctgccctatttctctgcagtgtgaaagggagcaaatgtgagaactggaagaggcctttgcaatcaagcactctccctaattatacatttaagagattaaacgggtccgacttc

SEQ ID NO: 27881 - DNA, 1550 bp, Homo sapiens
  chr2:31360210-31361760
  binary
cgccaataccaaggcgtctgtttttacaggctctttcgtggtgttctgggcacattcaacttccaatgcagctgagagggtcgggaacagttagagaacaggggtggcagccgcccgggaggctgcaaggcgctcgcccgcaacgcacaggcgcgcgcggcgcacccggcctccggcctccccaggtcgggcctggcagctgcgggaaggaggtcagcgcagccgccacacttcgcccgggcgctggcccgacccgaccgccggcgactctctggcagcgcccggagaccgccagcccctgggccgcccgtccgcagagccccctccgccccgggaccctcgcgcgcagctcaagttgggagccccgctccgcaggcgagcgcgcgcccaccacccacacccactgccactcatgcacaccgcgggtccggagatgcccccgagcgttttaaaatccagaaacatcacatggtagccacatccggcggctgttacctgctcgcagcacccagaccctcgccctggtttcccgggagcccgcaaacccggcacgcgggctgcgcgccctcccgcaagccaccgctcagcgccagcgcgccggcaagccgcctaccttaggggtctgcacttcaggtcccgtcggcacctccaacttcctcttggttacccagaagaacagcagcaccgtgatccagagcaccccgaagactggcagaaccagccgacgagtcaggcgccgcatggtcccctttgccgcttcctctccgcggcgctacgtcccgggggcaccccccggcggtcagggttggcggggcaggagtcctggcgagcgcctcgctctggggagctctagacccaggatccggttggaggggcggcaggatcctgcaaggcgcccttcccgcttcgaagagaagcgagcctgggtggggggtgcagggcgacccgaaacgtggcagggaaggaccgagggcagccaagctggacgcccgctccagcgggagaagcgcggtggctgccgagatgttccccacgccgccaccgcggctgccgccgccgccgccgccgccttgcccgctgccgccgatagggaaactgactcgagcagcgagagggaggaatccgaggctgtgccaagcaccccgggaggagcacgagggcggagggagtgagcggggagggcgggcccgacagacaggccgactcggagcgagcccaggtgggagtgagcggggctctgagagggggcgctaccgccgcccgccgaccgaaacgctcggtgctgttgcggggccgccagcgccaagccctgggcgcagctcccagaccatcgtgggttggggcaaggcggggcggggcgggagcggtgcactcgggatgcccgccacccccagctgccagctgggacccaagggccggccctcgccaggcggcgctgtgcctgggaggactttcccgctcatcgcgggggctgcacgtggcgctgaagccggggtcccacccccaatgtgctcgtcctaccacagccaaggctgggattccagggcgcc

SEQ ID NO: 27882 - DNA, 835 bp, Homo sapiens
  chr2:31456697-31457532
  hyper
cgattcaaagcagggagtgtgatgaataggtcaactctgtcctcgcagccgtccctgagagggcgctgttcccaaatcgaagccccagaggcggagactgagacaccggcactctcccactggactgggtcagcatccctctccccgcgcggccgcaggtctagagctgagcgcctgcccacaaacatggcggcgccctgcgcggcttcccgtcgccgcaaccgtggggccggccctgccttgccagtactaggggacttcctctgcgcgccggcttcctgcccagctggcatttaaaccaccgcctggggctgcaggatgctgctgcggatgcagagctgtccgcgggctgggcagcgtcgccgtctcccctgagccgcctcggtccggcaggagcggagccgaagcatcccttgctgcacgcagggcagagcaggcgagggctgggggccgatcggggaccccggcttgggaccccggcatctggcagtttccttgcaggttcaactttaattgccaagatttcacccctcctcctcaagcccagattatttatcctccctccggcctgggctgctggatgcagcagcggctgggcttggtcccaggagcagggagagtgcgctcccggccctcctagccgcgtgcccgggccatggtgcggctgagccccgcgcttgggtgaggcggcggcgcggctcggagcccggcggaccggtcctacgggacatcttcccctgaggaggagtcttcccctggggctgcgtgccgggggcgagcggcggccgcgatgttcagctggctgggtacggacgaccgccggaggaaggacccc

SEQ ID NO: 27883 - DNA, 287 bp, Homo sapiens
  chr2:38762353-38762640
  hypo
cggtccaggccttggccagggaagcatccatggacttgggcgttcgttgcagaatgttcagacaggtctggatgaggggtgaggccctgccttggaggggctgccctccctctgtggcacggaagccctgctgcctgtgacaggaggcgactgcacctcacccgcggcctgtatgctgcaggacccagcgaagagcttccttagcttgcagctgtgcagacactaggaaagggagcacctaccagggagatttgccttcttggtccggtagcaaatgcagtcccgcc

SEQ ID NO: 27884 - DNA, 670 bp, Homo sapiens; identical to SEQ ID NO: 23197
  chr2:40678194-40678864
  hyper

SEQ ID NO: 27885 - DNA, 761 bp, Homo sapiens; identical to SEQ ID NO: 22874
  chr2:40678936-40679697
  binary

SEQ ID NO: 27886 - DNA, 279 bp, Homo sapiens
  chr2:43037884-43038163
  hyper
cgcaagcaggaagcagctcgcagtggactctcaataccccttttccgagctacttgttgccaccgcgcgacatccagccgctcgaactcggacatccacccactgcgtccttctagtgctcttcttaggcgggtcctgtaactgcacctagtcccggaccacaggagggcggatggaggtggcgaggcgctccactgtggcggggtccctagctggccgtggggatcgaatattctacagggcacttcattctacagtgtgagcccgagctcccggtgc

SEQ ID NO: 27887 - DNA, 70 bp, Homo sapiens
  chr2:43413645-43413715
  hypo
cgcttctaacagagtcccaggtgacgcccatctgacactcggagtctcatgggaccgagaagaccttagc

SEQ ID NO: 27888 - DNA, 974 bp, Homo sapiens
  chr2:47796765-47797739
  binary
cggtagcccttggcacgtattcttagaggagaaaacggaggctcacaaaggtcagatcacagagccggccagtgttggagcacaggcggcccggggtgagcgccagaggtgggctttcttccctcactgaaagccgggagggagagagagagagagaacgggggccggcggagaagagggcgagacgaaagtaagcaaagggacattagaagggaaggcagagccgagggacgcggaccgagcggccgagcagtggaaagggcggcaggtgaaaggcacagagaggaaagatgcgcgggggacgcgccgctcacctatggttgacaccacggtgcccacgaagtagaaggcgccggggaagtcccagcgcgggcgcagcgcgtcggcgcggacgccggcggccagcgcggcctcgtagtgccggaggaaggcgcgcagctctggctcggccacgccgtgcgcagcgctgaagttgcgcagcgtggcgccccagcgcgcccgcgcctccgcctcgccggggctctcgagcgccgagaagactgtggcacccgccaccaggtagaggccgatgagcgccgccagcagcacgaagcggccggtgtcctcgttgaggtgcgaacggcggcagcagcagcagcagcaggaggggcgcggcaggcggcggcggctacggcggggcgggggccgggggctgcgggaggacatggtccggagctcagccccggggccggggcggcgctcggggcccgggccacgacatccccccggcgggagcaggagcgtgaggatggtggccaggggtccggggccgccgcggagcccctcgccgccttcgcagagcccctcgtcgccttcccagagcccggacagaggggcgcctccgcctcctccccggcgctcaggccacacgcgagtcccgtggcccagcgggtgcccgggcaggggcgctcctctgcgcgccccgacgcctcgcc

SEQ ID NO: 27889 - DNA, 953 bp, Homo sapiens
  chr2:66652787-66653740
  hyper
cgctcttccgaattatttaggaaagccaacacgcaattatgcaaaagtgtagataaggttctccgaagcagaaagcagcagcgcgggacgcgggtttccccttctctggcgagtaccagtgctgggaggctgtttatctgtgtcctggtgctgggacaggacgcaatccaattccagctctcggtcggttctgccgctctgtccccggttctgcagcgcactctcttactccctctctcagtagtgtccccggctgtctcctttcctccgtctcccggtcctctcccagcgtcacccctcactacctatacccccgcgccctacccccacctggggcgctgggttccacgcctcctcaagaggtgtgagcgcccgcgctgggcgcccgtagcgcggccctcctgtgtccccacttccacccggcggccgctggaagccgggagaaggaacggcaccaatcccctcacgcttctcccaggacgtctgatcccattagcgcacctgaaatcacaaccttggccacaaatgcgcgcttgttgcgacccctccgagtgggccgccgtgccgcaggagccactctggggccggggtccccaacctctcccccctgcaagtcctaaaaggaatcgtagagcaattgatctcggaggagatgagcgcaccccggggctcattgctgcccctgaggaagagccgtccaggaacggaggcgagaagcttccagaattaggccaagaggcaggtggcggggtgatccggcgtccccgagtccagctggggagaaaggcgccctcggatgctcagccccaaagcagcagaagacagaagccggtgcgccatcgtcgctgcgccccagtccgcgggtcctcgcgctcctgctccggctcccgggctgccacccaccgctgcccaagcctgaccaactcccaactccctccggcacaggctgaggc

SEQ ID NO: 27890 - DNA, 126 bp, Homo sapiens; identical to SEQ ID NO: 24274
  chr2:67626117-67626243
  hypo

SEQ ID NO: 27891 - DNA, 1118 bp, Homo sapiens
  chr2:68546231-68547349
  binary
cgggcccgctgggagcggcgcgaggccagaggcccttgagaggctcgggctgtcctgggggcctcagtcctctgcctgtaccccatgggggaccctgctgccaccaggcgccccgcactcactcgacctgcagcgtgctgggtttaatcttcacctcaaccttgtaggaggagccggtgagcagcttgatggtgcggttctggccgaagcgctgcccgtccaccttgtaaaagaccgggccgtcattaggctggatgcgcagcgcgatggagaggcgcacgaggcccggcaggtcccccatgtctgggcgagggtctggcgcggcggctccggggggcggaggacagcgccggctgcggccgagtggctggagcgcgaggggcggagaggaagcgcggggagggtgagggaggtggtggagctgaggctgccgctaggaacccgcgccgtcgccgccgtccgcccgggcttttgaggagcagctccttaggctgtggcccccctccccactcggcgaggaagcgggcccaagagacggctccaaggccgcgcgcttccccatcccccgctccagtgctgcgccctccacgcacccgaaggctcgctctggcccgcaggccgccgcgcagatccgcgcagctgggggcgagggagttaatcctgtttacgcaccacaatccccttcagctggggaagcggacatttaggctcctcctagaacagccccgggcaggaggaggagaggtttgggaggcactgggaaggcgctggagttaagcgaccactatgccaaggagcgagacccccggaatctggataccgcctcggccagctacgtgaggtggacactgctgctcgcggatccggcgccagccaggcgggaggaggctgagggggggtaaagggaggcgggaaggggggacaggaaaccgctagccggtgatttaaatttcaggaaatatgagtctttccaaagcttaggggaaatggccgaggaaaggcgcaattccacgtgatggagccacgctggatgaggaatggatgcaagaggaagaaaataaccatattcaaggagctacatcttcttgtgggtgtacatttccattatacgtatgctc

SEQ ID NO: 27892 - DNA, 137 bp, Homo sapiens
  chr2:69720085-69720222
  hypo
cggggtaaaaccaaatttgtagtttgcccaggttctagagacactgaaccctgagccctttcctcactcaatattcaaaaatgttaaaaaaggatgcagtaaggctgaggcaggagaatggcgtgaacccgggaggc

SEQ ID NO: 27893 - DNA, 814 bp, Homo sapiens; identical to SEQ ID NO: 26803
  chr2:73518220-73519034
  hyper

SEQ ID NO: 27894 - DNA, 798 bp, Homo sapiens
  chr2:73519055-73519853
  hyper
cgccaccagaggtttagggaagtccgccgcggcggcgctgcgaaggcccagcggggaaagctgaggctgcgtactggccagaaactctccgccgtcgccgctactccctccctccccactaggaggggtcaggagcccagggaggccctcagccccctcccctaagtcacccggggccagcgggaaagcgtcataggccccgctgggatagagtctgttggctgggacggccggcagttccgcagggcagctgatggacagcaagtcctcaatcttggtccctattacgggaaaacgagcctccggggcggcctggtagtctccctgtgacccacagttccctggggcccccacagaaagcagctcccagggcgcgtagggacccttgaaggcagagacagcgtccagcgctggcgaggcgggaggcgcccggaggccgggcttgacgtcgggcggggagagctgaggctcatacaggcactgcgagggggcacccgcgcaaggcgaggcctcccagaacgcctctgggaaaggggcagcgcccagatccggggagtaaaggtccggcggacccggcagcaaggcatcggaccccgcaggaaaaggggcatccagcggggatctggacgctgctgcctctggaccggggaagggtgccaggcctaagatgcccgacatgaggttgaagagtgcctccgggtcgtgcgggtgttcgggcactgcctgaatgaagaagctaccgctgtagctgaggccgggagggggtgtgggcgcaggcccctccaggaagcaggagtc

SEQ ID NO: 27895 - DNA, 955 bp, Homo sapiens; identical to SEQ ID NO: 24283
  chr2:74742812-74743767
  hyper

SEQ ID NO: 27896 - DNA, 228 bp, Homo sapiens
  chr2:8849838-8850066
  hypo
cgcctcgtctccttccaggctgctgagccagtagcgttgaaccctctcacctgccgtccccgcctttcctatgccctttgtccttgtaggttgacgcctgtgtcagcagagagaggaaagagacgcaggcgatcattctcccgtccttacgtggcagacagggttatttgcgtagattgaccgagatgagtgtcctgcactctgaagaaccttggtggctcctccttc

SEQ ID NO: 27897 - DNA, 947 bp, Homo sapiens
  chr2:89064565-89065512
  binary
cgctcagggcaggggtcaagagcagctggcaagggcggcgcagcctgtggggcccttgggcgcggcgggccgcagctccgggaagccacgtcagcccaccggcgctgcagctgcagccgccaccagcacacggaccaggggtcgccgaggattgggaatccccgaccaggactgcgcctccagccgtgcggaccccggggccagcggggcagcggcaagtcaggcagtctgcagcaggagcgctgggcatgggcttcggcccgggttgcaggaggcgtgcaccctccggccggataggcggcgcactcagggaccaggaggccatcccaggtgagccccgccagccccagccggagcccgagctgcagctgccacctgcaagtggtgctctggctgcagcggtggcaaccccggatccagtccttccgcctcgcgcccatcagcgcggacccgggggcgacgcagtggcgaagtcgggctgtgggcccggcggcggcaccaggcggagaagcgccactcaaccccatccctgggctgcagagggcccagcgcggagggctccgcgcgtcgggagccggtggaagaggagaagagcgcgcgggcgacagtcatacaggccttggggcagggcgcgcctcgcgctccagggagccacgccagcccgctgcgcctccgcagcaaccgccgcctgcacgtggcggggcgagagagctgctagggcggtttctccgcctcgggcctgttgggcggggccggctaaggtgcgcgtgctcgctggtcctaacggttctgttgggcgtttctgctgagaggcgggaggggctgagagtctgtgcgaaggtaggtggacagactgcattgcttgttgttgcgcttcggaggcggcgatccccgaaggcgagctgaaatacggctggagcgttcccaggctacagtttgtagccgac

SEQ ID NO: 27898 - DNA, 563 bp, Homo sapiens
  chr2:96192254-96192817
  hyper
cgccgctccccgagaggccgcaaaagcccgagggctccaagaactgcctgcagaggctcagggactgcgagctgtccgcgctgacgccgcgctccatgcggggcccagaggaccggggcgccctggaccacatggtcaggatgaccacgagcctctaacagccccgccggggccctcgcgtgccagactatgtgccccgagagcaccttgtgctgggggaagaggcggctggcggtgcaggaaatcctggcggcgcaggaaattccggcggcgcggcgaggggtggggggaggcaggcgcaggaggcgggcgaagaggagggcgcagagtagcataagccgctcggcctagcggccgctggctccacaaaggcctccccaagagccggcctcccacctgcccggctgccggggtcctggggctccgccgcccccgccccgcggacggccagcctcctgcccctgcagtgcctgcagcagagcagcttggggcccagcgtggtggtgcccaggtccgcctcagcaaggtgcccgcgcccaccttccaacccaaaaggccggcgc

SEQ ID NO: 27899 - DNA, 608 bp, Homo sapiens; identical to SEQ ID NO: 25497
  chr2:97193030-97193638
  hyper

SEQ ID NO: 27900 - DNA, 701 bp, Homo sapiens; identical to SEQ ID NO: 25498
  chr2:97427378-97428079
  hypo

SEQ ID NO: 27901 - DNA, 944 bp, Homo sapiens
  chr2:98963040-98963984
  hyper
cgccgggaggtgtgctggggccgcagaccccatacaggaggtaagttagagaaccacacgcaggggagggatgctgctgcttccaggggcgggcgcggcgctgtccgcagcccccggtgctgaaacgggccgcgggctggagagaaagtgaaaaaggatcggctacggcctcggctcccactccccggctcccatacccctccagtccagttcaaaggacaggaagccctccccgtgctccccaagccgatcgcacccccttttactcacgtcccacagccgcgctgggccgagcccgctgagccgtcggggcgggaggcagaaggagcagggctggctcccgctggggacgggtagggcttgcagccgcgaccccaccccatacatttcctcctgtcacgctgtccccggaccgccagtccgggaaggacccacttccccggctccaagtcgggagcgggcgccgcgtcttctcgagtccgcgccgcgccgggggaggttgagtcagtggcctggagggagcagggccgggggaaggcagcggcgaaggactgccccccaacccaggggactattttcccttggggattcaaagagaaaggtaggctgaggaggaggcgagaattaaaattcttttaggagtgcgcggttactttttttaatgataaaatcacacccgggatctcggacgcccggggcttagtgctcggtgatggaggagaaggggcggcgggctctctgatcctctgcaatcccctaaccggataaaggcgccgggctcccagccgtcaggcttttctctttagctcagcccgcggcccctcccgacgcccctgggggccttggcgcgcaggccctcgcagtcccgcaaccccgggccgggtgattcatttttctccctgtgtaatctccctactgagcggcgcagctgggactttaacttc

SEQ ID NO: 27902 - DNA, 794 bp, Homo sapiens
  chr20:21086501-21087295
  binary
cgggctctgcgggctggggaaaagaaggggcttggggtggcccaacccgaccgccacctcggcccggcctgcggggaaaccccacaaagtcaaggcgcggggcggggtcggggggatgggatccagagagagactcagaggggcgccccttccccccaggggtctccgaatcctagggactctctaagcccccgtggcagagaaaagaggaatttttaaaaacaaatcttcccttgcctgaggccattttccagccttccacgcgcctttgccggggaaagagtcgatgactcgccctgctcatcggctcagaccagagctaccctgagcccacacctctcctcctctctgcaagacatcccttccgccacccccagtcccgccgtcctcccctctccagacccactgaccttgggaaggcgcagacccaccgctcgccaagcctcgccccgcactgtgcacgggaagagggggctccgcgcgcagcccagtccggttagctggtcggcgtcggcggggctgccgaggtggcgcagagctcccctcccccacgccttataatttaatcacacgcgatattaaattatcaagctgctcattaatcatcacgcgagttattgggactgaacacgccgccgcgtgttttgacagcccagaaccattcgcgggggtcggggtgtgtctgggtttgggggctgggggatgtctagccactctagagaaacactgcgagccccacgcgggctggtggagcctcttgcctggaaaaagatgtggaaacgcgcaggctgggc

SEQ ID NO: 27903 - DNA, 635 bp, Homo sapiens; identical to SEQ ID NO: 24296
  chr20:21372082-21372717
  hyper

SEQ ID NO: 27904 - DNA, 1343 bp, Homo sapiens
  chr20:23029018-23030361
  hyper
cgcagttggctctgaagcacgggtccacgggctccacacactcgccgtccaccaggtcgtagttagggtagcagtggcactcgaagccaccctgtgtgttgacacagcgctgcggacacggactgggctccagtatgcagtcatccacgtcctcgcaccggtgttggtcggccgccagccggtagccggtctcgcacatgcacgagtaggagcccggctggtcggggttgggaacgcagaagtgctcgcagaggtcgttgcaggactgcgtcgcggatgcggtgcaggagcgcccgtctgcctgcagggcggcgccggctgggcactggcagcggggagccccagggatcgcattgcacgcgtgctcgcagccgccgttctccacgctgcagtcccaagcgcccggcgcctccctggcccagtgcccctggaccgctccgggcggcgcggtgcacattagctgtaagccgaggggagccaccgcggcggagctgcccaccggcagcgcctggaagtccgctccgcgggccgcgaacggggtgccgtaggtgatcgagacggcggcagccgcggcgccgggctccacagccagtggcctgcaggtggctgggaagtggaactcgcagaggaagccatcggccttcacttcgcactgctgctcctcccagatcggctcgctgggcacagtggcctcagcagcggagacagcgacgcacaacgggccgcagaggggagccccattgaggtcgagccgtgcccacctgctatagctggtgttgttgtctcccgtaacccactggaagccgcgcaggggcccgaggcgcttggggtcgccgcagccgggtggcagctgcaggccgatccagaggcgccggcggccaacgccgccgtcgccgttcagtagcaaggaaatgacatcggcagccaccgaggagcgcactgtcattaggtggccccgcagtccgtcgcagatctgactggcattgaggaaggtcgcggggcccgggtagagcgcgaagcagtcgtgctcgacgcactggctgccacccggctgcggctctgcgggtgcggggaaccccaggccggccagggccagcgcgccaaggaccaggaccccaagcatgttacccaggcgcgccgcgtgcaggcgccggggaaagcgcgggcactgcgacagggccgtgccggagcagaggggcacaggacgccgatggcgacagcctctcctgtccgtcccagcccagacacttcttgccgctgcgcgcagcccctgcgaggcagcctctgacatgcggatcggccagggctcgagtttataagtgcccggccctccctccctggac

SEQ ID NO: 27905 - DNA, 460 bp, Homo sapiens
  chr20:25058288-25058748
  hyper
cgagccgtgcgatcccgggggcccttccttacccaggagccagggcgcgcaggagcccagcaggccgccctcggcggagttgagcacggagtctggcagcgggatgcagtggcgcaccatggccccgtacagcccgtactcggccatcacgctgctgccgccccagcgcttctcccgcttgcgccatttggccctgcggttttgaaaccagacctggttggaggcaggagaagcagaaggcacacagaagagacagtgaagaggggcgcctggaggagcggaggcggcgtcccagggctcggatcttctctcccgagcatgatcccatgctatttctgaaggaaatagctcccgagggccaaccagccgccctcagggagagcgcccaggagcccccagcagcgcccacgtgcggtccggactcacgggcattcaacgcagtagggacacttgtgaccac

SEQ ID NO: 27906 - DNA, 1166 bp, Homo sapiens
  chr20:25061761-25062927
  hyper
cgctgcgccggcagaggagcgcggtacccgggactcccttttcagcaccccaaggggcggacagttccagggctcgaggccccgtactcttccaggacccgtcaatcattcgatcatttccgcccgcgtttccacctggtaccttgttcggtgctgctggtgaccaccacaggcccgggccttcccgacccacgcagctgccagaggcggagactggcgcctggcgctggggggaaaaatggccctctggagatggttgttgaagaccccagggtctcatcaaaaggttccacccggaaccaggtggtggcggtctcacatcgctgagggaacaggaccccggatgagaggcagggatttaggatgcagcaaggggcaggcggcgcagctccgcgaatgcccctcccgcgacggggcctcgctctgggctccccgcctagatctgggccgctggggccaggggtgcggtggggcgatggtctgtgacccctgcgcggctcagagcctaggggacaggggcaggagcggaaagcgcgggcctgattaccggacgtggagacgctgtcgctgcgcttctggcggccgagcgcaggcggcggacggctgggagccagcggggcagcgggctcggggcccctgggcggcaggaacggcacgtccgctaggagcaggcagggtgctcgagcggccgccggcggctgcgtgccgaagccacagaggaggccgagtcccagcggtagggccccacgcgccaggctggagccgtcaagccccgggcccgggcacggcgcgactgccggaccctcgcagccagatccctgtcctgggccagcgggcgccggcagctcggcctccaagcccagcaggtccgtgatggcgaagccccgggggcgcgagcccctaggggaaccgccaggcaccagcgccctgctgctagtgcgcccgtcggaaagcgagtcccggccggtcatggttccttagcaagcaaggcgcgagcctctctggatcccgtttgcggagggcccagcttagaggaagctttataggattgggctgccggtcgggcgcgggaggcctgaagggctccaatcagctgggcgcgggcgcgtcgccgttccggaccccgcgagatggggacgccaccagttcccctcccctcggttacc

SEQ ID NO: 27907 - DNA, 976 bp, Homo sapiens
  chr20:25565494-25566470
  hyper
cgcgcacaggcgggaggaaaggggcgaatctgcaaaacgagtacaacagataaaattcgcaacagacttctacaccctttcaatcaaccgtcccaagcgccacgaacgcgggtcccgctccgtggggggccgcagccacactggcaggagggaatcctgggcctcgaccagacgccggcggcgtcaggagaaacggcccgcgctgggcaggcggcgggcaccgcgtagctcattaccacggggggccccggccaaggccgcccgcctcaggccgagccttggggctgtgctggacccgggccctcgttcgcacggcgcccgcgccgccgccgtcgggaaaccgggttttcaagcgttcggcccagcgggcgctgtattttagggcgtgacccccgccccgccctcgagggcgaccggaagagcaggcaccacagcagatgcgccgagtctgcgccccgcaccgcgaggagcacccgaggccgcgctcccggagccgggtctggtgactaaggcgcgggtcgcgacgcaggggcggccccggactctcgaccccaccagccgcctgaatgtcccgccggacgcccgggccggctcacctgggaggcgcctccgccgtccgcccgcgcggggccaggagcgcggcaccacccccgtaccgccggccgctctttgtgtctggaggccgcgacgcaacactcctcccggcctcgaggcaccgccccctcggtgtcccggcgcagtgggcgaacagggggcggggcgagcgaacgggagagggggcgggtcgggtccgggattgcggggcggggtgggggcaaggcggcctccgcaaatctcagggcggctctggccagtttggagcctggggtgacccttggagctgacctcgctggtccctgtcggagccctgcgcgctgcggagcttggcggttcgcagctctcggggtagcatcttctggaaacaagcccggaggcc

SEQ ID NO: 27908 - DNA, 40 bp, Homo sapiens; identical to SEQ ID NO: 25512
  chr20:30297105-30297145
  hypo

SEQ ID NO: 27909 - DNA, 1356 bp, Homo sapiens
  chr20:30639044-30640400
  binary
cgactcctcccctcccccgaccacctcccccagcttgggagtcctctgagctgccaggaagccagggtggttccttcgggcagggaactttgcatggccatggtggttccttcgagagaggaactttgcatggtgtctgaatggagcaggcctgcggaagagaaaccgctgaccacagacctgcctggaagtctcgggccgcggagttggggagggccgggccagaagggaggggtcggagtggtggggaaaagagatcacgatgcttccggggtagggtaaggcctttccagggtgggttggaatctttgaagactgtggcaggaatcccttgataggtggggttaggatctctgaagggcagggttggaatctttggaccggcggtatagacccctgggtattaaaactcttaggcggcgggaggttagatcgcgcaggagcaggagcggtattggaaccctggggtttgtgttctaaatcttagggcagggttagaatccactgaagtgagagttcggatccttccactgggcagattagaatctttgggggcaagttgagtttaaaaatccttcagaggtgggattaaaaatcctttggcggggcggggttagtatcttgggagccttggagcgggtgctggggttcttagacgggcgggttcgaatccctaggagtgggatttgggatcctttggagactggggtaggacgctgggcggtgggatggggaggtgttagggaaagtggagcggaagggatgggggttcgcatccttggtggacgcgttagaagcctcctatggatggtgctaatattttttttctcttcgtggagggtttgggatccttcttgcaggagacggaggttatgaccctcggggagccggttaggatcctggggtggcgtctgaatcttcggggaggtgttaggacacttggggcggagttagcctcgctcagggcgcggctaaggcgcccagatggcctgcgggcgccaccacgtccctggtcccagctcgggagcacatcagaggcttagaggcgagtgggaagggactcagacagtgcaggacgagaaacgcccgcggcaccaaagcccctcagagcgtcgcccccgcctctagttctagaaagtcagtttcccggcactggcaccccggaacctcaggggctgccgagctgggggggcgctcaagctgcgaggatccgggctgcccgcgagacgaggagcgggcgcccaggtgagtgccgcgcacaggggaccgggaatacccggcccgcgaggggtcccaggaggcggagggagcccaggagcctggggagggctggctacgggtgcggctgggggcagc

SEQ ID NO: 27910 - DNA, 762 bp, Homo sapiens; identical to SEQ ID NO: 24298
  chr20:3073252-3074014
  binary

SEQ ID NO: 27911 - DNA, 207 bp, Homo sapiens; identical to SEQ ID NO: 10539
  chr20:32332893-32333100
  hypo

SEQ ID NO: 27912 - DNA, 230 bp, Homo sapiens
  chr20:33131627-33131857
  hypo
cgtgagcagggccggcgtttcagggaagtggcagcttctcgggaggtgccgcagctgccatctcccgtcagcactcatgcctccgcctcagccctggccacggctccctggaattctgatcctcctctgtgagctggtattgctgtttctccaaaaattaaaaatgctcaaaggattataggttttctcctctttcgtatgtttggctctgagacactgcatgttggcac

SEQ ID NO: 27913 - DNA, 237 bp, Homo sapiens
  chr20:33134788-33135025
  hypo
cgtgaggagggctggcgtcctgcgcacagtggaaggactggccttaggaacagggacagtgattccactcagcatagccagggagcggcccagatggcagggcaaggtctctgtggagtgagggcagcagggaaggtgcctcgcaggagaggagagaaaacatacacttccctggggacgcgggcggggagtttgacgggttcggcaggtggcccttttgcagcatctttttcagcc

SEQ ID NO: 27914 - DNA, 262 bp, Homo sapiens
  chr20:34147099-34147361
  hypo
cgggcacccaccgtgaggatgtacacattgccacccatgtctgtgaactccaggtcttctggccggcccttcctcctcctctgctttcgcttcttcttgccagcctgagcctcctgcgcctcccgctccacgtcctctgcctccttcagcttcactaccggccaccagcccctcaggcggcggcagcgaaacagattgcacctcggcccggccccattgcgggccagctgcacagagcagagctcggggccccgggccccac

SEQ ID NO: 27915 - DNA, 1585 bp, Homo sapiens; identical to SEQ ID NO: 24301
  chr20:34188561-34190146
  hyper

SEQ ID NO: 27916 - DNA, 488 bp, Homo sapiens
  chr20:36531527-36532015
  hyper
cgcagtcggaggcggccggctgggcgtgcgctcgctccccgaagccggggctgggccggagccgggcgagggctgggagctgggccgggtccggggacagcgggcgaggggcagctgccggagccgggcagccaggccgctcagggcaggggacagctggcgccggttctgcggtctccggggcccagatgtgaggcggcggcgcccccggcccgagagcgcacgatgggggccccgctcgccgtagcgctgggcgccctccactacctggcacttttcctgcaactcggcggcgccacgcggcccgccggccacgcgccctgggacaaccacgtctccggccacggtgagttcggtcgccgcccccgcggacttccccaccaaaccccaacccgggccgcgccactccaacttggccgccccggggctcgaaccggcgccagtcgtggcgggcatcccggggcgccccctgccggcgcggtggaccc

SEQ ID NO: 27917 - DNA, 1084 bp, Homo sapiens
  chr20:37302417-37303501
  binary
cggtgatagttaagctgacacctgaagaagccagtcatgcaaagagtgggtcaacagctttccaaggcagagggaatcaggaaagcgatgggcttgtctgaggaacagaaaggacaacgaacgtgtgagtcacactaaggggcgccgtggtgcggcatgaggctggagcctgatcactcggggtcttactggccacggtgaggagtcagggtttcatgcgcccctgcagtcagaaagcatggcccaaccccagtgccctaagtccggaaacattcaaagctggacccagggtagcgggatccggggcctctggggacccgagagggacgttaagttcagggcttcagggtgcagccctggggtcggtacccccagcctccaacccagagctggcagcgctcgcccccttctccgcgcgggccctcagctcagctccctcttcgctccccgtgtccccgcgagcgggagggaggggatgctaggacgccctgtcggcgtcgtcgccgctttccgccattgtttagtcgtgatgctctcattttctctgaatcaacaattttctgctcggctccgcgccgaccggcgaacgcggggcttttcctcgcccgcctgatgacagcagagcggcgcggagcagctggtccggaaggaagcgccaggcgcctgcccggtcccaggcgtccgctgccgcccacccacaccagaccccgcccccgcgcgtcaagccccgcccatccataccaagtcccgcccccacaccctcacccacacaccaggccgtccccaccccgcccccagagccccggggcgccccgcccgctagccgcgcacgcgcagtgagcacggcgacccccggtggtcgggtgtctccgcaggccgaacacgctgctcgcccagctgcggatcattaccgcccttttgttctccgtcgcgcgctcgccccacgctaggaatgcaaactgtaggcgccgccagcccccccttcctgtttccctgggtgggagtgggaagggagttttaaactgaattgtgctcagactcccagcccagtcttcccggagccatccgttccttcatccaatgc

SEQ ID NO: 27918 - DNA, 1912 bp, Homo sapiens
  chr20:37351437-37353349
  binary
cgggagactgggaggggcttgggatgggaggaggtggcaggaggcgggagggtgtagagagggaagcctgtcttgtcctggcagctccaactctctggccaaagccctcgggccgccctacttgtgcgctgacgtgagctaatctagaaatactgcagagaaagagtggctggggttcccagggagaaagggcctcgagagaggggagatggggagctgcttccttttttgtttccttcggtttttccgtccgcccccgcccccacttccagtcacagccgctacttctccattcaggctgggactgccaggtggagccctgcggtttactgctcaggaggagcccggccaggacatcagctggggacttacgcagggacccattcagagcagcggaccctcacggagactactacaaagggactaacacaggcacgaacgcaggcaaccccattcgggaacacatacgtaatccaacacactagctctggcacacacactggaatgcgcgcaaaaccacacagacacagaacacacgcggttaccaaacctcattctcagaggccacactgatccaacctcaagcagagtctgatacagcatcggtctttgtctctgggtctctcccttactcgcgctcacacacccgtaccccaatcaacacaaacagcccaagctttcacagcctggaggcggccgtcggagcagggccccagcgcaccgcgagcctctgcttcctccgccttgcagcgccgcgagcccttctttcctccgcgcctggccccgtctgcgcccctctcggcgtgggcattcgcagacccgctaggaggctgacgagaggtgtcctcatagagtcctgccttcttccagacccccaaacgaaaagaaagagaaaagccaacctttcgcctccattctgcacgcatttggagagcggctggtggcgagcgatccgcacaatcgcttccctcgcggcgtccctggacgggcggagagaacccgggtgactgagcctgaggctgagcttccttgggagcgatccatgccagccacttctaccttcaagggggactcgcggccgggtttacgcgcgaaggatgggtgccagggaaactgacttatagacgacccgctccgcgagagactgacaactcagtcctgcgggctttcggggcgcccagaccagtccttagccagaggatctggggctgcacagctcccggaccctggagggggtggtccgggggtgggagactgcgagcatcagcccacgccggccccctcccaccctgcggcggcgaggtgggaagggccaggatgcgagcttagcacctcccctagaaatgcagcacttcgcccccccacctcccctgccctcggcgctccctctttcacgcgctccctcccgcctccttcccaagggcgcccttcttctgcccccagctcacgtctgaatccctcggcgccccctttctcttctcctagccccttcctcacgtcccctgcctccgggtatttcctctctccaatcccccacccccgcaccgcctgattccgaggggcgggagcgcattgggctgcgcacgggtgggggcgccgcgccagcttcgcgtagctgctctgacgccgctgccgccgccgccgccgccgccgccctccgcagcccagctcgcgccccgcggcagctccgcagtgcactagccaccaccgccgccgccgccgctccgccagacctgctgccagcttgcccggtccagccctgagagagcctcgaacgccagctgcgagggtcatgagccagagagccccggggcgccgcgcggagagcaagcggagatagcgactttgcgccccccagccctcgccttcttgcatcgcgttccccgcatcctcgggtccttctgtcctttcc

SEQ ID NO: 27919 - DNA, 914 bp, Homo sapiens
  chr20:37357365-37358279
  hyper
cgccgcgcttgggaggccaagctttaaacatctctggttcctagtttctgattattcggggatgggggggatgggaggggacagggattcacgatccatcgcgtctgcgtttctgttgtcctttcttttccacaacaccctggttttggggggaggcggggtgcatttgcgggcagggttctctgtccttccaagtggggccccgacactttggttccagtcatcgagggggttgggaagggagggagagggggcgcagctcgcaggcgtggcaacttgaccttgggggaatatttcacatccatccagagctcggaatctacagcgtccagccatttccagcaagagcgcttcccattccggagacgtttcaaccctgcagcgggaaaggctgactgggaaatccattttgggtgggcaatttccttcaacgaagccggaaggcgagaagccgcggcggggccagcttgcctgccggttttcaggaatctaaactctcatcttgtgcaatttatcaggtgtggaactgttctactgtgcgtgtggtgtgctcgtggtgaataagatgaaatgtatatcagaaaaaaatctatctctaatttagagtgcggtacataattatatccgcaaataaagaagagacaaaggcttgcgcggcccggtgtcgggtttgtgtgttcgtaccagccgggatcccctggcgctgggaggcgtgggaactggctcccgccggctgaaaccggagatggtgagcagctgtggttaaagggtccggggagggctctagggagtacaaagattagttggcggcgaggaggctcctcaggtgtgaggaggaagctgaagacggagagtgctgtagcggccccctcagctgccaggtcgaggtttgttcgaatctctcccctgggggc

SEQ ID NO: 27920 - DNA, 2195 bp, Homo sapiens; identical to SEQ ID NO: 25521
  chr20:37433723-37435918
  binary

SEQ ID NO: 27921 - DNA, 981 bp, Homo sapiens
  chr20:39316787-39317768
  binary
cgtccttggtgaagccccgcaggtggcggttcagctcgcgcacggacatggacacgagctggtcgtcggagaagcggtcctccacgctgccgttgccgcccgccgccgtcgccgaggccgtcgcgtgcggcccgggcccggggtggctagtgggcagctgttgcgccgggctagcggcgctggacggcggcggcgacgcttggtgatgatggtgatggtgcgggtgagcgtgcgggcccagctcgtcgtgggccacgccggcgcccgggtacgcgtggtgcgggtgagggtggtggtgatggtggtggtggtgagcgccgcgaaagctgtcgaagctttgcagcggctgtggcactgggtgcgagccgatgagcgcttccaccgcgtcctcgggcgtcaggttgagcgcctcggggttcatctgctggtagttgctcgccatccagtacagatcctcgaggtgtgtcttctgttcggtcgggctgaagctgggcgacgagggcacggagctacacggagtgctgagcggtgtggaggacaccgagccggctggctgcaggcgtgtgcagggcctgcccggacgctccgcgcgccccagtggctccttcttcacgtcgaacttgagcaggtcgaagtcgttgacatactccatggccagcgggctggtgggcagctctggccccatgctcagctccgcggccatcgctgaagcgaggcgcagccgccgctgccgcccgggaaactttgcggccggccggagcgcgccgagccaagcgcgggggggaagagcggagaagagctggggaggcggggagcgagggcgcagcgggccggggccgccggccaagcctttgtctggggacgcggcggcgcgccggagagtcccgaggctgcctgcaccgccccagagctctgggctgtgcccgcgcagggaccgggccgggtagagtcgggcggggtggagaggcaagcggagcgcgc

SEQ ID NO: 27922 - DNA, 328 bp, Homo sapiens
  chr20:399954-400282
  hypo
cgcgtggaaccaccaccctttaaccctcctccacagatctgggcttcaaggacctcacgctgcagccgcggggccctctggagccaggccccccaaagcccggggtcccccaggaacccggacgggggcagccagatgcagtgcctgagcccccaccggtaagctgtccttggcctcagtatcctcttctgtgcccctcccttgcctcaccctgcccagtcgggctcacagcaccctctgctcccaggtgggctggcagtgccccgggtgcaccttcatcaacaagcccacgcggcctggctgtgagatgtgctgccgggcgcgcccc

SEQ ID NO: 27923 - DNA, 793 bp, Homo sapiens
  chr20:401364-402157
  hypo
cgtcccccatcccccatccctactggctcccagctttgcctgtggctggtctgacccagccctgaccacgccccctggcccttcccccttcggggtctgacccgcccccgaggccctgacccgccccgtggccccgccccgtgtgcccagcggaagcagcagcagcaggaggggaactacctgcagcacgtccagctggaccagaggagcctggtgctgaacacggagcccgccgagtgccccgtgtgctactcggtgctggcgcccggcgaggccgtggtgctgcgtgagtgtctgcacaccttctgcaggtgcggcccccagtcccacccccggcaatgcagcttaatcaaagccgccaattacgcagggctggacgtgggtggggccctgtgctctgatacctcattggacgcccgcgaaaacctacgaggtaggctccgtctccccatgttgcggacgaggaacctgagggaaagagaggcccagcgccttaccccaggcccacggctcatgagagaagcagcctagacgtgagcgcaggcgtggggggagactcccttcccctctacctttcgccgcccgggctcctgcagccacgctgctctcagcctcgctgtgggcatctgccagtttctgagtctcctgtcatggcccccccacccctgaatgtggggaacacagacccgctcaccacagcggacccttgtggagccgcccctgggtgacaggctccgtgcctgcctcctgcagcttacattccagcagagaggctgatgagaatcggataatc

SEQ ID NO: 27924 - DNA, 976 bp, Homo sapiens
  chr20:41817376-41818352
  binary
cgccgctactcttgggggggggggggctcgggggtggaagctgcctgcggtggggcttggtgatgtgtaagaccctggactgtggtgccctccagcacccgccaacgtgcctttaggagcacggcaggcaccacccccccgcccccgctccccctactctggggaactacctctgctcaccgccttcccgtggccaaacccaaatatgagttccccgaacttttcaggagcggacgcgctcacgggtcaaatccactcccctccaagggccttaacacgggcgcccagctacctcggagaaaagccagcgggtagggcggaggtattgctctcggtcatcaacgcaaacatcccctcgggtgcctacagcggcctgcttaggggagcagcgtgttcagagcaaatggagagcttcctgtatctccgaggaaaaaagaaaagccgccgccccggcagcctcggcctgctggggacctgtcctccccactaaaagcgcgcgctgcccgaggagctgcccgggagagaacgctccaccccgggcgtcggtgccgctcctcgtctcgccgccccaaacactcaagtggcagattccgacaagtgggaggcagcaagtggaaatattcgcaacaaccgcggaaagttactccagcccggggggccggcaggaaactgaagcggggaacttcgccaaacgcgggctgccgagggacgcgaggggccgggctcgctggccggggcgcgcggggacactgcttcccgcgcctgcaagctgagacccgggttccggccatggggacccgcgcccccgcgagcccacacaactttctcctccgagggccccgcggctgggggcccgcgcgcatccaggagggagcggggagcccaggggagccgggcgggcgcactcacctgcggcgctctgagcccgggcgccgggcagtggcggcagctgcagcctcaggagcaggctgagggc

SEQ ID NO: 27925 - DNA, 929 bp, Homo sapiens
  chr20:42875764-42876693
  hyper
cggcttttctggcgcgggccagggggaggaggagaaaggagctcccgggatcccctcgccccctcccccaactgcccggtgagtaatgacattcacggagcggggagggagggaggagaggggcaggctcggcgaggccatgtgatgctgggcgagagagagccgccgcgccggagcctccttctttcctgcctctgattccgggctgtcatggcgacccccaacaatctgacccccaccaactgcagctggtggcccatctccgcgctggagagcgatgcggccaagccagcggaggcccccgacgctcccgaggcggccagccccgcccattggcccagggagagcctggttctgtaccactggacccagtccttcagctcgcagaaggtagagccgggccgggagccgcctgcgccggtggccaggaagcttggggaggggagccccagggcttgagggatctgagggcggcgaaagactggaggggggaacctggggtttgggggtcccggaggtcgggggacgcaagggttccttccaggactgctcacctgggaagcgacaggccctgtctgggccccaggagcacagttctcaattttaggagcatccattctgcctctttccctcccagaaacagccggtctgttggggtgcggggcgggttgggggggctgagaaaagagacaaaggcgaggggaagggaatgggcactgctgggaaggcggcttggtggggtgggaggtgctgctgctgcggggagggagaagaagcgctacttggggtccagcctcggtagccccctctcagtcgctccctgcacgctgccgtcccggacactgcaggcccccaggtcacagctcctctgcccctctgtctgcgggccgccttctggctagggcttggagggtctgtccccagtcgtc

SEQ ID NO: 27926 - DNA, 110 bp, Homo sapiens
  chr20:42931324-42931434
  hypo
cggggaaaaacaggagcaactctagccataaaataacccgtatatgacaagttaaattgagaaagaattacctactttcacgaagtgcgctgaggtttattgggctctgc

SEQ ID NO: 27927 - DNA, 208 bp, Homo sapiens
  chr20:43926539-43926747
  hypo
cgagagagatgcgctcacctggacagatgctgcctctgaggttctccagcaggtgcgtcatggtgccgaagtccggggcataggacacgtgcagttccgctggctccgaggcgatctcgcgcagctccgcctccaccgccttgcccacgcccacggcgtacatgacgatgcctgcaaggccggggtctcagagggtgccccaggcctc

SEQ ID NO: 27928 - DNA, 928 bp, Homo sapiens
  chr20:44098777-44099705
  binary
cgagacgctcagctgtgcggcgtcccctagggctgagatctgagggccccgacgccaagggttagggagctctcgtactcccaggggtcagggactcctggtctggaagaaggagtctctgggggctgtaaggggactcctagggccagagactgagaattccttggggttaaggtttggagcaggaggtgggcatcctctggggctggcgctacgccccaccctcgactgtcccgggcctcccctcccaggcacaggagcagagaagactggcgtgtgccccgagctccaggctgaccagaactgcacgcaagagtgcgtctcggacagcgaatgcgccgacaacctcaagtgctgcagcgcgggctgtgccaccttctgctctctgcccaatggtaaccccacggcggccgagcgggaacggggcggggccgcgctgggctgggaggaggtgggagggcccgggttccgggaacaggggcgcccccggacccggggacccccgggaaagtcaaggcggttgaaaccagatccgtcagtcctctccctcgcacggcccaggggtagacaaaggcgtcgttgaaacgcagccaagggggggtccccacccctagctgggattcgagtctctggtgcatgacgggcttccgggcacgcacagccgggacattgttccccgcggcctggggacccggggccgcagtttccttctcgaaccggccgaagcctgccctgcgggaaagcccggagcctggggcgctcacctctcctcttggagtccctccctgggggcctcccccagccctggggaaagactgggagagcctggcctggcaagattttccccaattcctctgtccaggcggaaaggaactttacagatttaggaaaatgccccgctcatcttaaagatgtgtaagggagcatc

SEQ ID NO: 27929 - DNA, 976 bp, Homo sapiens
  chr20:44936302-44937278
  binary
cgtgcgtgtcgccgcggctggagtcagcctccgggtgtccccggacgcggcacgacctcgcacacacacaccgcgcgcacacgctcgcgccgtgcggtattttcccggccccggaccccgcctctgggaggggccggggagccgagccccgctagcagggttgggggaccgggaacgcctgggtcccagccctcgcgtcagggctgtgcgccaccttcccagccccttttggcgcgccggctcggcccctggcgctgccacccctcggcccgcgggggtcccggaggctcccgggcgcgcggcggacgaggttgtggggacgggtgggagctgcgggcttcgggccgagaggcggctcggctccgcgccggggaaagtttggacgtgggaaactccctccccgccctcccggccgagaggagggggcgcgcagggccgggcgcaggcaccccggctcctcctgcggctggaggctcgccccccgcgccgcctgcccggccgctcccgccggccagggggctccctccctgccgggcagcctcccctcggcggcgatccggccgctcctcccgcggcaccccgcgctcttacctcggggagcggcccggggctccccctagtcctgccgcctcgggacgctgcgtggggcgggagccccggcgcgggcagcgggcgagtccggagccccgcggccgcccgcaggagccggagggagagcgggagcgagagggggagccgcggcggcgtgtgcgcgcgtgtgtgtgagcgagagagcgagagagcgagagagcgagggagtgagcgagcgagcgggagcgagggagtgtgcgtgtctgactggggggaagtgtgcaagggacggatcccttccttcctcccgcagcctctggtggagactcggagaatgcagggcccgccgggcaggagccgcgcagcgccaagccgcaggcggccgccggcccggacccccgcagcc

SEQ ID NO: 27930 - DNA, 313 bp, Homo sapiens; identical to SEQ ID NO: 24311
  chr20:47296037-47296350
  hypo

SEQ ID NO: 27931 - DNA, 1508 bp, Homo sapiens
  chr20:47443693-47445201
  binary
cgcccctcctctgagcttcaggttttatcctactccatcaacgcgcagggacgttgggctctggggctcctacggtatgtcctagatgagtggtgcaccgggcgcgtagttattcctgggaaaaagacgcaggagcgccagctcccggcgccgccggggtccccaagcccctgcatcgcggatgtaactaattttaaaactatttgaaaggcggggacggggaagaaaagacaaaagggcagcgcgcgccgcggggaagtggagtgcgggagagccccggtcggagcaggaccgtgcgccggccagggagggaggcgacgcgacagctctggaggagctcggatcccccccgctttccgcgcgccctgcggggcgcccccgaggcaattctccacccacggggaccacggccacaggttgtggggaccgcagcggggcgagcggctggagggaaagctgtccccaagctcccgagcgacactcaccgactgcaagaagcgcaaggtgcccacgtagtccctctcggtgcccaagatctcgttgaggacgcagaggcggaggcgcagctggcgctcggactcccgggcggccgcgcacgggccggggccggagctgggcgccgcggcgccaggggcccgggggtccgggtgggcgcagtccccggccccgtcgccgccgggctcgctgccgctgggcgcctccattctagcgcggccgcgcggcgccggctccttccgtcgcgccgagcggcaactcaggcgtccaggcgccccatcccggacggggcgcgccggcgggccgggctcagcggcgggccgggctcccggcgcggcgggcgggactgggggccgggcggctgggccgggggcggaggcagcgcgcgggggccgggcgaggggcgggagggggcggccctcggggctcccagacggctggccccccgcccccgcgccagggaccgtctgccaagtgccacgccgcgctcggccgcagaggcgctctgcgcgtgcacggggcccctggggacgcggcgcggcgctcggcgcctccgtcggaagctcgggggtcgggcgggagcctccggaagggccccgcggagccgggagtccgaggccgcgcgcacgccgaaccgagcgtaccaactccgcgcccggacgcgtggcgcccccccaacccgcagtcaccgcgggctacgccactcccacccggcacacgcgacacccgccgcgcgcaggctcctgcttgcaggtccggccgctgctcgggccaagtaaacaccgggctgggaaagctcgctgcggagccgctcgggggcaagccagccccgccacgcgcgcctccgcggccccgggaagtcaggggcgaccgctgcctgggcagtgacggcccctctctgggcagtgacggcccctcccgggaacgccgggccctcgcggtgccctcggtgctaccacgaccttgggaaggaacatgcgtggcgcgcgctcgctctcacttttctctttccc

SEQ ID NO: 27932 - DNA, 876 bp, Homo sapiens; identical to SEQ ID NO: 26839
  chr20:47934774-47935650
  binary

SEQ ID NO: 27933 - DNA, 1409 bp, Homo sapiens
  chr20:4803013-4804422
  binary
cgaaaaacacgttctaggcgccgggattccagatacctgggaaatagagtgcacgcagctgttgagaggcctcgcgcttggcttctcctatcactgaggcgcagaggtgctgtggacagcccagacccacacggcgcccgaggtgaaacagaaccctcagtctccctatgaggccactggcactctcggctgtccccagagctctccgacttagagctgaatgcaaagtaagcgctcgaaatgcagaagtagccggggccgcccacggcacctgcctcgctcggggcgagagaagacgccaggctgaggtcccagcgacctcaggcaccagctccgaaggagggcggggagaccgcaaaggggaagtgcccggagggccaacggcccccgcgcaccctgcgcccctctgaagcgcgccgcctccccgcgccggggactgggacctgcctctggggaatccgcctagaagacggcggcggactggggtcgggcactctccagggctgtcaggccctccccagccctgcacctgccgcgccgccccacctcgccaggaagtctcagagaccccggggatggggtgggagcgccttcccatcgcgggctcaaaaagaaggaaggacgcccccaggggtcgtagaaggaggactagctccaagccacaactttcttcggacccaaggcaggccggctggggctccgcgcctacacggcccctggcgggggtccgcgcgccccgggagccccgcggctcggggaggaaagaggagacaagagacaggcgaggattacggggctgacccagccggggtagggaccatcgtggaaaaactttggcgaggtggggggacgcggaaagagagcggcccgcgccctgcaccttgcgccgggcatcccgcgccagtgcctcgctcccagtgccccgcgccccgcgccccgcgccttgccttcaccccgggccagctgcatcgcgcccgcgccgcaggaaccgtggagttggaaagtgggggcgccgcggctggggggctgcttcagctgcgcctcggccagcgatcggcgggccgggctcaaatccagccaggctgggcaggcggtggccgcgcgactggggaccgggcgccccgccctcctcgctcccctcctccttcctctccctccctccagccccttggcctttttcagcccctaccggatctgctcgtccgctgtcctctcttttctctcgctcttcatatcactctccaccccttcgccttgccttcgcctttcttcctccccttgtctcctgccccctcctcttctcccctcccctctaggggcggagcttctcccctccctcccagacaatgctgtggctgcgtccccttccccgccagctcgtccaggctcccgccgccagcgattcttcc

SEQ ID NO: 27934 - DNA, 420 bp, Homo sapiens; identical to SEQ ID NO: 26841
  chr20:48184254-48184674
  hyper

SEQ ID NO: 27935 - DNA, 391 bp, Homo sapiens
  chr20:49218479-49218870
  hypo
cggcccacccaggtcacgcagaggtgaggccaggatgtcggcccaggctgcgtggccccagagcccccgactcccagtcatcatgccatcagcaaagcagggccaccgcccggggcggggtggccataccttcagccggtcccggaagccgaggacctggtactccagctcccggagctggggctgggtggagtccgtgggcctcagcaactccaggacctcctgcagaggcccctcgagggccacgccaggcccgtcctctctgtccccggttgccccttcctcgtggccgttctggctactcgaggctgtgccgctgtggaacagggagccctgtggcaggctggggctctcccctcctaagttcctccagccaggctgctctgcaaac

SEQ ID NO: 27936 - DNA, 79 bp, Homo sapiens
  chr20:49969391-49969470
  hypo
cgtcctaatttttctataatatacatacattatttgagtaagaaaaataaacatgtttgtagcgggatcagatttacgc

SEQ ID NO: 27937 - DNA, 1327 bp, Homo sapiens
  chr20:50720375-50721702
  hyper
cgagcaagctttattttaacatataagctattcgtttagtggaggcttcattaaactactcccctccaccaccacctcgggaagttgtggtcaaaacccaccagaccgactgtggtggaagttgatgcggaagctggagagcccgcggctctggaggggtgagccgccccggagaggggacccatcctcctttccgcgcccggaaagagcgggggagaagaggaagtccagttacaactcctttcctcagccccttaaaggaaaggtatcagctaaccacggggagctggcagcctaagagaaagtaggaacctacaatctcttaatctaagcacaagataagcaaaaagggaagcgccttagaaatgcagattccccaaccccacccctgagattccagtggaggcgggggatggggggatccctaacttgcaggaagaatttggcgagcgagaaaaggtcccctcccgcaggctcttctgaagcggaggatcccgggacgagaaatgctgcccggggggcttaaggtagccgacgatctccttgctacatcctgtgtccacgtggcagccgaggagggggtgtgggggccgcctgttaagtgcgacagcatcactgctctatccccaccacggctcccacttcgctcagataaaatgcagagctcttaccaaggctcacggccgtcccccgccccccaccgtctgcccccatcacctctcgggcctccggtgacctctcgggctacagcagcgctgacgccctgggtccctgcgcttctgttccctcggcctggaatgctcttcccccgggtacctgcacagctcgctccctcccatccttcgggtcttcgctcgaacgtccgctcctcggtgaggccttccctggacaacgcatttgaaacgtaaccccaaggcaagaagccaccttccaggcgcgcagccgaagcccagtgccaaggaggccggagactcgggtgcccgcgcatcccgaaaacagcctctgaggggtcctctgagcatccttccagcgtgtttgggaggcaaactcgttgactagctcttgagaggagtggctagaggaatccaggcggggaaggggacggtggactccaggagagtgtaatttacaaaggcggggggcggggacgcccaggtccgagtcccaggactctgcgccggacgcttcgcccgccctttcaggtcccctgcccggtcctcgtacccgcgcgggtccggagaacctctgagcaccggcccccagcccccgggcggggctccagcggcgctactcacccggctcccccgccacctgcggggccacctcc

SEQ ID NO: 27938 - DNA, 932 bp, Homo sapiens
  chr20:51589126-51590058
  binary
cgctcctgtcctctcgcatatcactcacagacggggatctgacagcagccacaaacctacagtgagtgatcgctctccccccggcacgaatccgccatagagatcggcgaggaggaggaggaggaggaggaagaaaagaaggaggaggtggaggaggaggtggaggaggaggaggaggagggaaagaggagaaggaagaagaagaaaaagaagaaacccactaccttcccaggattgccttttttttttccttatctttacgcgcgagtgtgcctgtggcgcgtgtgcgcccctcgtcccttccatccgaacccgggcttggatgtttaataaagaaatcaagtgtctcaacagtcaccaaaaaaaaaaaaaaccgcaaaaacaaaaccaaaaaaattccaaaagcaaaaacaaaaaagagagaggaaaaaaaattcaaaataaacaaacaaacaaacaaggcagaaccaacctctacttcaaagcagccggcacaagccacccgtgtctgccacccagagaggggggtctctggcccgtggtggaggagttgcaggggggatcgtcagggggacagaggccgagtgacgtcctaggagccaccgggcaagaggcggaggagacccagagaggccagagagacagcgggccccagcgcgcggctcggggctggggcgccagaagtgggactggagcgaagtagaggatgccgaggagaaaacagcaggcacccaagcgggcggcaggtaagagaaacggctccgcttcggggctgccctgtgcgccgagctcctcgcccgccctccttgcccctgggtgcccgggggcaccacccacttaagctttcgggggagtttgcgccgggtgcccttctaataaccccgtcctctctcgccttctctggtctcccaaatcctccccttccaagctcc

SEQ ID NO: 27939 - DNA, 1632 bp, Homo sapiens
  chr20:5296187-5297819
  binary
cgactccacatgtgggcgccgcgggatgctgggtagcaaggagatgacccagctgaacaatgcatttggtccactcctgcgaggggaggagaacgccgagggacaggaactgcgcgccagcaaaagacaccctaacctggggtgcgcccgccagctgctttcccaaggtgaaaacctccaagaggcgagatgcaaatcccagtggcgtccacacccggaggtgtcttctctccaggtcgcccctccgtctcatgcgacaccccaatccccgcagcctctgctcagcgtgggaccaagaatggggagtcctacccctcctcggctttccagccccctaacccaagacaagagggcgcgcgcccgggctgggacaggtcccagccgcattttcgtagattgcactccccgcccgggagcgacccgttccagcagcccccttcccgccccatcaacgcggccgcactgtcggcgtctagaggcgacatcctggcaaagacaggaatcaagtcagaaattcaggctctagaagcaaaggctgcggtgcctcctggctggaagaaaacggcgggtgggtggaggatgcggtgcgcgggaatttccccacggacgcttgctgtttcctgctcacctttcaggaaggtgcccctctacctgcaccctcccctgcaatttggagctcgtccgcgagctcagctacccgctggctccctctgcccgcgcccgcacaccacagactccgcttaccgtaccctacccggtcctagagggcccagaggggatctcctgaaaccaactcgcctgcttggagccagccccgacgcatatctcgagagtggcgggaggcaaagcagccggaatgcccgagaaaaaagtgggcgtcagaggcccttgtcctagcgactcccccaccgcaccgactgagtcccgggactgcagggatctaagcccttacctgtctcggcgcctcctttctgtgcgctctgctgctccggaagccggatcgagagtcacagtgtggttgggcgcaggcgggccgctcggttttcacctcgaggacccggacttgcacttgcagagccgctgcgtgggggatgtccctcttttttcctcgccccggcgggctcctccggcgtgtcagggtctctgggttccagctggagttggcgctccggccccacagctctttccagcgtctcggacctgtgcgccccgccccgcgctggactccgccccggggtccccgcctgcctcctagtccaggccaagggtggatgcccagctcccccaccccaccgcgtgctctcgggctggtgcgtccagggcgcgggcaccgtagctccggccgcgctgacgcgagtccccggcagcgggggcagcctctcgcacggatttcagcgccttcgcatcccgtctgaatcggaccacacagtagccgggtttctaccgtgcgcttgggaacagtgagcaccgccctctgccgccagtcgtggcaccgcacccgggtcgcgcgcgcaggaggggagagtcctgtcttccggaggtgcccagtgccagcgtccgcgcccactagaaggtgaccctttcaaggaaagcccggctccgacgagtgcggtgtgggcctttggagatggc

SEQ ID NO: 27940 - DNA, 489 bp, Homo sapiens
  chr20:54918924-54919413
  hyper
cgcccaagcctgatgaatttacgacaagcttccaaaaaaggcaattgcggcttgcggagggtctagaggctcagttgcccgaggctgtcttgaggagctgcctttgggactccgcgaaacctcgaagtcttgggctgcgcctccccttgcgcggtcggagccttggcagagcctgcggcgccacctcgtgggcgaggccgcctggtgcaaggtcatccggtgccgggacccgctcctcgccccgccaggacccccgctcacctccaagctggacgcccgcggagccctgatcccctaacgcccgcttccgaggccgagctctgcagccccctgcaaccatcagatccagattgccttcctgcacgagcgcgcaactctcagcctcggagcgtgctggaaatgctgatgggaaccgtttgaatgaccgggcacgggtctgcaagaaactcagctcccaggccagccgtggctcaggaagcctcccacgtc

SEQ ID NO: 27941 - DNA, 1473 bp, Homo sapiens
  chr20:55205396-55206869
  binary
cgccaggaggcgacagcgccatgttcctccaggttcccggcgccccgagacccctgggcagatggggacgcatcctttagaaactgagtcgggccgcccaggggcgagggaacgtgcgcgggcaaggctgcccaatttccagggttcttcatgccccctctgcgccccgacgtgcgagaacactgcccttggcagtgcagggcgcccccacttattactcccctcggctgggcccggccagcagggagggccgccctgtgcgcgcgctccctcttcacttcccagggcggcgcagggtggcgggccctgctttccgagcgccgcccgctcggaggtctttgtcccgagggcgtggaagggagggtcccgggggcgggggaggtgcgcatttcccgcgccgcgcactctatccgcgcctgccgcgctgccacctccagcagtccctgcgtcatgggcgggctccacgagatagctctgcaccgggcgtccggctccttcgccccgggctctggctccttcgccccgggctccggccacggacttttctggcccaagacccagggttcggacttggcgcctccaagcgcctcgggcttgggagcagcgcctagaccttcgccgccgggctttgagaactcgttcccccaggtctttcaccagactctcctccctccccgcactctttgcttacaacgaaatcctcggggcgcattgcccccgggtaccttccgaccctgggcaagccccgccgggcggggtgcggttggtcccccggggccctctgcgtagcccggcgatgccggccagttcgcagtagcggggtttcgcactaacggggtctcctgtttttttttttccctccaggatcgccacgacgggagcagcaatgggaatccgcgggtcccccacctctcctccgccgggcagcacctctacagccccgcgccacccctctcccacactggagtcgccgaatatcagccgccaccctactttccccctccctaccagcagctggcctactcccagtcggccgacccctactcgcatctgggggaagcgtacgccgccgccatcaaccccctgcaccagccggcgcccacaggcagccagcagcaggcctggcccggccgccagagccaggagggagcggggctgccctcgcaccacgggcgcccggccggcctactgccccacctctccgggctggaggcgggcgcggtgagcgcccgcagggatgcctaccgccgctccgacctgctgctgccccacgcacacgccctggatgccgcgggcctggccgagaacctggggctccacgacatgcctcaccagatggacgaggtgcaggtgagcggcgctgcggctcctgaccggacctgttcaccctacggccttctgcccccaccccgcactcctctaggctcccccgaacttaagggaattttgtcctctctcccccagaatgtcgac

SEQ ID NO: 27942 - DNA, 170 bp, Homo sapiens
  chr20:55959005-55959175
  hypo
cggctcccgaaaaagaactgacctgcattcttaatcttttattctttttccctcctgactgtggtgcagaggaggcagtatgggaggagacaaagctcaaagaaggcactgacaatccccagcatcctacgggcccgaatccacactgcggattccgtcagctcactggc

SEQ ID NO: 27943 - DNA, 163 bp, Homo sapiens
  chr20:55959404-55959567
  hypo
cgtcagcatgataggtttcttcctcctcttatgaatcccagtgtcaagatacagcctgatcgccccttaatacggtgccgccattactccagacccctctgcaagcattggtcattcatcagctttcacgaggtgaactggggacgaggcaggggcttggacc

SEQ ID NO: 27944 - DNA, 183 bp, Homo sapiens
  chr20:57009378-57009561
  hypo
cggtaggcttgcagtagtgaaagatccatggactaggaatcagaagactgggtcctcggccttattcccagctctgtcatgcgtgattttgtggctcttaggttggtgacctgcaaaatggagatgttggtcatccttgcttacttcaccaggggcgtccatcctaagacataagagaatgcc

SEQ ID NO: 27945 - DNA, 982 bp, Homo sapiens; identical to SEQ ID NO: 25536
  chr20:57224597-57225579
  binary

SEQ ID NO: 27946 - DNA, 244 bp, Homo sapiens
  chr20:60477321-60477565
  hypo
cggggcctctgaaaccaggacccccggggcctccattccaggagaagcagcctcactctgcccttcaccagccacggagacccggggtctatgggcagtgccctaaatgccagccatgccctggggcacgcggtcaccaccccgcagaaccgctcccgtgctcgttgcaggagtgcaagggcagatccacagaggagcgtgcggggccccaccttcccagggatttgcaggcaaatgagcggcc

SEQ ID NO: 27947 - DNA, 448 bp, Homo sapiens
  chr20:61471909-61472357
  hypo
cggcaccagcaaggacggccaggacggtgctcccggcgagcctgggcctcccggagatcctgggcttccaggtgccattggggcccaggggacaccggggatctgcgacacctcagcctgccaaggagccgtgttaggaggggtcggggagaaatcaggctctcgaagctcataaaattcaacgtgaggaagcaagtgacaaggacgcccgaagcacagtggacggtcatgaaggagcgggggtgtggcaggcgggtgacgtccaggagagggagcgcccctggctgcccctcggccgccgactggacgcgcgggccttgccagcgagcaccctcatcgggctgtcgcctgacagcatacctcaaaaggccctagctaataaacctgtaagcccagcatttgagagaaggtagggtgtgtatatataaaaggttgtgtacaactccac

SEQ ID NO: 27948 - DNA, 778 bp, Homo sapiens
  chr20:61703315-61704093
  binary
cgctcctccccgcccccgcccccaaagccgctcctctcacggcccccgaccccgcaggcaccgactgttctcagccccgcccctcgaggccccgccccgcggcttcccgccggggattgcggctgcgcctctgaccctccgctccgggctccgggctcaggtcccacacctgcccgcgcccccaggccccgccgtcccccagagcctgcagcgggcgccgcgcaggccgccgggctcctccgggtgggccgggctcgggcttttggagccgcgcgcccaccgacccctcccacgggcggcggggggagagcccacccagaggcgcagcggggccggtggtgtttcccgccctcccagggggccgcgggtccgggggcagcagcggggcgcggggcggagggaggcccggcgggaacgggcgccccctttgcacccacagccgtggaacgccgaggtctcagctcccctacggcgcgcgccccgagaccccgcaagggcagtgctggggacgcggggccgagactcgaggacgcccgaggccgggacggggtgtgggggcgtcccccaggctcccgggtcccagtgcaggggctcgcggtcaggaggttaggtggatgagtgaaggggaaaagcgcggttctagctgcctgctcaggcttggggcgatgtgaacgtcggggtttgcccctcgaccccccaccagaacgcagatacttctcagcaaagaggagcttggggcagcccactccccacagaggaagggaggggcccgctccac

SEQ ID NO: 27949 - DNA, 756 bp, Homo sapiens
  chr20:61806216-61806972
  binary
cgcggcctttcctctttctggaggaatgacaggcctcccgcagaggaggagcgggtggtgacgagggagaaggagcggaaagggaggggttctccacgggttctgttgatttgtttaatcccacgctattcggaggctttcacggatggcggacaagagggagggggagggggtgggggtctcggcccgtgtttcctcccctcctcccgctcccgcccccgccggagccacctgacccgtagcgaagttgccggccccgctgcgcgccggcctttgtgcgcaccgaggcggccgccgggaaccgggagcccgagctggcccggcagcgccgccgcccccaccttcgcgccccttttcactcccccactgtccccggagctggcaaataaacaaatccacaaacaaattatccgtgtgctccggagaggcggcggcgtgggcggcggcggagagaaggcgccgggcaaggcgagactaggcccccgcggagcgggggaagcacagaccccagcccgggcccggcagcagtaagttgacttttatgaaacctacgaagctcgcggggccaccgaaaaggtccccaccggagcggactctgcggggcgggcggggcagaggctgcaggcgggctccccttcccgcgcggctcctaccggccggctccgcccccaagccctggacggcccttcccccagcccgcctggctgggggccgctgcacaccgggggtggaagtggggagccggggaccccgatc

SEQ ID NO: 27950 - DNA, 2289 bp, Homo sapiens
  chr20:61808613-61810902
  binary
cgcgcgtgggtgcaggagggccatgtgaggggctggagtgtgtgggagacaggcgtttccttgggtctccgtgtggccgccgggcgcagggcacggtcgagggcgctcgatggctgagtccgcgtgagccgaggagcgcgcggggcgggacgcggtgcgaatgcgcgggaggcacgaggcgcgcagtgcgtgtgtgcgcgtgtgcgcggcgcgcgtgccccgcagttctcaaggacacctcggggaggcagcggcggggccggtgtccgggtgacgtcaccgcgcgccccagtgataatcggccggtgccggagcggagcgcggatacgcgcggaggcaacggcgacggcggcggcggcggcgggcgcggggacagttgcatcggggccgggccgggctagcaggagctgggcgcctgcagcgtggaccccgtggacactcggctcgcagccggcctgcggcgctcggggacttgcctggctcccttctcggggttcccgcgcccttctccgcccagggcagcagcgcgcggggcccccgggagccgaagagcaggcgggaactggcggcggcgcgggaggcgcagggagcggaggcggcagcagcggctcccgccgggactggtaattacgctcggggccgggccggggcgagccgggcaagcggcctctctgggtctccccgtctttctctccacgaacagctcgagcgccttctcgcgggcccgctgcgcgcggagaggacgagctcgctgggttgtaaaaagagacgagttttcatctttgagcatcgagattcgttcttttaaccgcattcggtgcgcgctcctgggtcggcacgggcagggcgacggcaggggaaggcagctgcggaggagctcgcgccgcccagtcggagcggttctgcgcccctcggagccccgcgggaggcggccgggtgcgcacgcgctcaccacccccacccccggaatccgtcttcgcgattcccgggcgccccagctccaggaacgcccggagggacgcacttgggggcccactctctgccgcggaaaggggagaagtgtgggctcctccgagtcgggggcggactgggacagcacagtcggctgagcgcagcgcccccgccctgcccgccacgcggcgaagacgcctgagcgttcgcgcccctcgggcgaggaccccacgcaagcccgagccggtcccgaccctggccccgacgctcgccgcccgccccagccctgagggcccctctgcgtgttcacagcggaccttgatttaatgtctatacaattaaggcacgcggtgaatgccaagagaggcgcctccgccgctcctttctcatggaaatggcccgcgagcccgtccggcccagcgcccctcccgcgggaggaaggcgagcccggcccccggcggccattcgcgccgcggacaaatccggcgaacaatgcgcccgcccagagtgcggcccagctgccgggccggggatctggccgcgggacacaaaggggcccgcacgcctctggcgtcgcggggcgggtgggggcggccgagggcggccgaggggggagcctgcggccggggccaggctgcggccagccggcccccggccacgtgtgtccgcagcgcggagcgcccaggcgcccgcagagggcggcggggcccgggagacaaagggagggtccacggggagcggcgggcgggtgcgtggggcggcgggctagggtgcggcgctgtccgcggtgctggcggcggggcggcccccgcgggacgggagggcggccaagtgcggccctcgcccccacagcgggcgccctggacagttgccacggcaacgtgggaggaggtggggcagggtctgaggtcaccgctaagtctgcccttcctcgggccgctgcgccgcggggcggggcggaggcggcgctcgctgtggccccagagcagcccccgcagcccaggaccaggcttgcatggggacgggggtctgcgtccgcgtccagggtccaaacgagggcggtggacacgccggaccgcatcccgcccccaaagccggctctgggctgtgcaggaccaggcacgtgagactccgcagcccagggagaaaatgacaaatccctcccccgccgccatctgcagccgcagtgacacccactcgggtttgctgcaggggttttttttctgtccccggaagccagcgccacctgctgacgcccggcaccgcctctgcgccgcctcccccgcgcccatcccaggccccggctgggctgtgatgccccggtaacagtcagaggac

SEQ ID NO: 27951 - DNA, 896 bp, Homo sapiens
  chr20:62103080-62103976
  binary
cggaggacaggccagacccctcccccccgccctcgcttggtcgggcggccccagccccgcgggtccccgagagtcccggagagtccagacccagcgctgccgccgtccctccccggccggccctttgttcggcgcagaggccgcggggaggggcctcccaggctgaggagggggctggggcggccgcacgtctctgtcctgcgggcctggagcccccaccccgacctgagcggccccgaccccggaatccttcctgcccgcgcgctgtacaatcgctctccggtctcggcccagcactcccgccggggagcgccggccccggacccagacccaggggcagggagccaaacccgccgcagccagcctggccggggtcgccgatggggtcgccgatgggggtcgccatgggggtcgccacgggggccccgccggccactcacacgtaggcgtggtagatgaacgcccagccgcgcggccgctccagcacgttgtagaggaaattctgcagcttgcggtagaaggcgttgcgcttggggggcttcccggcgcccgcgccgcccgcgcgaggtttgctgaggatgctgccgcgcttgggggcctcggagccggcgatcagcagcgccccgtcccgggtggagtcgggcgcgccggggtccagccccacgaagcccaccttcagcttcttctccccgctcgggccggggtatacgccgccgttgcgcgacttctgcaccatggtgcctggcgggaggcgccccgggtcgggctcaggctcagcgggggcggagcgcggggggcggcgcgggccccagcccaggccccccggccgggagccgcatggccgaggcggcggttccgcactcctgccgggcttgggccgcgcgcggagacgctgc

SEQ ID NO: 27952 - DNA, 497 bp, Homo sapiens
  chr20:62126053-62126550
  hypo
cggggacaggccctcgacctccccgtgccacctgccggtgcctcgctctgggccagggggtccagccagctcccgtggcccgccccgccctagccgccactcacgttgggggagggctccagcatgttgtcaccgtgccagccggagatgggcacaaagggcacggtggccgggttgtagccgatcttcttgatgtaggcgctgacttccttgacgatctcgtcgtagcgcttctcgctgtaggccggctctgtggagtccattttgttcacgcccacgatgagctgcttcacacccagcgtgtaggccagcagggcatgctcccgcgtctgcccattcttggagatgcccgcctcgaactcgcccacgcccgccgccacgatcagcactgcgcagtccgcctgcccggcaggggacacagtgagccctgccccgcctgcctggcaggggacagagcgagcctggccccacctcacttccaggcctctccaggcagc

SEQ ID NO: 27953 - DNA, 1401 bp, Homo sapiens
  chr20:62320890-62322291
  hypo
cgtggtgtgattgtcacgggcctcccgtaccccccacgcatggacccccgggttgtcctcaagatgcagttcctggatgagatgaagggccagggtggggctgggggccaggtgagttacagcagggtggggctggggtaaggcggtctggtgactgagcccccgccccgtggccaagggagcccccgtgaccgagccgcctcgccccacagttcctctctgggcaggagtggtaccggcagcaggcgtccagggctgtgaaccaggccatcgggcgagtgatccggcaccgccaggactacggagctgtcttcctctgtgaccacaggtgcgtgcagtccggtggcaggcgcggcgccaggggacacgcccacaccccactgggcccctggactctccttccccacatgaggccccgtctcctccagagcctctccggctactcggggtcagcgtggggcccctgcagcagatgagggtcttcacttcggtgaactgaacccttgaagcggctgtgggcagggcagcagggctatggccaccccccaggttcgcctttgccgacgcaagagcccaactgccctcctgggtgcgtccccacgtcagggtgtatgacaactttggccatgtcatccgagacgtggcccagttcttccgtgttgccgagcgaactgtgagttcctgcccagggaggggatgagggtgttgtccccagaggagccagaaatgggtccacccacccccatggttctgcagatgccagcgccggccccccgggctacagcacccagtgtgcgtggagaagatgctgtcagcgaggccaagtcgcctggccccttcttctccaccaggaaagctaagagtctggacctgcatgtccccagcctgaagcagaggtcctcaggtgcggacgggcagcgctgggtgggcggtgtgggggtggcggagcgggcggcgtggggcgggcagcaccaggcgcccagggcggaggcgactcacctggctttgtgcgcttcccctcccacctccaaaggctgcctctccctcctagggcagggcccccacgggctgcaaccctcccctacaggcagagaacgccccaggcaaggatgccccccgaggctgagactccccccaatagcagggaggacacccacaggcaggaccccaagtgctgggactctcccccaagaggggctttgccacaggcagggaccccagctggggccccccgtgggcttcactgcgcactcgggtgcccctgcagggtcaccagctgccggggaccccgagagtagcctgtgtgtggagtatgagcaggagccagttcctgcccggcagaggcccagggggctgctggccgccctggagcacagcgaacagcgggcggggagccctggc

SEQ ID NO: 27954 - DNA, 981 bp, Homo sapiens
  chr20:62600653-62601634
  binary
cgcgactggcgccccggatgagaaggggcttcggccctcccgagcccagcggggacacagagccctcgcggggagagggggctccgccgcgctgcgcgcaggagacgccagcagcgggtccgccgcgtaggccgttcggcccgggaccccggcccaggcctggcgcgcgggtgagcgcggccagggacgcgcacctggggccagcctcgccacccacctgtcacctggggccgggagcgggcgcggggcgcgggcctcggcctggccgggcagggccgatcgcgggcgcggggtgggggggcgaaggcagtgaaccaaaatggcgactttttctggagaaggaggaggcaggaagacggcgccggcgcggggcgcgggggctcgggcgcggcggggggcgggggggctccgggcccggccccctccttggcctgcgcgcagggtcgagatccggggcgcggtgggcgccggggctgcggccagaatgggtccggggcgcggccgggcgcttacctgcggcgcccagcggggctgcggccgggccgggccgggccggggcggggggcgcggggcgcggggcgctgggtccgggcggcgcaggctgcgcgccgcgctgcgcacatgcgcgctcccgcccctcccacctttgacagttttactgcgggggggagggggcgaactctcgcgttattcccgcggccgctccgcgacggggagggggcggggagggggcgggggcgggggcgggggcccggcgctggcctgtggttcccccgctccgcggttccgcccccgtcggccgggcccgcagtccagagtagccggttctgccgtcctggggcgggggacgttttttggacagtggggtaaactgaggcccgataggggcgctaggcactgcccggagtccggcgcgcacggattgaggcgacctgattccgccgcatcctggcccgcgcggcgagtgtggtctctgggctc

SEQ ID NO: 27955 - DNA, 341 bp, Homo sapiens
  chr20:62662125-62662466
  hypo
cgggcaattaagaataccacaaggcttaaaaaacaatcaggttatcagagtgtgaaattattccgtttggcaactgagacgaacccgaacagctgcccggagtggaggctcctcgtgttgtctcttgactacggtgcctctggctccagggggaggtgaccctgaggagagggtggcagcaacgcagagtcccgggcctgccagcatgctcagcagccagcgcccgccatcccttctccagcagcgggtgggggtgccatgcacacccttacctggcctctcatagcatggacctcttcgggcccggtttttcaggtgtgcatgtgtctggcaggcacggc

SEQ ID NO: 27956 - DNA, 877 bp, Homo sapiens
  chr20:62680286-62681163
  binary
cgccgcgttcagctccttccacgctttgcctgcgggccgtgggcgccagtgagtggaacgccgtcgggcgggtgggcgccgagccctccgtgcgcccgggacgccccgcgagggtttggcgcagcccccgcaccccgcggcccgggacccctgccccccccgccccaccccggcccgagccccccccgccctctcccccttctctgccgccctcccgccgctcacccagcatcttgctgagcaccgcgttgtgcaggtccgggttctgctgagccagccgcttgcgctcgtcctttgcccacaccatgaaggcgttcatgggccgccggatgcgcgactcgtctgccgcctggcgttccccgcggccggccgggctgaggccatagcgccccggctcggggctgcgcgggggactgcgctgcgggctgggcggcgaggcgggcgcggcgggcgcggcgagggcggcggggccggcggcgaggccgcgcgtgtcagcggcggccccgtgtcccggggcccatgcacagtcgcggcgggcgggcgggtcgtcctgtgcgccgtagccgggcggcgatctctgcattccagctgggcgcggcctgggcggaacggagcgcgggagcgcggcgggcgggcggcgggcactggggagccgggcgcaagggcaggccaggccgggagggcggatggcggtggggacggcggtggcctcgggccgggcgggcgcccagatatagcggctcagggccaatcggcggcggggcgggcgggcgggggcgggtcggggccgcctcctccccgggggctccctttcttctcaggccgggcgggattccgctgaggcctcccccgcgcacagcccccccacctcccccgc

SEQ ID NO: 27957 - DNA, 1018 bp, Homo sapiens
  chr20:62694227-62695245
  binary
cgcgggacagcaaggcccgaagcaggaggagagaagggagcagattcctgggcctcctggggcccggtcgctccgggatgtctgagctctgggaggggcgtgcccggggcgcctccctcgcggggtattgtgggatcacgagtcactggcgacggtgggtcaggactacacttcccaggaggctgtgcgcgccgcgtggcgcctgggagttgtggtccagagcgcgggcgcggcgggcgcggcaggcgggcgcgtggactacgcatcctaggatgccgcgcgcggccgcggggccgagggtttgaaccgggggtctgtcgtccgcggcggggctgcgtcggctgcggcgggtgtgggaggtggcgacggccggggccggggtcctgcccggctgcggaggcgggcgcgacgggcgcgggggtcgctgctcctgaggcgatgatgggcaaggaagaggagattgcgcggatcgcccggaggctggacaagatggtgaccaagaagagcgcggtgaggggcgcgggccgccaggaccccgggaaccccgccccgccgagaccccgtcgagcccgccgacccccgttagggccggaagacgacctgaggggcaggacgagacccctccccggcagagactaaccgggacgcaggggagacccccacccgtggccgagacccctgccccgggccagccctgccgttcactcccgcaaccccggcagaggccgcgatcaggcctggaccttgtcccgggagagccacccgctctggactcagacccctccctcgcccgcagtcacaggctccgcacccttccctgtcccttaactccagacccccagcctggcccgtcgactccttccttggccctgtcccgcctctcggagcccccggggtgttcgggcctcctctgcgggccgcgccagccccttgccttcctccatcccggcctgggcatcctcacaggccgagccccgccccccaactcagccctctcccacgctccgtctcttacagc

SEQ ID NO: 27958 - DNA, 383 bp, Homo sapiens; identical to SEQ ID NO: 26862
  chr20:656952-657335
  hyper

SEQ ID NO: 27959 - DNA, 1443 bp, Homo sapiens; identical to SEQ ID NO: 26865
  chr21:27011435-27012878
  binary

SEQ ID NO: 27960 - DNA, 440 bp, Homo sapiens
  chr21:32716044-32716484
  binary
cgagcagcgggacagccccgggcaggacgcatcctgggtgggtgacgtgatcccgcagtctcctccccgaccccatatcccatacaatgatcctcgcttacagaagtcaagggggaaagatgacgctttcaaagcccgaatctctttaccctggagccagaaccagcgtcgccgccgtcccctgcagctcagccggcaacgcgcgccgagcctcggggcgcagcttggagacgcgcttgctcgttctgggaaggggcacgggacgcacggttccccggccccagctgcacagctcagctcggggctctcacctatcctcgttcagagccacattcggctgcctcccctgaccacccgacacaaagagattcgccggtggaaagaatcgatttcaaaattcaagctcaccgctgctcaacaaggcgcgcacgtttctcccc

SEQ ID NO: 27961 - DNA, 389 bp, Homo sapiens; identical to SEQ ID NO: 24335
  chr21:33954154-33954543
  hypo

SEQ ID NO: 27962 - DNA, 1452 bp, Homo sapiens; identical to SEQ ID NO: 25557
  chr21:36041402-36042854
  binary

SEQ ID NO: 27963 - DNA, 997 bp, Homo sapiens
  chr21:38064746-38065743
  hyper
cgtcctctaaaaaatgaagaggggactggagtcgggaccaaaattattggcagaccgcacggtttgcagtcaccctgaagttaccagcagccgatgctgtgtccagggaaaatattcttgagctggaaaacgtgctaatttaaagtctttcgtttcacacgaaaatgtgctgcactctttgactgctcaggaatttgctctagcacctagaaggaattctggcttagggcaggggcgagggacagtggagggcgttggaccttcttccgcaatcgggaccactccaggtctccccggagaaggctgagtctccagcgcgtggattcagatcaggactctgtctaagtaggcgagagctggggataccgctgggggctttggcgaagctaagaaagcactggcttcttattctcaccagacatctcaacacccacgtgcgctgggtcccgcagtctctcgcccgccccacgcgggtcccagccctggtccttactccccgcgcgggaagaatctggggagggtgggggcggagaggcggctgatcggagagtgggagggaggatgggagatgggcagaggctgcccgcatcagggccaggacagacgtccgcgcggccccaggcactcacttgagtgtcacgcaagtcaccccaacaccgcacaagacagtggcggggtgcgcaccgaggcccctacctggggggtgtgcgcgcactgaacgaccccttctccaggtgcgcgagccgctccggcggccgtgcacactgcgcccccttccgcccacctgcctggcctgcgtttctaaccacgcgggcggtcccgagacttcgcgcaaaaggcaggaccgcgactcccaataatgatatcttcgaaataaccccctgctgagccggcgcccagggccgggggtagagtcccgagtcccttttgcggaattaaggagacctctggcgaccggggagcctgcccctgtgaccgctccagcagcccctgccgc

SEQ ID NO: 27964 - DNA, 903 bp, Homo sapiens; identical to SEQ ID NO: 24339
  chr21:38592864-38593767
  hyper

SEQ ID NO: 27965 - DNA, 91 bp, Homo sapiens; identical to SEQ ID NO: 10586
  chr21:40331586-40331677
  hypo

SEQ ID NO: 27966 - DNA, 528 bp, Homo sapiens
  chr21:43248413-43248941
  hypo
cggcaccgaactgctccccaaaggccctgctgactgctccatgccgccctgccccaccccgcaggagctgcctctccccgcccgcagcaggtgcgcaggcggcctcaccttccaggtgccggcgctggtggtccagcatgacgtccttgcggtagaacatcttgctgcagacctcacaggcaaacttcttgtcgccgtgcttcttcttgtgcttggagaggttgctgttggtggagaagaatctgaaacacatctcacattggaacgtcttgtcatctgtccagagagcaaacaaacacacaacgattttgaggtaaataacatctcacgcaggcacgcacgtgtggcctgaacgtcaataaagcgcgggtgacgggcatgagagtcacggggatgcgtggccaggaagaaaacagcacctgtgtgtcatacactgtctaccccaggaactcacgatgcagagacgggaaccccggtgcttgaaaagcagacacggagctcacctttcatcaccaagcaacgccagcc

SEQ ID NO: 27967 - DNA, 442 bp, Homo sapiens
  chr21:44847478-44847920
  binary
cgcggcctgcgttcgtccagactcagagcctcgggacgtgcgggggcccgggggcctcgcgggctcgcgcgtggggctggcggcgcggatgccctggggcgctgcagaccccgagaggccgcttgcccgcggggacgtcagccgcttttgctgttaaaatctgaaatgttcagcaagttagaaacttgaaacctaaggaagcgtgaccggccgctctggaagcccccgccgcgcggccggtcccggccccggccctcagcggcgctggcgtctgcgcgtcccggggctgcccccgcagcatgtggggctgggaccctcttcccgcgcgggccccgggcggacgctgcgggcggtgacggagccaggccggccgcctgggtaggggacgggggcgcgggaccacttgcttgcccgtggccgatgcctcatccgaacggaaaac

SEQ ID NO: 27968 - DNA, 867 bp, Homo sapiens; identical to SEQ ID NO: 24342
  chr21:45148293-45149160
  hyper

SEQ ID NO: 27969 - DNA, 342 bp, Homo sapiens
  chr21:45508577-45508919
  hypo
cgcgcagcactggtggcacctgtgctatgtgccgtgttatcccgctcttccctggcgctggtggcacctgtgctgtgtgccgtgttatcccactcttccctggcgctggcggcacctgtgctgtgtgccatgttatcccactcttccctgacactggcggcacctgtgctatgtgccgtgttatcctctcttccctggcgctggcggcacctgtgctgtgtgccgtgttatcccactcttctctggcgctggcggcacctgtgctgtgtgccgtgttatcctcttttccctggcactggcggcacctgtgctgtgtgccgtgttaccccgctcttccctggc

SEQ ID NO: 27970 - DNA, 162 bp, Homo sapiens; identical to SEQ ID NO: 10592
  chr21:45513811-45513973
  hypo

SEQ ID NO: 27971 - DNA, 950 bp, Homo sapiens
  chr21:46894937-46895887
  hypo
cggtccctgaggatgtttctcctccgggttttcctgaagtttaaaacatccagccgccttggcgcgtgttcggcccagccgggcgtgcgctggggaaacctgtgcggggagcatctgcggtgcggcctcctccagggcagggctctggccagaagagaggagcgcgttccccctcccgcctccgcatgtctgaccaccggccgaggcaggttcagaagcgtcactgtcctcgacccgattggacacgacttactgaagctcagatggtgcctgggcagggaaggccagcgtgcccaccccagcggccccccggagagcaccagagagggctggacgaggcgagagggggcctggaggaggcgagagcagcgtcctttgcttcccaggcctgccgggctcggggcctggcctggctgccatctctccagcctttcccttttcaaactcctcaggcatccggagactctggcagcgggctcggggacgcccgggagcttctcagggaggagacggtgagtagccggacggggcccagcccacgctgcagggtcccgggagagcccctcccagcagtggggtgacacatgtgcacacgcaggtgtggctccaagagctccctctatgccacgaagacatattcctggctggggacagggatgctgggctgggcagacgctcggagcctgggcacaggccccgctccggccctgcctggccgccgcgtgtctctggtgagaggatattcctttaaaacgaggtcctgccctgcacactccttggtcttcgaggcaaccttggccttcccttcgccccatccctccgttagctcgtgcgtggccatcagggaatgaacgcgtgtgtgagcctgacgaccaggaggagaaggcggcgcagggagcgcgcggaaggctttccccagctcgggccacctgagaaaacacaggaggggc

SEQ ID NO: 27972 - DNA, 635 bp, Homo sapiens
  chr21:46925332-46925967
  hypo
cgcctcctcaggggtaagtgtctgggcagccggctgggcacctgcgtcccgtgccctggctggttctgcagcccctgcccctcagagacactctcccacggaccccacagggagatatacaggaggccaagatgcggtttccagggtggaagcggggccaggccatgggggaatcaggtggacccaggaggacgaccaccagccgggaagtgcccagggcctgtacattgtccacggaggcgcaggagctggcggcaggcaggggtccccatggtgctcatgggggcagccgcctcagtccacacctgtccaaagccctgcggcccctgcccagcaccctgaaacgggcattccttccttccgcccctgccccccgccctccccgccaagccccacacctctgcatttggtcccagcaggtgaggctctgggctacacgccaggccatgctgggccaggtgcacgaggttcccgagggctggctcatcttcgtggccgagcaggaggagctctacgtccgcgtgcagaacgggttccggaaggtccaggtgagcgctctgtgtgacgggttctggacccgtggaagggccgaagccgcctcctggggcttaaggaaggcgagaggctcaggcccc

SEQ ID NO: 27973 - DNA, 210 bp, Homo sapiens; identical to SEQ ID NO: 10597
  chr22:20929364-20929574
  hypo

SEQ ID NO: 27974 - DNA, 646 bp, Homo sapiens; identical to SEQ ID NO: 26880
  chr22:24819901-24820547
  binary

SEQ ID NO: 27975 - DNA, 1265 bp, Homo sapiens; identical to SEQ ID NO: 22890
  chr22:25678186-25679451
  binary

SEQ ID NO: 27976 - DNA, 851 bp, Homo sapiens; identical to SEQ ID NO: 24378
  chr22:31480666-31481517
  hyper

SEQ ID NO: 27977 - DNA, 292 bp, Homo sapiens; identical to SEQ ID NO: 10601
  chr22:38506297-38506589
  hypo

SEQ ID NO: 27978 - DNA, 1121 bp, Homo sapiens
  chr22:39852943-39854064
  binary
cgcccccgcgcaggccgccccgggccgtgggccggcgcacgcacggtcacaggaggggcgcgcgcacactcgcactcacacacactcgctcgcacacgcacacactcgatccagcacgcgcgggcggcgcggggcggcggcggccggagtctgcggtgcgaggcgcccccggcccggcgcggcggcggagcccggctggcgggggaggggagggggttgcggagggggcggggtgggggccggagccgcttgagccggcgggagcgggcacccctgcgcgccgcgctcggcctcgcctccgcgccccccgcgcgcccgccgcggtccctcccccgcgcccgtccgctcgccgggcccccgccgccgccccggggtgcagccgagcggccgcgccgggtccccgggacggggtggaagtgggggtggggggaggggatcggggccgggccggggccgcgctgcctgcgatgccgggcgcccgccgcagccgctgccgccggagcccgggatggggcgagaggctgcggcggacgccagcatctccccgccggggaccccgggggccgcggagccgccgccgccgctgctgccgccgttgctgagacccagcgggcgatgggtgagttgaccccggcgtcctggggggcgccgcggcccctctatccccgcgctgcccgccctcccgcgctgcgcttggcgccccccgcccggctccgcggcccactccccgagcgtgaccttagggggcgggcgcgggcgcactggggctgggggcccggaggccgcggtgggggcgggatgccggggaagccgctcggcgcgggccccctccccctacccgccgctcctccgagctccccggtccccggagggcagagcctcagcgcccgaccccctcccacggccgggcgggggacgtccccgaggcgcggggctcgagccgtgctttgtgcgcggcaccccccagcctccggcgcggctcccccacaacctccggcgcggcgcggggctggggtgggaggcctccgcgcccgccttccccacccccgaccccagactgcggcggcggcagccgaggcccaagcgcagtcgggggctgggcgggtgcgggggctgcggcc

SEQ ID NO: 27979 - DNA, 971 bp, Homo sapiens
  chr22:46262409-46263380
  hyper
cgggtgctggggaggtggagacagcgcgctcccgagccctggaccactccctctgccccgcgcggggccgagctccacggcacgtgctttggcttggaccgggaaggcccgcagtcccacagtgcccggggaggacggtccgcgccttccacgacttcgcgccgcccgcgtggctgcagcgccgtggcccggggacgcgaggccacagcccgggagcgaggagcgcgggaggaccggcctgcctgtgcccggcaaagggggcccttccgaggcgggctcccttccccgccgctcccgtaagcgcgggagccagaggaccccagacccgccgcggcccaccccaagccccgatcaagtcctgcagcgcgggagggacccctgcaggcgcggggccagacgggcgacaaagcggcggactgcgagggccctgaggaagccggcggcgcggggtcaggagcaacctgctattcgtagggtcaggagcccacgcgtccccactgcggagggcggggtcgcagccaggcctccccgtttctagctgtgcggcctggggcgaggtgcttgacctctcggggcctcagtttccttctctatgaagcggagctgatcggccgcgtcccggggctgctgtgacagtccaaggcgagaacagcagctccgcgccgcccctggtgctggagaaccgctggggcctcgggagagggcgcggcgcggcggagcggccctggcagccggagggcgcgtgtggccagggccgatcctgcactgccctctgcgggatggcccggcccagtcctcgacccccagcacctccgccgcccggcctggccaccacctccgctccacgcgcccaggccgctcccgtcgcgggtctcggagattctcccgcgcccaggggtgtcccgcagccccgggcctcagcacccagcgctcccttctccacgacgacaatgaggcggaccctccccagc

SEQ ID NO: 27980 - DNA, 351 bp, Homo sapiens; identical to SEQ ID NO: 10607
  chr22:46597084-46597435
  hypo

SEQ ID NO: 27981 - DNA, 190 bp, Homo sapiens
  chr22:46599521-46599711
  hypo
cgaaaaggaaaaaagaaaaaaactctcagcaaagctagaggggatcctgccaatgagttcccagctcacagactgattagcaggccaccacacatgagctggaggccaggctcctcccgctgcgcaaggtgagaacttcccgtggctccaccccattctcccaatgcccaggtgggtccccgtcccttgc

SEQ ID NO: 27982 - DNA, 487 bp, Homo sapiens
  chr22:46658633-46659120
  binary
cggcctgcaacatcacgcgcgcggggccgtctgtggggcactcggtgcgggccacgaagccctgctggggccgcgggcctggcgcggcggagcgcggggagacgcgggccgcgggggaggccgggcgggcggcgccgggtccgagcagccgcaggcggaaggcccaggccaggcgcccgggcgagcgcggcagccgcacggaccacgtcagggagaggcggccgccgcgcgcggagagctgcaggtcgacgagcgcgagcgcgggcgcggccggccagggcaggcgttgggcgctgagcaggacgcgcaagtcgaggcagtaccagcgccgcccggtcccgccatgggggaagcagaggctgccgcggccgctcaggacagcgccgcccgcccgcaccgcgctgggccgcagactgaggagggcgcggccgccgcgcaccccgaggcccggggcgcccctgaggaggccaccgggcgccccggagac

SEQ ID NO: 27983 - DNA, 850 bp, Homo sapiens
  chr3:120169367-120170217
  hyper
cgtaagcagcattactgccccagctccaccccagcacaccccaaggaccgaaactcccagcgccaccccgggagagcatccccaggacgcgcgcccacccgcccagcgcgcagacccaagaggccccggggaccgagttcggactcctcggcccctcgcctacctcggcgcggacccaggcgaccgccaccagcgcgagcgcgagcgcgagccagcgtttccacatctgcggaagagagaagagagcgagtctgaaggcgccgggccccgcgctgacctgggaaacttgctcgggtcccgcaggctcgctccggccgcccaagcacccccggccgcccgaagagtccggcctccgcgccgtgcgccctgcgctcaccgtggtctggtccaggtctcctgggggcgcggggcaggacggcggcagcgagctgtaagcggaggtgggagctccgccgatcgccagcctcggaggaaatgcgacctcccctcgccgccccttaagacctctccttccccgcctgcctgcccccccagctcctccccattctcctcccccttctgctgcagcggcccccgcggctcccgctccccctccttccgacccctgctccggggagcccgcgggagtcctggcgccgccgaacccctctctccgcacggtccctcgtccggcgccccttcggccccctggacgtggagcggaggcagagggggtgtcccgtgggtccctgccacaaaggggtagggggaagggaaaccccaccccgggaggggctgctggctggcggcggcccgggcgggctgcggcggtggccaggtgggcggtgccgtggggggcccgggaaggtcc

SEQ ID NO: 27984 - DNA, 970 bp, Homo sapiens
  chr3:121902674-121903644
  hyper
cgcgatttgtatttattttactgtgaatctctggccttatatcagaaaaaaaaaaattgtgccaccctcggcacagagaacgttggtggcgtcgtaagcgccctaagcttctttccatcgccaaggagtaggggtcagggaagaggacagcgggaacaggatttgagagccgggaacccctggctcggcacgggagagggcaggagaggacctaagcgcggggctcgccgtctgctggggacccgagccggcctgtggccctcggggaaccgaagacgcgccctcagcgaccctgaagagtcagctaagctctctgcgggctaaggagacggtgaaggaaccgggactaactggggtaggggttagaaggcagcccgcgagtgggctacgaggggagctgggctcggcagttggggaccccgagggggcaagcgggcggggagcaggagaggggcggagctccggggccggggccggggccgcagcggccgcccagagggtctgcgggggctgctgtggccggacccgaaggcgggcgccgggagcgcagcgagccagacgcgcctctccaagaccgtgaccttggcatagggagcggggctgcgcgcagtcctgagatcagaccagagctcatcctcgtggagacccacggccgaggggccggagctgcctctgtgcgagggagccctggccgcggcgcaggtaggaccggggaacccaaggagggcgggaggaaagcgcccctggtgggggaggggccgtggcggggtctgggggccaagggctccgggccgaacgaggggcacacgccggagcagctccagcctgggagcattgggcgtgaacgtgggggaaagtagggaccagattacaggatcaaggctttccccggctcagaactggattgttcagtgcccctagaaggggcagcgggtcgcccacgcgaatgaacgggagcgcgcaccaaaac

SEQ ID NO: 27985 - DNA, 30 bp, Homo sapiens
  chr3:123667353-123667383
  hypo
cgggattacaggcgtttagccacggcgctc

SEQ ID NO: 27986 - DNA, 283 bp, Homo sapiens
  chr3:127534744-127535027
  hypo
cgcccaaggaccatgtagacgtcaataaggaagtatttgctgaatgaatcgctgctttggatcctgggagaggagagcaaggagccgtatggggtagccacagagctgcatgcgaggggcgctgagcaggagccaggccgtcctcacccctgcagagactgacagagtggggttcaaaatggccacttgaagggacaataagctgtgtgatttagctgaccccagggagcatctgcgctaaaccagctggctggtgatgcgggaacacctagtcgcaggtggc

SEQ ID NO: 27987 - DNA, 1239 bp, Homo sapiens
  chr3:128720062-128721301
  binary
cggagcgaactctccgcgccaggcgggcggggcggagggaggagggagttgagagtggacggccgggagtgggaggaaaagcgcagacgccaggaacgccccgtgagtgaggagaggagagcgtgggagtcacgcggagaagccagacccagacgccgaccgggcactggtggcgctgccggggtcccgggggttcctggaccccctaccccaggcccctccaaagcaactggggtaaaccagacgcactgtgaggccagcgcagctgctggacacggtccccggcgccgctccaaccagaccgcgaccgctaagcccctcctttcgagaaactctggggccgcccctggaagtggcggggcgaagggaccggaggagggaccggaggagcgaggcgcgcggcgcagcgatggagccggtcagcacgggcgcggaggccggcatggagggcgcgggaggtgacccgtaccggcgacctgcgcggcgcacgcagtggctgctgagcgccctggcgcaccactacgggctggaccgcggcgtggagaacgagatcgtggtgctggccaccggcctggaccagtacctgcaggaggtcttccaccacctggactgccgcggcgccggccgtctgccccgcgccgacttccgagcgctctgcgctgtgctggggctgcgcgcggagggggccaccacggccgggcaggcagcaggtgacgggaactccagagatgtgacccccggggatgcggccgctgagttggccacggacggggactcagataccgatgaagaggcgcgcctggcgctgcgcgccgagccgccggagctcaccttccgccagttccacgcgcgcctctgtggctacttcggcacccgtgcggggccccggctgccccgcggcgctctcagcgagcacatcgagacgcagatccgcctgcgccgtccgcgccgccgccgccgcccgccctgcgcgcctggccccgacagcggtcctgactgtgagcgcgttgcgcggctggaggaggagaatagcagcttgcgcgagttggtggaggacctgcgcgccgcgctgcagagcagtgatgcgcgctgcctagcactgcaggtgcgcgccggccacgaagggagggtggtaacgcccgggagagggctcgaactaaaagctggctggctgcggagcccgacaggacagagtcagaggaaggggagacagagggcagccccacaccatcccactcc

SEQ ID NO: 27988 - DNA, 1269 bp, Homo sapiens; identical to SEQ ID NO: 22894
  chr3:129693123-129694392
  binary

SEQ ID NO: 27989 - DNA, 333 bp, Homo sapiens; identical to SEQ ID NO: 24404
  chr3:13679108-13679441
  hypo

SEQ ID NO: 27990 - DNA, 787 bp, Homo sapiens
  chr3:139258152-139258939
  binary
cggtggccgaggacgccctttctggcgtccgggggcaccggaccgcggctcgccgggatggaggcaggcaggcagcgtctcgggagggctctagggagcggcccggagctgctcggcggggcgcccagggcgcagcgggcagcgcttaccgagggcgcgcaggtactcctcgaaattctcgttgaccaacatcttccagtacccagtgaagtcgactggcatttcggggagtgactggagccagttggccacaagcgggcgggacggctggagactgccgggacagcggctgccggtgctacgcgggtggtgggcggcccggaaatgagcgccctccggggacagggggctctgcggggcggcgacagctggattcccagcgcgcacaaagcctgcgggaggatccattgtagcggtcgctcctccccgcttagcgagggcgggcgcaggggcgggggatgtcgaagggtcaggtttgtccaggccgcgccaccttcgtttcagacgttcagttcgtttcccctacaaaggaagaggagaccggagacgggacgtttgctttgttggccgaactcttcggctgctggggatttccttcaaacgccattaacttctcacactcagcagccactcgggagttgggaaacaatctcctggggtttgtgctggcgtgattaaggaaagaggccacttacaggcctttgtctaaagcctcgcgccggtggtggctggggtcaggaaagctgggaggttcaactacgggcgagaaaattggggcactttccac

SEQ ID NO: 27991 - DNA, 506 bp, Homo sapiens; identical to SEQ ID NO: 24405
  chr3:141174173-141174679
  hypo

SEQ ID NO: 27992 - DNA, 949 bp, Homo sapiens
  chr3:142682278-142683227
  binary
cgccgggggcgtcgctgcaggtttaggagaagacccgtgcctccgagcagccgctcctaaaaattaaataaatcaataagagaatcaattaataggcagcgctgcgaccgccaggagcgcggagcgcgcgaggctcagcggcttcctcgccaagcccctgctaccggcgcgcggccgcccgcgctgcggcagcggcggcggcgcggctgactgcggcggcagcgcggcagcggtgactgggcatcgcgcggtgcgggtgcctccgccgccgccgcccccggagcgggaggtggggatgtgcgagccgaggcgcggagggagggacgggcgcaccgaggaagggcgggggcctcccaggctagggtttcgcggccgcttcgggggatagagttgtcccctgtctcgagttccgtaccatccccctcctcgggccgccgcagcccgggccgccccgttaatgattgatgcgggggccgcaggctggtcggcgacgcggcggcgcgcgcgccgagtactagagtcggccctggggttcgaaacccgacagccacgcgggcgttctggaggacactggggagccgcgttcgcggggggcggggagctgcggctgcggggggaggggagggcgccggagccgggcagggcggagagatgcgccagcggtaatctccggaggtcgccggggaggggggcactccggaagtcggggggctttaagcccgcgtccggatcggggccgtgtcattgtcagctacctggggatgcgcctctcgctccctcactgtctttgcgtgtgtgttagtgtgtgtgtgtgtgtgtgtgtgtgtgtgtcggcctgtctacgcactacacgaaggcttagttggtcttctttcgtctagtgggcgcactcaggtgcgtcaccattctgccgtttccctcgcccttgtcctgtccgaaagaaccgtcc

SEQ ID NO: 27993 - DNA, 2468 bp, Homo sapiens; identical to SEQ ID NO: 25634
  chr3:142837817-142840285
  binary

SEQ ID NO: 27994 - DNA, 141 bp, Homo sapiens; identical to SEQ ID NO: 10616
  chr3:150237458-150237599
  hypo

SEQ ID NO: 27995 - DNA, 72 bp, Homo sapiens
  chr3:150237910-150237982
  hypo
cgtgatccgcccgcctcggcatcccaaagtgcactccaggttttaattacctctcgggtgattgtggtgcac

SEQ ID NO: 27996 - DNA, 785 bp, Homo sapiens
  chr3:160822422-160823207
  hyper
cgtgggatttccttctctctccgcccgttctccacattccccacttagtttcacattccttcccaatccctccgacatccctgcgccggggcccttccctagcgctccgggaaagcgttcgccgcaggcctgttaggggcccaccaataccgtaacaccgttcccgtcctcttcctcggcaccgctgcaaacgccccgggtcgctacccggatttgacggtggctggagcggcacgggcgacgcaaggcaggtattgcaccctggggcaaggcaaggtggacaaccagcggatgcggcgcggccgcggcctgggcctgggccctccgcgtcgcccactgccccactgggccccttctcccgcgctcaccggaggcgggcagctgctcgtcaccgagacccgagacccacggtgcggcggctcaacctgggccacgctccgctctagaggagtgggcggtgcctcccggcctagctgccggggtctaggcgtttccgaggacggcgcgttccgggaaaggcgggtccggtggctataccctccacccagtggcaggactcaaccgcctcggagaccctgcagggccgcccttctcactcacctcctgtgctcggcgcgcacccagctcggaagcgggaaggtggccggcgttctctccctgcgcacacacgcagcctccccgcatccgcacgcacggccgggcgcgcgcagaccacgcgccagggccgcggccggaagcccctggctgcacgcgcgggcccaggcggcccccagccctgtgagctc

SEQ ID NO: 27997 - DNA, 1895 bp, Homo sapiens; identical to SEQ ID NO: 26955
  chr3:16553609-16555504
  binary

SEQ ID NO: 27998 - DNA, 820 bp, Homo sapiens; identical to SEQ ID NO: 24414
  chr3:169539913-169540733
  hypo

SEQ ID NO: 27999 - DNA, 1102 bp, Homo sapiens
  chr3:179168676-179169778
  binary
cgtagaacttttatgagtcttccaagcactctccacccaacagccctgctgggcagtcccgaatacccgttattttgggggcacgcacgggctcgtgctctgagttcctggaaggaggcctcggggagtgacgagaaaccaggggggtctgcaggacttggaccgccgaccgttcctcgctccccggggcgagcggtctggaccgcccgggaagtgcctgcgccggcggtcgtggggccagttcccgcgtggcagctgggcgcgacacaggcgcgccctcctcgtccctcccgggcagcgtcggccgcccgagcccggggagacccgccccgccccgcgccgtcacccgggccccgttccgcaggggtggctcgcggcgccccacgtccctgcgagaagcccgggatcgcttcgcggggcgcaccgacgagccgccgctcgcgagctcgccgcctacctggagggagctcaggcccgcgtcgaccgcgcgctgccggtgtccgctgggcgctcagcagcccctggagcgcggagccggcgtggagagcgcagctcacagccgagaccagagccgccggccacacccagtcccgcacctcccagcagccaactccgcggcgcgccggagccggggcggggacgtggctggaggcgcgaggcgcgaggcacgaggcgcgcgggcccggcggggacgtgccggggacgcgcagaccctcggagcgcgcgcagcccgggcggggggcgaagggagcgggcgccgcgcgcagcttctgcttcctattttctctctcgtttcctgccagaaggagaagaaaaacattcattcccgggcagtttcgttttcttgttggtgtggcgccggggcacgctgctaagtagcgcccgtctaagtggcgtggccagtttcctttccggcgctgacaggcgccagtttgcttgttagcaggatcgaagggcagagctagaagaccccaaaggccccatttaggtttcccattctggaattctaaatgtcagaaagtaaactgaagcccagagttgcacaaccttgcgttgcagtccccgctcttccatcactagttgtaggaccgtgtaccgtctc

SEQ ID NO: 28000 - DNA, 1571 bp, Homo sapiens; identical to SEQ ID NO: 22901
  chr3:186078710-186080281
  binary

SEQ ID NO: 28001 - DNA, 635 bp, Homo sapiens; identical to SEQ ID NO: 24423
  chr3:186857065-186857700
  hyper

SEQ ID NO: 28002 - DNA, 1949 bp, Homo sapiens; identical to SEQ ID NO: 22902
  chr3:192126247-192128196
  binary

SEQ ID NO: 28003 - DNA, 891 bp, Homo sapiens
  chr3:194407289-194408180
  hyper
cgcgcgtgtctcccccgcaccaaccttttttgcacactcgaagctgaatattttcttttttagagaatttacccgcacctcctgcggggttcctaagcactctctctgctcccctccccccaactccctaccacagggccgctcccagtagttttattcttcgatcttgcccgggccgagcctggcaggggccggtggctcagcgggcctcgcacccggcgctccgccgccgccgccgcccagctgcgccggggcgccctccggagatgctgccgtggaagaagcacaagttcgagctgctggccgaggcgccgccgcggcaggcgtccaagcccaagggctacgctgtgagcctgcactactcggcgctcagctcgctggcgcgggcgtgccccgaaggcgcgcttagccgggtgggcagcatgttccgctccaagcgcaagaagctgcacatcactagcgaggacccaacttacaccgtgctctacctgggcaatgccaccaccatccaggcgcgcggcgacggctgcaccgaccttgctgtgggcaagatctggagcaagagcgaggcgggccgtcagggcaccaagatgaagctgacggtgagtgcgcagggtatccgcatggtgcacgccgaggagcgcgcgctgcgccgcccgggccacctctacctgctgcaccgcgtcacctactgcgtggccgacgcgcggctgcccaaggtcttcgcctgggtgtaccggcacgagctgaagcacaaggccgtgatgctgcgctgccacgccgtgctggtgtccaagcccgaaaaggcgcaggccatggccctgctgctctaccagacgtcggccaacgcgctggcggaatttaaacgcctcaagcggcgggacgacgcgc

SEQ ID NO: 28004 - DNA, 900 bp, Homo sapiens
  chr3:194408205-194409105
  hyper
cgcacacaccatcccgctagtgccgctgcgcaagctgctcctacacggaccctgctgctataaaccgccggtggagcgcagccgcagcgcgcccaagcttggctccatcaccgaggacctgctcggcgaacagctggagcaggagctgcaggaggaagaggaagaggagcaacccgagggctgcccggaggaggaggagaaccgtgcggcagagggagatccagcagaggaggaggccgaggcgcagcgtgcgctagtggtcgccatgcactttgagtgcggggacttgttggatactctggagaatggccgtggggaggcgctaggaggcggcgggggctccctgggcccgggggccgggccgccgcctctgctgctgggcagcgcctccgacatgaaggctgagctgtcgcaacttattagcgacctgggcgagctcagcttcggcaacgacgtgcgcaccctgcaggccgacttgcgggtgacgcgcctgctgtcaggcgacagcacgggcagcgagagctccatcgagggcgggggccctgacgccacctccgccaccgccggggactcgtcccgccaggccgacggcgccagtgcagacgagccccactcgggctgagctcctccgcgcgtcgccggcgctccaccgtggctacccatccgtggtcccgacaacctccctgtcccttgcccgcccccaggaagggggaaatggggcatttggggcccagacctacacttggagcccaggtccagcgttcccccgaccgctttcccctacctcccggcccccgctcccgccccagcacttttggctctgttgcgcgtggggatgcggggagatttgagaggggaaaaccccgccaggagggagagagaggcacccctctgggatgc

SEQ ID NO: 28005 - DNA, 2061 bp, Homo sapiens
  chr3:238187-240248
  hyper
cgacctgtgtgtgcaacatgaaccgagtgaaaccatcggggagggggtggggggcgtttcttttaaatgtcgcttttgcagataaacgagcagggatcctacctcttttgaccggagatgttgaaaagcacgaccaaagtttttggcttggtctcttgctttccacaacgagataaagtctgaagcctgtaactctccctgtcccgcgggagcgtgcaaagggagggaagataagcggcgtgggtgaggggtggcggcgcagaacccaggaagggagcagaggcgagagccagcctccggcaggagggcgtagaccccggtgccagccagaacggctccagccttcccgcggccagagagccagcggcgggaggggacgggcgggacctccgcggacagccccgggtgcggaccagcgggcagcggccggcgagaccctccctggatccgcccagagcttaccggaccctgcgcgcccccgtcccggctcccggccggctcgggggagaaggcgcccgaggggaggcgccggacagatcgcgtttcggaggcggcgcaggtgtgtcaggggtgggggtccgctggcatctctcgtgccggcgctgggggggtctcccgtggaggaagggctgaaggtgctccgggaggggtccactcgttatggaaaggaagcggggcgcggtcagggtccctcgtccgcagtgggggtggtccgggcccctcagcctgcacccgggaggagacgcccccttttcacgccccgcccccggtggccgaggccggattcggacagctcggggtcagtcgacggagcacaccgggcgcccgaatccgccgggtcccactcacgcccgccggccgccggtaggttggccctcccgcttccagcctccgccaccccatccctcgctgctctctgaggaggattccagacccccccgtagatctccgccctctctcgggtggggctccgaggtctagctggtctgggggtcagtcccggcctctgtctcccaccgcgcccctcgctcccctggacaccgcctggtgtgtggggctcagacccccccagtccactgcccctgtgtggctcctcctctcaggagaggattctagatcccagcccggggggggttccgaaaatgccgccagcctggagcggggaatccatggaccgtggggttgtggggttggggagcacgaaaacccagagaggggctagagctccacctccccagaccgccgaggggcgagagggcgcgccgggggccgtggttgccatggctcctggtagcggagcccggggggctggagatgccggtcgcggatggtcccttcttcctctttgtgcctctctctttctctcgctttttttttttttttggagtgtgagtgtgcgtggggaggcagcacggagaaagtgattaatttggggagcagggattggagccgggaggctggggaaagccagcccctccgttcccactctccgggctcgctgcgagccacagtgtctcagccaggggcagggccggggaactcctgcgaaaaaccacgggccggaggagcagcagccgcgcgggcccaggtacccccgccccagacggccagcagggtggagcgcagggtgggcgtttgggctgctgggcgggaaggcgggcggggaaggggtgggaggccggcggcggagggcaggtgtgcgtcggcagggctgggtggcccggcagagagggcgccccaggttcagcccctcctcgaagggcgccggcgtccagtcccgctcgtgggagccgcggagcagccccagggccggcgagcggctgccctgccaggcgcgtgcgcgagggcgcgctcccgcgggaacgcgccgtgcgcggggagatttgcgcgtgcgcgtggcgatggtaactggtgggccccccgggctcgctctaggcggaggctcccgggacgcccacgtggcttcgaattccagctccaccatcactgtgatgcgtcactctggactaggcatttaactacgtgcctcagtttccctttctcaataatacggagattatc

SEQ ID NO: 28006 - DNA, 636 bp, Homo sapiens
  chr3:25469368-25470004
  hyper
cgaggcggtgggcgggaggcgagcgggcgcaggcggaacaccgttttccaagctaagccgccgcaaataaaaaggcgtaaagggagagaagttggtgctcaacgtgagccaggagcagcgtcccggctcctcccctgctcattttaaaagcacttcttgtattgtttttaaggtgagaaataggaaagaaaacgccggcttgtgcgctcgctgcctgcctctctggctgtctgcttttgcagggctgctgggagtttttaagctctgtgagaatcctgggagttggtgatgtcagactagttgggtcatttgaaggttagcagcccgggtagggttcaccgaaagttcactcgcatatattaggcaattcaatctttcattctgtgtgacagaagtagtaggaagtgagctgttcagaggcaggagggtctattctttgccaaaggggggaccagaattcccccatgcgagctgtttgaggactgggatgccgagaacgcgagcgatccgagcagggtttgtctgggcaccgtcggggtaggatccggaacgcattcggaaggctttttgcaagcatttacttggaaggagaacttgggatctttctgggaaccccccgccccggctggattggcc

SEQ ID NO: 28007 - DNA, 123 bp, Homo sapiens; identical to SEQ ID NO: 10630
  chr3:31494150-31494273
  hypo

SEQ ID NO: 28008 - DNA, 1071 bp, Homo sapiens; identical to SEQ ID NO: 26992
  chr3:33259711-33260782
  binary

SEQ ID NO: 28009 - DNA, 248 bp, Homo sapiens
  chr3:33841102-33841350
  hypo
cgcttatttagctcatgctgatttaatgagggttcctttcatgatacttaatagttataagaacattttttacgattttatagttaaacatttcttttgcataccttgttaatctcgttttctccgtatagtatattctacttgtttcacaggagaatcacaattgtattccaatccaagtagcagaaacccaggctaaactagcttgagctaagaaaagacttattctgccgggcgcggtggctcac

SEQ ID NO: 28010 - DNA, 137 bp, Homo sapiens
  chr3:36984260-36984397
  hypo
cggtctcctcatactctgggagagcggcggaaacagaacctgcagttgccccataaagctggtcagtcggtcataaagtgaagttaacaatttatgacccgctttaaaaaaaaaaaaaaaacatagaatgggccggc

SEQ ID NO: 28011 - DNA, 419 bp, Homo sapiens; identical to SEQ ID NO: 24436
  chr3:38035641-38036060
  hyper

SEQ ID NO: 28012 - DNA, 956 bp, Homo sapiens
  chr3:3840845-3841801
  binary
cggcagtgcgcttcgcctccctgcccagccgcagcctgccgtcccctagacaaaaagcggcgaccgcggcccggccacccgagccccgccgcgctgcgcctttgttgggcggtccacagatggtgcccagcacggggccgcgccgagggcgggggcgggaggccgcgaagagggtcgggcgggaggggaggagacggcggagcagccaatccgcgcgcggcccatcagctgaccgcctttgcttacaccaggtgcacgccggctgcggggagcacaaagcggggcgcaccgcgggcgccggcaacgagccggtgaacgaggcgaggcccgtgcgcccgcggctgcaagcgcccgcctggcggggagaggggccgacggcgtcagcccgggcggcggcatccctaggcgcctggggcgccttcctccggacctggccgctcgctgccccgccctctgcaccccacttctccgaccctccttcccagtcctgcctccccctgccctggcctctgagagccgactgagcccagccccgtgcagcagcggttgcctgtgtcgccgcctagtctccggtcttggtgctctcccgggggtgccccaaggagccagtgcgcgctgcgggctgggaaggaggcgccgctcagctagtcctcctcctcctcctcgtctttctcctcctcctgctgctgctgccgccgccgccgccgtgggtgccgggtccgcgcgcaccccaacacccccaccagctgggcctcggggtaagtccctggccggccgcgccgcggcaggaggtgtgggaggcagcgaggggaagtcgaggcaaacttggtggcgtgggagaccctacggggtctggggaacctcagggtaagatcgcgggcctgagggggacgagggggcgcggctcacggagctggggaaaatgacgaagtcgggaaacgagaatatagtgcccc

SEQ ID NO: 28013 - DNA, 164 bp, Homo sapiens
  chr3:43655477-43655641
  hypo
cgttcaacttagactagatacacagaaaaccccaaggtttccaatcttggatatgggaagaataactatgcgtgaaaaaaatagcaaagttggaaagaatgtctagtttaagggaacaataaagtgttccgcagagtatctggggacacgcatcaaaggtcaac

SEQ ID NO: 28014 - DNA, 2935 bp, Homo sapiens
  chr3:44036183-44039118
  binary
cgacgtgatgtgctctgcagtgctggaattgagagttcaagagagagataccggtcctggcctctcggtgttcaggtgtgtgtataggtgggcgttggtgtgagaacgagcgagagaaagcgggagcaagagcgagagctatgcctcccttagtgtcagggagggtggccggctgatgaaggtgctgtgcagaaagccggggaagggcttaaagagggtgctggcgcctcgggaacgccctcccgctgcaccctacaggaggtcgtgggcggtggcttaacagccccagtgcagagcttgaaccccaccgtccagaaggaaaggtgagtgggggacccgggcgggaggtgaggcctgccggcagcggccctcaggcgtgctgggcagcacggctagcagaggcggcgcctggtcttggatgctgcagcggagacgccaaggagactgaatgcagggagcgaggcgtagcggccgcggagggtggggccgcccggaaatccaggcggcgccagccttgtagcatctgcaggccgggggcgcgcacacgaggggcacgtgggtgtggaggaaccggcgcggcggggcctccttcctgcagcgccgcggcggtcgagtgcccgtgctggaggaacggcgagtggggtgcctgccccgcgcaggcggtacccgccgccccagctccgcacacagcaggcacggccagggaccgggaccgtggcccagcgcctggaggcgctctccacgcgcatctttcccgatgccggggcgggaagccgagtggctttgtccggagatgccaggggatgtgggcaggggacgaagaggtttcccaactggccaaaccctggcttgaggaaagactgaggtggtcattgacccgtgggagcgccctggggcttcgagggaacggcagccgagcccgggagactggtgttgggtacccgcgggggccggcgggttccacgtgggtggaccccgagctgagggcagggtagggtcgcggatcgctgacctatgagctcccctactcccgcacaaggacacctgcacatggacccgggcttccacccgcttctggctgggttggcgccgggagcgcgcaggggagggacggcggcggagtgcggggtttggcgggtgaggtgggtgaggtgtggccgcgggggagggggcgaaggcactagaaggctgcggtcgcgctgtcgctgctgttcccaccgtcggcgcggggcgcggagggggcgaagaggtgcctgccagtcgcactgcggtctaggggtgaaaggaaaagggtccatgtaaaggagaaagggcaggcagagactcttgctggtgccagcaggcacggaaggatgtggccgcggggacttggagtttagagggcaacgctgggtgtcataatgccggagatgaccccgggtgcagaggcgattccagttgggtagagctacagagaacgtggcccgagaaggggagcttccttaaattagacatatcctgtgttgtcctaaacctagcatttaccctctcccaccccgctcccacaacctccagggtcctagcggagtcatttaagcgctcagtactaccagcttcattttaggtaaaaatcaagactaattctgcactttattaacctcctcgtacccaagtcaccacggggcagcttttcacagccctaaggcgtggtcacttcaagcccacagcgagttgctcgtgtcctcggcttctgctccgcaaatctcggacgatgccaccggaggacgctgaaggcaaaggctggtggggccaggcgccggcgagactgccgcgctagcacagcttccgcgggagccgagtgctgacgggcctcgcgaccccctcccgagggcaaacggctcggccctccagggacacttggtcagtgtcactctctccctaccgggtgtcgcgcattttctcaacagaacgtgaccccgtagacggatgaactcggaatcggcaaaacccgcctgcccttgtctagtctctctgccccaccacaccactgcccttcactgcggactgcgccgtgtgcgctccgggaccgcccctgcacctttgcccacagcttcccattaccaaggcagccggaggaagacctttccgagttacctgtctcacgtcagcagccacaccgaggcggtccccctcgcaccactccccaagtgcagagcccctgaaagtccgaggctcctgtgccacgcaccctcccccctgcggggcgaccccgcgtatgcgtgtgtgtgtcacgcgtttaatcgcacagagtaattcccagacgtgcaagacaaagcatttcaagcaaagatggtccagagttcaaattggaaagcacatctcgaggcgctgaatctgttctcgccgtctgcctcggtctctggggcgtcgcatccaggagaagggttttaactccctgccagatccgctcggaattagctcttctggcggtgcagcaacaagtggccccgccgcctcccttgtgcactcggagggactacatcctcctcctctcccagcccctagtccaaacgggagtaggtaatggcggggaaagggggaggtgacgagagcggggagaaggaagtacatattttttaattgtgaaattgtctgtctgcgtgctgtgctctgggattctcttgtctcaatcaacttcaattttaacgtggccgtaacgttaagattaagacctagaaatgaaaacgtacccacctttcttattacaaaggtcgtttgttgttgttgtttttttaaaacaccaagtaaccccccccccccccccccacggacttatactttgtttatgagatttctccaaccttggtggtttggagaaatgaggtgggggaggggaggaccaagggcagcaagacgtccactacgaaaataagatacttactaatttaatagggcc

SEQ ID NO: 28015 - DNA, 990 bp, Homo sapiens; identical to SEQ ID NO: 26997
  chr3:44039665-44040655
  hyper

SEQ ID NO: 28016 - DNA, 972 bp, Homo sapiens; identical to SEQ ID NO: 24439
  chr3:48693261-48694233
  binary

SEQ ID NO: 28017 - DNA, 1429 bp, Homo sapiens; identical to SEQ ID NO: 24440
  chr3:48698806-48700235
  binary

SEQ ID NO: 28018 - DNA, 860 bp, Homo sapiens
  chr3:53032761-53033621
  hypo
cgtatcaacagggggccagccctgtccctcaaccctggggagctggtgctgccgatcgacctgactggcccacaacgtcttcagctaccactgcaagggcctgcggggtgacggctgtgcagcgctgctcgcctagctgttgatcgcctggctgttgatgggctggcacccgcagagctgccctgccggccaccgaccaccatggagggagcattcagctggtgcgcgagctgggtactaaactggctctactgtgagccgccctcggcccctccatctcctcttaccccttgtcatccatgcgtaagccggggacgcccgaggacatgctcttcacccaaggcctgcgccggcgtctgctgatcaagggcccagtacaaaggccgtcatggagatccaggccttcgccaacagcggcctgttctggtgcaagggccagccgggcagcccaaggacctcacgactggctgctgggtcaaggcgttcccggggtgaaggtggataagcagaccaccaagggctcctggaaccctacgtgaaggaggccaagcacagccgtggacaccggcctgaaggctgggaaaggagccgacgccccacctcctctgaccaggcctgcggggaggagccacccacgcgccacagcaagtcctggacctggccctgcattccagggtggggcagggaggctggattctgagagagctgcttccggattgcgttggggtagtcaaggagctcgggacatcgcaggggaggcaaaaagccttggccagtgctcttttggtgtatcccttcagcttccagaggggaagccacaccctgatgctatgttcaaacgctccagaagacaggagttc

SEQ ID NO: 28019 - DNA, 1326 bp, Homo sapiens
  chr3:54155239-54156565
  hyper
cgccgggagccccggcgacgttaggagcgcactccttgctggggtcaccggagttgcgcttggccgggcaaggatgactcagcctcactccggtcggtctttaccgccagcctgcgcgagggctccacaaagttcccaatcacaccccatacctcgcacgggggagaggggttctgcaagctgggtcccggggtgggggcagcggcgagagaggcggggagaagcctggttcccagaacgcgcaggggcttctccggcttcctttctcctcgcccctgagggcggcgagaaggcgcctcctccggcgctcactgcctcctgcccagtgcggtgggcgccggagtggggagcaggcaatcccccaggctcggagaaatcttttatcccgaaatccagggtgtcccccggtcaggatcgactcggcgccgcgttggcttcctcgctcaaccctgacatcccggtccccaccagtcaccgcagccgggcggactccgaaggcagcggccgctggggagccccggggcctgggtcgggcgcgcagggggccgctgcgctgcggccggatgccgggagccccgcgctggtgcgcccaagccgtggtggcagcaccgccctccgtgctttcccctgtcgggcgccgcggccggaggagcagctgcgggcggtcacgcagcgctgccctagccagagccccgagctcccacccagtcccatccccagcccgatccgccccgcgtgcgatcccgcctgccgccgcgagcctgtgctcctttctgagatttctgcttcttccccagctccctccccgcaggagaatcgcgcggcgggggcggagggcgcgccccctttaggttccgcggcccccgaccccgcccggcccaggggcggagcgggcatgctacgccctctcctagcagccgcccgcaaagtgcggagcgccgcgccctgccctcggcttccctcccgcgcccccaacccccaccctggctagggtcgcccggcccggggccagccccagagtcgcgcccgcggtggcggactgcggagttgtaaagaactcagcggccgcagtagcccgggtggggcagggcgcgctccgccgcggccaaggacactggagtttccgagtccccgcccgcgcggcgcctcctgccccgccgccctcccgccgcggcccgccggactccccggggccgccgaggcggggccgggcggctgctgctgctagaggcgcgtctcgctgcctcctcccccgcccgcctccctccccacctctcctccctccctccccacctctcctccctccctctcctctccgccctcccc

SEQ ID NO: 28020 - DNA, 841 bp, Homo sapiens
  chr3:63263774-63264615
  hyper
cgctttcccaaaccaacagacccaaagtttccccggagccagagggcaccgggcgcacggctgagcctgcaccaatgtctgtgggccctgcctcgcccacctcctcgccctcccctctggagcgcggctggccaatgacagccttcccctggctccatgggtttccccctcccctgttgtatctaccctgccccagctcttccctgcccacccctcgctgactcgcttcgcttccccgacgcgctgggttcccggagcgcagagcccagcgttagcgggtgggctccccgaggccccctgccctcgccgggctgctccagggtgtcgctcctctggctgctcccgaaggggcttctggccctgaggacggtggtgccaagcgaacttcatttttaaaaagaactggtggatgagaagagcgagcgagggcgagctatggaccctgtgagtcaggtgagacagaactgggcagggcggctggctgggagcagggggcgggggatgccgcggcttgggagaggcgcccccagccccttcctcacgctttgctttctctctctcgcctcattcccccaaagctggcctctgcgggcaccttccgggtgctgaaggagccccttgccttcctgcgagccctggaattggtgagtagcagtgtgtgtgcagggaggggcgccaggcagccagctatcaggtgaggagaggtcggatggggtgctccctgctcagttctgctccaagccggagattcaaccctcaagccggggatttcaatcctgccccctcctaagatgccgttccaaggtggtgaggacaaaatcgaggcaccctgcttggaggc

SEQ ID NO: 28021 - DNA, 261 bp, Homo sapiens; identical to SEQ ID NO: 10637
  chr3:69230152-69230413
  hypo

SEQ ID NO: 28022 - DNA, 1291 bp, Homo sapiens
  chr3:69590903-69592194
  binary
cgaaacccttagtgtcctctgctaactccagggatttcccccccctcttttcgctgccttttagaagtatctctgggggccagatctgggcttcatcagcttttctcccgacctcccacgaacgcgcggcaaccgaagcacgcggtccccggcggcgcgtttgcaaaccccaccaacgccaacgcctcgaaaccgccaaacttcctgtctccataccaccaaagcgaccaaagcgccgtgccaagtgccccagggactccagcggaggctgcactagacctcgagccccagggcggggttttccgctctcccaaactcctgggacccgcacctccgctgggggtctccaaacgtgcgcgctgcgcccggggcgcaccgggcgcgcccgtggccgcgtcttgcggcctcgccctggcagcacgcttggggagcccggggcggtcgcccacctacctgctccgccacctcctccctgcggcgctccggggctgtagacggctactttattgtctcggctgcgcaccgcgcgggacctggggacccggctctgcgccagtcctgcaagtccactctgcgctgtgccttccccggcggcggctgccttcctcttcttcctcttcctctctgtccaagctccagctcagcacgtgagctacgcagcccgactcccgggctctctgggcagccagcgcctgccgcatcccccggcccgggtctgcaggtcgcccccgccaccgccgctcgccgtgcgtcctcgctttgctccacacttacagctgtgccccgggccgcctttctcgcgtccttccgtcctgcctgcctcctctcgctgtcagccggggctttcggctccctctctccccagcagcccccgcccgccgcctctccgggggctggggcggccgctgccaatgaggctcggctgatgcgctgttccggcccagtcattgtatcgggagggaaggaaggggagggggagagggaggaagggagggggcgccctcggcccccgccgcacggggctgcgggctgggctagccttccccggcagagaaagggcgccggtgccaggaggcgcggagcggtgcctgccaggaggaggggaaagagggggtcaccagcccgcgcctctccatcgctccctccgactcctccaagctctgggcggaacttgattctgcctcaccggcttcaggcatcccaggacctgagtgctgttagaataaagggtatgaggcaccggtggcagagggaggcgcagaatgcacccagccacccaagaggggctggc

SEQ ID NO: 28023 - DNA, 178 bp, Homo sapiens; identical to SEQ ID NO: 10638
  chr3:72618825-72619003
  hypo

SEQ ID NO: 28024 - DNA, 183 bp, Homo sapiens
  chr3:73045503-73045686
  binary
cgcctcggcctccctcccaaagtgttgggatcaccggcctgagccccctgcccggcctcgctctacgttttttaggcgcattctgaacgtgaagtgtatacactgaattctcacagcaactgcatagggcatcagtaccagtgcccttactgtacagatggggaaaatgaggctcagacaggc

SEQ ID NO: 28025 - DNA, 405 bp, Homo sapiens
  chr3:9993730-9994135
  binary
cggatctctctgccgcagggactggggagaggccggcctgggggcagggcgaggccgttgcggggcagcctcggagctggtccatctcgggttacctctcctcctcctcctcctcctcctccgtctcctctctccctggctccgcgccttcccgcagtgtcctggatgggggtgggcgccgtgcaggcctggtcgcctgcgcccgcgacgggggcagcaggccacgctccccgtcggggtcccgccatcgccccctccctgggccagctcctcacctgcgcgccgcagcccccgtgttcaccttgcgcgcgtccctgcagccgatcgccgcgccgcatcctccgagatgctcagactcggctaacagagcccggcgctgccgatcgcgagcccgcccacaggagc

SEQ ID NO: 28026 - DNA, 849 bp, Homo sapiens
  chr4:1015893-1016742
  hypo
cgaggtctgtgctgggccgtgggtccccttttgaccgcccccccggctccggaccccaagcccctcctcgctgactgttcctcggtcccacccgcaggccccccaaagatggcggacaaggtggtcccacggcaggtggcccggctgggccgcactgtgcggctgcagtgcccagtggagggggacccgccgccgctgaccatgtggaccaaggatggccgcaccatccacagcggctggagccgcttccgcgtgctgccgcaggggctgaaggtgaagcaggtggagcgggaggatgccggcgtgtacgtgtgcaaggccaccaacggcttcggcagcctgagcgtcaactacaccctcgtcgtgctgggttagtcgctgctgcggtcagaggtcatgggctgggttggagccaggcaggggtgtgcaggagggcggacggggacacacctggggcccgagagtcagccagcccccggcagaaagccttccttcggtgccctgccccacctcagctggctgcacctctgccaccatcccccaggtatcctgtcccgttcctgtccccgtcaggctccagcctcggagccttcctcccagcggagggcggagggtggagggcgggagccgaaggcagtggtcccacagaagggctggggcccgaggccttggcagggtgtgccggccgtcggctgtgactttgaggctcgggtttcggagttcagaggagccgccgggatgcgtggcctttctgttctcttctgcgcctggggcccgggcgctgggcttggacaggtgtccagagagacacgccctccatacctagggacccggcaccccgcctgctcc

SEQ ID NO: 28027 - DNA, 1023 bp, Homo sapiens
  chr4:10458329-10459352
  binary
cgcgtcccgctcgccgcgagggaaggccggggttcttccaaccgaagaaaaccaaaaccgtcaacgctcagctccgaggcccgcaggaggctttaaaaatggcctcctgacgacacttcctgctcggcgcggacggtaggagccctcggaggaggcatccttcataacgctgggggcggggagcgcaggccgggccagcggcgccacacgaacggccccgcgggacgctgccacccccgcctcggtcgccccggcgcgtcggccgagtccgcggggtcgcggcgcacaaaggcgagctgggggcgccgggccggaccccgaccctaggccaggcccgcgtacctgctcaacgcgcgccaagccgcggcccgggcccccaccccagccggtgccccacgcccaccagccggagcccgcgttcggcctacccggtgccacttgccacgacgccagccctcagcgcgggcacgcggggccgcggccgctcgacccgccccggcctggccccgtcaggcccccgccccgcgcgcccccacgacccggccgcagctggcgcttcggtcacgtacacgcggatccgggggccctcgccctcccgctcagctacttacccggcaggccggattcgggtgccaggtcccggcgaaggggcgtctacaccgccggccgcagaccgccggcgccgcgcccgctgtaggtccctacccggggggcggagcccgcgccagccccgcgcgtgcgcaatgtgaagcggcggcgcggctccagcgaggccggcgcctgaggtctctaaggctgcgcccgcccccgccgggcttctaagctgtccagagcggggagcctcagacccagccgagccccacttctgggcttagagcttgacccaacacgttcgcaccgtagcgagcgaggtccacatttagccatgccgcaggcaaaagaaggattcggcttcggtcctggcccagtctgccatcccggggcgcctgccttgtaccgggtcccgcggagggcggccttggc

SEQ ID NO: 28028 - DNA, 970 bp, Homo sapiens; identical to SEQ ID NO: 23254
  chr4:111552929-111553899
  hyper

SEQ ID NO: 28029 - DNA, 597 bp, Homo sapiens
  chr4:11429092-11429689
  hyper
cggagcgcagcgcaaagacagtggatttggagtggcctccctagaatccccccaaaagcatcttggcacaagttgtagataaaaatagctcatgataacattgtgggaaagggaggagcgagactcgcgcaaggcgaggcaagggtaccactggatctgcaaaggaggaggaagagggaggatgcaacccttggcccaagagagcgccctgagtgtgcgaggaatcgctggctcccaggggagggaaagagatggaagacctatagcgcctataactgcagagttatagacctataactgcagagcccagcacaccccatcccgcgccggcacccggctttggctccagcttcttcttcccatcatccgcctacgttctgggtctgtcctccgcttcctgggacaggctggggctagaaggaggagcagcgcgccgtccgccccctggctggtagagcgcacctggagaggtcaagctccgcgaataagacccttcctgggagctggggtctaggcgttccaaccgcgggttcgcaccccgccatccctcacctccatccgctgccactacccaagggcccggaaatagaaaaccac

SEQ ID NO: 28030 - DNA, 782 bp, Homo sapiens
  chr4:123747655-123748437
  binary
cgtggtttgggtggtgcgggggttgggcgggggtgacttttgggggataaggggcggtggagcccagggaatgccaaagccctgccgcggcctccgacgcgcgccccccgcccctcgcctctcccccgcccccgactgaggccgggctccccgccggactgatgtcgcgcgcttgcgtgttgtggccgaaccgccgaactcagaggccggccccagaaaacccgagcgagtagggggcggcgcgcaggagggaggagaactgggggcgcgggaggctggtgggtgtggggggtggagatgtagaagatgtgacgccgcggcccggcgggtgccagattagcggacgcggtgcccgcggttgcaacgggatcccgggcgctgcagcttgggaggcggctctccccaggcggcgtccgcggagacacccatccgtgaaccccaggtcccgggccgccggctcgccgcgcaccaggggccggcggacagaagagcggccgagcggctcgaggctgggggaccgcgggcgcggccgcgcgctgccgggcgggaggctggggggccggggccggggccgtgccccggagcgggtcggaggccggggccggggccgggggacggcggctccccgcgcggctccagcggctcggggatcccggccgggccccgcagggaccatggcagccgggagcatcaccacgctgcccgccttgcccgaggatggcggcagcggcgccttcccgcccggccacttcaaggaccccaagcggctgtactgcaaaaac

SEQ ID NO: 28031 - DNA, 550 bp, Homo sapiens
  chr4:1299071-1299621
  hypo
cgctgcactaggtgagcccggccctggtgagggtgccttgtgagtggagcctgcttgtgctgctgtgccccgctgcttccaggcggcgcggccctccgtctgattgctggaggactcttcggtgtggacacaccgtggtttgtttacccatcctggtcaatggacaattggaactgtggtgaacaagcattcctgcacctgtatgtggatattgtatgtccatttttcttgggagtggaatggctgagtcatctggtaggtgtctttaccttttaaagaactaagcgctttttccagaaggatcatcagaactgctgccagcaagagtccaggtatcccggctccaccagcatgtggtggcggcctcttgacttggaactgttcttctgggtgccggggttctccagagaaacagagccagtggcacccacatgtgtgtgtgcgcacgcgtgtgtgggagtgtgcgtgcgtgcacgtgcgcacgcgtgcgtgtaaggagctgtgtcacaaagaattggctggtgcagttatcaaagctaagtcccgagcc

SEQ ID NO: 28032 - DNA, 837 bp, Homo sapiens
  chr4:142054075-142054912
  binary
cgggccggaggggccgcggccgggacgcgcagccgccgcggggaccggattccgggcgagcggatggcgctggccccttcccctctcagctgtagcgcggtggttgcattttgcttcttgggcgcccggggggcgcgggaacagagggcccgcggggcttgcggaggagtcctgctgccgagcgtcctgctccttcgcccggcttcgccttctctcataagggtggccgggggcccacgaacttgcagggtggcggccctgcgccctccagccccggcggggacgggcacgattgctcgtagtctggggtgctgcggtgcggggtgctgcccagggtgtcccggccgccgccactgagcgctggggcgcgcgaatccagctgcagccgctgctgccctgcgccggttccctcaggctgcgggcgctgcgctcctgatctcgccggtggctgcgcctgggcacgcacttgccgcgggcggggcgggcttggggacagtgggagcgagcaggcagagcggagtaagcggtccgtgtgtgtgtgtctgtatgtttgtgtgtgtgtgtgtgtgtgtgtataatgtgtgcgtgcaaggaggagcttagtgtgatgtcaaagcccctgggattctcttgccatgttcccttggtctctctttatgggcagcagcgacccctgtcgggtctcaaattcaacctcaatcggcgacttaatctaggtggaggtaaagaggaagcgacccctcgacctttgagtacgggaataacttcctgagcgttacatttagcaaatgtatgtgcctctcgtaaacgaccctcccgtttgctggaagtactgcc

SEQ ID NO: 28033 - DNA, 1461 bp, Homo sapiens
  chr4:147559686-147561147
  binary
cggcgactggagcgcggacctggccatttgggtggggttgagtgggggcgcgattgtgagtagcagccgcgggacgctgcgaaggggcggcggcaacagagcacgggcgggggcagaaaagaggcggcggagggcgcggtgggggagcgcgaggcgagtgctgagagagcagaaaggactcaagcctgaggggagtagagaggaagaaggggcaacgcgagaaaccgaacaggagccggcgtttcctggcaagggagggcggaggcgcgcgggagagagggagagagggagggcggggggcgcgggggtaggcgcggggagaggggagtataactcgccggccgcgaggagcgggggcagtttcgggtgccgaggtctgcagctagcggcaagcggagtcaggcatccgttcagactgacagcagaggcggcgaaggagcgcgtagccgagatcaggcgtacagagtccggaggcggcggcgggtgagctcaacttcgcacagcccttcccagctccagccccggctggcccggcacttctcggagggtcccggcagccgggaccagtgagtgcctctacggaccagcgccccggcgggcgggaagatgatgatgatgtccctgaacagcaagcaggcgtttagcatgccgcacggcggcagcctgcacgtggagcccaagtactcggcactgcacagcacctcgccgggctcctcggctcccatcgcgccctcggccagctcccccagcagctcgagcaacgctggtggtggcggcggcggcggcggcggcggcggcggcggcggaggccgaagcagcagctccagcagcagtggcagcagcggcggcgggggctcggaggctatgcggagagcctgtcttccaaccccaccggtgcgtatttctgcataatcaccgcttaaaggcacattttgacagccccctttatctgcttgatgtttttttcatgtctgcacagcaaatcaccccacacctccaaccaattttcccctctctctctcttaagtattcagcaggtcttgcctttcatattaatttttatgacctgggatgttgcctgtgcgcgtgttgtgttgtgtttcgttgtgtctacaggctcactttcctcctcctcctgcactctcggcttctttctgtggcttccctctttttctcttcacctctgttttcaggattattattattattattttaacgatctgggaatgttgtaggcgcggcgacggtgtcgagccctgggccggggcttccggagagagggcgtacaattccctgctgagcgtaatgtgtgccttctacttacaattgcagagcaatatattcggcgggctggatgagagtctgctggcccgcgccgaggctctggcagccgtggacatcgtctcccagagcaagagccaccaccaccatccaccccaccacagccccttcaaaccggac

SEQ ID NO: 28034 - DNA, 692 bp, Homo sapiens
  chr4:154143770-154144462
  hyper
cgcggttgatggaaaacagatgtcttactgctctgggcctgagcacagaatggaaatgaccgaccagagagccatttggagccgaggacacccggtgaaagccattcagagtccagccaggaggccgactttcctcctctggtctgtttttactacttgagccgctcgctcagaaaacggccttagataaagcagtttcaccttcagatcgcctgaggctgcagaagggcggctgcgggggaggaaggaggaggcggagaggagcgggtgcgaagtcctgggtcgcctgcccgctgcctgatgtcgtgagctagggcacctcggccctggctgggcgcgcagcgaggcccaggcccgaggggtgaggcccaggccactccggagcgcgcgctgttcccgcgaagcgagtcgccgtctcgtagtaagtcgtggctcgggctgtgccctgggaaccctcccgcccgggcaaggtccggtggccggagcgtgcgggaagcctgcccagagtccatttccggacgggcgctgcggggctggcagccggcctggagcgggtgcagtgggtcggcgcggcgcagagctgtcagcaacagggccgctgagcagcagaacctggacgccgcgcggctcccaggccctgcccgcggagctctcccgggagtcgcggacctctgccgtcctcagtcacccgc

SEQ ID NO: 28035 - DNA, 711 bp, Homo sapiens; identical to SEQ ID NO: 22911
  chr4:156297402-156298113
  binary

SEQ ID NO: 28036 - DNA, 780 bp, Homo sapiens
  chr4:176922895-176923675
  hyper
cgtttggaaagggactagaaattgtccccagtctggccctgcaccagcaccttcctctgctcaaacctgtacaaagtggaagttttaggaagtttccatttctcgtgccccgtttcaacttgctccccaaagagaacatgaaaacgtgggaactcgggaggacagagatctccctgtaatcgcctcgctattcggatcctgggtctcttagtctttctttatttcccaaataccgcccccagcacggtagaccggacccccaggcttgggtcctggggccggcgcagaggatcagcgcccaagcgcagccccccaccctcccgacccactgtaaacagtcgggcaccctccctcgcctccaggtgccaccccatcgccatcgcctctctcccagaaaaaaaagtccggagacaagagggcggggggcgggggacgccaggcgcggggggaacagagctgggaaggacgcagtctgaggccgaggaacattcattttctttctataatgcccattcccgaggccgagcctttgggcgaggtgtacgcgcccgcccgcgcactcacccatggcccgaggtcctgcttctctgcagtccccagaggagagcgagtgaccagacgctgcgcggggccaagttctccaagccgcgctgaggctcctcgcgccctggcaagtgacagcctcgcccctcccagcggagacaactcgcagggcgcctggcgactctgcgggcgcacagacccctccctctttccacctgcctcctctgcgagaagccc

SEQ ID NO: 28037 - DNA, 615 bp, Homo sapiens; identical to SEQ ID NO: 23268
  chr4:176986744-176987359
  hyper

SEQ ID NO: 28038 - DNA, 164 bp, Homo sapiens; identical to SEQ ID NO: 10651
  chr4:183626546-183626710
  hypo

SEQ ID NO: 28039 - DNA, 996 bp, Homo sapiens
  chr4:20255523-20256519
  hyper
cggcgcagtgctcttgctcgggcagcacagtggactgtcacgggctggcgctgcgcagcgtgcccaggaatatcccccgcaacaccgagagactgtgagtatgcgctcttcgtcttcccctctccccatccgggccgcgcacccctgcctccactggaggaacctgtcagctcagggtcctgtgcctggggcagccctcgctagctctcccccatgcacatcctggggttgagctctccgggagggcactggccagggaagggcctctgtccaaggaggggcgggtccgctggcagctgcgctagttctccctcccctgctctcgtcccgccactcgcagctccttgctggctagttctctggggctggggagcgggtagataggggacaagtactggaggatgcccggggcaagtgagacgccactttgttctccagagtccataaacggagtcaccttgcgattgccagcatccaggtcggtttcagagcccagtcctcgctcttgtcgcaggctggcgcggaggggatagcagggagactcaaaagagagaaacttgccttccccgattttttgtcaccctcctgggggcgaaggttaggaagaaggggtcatggagtgcctgggggtgcttctcacaggtcgcggggagaagggtgccccaggacggcgacacctcgcatagtagcctcgcgcagccccccgccccccacttctccggggaggggaagacggcgtcaggcccctagggacttgtctcagcgggcgactgcgagggaggaccgtgtcccatccgttaagcgaagttagcactggttctccagcgcaaaccagcccaaccaggtcttaccactgcggcgacccggcggtgcccggctgccccctccggcccttcctgctgaacccctgcgtccccatccacctttctggcagtttctgcgccccttcacgtggcagcagttcccctgccttcccctcttcgcgctccgttgctc

SEQ ID NO: 28040 - DNA, 2383 bp, Homo sapiens; identical to SEQ ID NO: 27041
  chr4:42152717-42155100
  binary

SEQ ID NO: 28041 - DNA, 133 bp, Homo sapiens; identical to SEQ ID NO: 10652
  chr4:48678686-48678819
  hypo

SEQ ID NO: 28042 - DNA, 172 bp, Homo sapiens; identical to SEQ ID NO: 10653
  chr4:48679706-48679878
  hypo

SEQ ID NO: 28043 - DNA, 1480 bp, Homo sapiens
  chr4:54965998-54967478
  hyper
cgtggggaagagttgggctgcggccagggtagcgagagggggtgggatggaggatgcagcgctgtgatttctcagtaaagcgtggagaaagagggggaggaggccggcctccccgggaaattaacaaaacctacactttgcaaagtctcccccatccccctcccccgagttcttccccgccgcgcgcccgcccctcctcgcggcttctgttgtgactcgggcagcctatcccgagggtgcggagctgccgaggagcctgagccgagcggtactccgcagcatcacgtgccagggtggggggctataaaatacccgagccggggcgccgggcgggggacgtgaggaccagccctctccggggacccctttgttcccagcccagacgccaacacctctgcgtccccaagggcttgactgcccgtgtctgcgcggctcccagggcagagcttagaacactagaggagaggggtcgccgcgaactgccggggcttccagccacccacccctctcgacatgtcgcgctccttctatgtcgactcgctcatcatcaaggacacctcacggcctgcgccctcgctgcctgaaccgcaccccgggccggatttcttcatcccgcttggcatgccgcccccattggtgatgtccgtgtccggccccggctgcccgtcccgcaagagcggcgcgttctgcgtgtgccctctctgcgtcacttcgcacctgcactcctctcgggggtctgtgggcgccggcagcgggggcgcaggggccggggttaccggggccggaggcagtggggtggcaggggccgcaggggcactgcctctgcttaagggccagttctcttcggctcctggggacgcgcagttttgcccgcgggtgaaccatgcgcatcatcaccaccacccgccgcagcaccaccatcaccatcatcagccccagcagcctggctcggccgcggcggcggcagcagcagcagcggcggcggcggccgcggcggccttggggcacccgcagcaccacgcacctgtctgcaccgccaccacctacaacgtggcggacccgcggagattccactgcctcaccatgggtagggcggggtcttggggcacctgcgctccgcgcctttcgcgctcctggagcaaactttccacctccagtggaggaagtgggagcccggggacagggtgaagagagaggacgggcttttagtgtaaccgtagagtcagccacagaagttccacgaaagtggaagttagtttgccagcttctccactcagcctggtgcgttttactcctagtagtaggtgctcgagtattgccttattaatactggggccttagggacctcgaacgtcacggcggataaaccagaggttaactgcttgggatttggggtgggtgtgtttgaacctgtgtggcatccccgcgtcggggcggctaaagcgtcttgacgtttttggctaagcctgcgcgcttctcc

SEQ ID NO: 28044 - DNA, 646 bp, Homo sapiens
  chr4:5712804-5713450
  hyper
cgggcccccctccggaagggtccggggctgggaggcgcgtctgtctctgggcatgctcagtgcaggggcagggctggggcgggggtggctgaaagttttgagcggtgatccaggctcctccctccggctcggcgaagcagggaaggggagagaagcaggagtcgggagactgcacaggccagaaagtctgcggagcgggccgcgcccctggcccgcccgggctccaagtcccgcgtcgccgccctggcggggacggtgcagcaggcggcgggatgcggcggggcggcagcctgagcgccccggatggcccgcggcggggcggcctgcaagagcgacgcgcggctgctgctggggcgggacgcgctgcggccggcgcccgccctgctggcccccgccgtgctgctgggcgccgcgctcggcctcggcctcggcctttggcttggctgccgcgcgggccgccagcgcacgcgacaccaggtgggtcggccgagcagacagcggcggggcggggagcgcggggcgcgtggcttctgggtcctgcgggcccggagccccggctctgcgactccttgagcctggttgggaacttcgcacgcaaccgcttaggcgtcgggttccccttctgctccaggagggaggtggcggc

SEQ ID NO: 28045 - DNA, 956 bp, Homo sapiens
  chr4:57521845-57522801
  binary
cggggaggcggcggcgggagccatgcagggtctgggcccctgggatgcgggcagaagcgatgggagatcatggggagggcagcccggcgggaggcgcggacgaacaggaccgcccagccgcgagaaggctcagcccaggcaggggtcggggcgcgctgggcgcgtgtggggacgcacctgggtctcctcctcggaaaggcctgcctcggccgcgatgaggcacagcgtggtggaatccgggtgcttgtcgaccttgttgaagttgtactccaggatttccacctggtcctctgtggggccgctcgcggtctccgccgacatggtccctgcgcgctgcggggcagggagaagcggcggcggtgagcgaggcgtggagcgggcgggacgcagcgaaggaaggcggtcgcggcgccgccgggcagccccagccccaggccgccccctccagcggtgccacggccgcgcaagtccccggtggctgcacgctgagcgggggcttacggctgccccccacccgggcctccctccctggactgagcgctgttgcgggctgacggcagagcctagcgtcctgcgcctcccgcgccccccgggaccccttgcaggaactgtatccctgcctgcgacgggggcgagatagatgattccgcgggccctcaccgacctccggctctaaggaaggagtgaaggaagcgcgggggtgattttgagaaatccccttaaaaacttcctcccgaaagggggacctcccctggggacagacttgacagatcgcgagggtgggttcgcccgagtccgcgactagccggcctccggcctccccggtaggcggccttctgtctccgcagtgggttggcgctttggggccctctccaggcagggctgcacaccccacccttcctccaaaaaagttccccgcaagacaagttacttctcaaagttggggagacggaggc

SEQ ID NO: 28046 - DNA, 129 bp, Homo sapiens; identical to SEQ ID NO: 10656
  chr4:6769454-6769583
  hypo

SEQ ID NO: 28047 - DNA, 325 bp, Homo sapiens
  chr4:717901-718226
  hypo
cggcagaaagactcagggcagatggtggttgtcagccgggagggggcacggagccctgggggtggtcaggcccacgtggccttgggacgagagcgaagaggtgggatcggctgcgggagacagggaagtgggtgacaaggaggctcaggggctacagcaaaggccccggaggcttttccacacccgagtccgtcctcggccatgccagccaggtcaggggctcagtcctgtgggccaccacagccggccgcacaggcagggaaggtgaagctccacggagcaccctggtggacagcggtgctgtgggggccatggaccagaaggc

SEQ ID NO: 28048 - DNA, 137 bp, Homo sapiens
  chr4:79689620-79689757
  hypo
cgcagtgtcgtggcagcaggcacagtcttgagatgcagaaggacagcggcgagcttgtggacctgtacatgcggcagaaagtctctgctagtaaccgcgtcaccggtgccaagaaccatgcatccatccagatgaac

SEQ ID NO: 28049 - DNA, 268 bp, Homo sapiens
  chr4:905682-905950
  hypo
cgaacccttacaattttagacgtcagagcggaagatgagggagagagcagtggacgaccgagagaaaggcagacagaggcaggaggagctgcaggagagggcggggacaaaggcaggcacaccggccacacacacctgaccacagcgacaccaaagtccatcccgcgcgtggcaggaggaggcagggccctcagggggctgtgcgcagggaggctgcggcgtggctgtgtccacccgaacccacactcaggcagccggcgggctctcc

SEQ ID NO: 28050 - DNA, 980 bp, Homo sapiens
  chr4:956320-957300
  hypo
cgtccacagacagcagtacggagaacgggtcctcgccgctgtagcccgccccccagcggaggactcgaccaaggtcattccctgggacacaagcagacacagagcatctgtccacacccacccgcccatcagctgggtgcagaccccaccacgaggacagccagcccaggcctcggcaaaagctgcacaggaaggggtagaccctgaggccccctcctcggctgcacggctgagcccacctgtgcccaggggcaggatggccacagaaggctccgggcaggccagtcggtaccgtgtctcctccagggcgccaagcacccagcccacagtgccatcgccaccacacaccagcacccggaagcagggcacctgggagaacaggtggagcctagcgggagacaggaagtgtcctctaccagctgcgggcgcagcccatcccccacccaggctgcctcttccaagtgcccgtcctggccgtgtggaggacttcaaggtcccagcacgggatccccgtggagctcctgccggccgagacagctgtggcagcctcctggggcccttcccgcccctgctgctgccctggaccaggggtcctgctggactcacccgggaagaggacctccgttggtcaggtcgaagacctgatgagggttcagtagcttccggaagctgcagagcaggtctcggcccttgaggcctccactcttggggttcacgaacacaaggaggggacagctgtctgggggcagcttcgcgtgctgacagacagggggctgggttaggatggggacccaaggtggggtgtccccactgctggggttgccaggcagtgcccagcccccaaccctgagcccacctggcttggaccagccccctccccaggaaggcgtggccagcaccctcacatctgaggcctcacacatgagctgcgtggtcaccccatctcgctgctggccagcagggcggcactgaggacagcc

SEQ ID NO: 28051 - DNA, 1887 bp, Homo sapiens; identical to SEQ ID NO: 22915
  chr5:100238197-100240084
  binary

SEQ ID NO: 28052 - DNA, 1429 bp, Homo sapiens; identical to SEQ ID NO: 25707
  chr5:10564301-10565730
  binary

SEQ ID NO: 28053 - DNA, 1351 bp, Homo sapiens; identical to SEQ ID NO: 23619
  chr5:1073469-1074820
  hypo

SEQ ID NO: 28054 - DNA, 939 bp, Homo sapiens
  chr5:112629411-112630350
  hyper
cgcttgcctcaaagactcaggagtccagatccgggcaggaaataaagttctaaagcggctttgaagtgctttctccccagacccctccccagcgcgggtcattcatctcagcctagggaagagaccaccttgcctgaacgtagccaaacgcatcgcacgtgggagccaagtgggagatgaaataatccaatgcgtccccctcaccaccaccacccccaccaaattagttaccgtcggcttaaactcatcgggaatgtccgtgtattttaccgatcagggaaataaaagggtgtatataaattagtggaagcgggtgggaaggaacaagggatgcagactgtcgtgagtaaaacgcctcgcggcttggtgagaggttgtttcttttttaagccactcatttcagactgaaatatcaagccagttcaggtcatttcctgagtagcactacaagttaaaacaagatccagaaaatctactaatcttcaattgcgctgcctccagactgggagcacagggggatagggtgtagggctgtggggaggtcgaggggagggggatttgtggaaaagcaaacgcccgagaaaccctagctcccgacctcagctgtttcttacctcactcagctcggccgaggagtcgtttccatatttcatggcaactccggaattcatgatgcacttttcagagctgggctctcagtcccccaggtctcggagcttaagagttggacttcacaggctcaatatccactgcttggtcccttctgccacattttagtctagacagccattttcacccaggacagttgcgaagcgcaaacggaggatgcaggcactcttaaaaagagcagccgtggctcgcgtttcacggacgagccattgctgcaggaggctcggtggcgcggcgcgctcgcagctgcggcagcggcggagcccgcgc

SEQ ID NO: 28055 - DNA, 997 bp, Homo sapiens; identical to SEQ ID NO: 27068
  chr5:115151516-115152513
  hyper

SEQ ID NO: 28056 - DNA, 1446 bp, Homo sapiens; identical to SEQ ID NO: 27075
  chr5:127872759-127874205
  binary

SEQ ID NO: 28057 - DNA, 947 bp, Homo sapiens
  chr5:127874216-127875163
  hyper
cgggctggaagagggacttggaaagagggattggcgagcccgggtgcgagaggaaatgagcgggggatgggggcgaagttagggcaaagagagaagtgggaaaggagagggagggccaaggtccgggcgccgagaggaggggcccggggggccggctggagggggcgaggcgctaggcggctttgcttcccgtccccgtcaattggccgctagctctgttttgactgcctgtacaaagcgagtagacggcgggggatggggcgattagggaccggatttgggaaaggaggcagcagccccttcccctccccctccgtcctcgcccggccgcggaccagggactagggtgcctaagcgcgccaggcttggccggacccgcagctgaactgacccgcagctgaacttccccgccggacagaggccgcaaggttgaggatgagaacgggtctttctgtagggtcccggcccctgacctgggatggggggattcgcagtcagccaggaatagaggctcacggggctgttggttgcagcctcaatccaagaaggaggagacctcccctttgccctcctacccccaccgccccaccgggagcggcgtcagtctgcgggaccaaattaggggctgggagtttccagattgaaatgcgccctccaccaccaagagggagctcacgcggccgcggggggccgaggcagccagccggcgccgcggtcctggggagtccgtgcaggggtgtgctctggtgtgaaacctggcaggactctgcctgggcttgcatgcagggaggggttagagactctgaaatgtactagcgggcagggtggtgacaaggcgggtaaatgaggctcggggcatgcccttgcttcctggcttggaccccttctgattgattaaatcctagcaattggtgcaaccctctgtacctcttagagtgcctctcacc

SEQ ID NO: 28058 - DNA, 826 bp, Homo sapiens
  chr5:1294889-1295715
  binary
cggaaggagggggcggcggggggcggccgtgcgtcccagggcacgcacaccaggcactgggccaccagcgcgcggaaagccgccgggtccccgcgctgcaccagccgccagccctggggccccaggcgccgcacgaacgtggccagcggcagcacctcgcggtagtggctgcgcagcagggagcgcacggctcggcagcggggagcgcgcggcatcgcgggggtggccggggccagggcttcccacgtgcgcagcaggacgcagcgctgcctgaaactcgcgccgcgaggagagggcggggccgcggaaaggaaggggaggggctgggagggcccggagggggctgggccggggacccgggaggggtcgggacggggcggggtccgcgcggaggaggcggagctggaaggtgaaggggcaggacgggtgcccgggtccccagtccctccgccacgtgggaagcgcggtcctgggcgtctgtgcccgcgaatccactgggagcccggcctggccccgacagcgcagctgctccgggcggacccgggggtctgggccgcgcttccccgcccgcgcgccgctcgcgctcccagggtgcagggacgccagcgagggccccagcggagagaggtcgaatcggcctaggctgtggggtaacccgagggaggggccatgatgtggaggccctgggaacaggtgcgtgcggcgaccctttggccgctggcctgatccggagacccagggctgcctccaggtccggacgcggggcgtcgggctccgggcaccacgaatgccggacgtgaaggggaggacggaggcgcgtagacgc

SEQ ID NO: 28059 - DNA, 228 bp, Homo sapiens
  chr5:132083840-132084068
  hypo
cgacgaaaagtgggcgcgaggggtgggggtgatgggtgagccgctgcgccggggggcgcttactcccagcgggcatgcagaggaagggacttctcactgccccaccccccgcaccttaagcaggaggctcctgctgctgggggaccaggagtggccgctagcgaccttcctcgccccacctgctcttcttcctagcaggatgaaatctgcgacgccttcgaggaagtc

SEQ ID NO: 28060 - DNA, 881 bp, Homo sapiens; identical to SEQ ID NO: 27081
  chr5:140855795-140856676
  hyper

SEQ ID NO: 28061 - DNA, 576 bp, Homo sapiens
  chr5:141262733-141263309
  hyper
cgaagagctccccactctccctgaccagagtctccttgatctggaggctgggcagcccccggggacccggtggccgccgctgaccccgtggcatgcggctctcaaaggccccattcatctctgggggctgaaggcgccattgtccccagcggggggtggtgtggggagtgaaggggtctggactcagaaggaaggaatgcgtctggagaagttgcccccggggctccagtctcaaggtccccaccagatctccatcgggaccctttcacgaccccgagccctttccccaggagctcccagcaaccttcgcgcttctccggagggtggggtctgccgcggcgcgggggcagcctcaccccacctcactgctggactccggagaaccatttctgggaccgggagctgtccagcgcctcgggtcctgacggaccgctgattcgcctaggtgccatcggacaagcgggtgctcagagccagctctggtggctcgggagctttcccccaaccaggctaagaccactaaaccacgcctggcccggatgagcttggatgcagctccgaacgtggggatccatc

SEQ ID NO: 28062 - DNA, 1482 bp, Homo sapiens
  chr5:142781722-142783204
  binary
cgtttatctgaggcgataacgatctctaaacacgaggtatcgaatggagcccaatgaatttccatgccgcttttttgacagctgccttcaaacccgaaaccaaaacaatatttcctaaaacgaaaacgctccctcaagcgacattatcccccagtttaagttgcaaataacccagccacattaattggccctaatgaaccatgccagagggtcttaagtggtattacaaggttgcaattatcaagtctgcaaccccaaacgtcaaactagcacttgtaaaaatcgcagcacaaaaccattacggttacagggggtctttttctaaaaggggccacttagaaacctcaggcgcgaattaacaacaaacgctaaagagcaagcccttgcggggcgggggtggagaagagaaaaaagtgcgaggttaaaagagaagtacgtccagacctgttgagttctctctccgacacgcccacttctaacagataacgccggccccggccgcagtctccaagttgcgggctgtcagccccccgcgtgtgcaccctcacgcgccccgcacgccctcctcaagccaggcgccgccggggcctccccggagcccgggctcgcgctcgggcgcgccggggtggcgtgcaaatattcgggcgagtaaaattcagacgcggcttagcgttcaccacgaaaacgggtgtcgggcgacccccttggagggaaaggggacactagggggagaaaagaggccaggattcccgcgaggaatgagaggctcgaagcccccggcagttcgacagggctccgctcgccgtccgaggtcaggttcctccccctcggcccggccaggggacgcctgcggagggagaggaagaggccagcgctgtcacccgcgcgctgccctttcgtcaccgtcgcccggcccttgccagccccccacccccactccccgaggctaataaaagtttgtaggctcccgcggcggcccccgagttgtctccggtcccagcggcacctcgggggagcgagcgcgccccggccccctcccgcctcgcttcttacctctggcagaggagccgctcgcccgccaccgtccgcagttcccgccgcagccgagataaacaacttagcttgtgaacgcagaaggagcaggagggaaatatattttttttttctaaaaaaaggaagtaaacagccgcccctttctccatgggtggggggagagcccctatttaagaaagtctcccattgcccagctgacaagccagccctccgccccgcgccgggctccgcgggtcgaggttccgggcgcgcgtgccccgtcccggtcccagctgcttcggccgctccggctgcggcgtctccttccacccacagaatccgtccccgacgggcaggcggtgactcgggctcccgtcacagacacgagctcgcaaaatggaggaggcggcggcggagggaagagagcgcggacacgcgaaagggcagccc

SEQ ID NO: 28063 - DNA, 1698 bp, Homo sapiens
  chr5:142783606-142785304
  binary
cgctacctccttcccgcccccgcccagctccgcggctccagacccactcgggagctcgctctgccccttggcggcaagcgccgccagtgcccctgcgggtgacagcgggcgggccacaagagccggggcgcctcccgcggctgagctgcgtgagtggcccgcgccgccgccgccgggccgagttgcgtgaagtgtgtcacttcgaaaggggctacggggttgcacggaaacggtgccgcagcgtctcggccgcgctcggggccgggcggcctgacacgccctctggggaggcttcagggaagggacgggatagcgggggtcggcgcatacgtactttgggcccggggggagtcgcgtgccggcaggtcccccaccaccgcatcatctgggcggccgggtcttcagctgccgccgccgcgctctcgcactgggagagaagttgcaaagcagaacccaccctcccccgcgccccgaccgtcccccaccctcttccccgagtctgcgaggcggcggcggcggcagaaggaggcgccgcctgccaagttcaacccccacccctcccgcccaatgtgctcacactcgaaggaagttgcacgccaaatgcaaaacctccagcgagctggatttctttgcactttttttttattattatgattaaggaaagcagggggcggcaggcttaaaagcaagttgcaggcgaaatagtaagttgctggcgaaatatagccccccttccgaaactcctgacctcttcttccaccccggccagggcccgcgtccaagttcccggtgcaggccccacccccgaatcttgacatttgctgccctcgactctgtgcgttgctcaccctatcacgttcataggacccctgcccctacaaataaaacaaaatacaggcagctttaaaatgccagcgttcaactccctacagatgttcctgttaggagcttccccctcagtccaaggggaagggaactcgtggtccgtcctgagaaaggagagggccgtggggcgaggggtgcccgtgcgggaagcccccgccccagctcccttccccagctcgccgcgtcgggaaggcttggacgatgccgggaccgagcctcctaccttgtgcggcacagattatgatttttgtgactctgggaaaggttgtgctgtgtgggtttagggtttggggaggtaacttttgcgcccccacaggtgacatcgcttgccagctcctgacacgggcgggggctgccgcagctccacctaatcctgctcgggcgctcggccacagccactctctcacctcccgccgcgctcagactgacggcggctccccctgctctgacatcttgaagacgattggggaagcgcgtcccggaagccgcccgccgccatcttggtagggtacagtgtcgccagcccgtccccgcggccaccatcttggcaaaggttcgcgatcgcgggtagcctaagccgtccttccttggttctcaagggtaaacggttccctgtgcattgtctgatgtgaaaggaaagaagtaggctttcagcaagcctcttgtccggagacgatctacgggggccgcctccagaggattctggagccgccatcttggcaaaggaagagatactcgccacctcggaaaagaagagggaaccaaccgtatgccaacgtagaaccctcagccagaagaatttttatgaagggc

SEQ ID NO: 28064 - DNA, 950 bp, Homo sapiens
  chr5:146257245-146258195
  hyper
cgaacatctcggggaaggggtcatctgccttcctggggtcatctttctgggcgagagccccaccctgaaaaagcctaatccctgagggccattttaactcccgtgggcgccgggtccacctgctgctgaacgccgagctcgcctcgcggagcccggatggatgcgaggtgcactggggctgccggggccagccgagcccccgccccagccctagggcccggaggagtctccgccactacgcgcccagctgcccaggaagcacagtgatccgcaacttgcgcccggccccaacggcggaatgcggcggggctggcgttaccttcggtcgcatagctgtggtcgcgcaggaaactgttgttgattttgcgggtatcaatgtcctcctccattgacagcaggcttacttgcgtgggaaccagaagccggcagacaagtatccatgatccctccccgcagccagtctcacaggagaggggggcaggggagccagtgggactgcaccatggtccgagcctgaggaggagacggggaggcggagagaaaaaaaataaaaacccggcaatggagctgtcacctcctccactcgggttctgcgaggctgcggcggctcctcccgcgcggtgcgctcactccagctccagttcccagcgaggatgctgcgcctgcctccgctgcctccgggtgccaagatacgccgtgccccgaggggtctggtcccgcccgcccgccccggaggcgctcacaagcgggtctggggagatgcccaacaggttcccctccttggcagccgctccaaaatgcaaaaaagatccctcctccccctgggagagcgggcagccgcgacaaaatggtgcctttctggacccgagctgcagtggcgagatggcagggacaggattcaggcttgcctggccggaatgagggtgctggtcccacgggagggcggctcc

SEQ ID NO: 28065 - DNA, 225 bp, Homo sapiens; identical to SEQ ID NO: 23621
  chr5:154209748-154209973
  hypo

SEQ ID NO: 28066 - DNA, 95 bp, Homo sapiens
  chr5:154318085-154318180
  hypo
cgtccaacgttttttgagcgctatgtgccagggcactttgctagttgtggaggtgttttaaagatatgcacaagaggccgggtgcggtggctcac

SEQ ID NO: 28067 - DNA, 398 bp, Homo sapiens; identical to SEQ ID NO: 10672
  chr5:159707402-159707800
  hypo

SEQ ID NO: 28068 - DNA, 795 bp, Homo sapiens; identical to SEQ ID NO: 22921
  chr5:169063996-169064791
  binary

SEQ ID NO: 28069 - DNA, 751 bp, Homo sapiens
  chr5:175792453-175793204
  binary
cgggactgggtctgggtgggtgggcgcggccgcagcagtcgcagcggggccatcttcggcgggcgagtgggctcggcctgtgcaacccgcacctgcgtccctcgcccggcccgatggcgccgcggccgctgggccccttggtgctggcgctgggcggcgccgcggcggtgctgggctcggtgctcttcatcctctggaagacctacttcggccgcggccgagagcggcgctgggaccggggagaggcctggtggggcgcggaggctgcccgcctccccgagtgggacgagtgggacgtgagtgccgggccgaggcctgcggaagggcgggcaggctgggctgcgactccgcgcatgtggccaaggggtgtgaccacggaacggccctgctggtgccgggagcttggggggtcgagggcttggcagccgcagcgcacaggccccgcgcgggtgggcggtcagagcccgggaaccgaggaacgggtgggtgtgcttgggtgcgtgcggcgccttggcgccacgccgtcgctccacgccatgaggctcgggtgttccagcgggggccggagtttggagggcgcggctcgggagcatcccggggcccagccgggtcggctcgcgcccctccggcgcctgcgcagtgcaccccgcccgggggtggggatgtcgggagaaaccccatcccctcccgcctgcggtcgggactccgagaccggtggaggaagcggggcgcgcgagcgtttaaggaattc

SEQ ID NO: 28070 - DNA, 619 bp, Homo sapiens
  chr5:175831167-175831786
  hypo
cgccacatagtagctaatagggcccaaagtcacttctgtgacgcatagtttgtgtgcctgcttgtcttcctctcaagacaagactagagactgggtccccagctccggttgcccccaggtctcatggcccgccttcctctgggacgcacccccacacaccaccctcagctcgcctaggggctgggtcaggagtttgtgagaagcgtccggggctgcagagcacttttttccacagccctttggggcagcggagcggagcctctaattcgcattttacaaatgagaagccaggctcagagtagttaagtgactagcccacagccagccagctgggaaaaagcagaaagtgaagtccaggtcttctgactccatctaaacctccgctgcagcctgcagtctgggtgtgggaacagccttaaggaaactcagcccccacggtgtcctgccccagtcccaaggtgccaagcctggccaaactgggcccacatctccgccacctgccaccagctgcaaggcccactgatgcactctagtgggggctatgcagggctcacccgaaacctttggcctctcctggcacgtccctttgtgcagcaggtcccgggctccggtgaacccc

SEQ ID NO: 28071 - DNA, 256 bp, Homo sapiens; identical to SEQ ID NO: 10675
  chr5:175832697-175832953
  hypo

SEQ ID NO: 28072 - DNA, 395 bp, Homo sapiens; identical to SEQ ID NO: 23622
  chr5:176558657-176559052
  hypo

SEQ ID NO: 28073 - DNA, 503 bp, Homo sapiens
  chr5:177031080-177031583
  hypo
cgagttatgtgcagcctcctcgtggggaggccagagaacgggtctgtcacagggccagccctgccccgccctcctgaccctgtcccgcgcttgctccaggtccgggttgctctccggcggcctccctcggaagtgttccgtcttccacctgttcgtggcctgcctctcgctgggcttcttctccctactctggctgcagctcagctgctctggggacgtggcccgggcagtcaggggacaagggcaggagacctcgggccctccccgtgcctgccccccagagccgccccctgagcactgggaagaagacgcatcctggggcccccaccgcctggcagtgctggtgcccttccgcgaacgcttcgaggagctcctggtcttcgtgccccacatgcgccgcttcctgagcaggaagaagatccggcaccacatctacgtgctcaaccaggtggaccacttcaggtagcgcccgcccccaccctctcccctcggcacccctgccc

SEQ ID NO: 28074 - DNA, 165 bp, Homo sapiens; identical to SEQ ID NO: 10678
  chr5:177654009-177654174
  hypo

SEQ ID NO: 28075 - DNA, 996 bp, Homo sapiens
  chr5:178016455-178017451
  hyper
cgccgtgaccaccgcctctccaggtgtaccagcgttggttaggaacagtaggtgctactggtcacagtcaccagatacttcccacgagcctcatctttatccccgactctggccgccggcgggaagcggcgtgtccgagcgcacaccccgtggagactgaccctaggtctgttactccaaagtccctggtctctccttcccctttctcgcggccgcctgcctggcacgggaccctgaggccggagcggagaccgcaaaaccccttggggccggcaccccctgcctccgccttggcgcagacgtgcccatctctgggacggccccgagcgcacgcagccggcgggcgaccctcctcccagagacctgcacgctgcccccggctcccagcgtaccgccaccctcaacccgacacacccaagtccgccccagccacgcgccaagacgctcacctcccgcagcaggcgctccaggtgcggctcggcccaggcgtccagggcgcctggcggccccgcgcgccgcagcagctcccgctcctcctcgagcgccgccacccggccctgcagcgcggccgcctggacacccagcagcaggcaggcagccgccgagcccacggagagcagcaggcacagcgcgctcaccgcccgggacccggccgtcgtcgccgagcgccctccgccgccgccgcccgccgcattgcccttccccgcgtcgccgccgccaccggcgcgctcgcctgggcccatggcgcgttcgtcgcgcgtggactctccgagggggcggtgctgctggggcagaggctgggtgcgagaggagcaggcgggacagcccgaggcacgaggtccgccgggcgcgggggttagcctccgggtagcagcggatcgccgcgcacgcccccttcgccgcagccagctcctccacagcggccactttgggcagtttcctctatgcaaatagaccctgccagaaaaggagcagggacccacccaggggaggagc

SEQ ID NO: 28076 - DNA, 1431 bp, Homo sapiens
  chr5:178770455-178771886
  binary
cggacccacccccggatgcaagccagagacctgttcaggcaggcaaaagagagaggcgcacgctcctgcctgctgagccttttggagacccgggcgctccccatgcataaatggccccctgctcagaccagtcaaaacaacctgctttccagccaagcccttcagttggagcacgaggctcactaaagcacgggaagggcgcggaaagtcctcagcgcaggccttgccctcccaagggactcccaggtaacccttttccaaaacccaggcgagagcagcggagagaaaggagctagagaagtgcgtactcaccagcccatcgcagttgctgagcgccacagaggaggcttcggctaggccggccacgtctccgacgtagagacagctcccgagcaggggctccacgcgggtggtgcccttctcgccctgccactccatagtggccccgggcgccacgaggcgggcgttgggccgcagccgcaggtgcaggtctcggccaaagaccgtgacattgtagaagaggtgactgccaggctcctcctcgttgcctccggggaagctcggggtccggaccggggcggccctgcgggctcgtacccctgctctggacgtagctgccgacaccacgtgggacaccaagcggccctgggcgtcagtgcgcacgggcaccgccaggatgcgctccgctccgtgccccaggggcccgcctgcaacgggaaggggcgttagatcggcggagaccacggagccccagtgcctcagagacccgccggcaagccacgcccccccagaccccgccccactgcgaagggaaggggcattccgccaggcgaccccagaagccagcctgcacctccccggctttcctgcaaccgggaaggggcgttaacagggccaccactccggggctccgccactccccagccgttccctcctccggagaccttgcctgccaagagctctgccccctgccccgttcagggttggggctcggtgggaacctccccgtgcccgaagggacgaccccgtcagagagtcccccgacccttgcacctaccgtccttggcaggacgtggagctgctcggaagccattccgggttggcccccttacccgtgtgccacgacccctcggcgggcccctgccgcccgagtgccctcaccgccagcctccggagcggcggagtctcggcttccccgagcacgagcggcctgtcctgcctgtccagctcccgctcagcccgctgccggccccgtctccccgagcgcccgaggactgggaggggtggaacagggtccctccgatctccggggattccctgcggggcgccccaaccaatccttagggcccaaggctacgcgctcggcagccggctcctccggagcgtccccggacgcgagccccggcgccgcctcgccctggctcccccctc

SEQ ID NO: 28077 - DNA, 433 bp, Homo sapiens
  chr5:180326141-180326574
  hypo
cgatggagtagactctcagaacagcgcagtttgccctccgctcacgcagagcctctccgtggcttccgcaccttgagcattaggccagttctcctcttctctctaatccatccgtcacctctcctgtcatccgtttccatgccgtgaggtccattcacagaacacatccatggctctcatgctcagtttggttctgagtctcctcaagctgggatcaggtaagactcatctttgtttcctccttactaactaacagtttgagttctttagctacaatggttgcagcataatggaatgaaggcatctttgtcgtttccattcctttggcttctcctagcctcagcctggggaaggatcaggcgctgtggaaacaattatagtagcccccaaataatggaaacacgggtgttgaagacgcaccgtgatcgttgac

SEQ ID NO: 28078 - DNA, 988 bp, Homo sapiens; identical to SEQ ID NO: 24510
  chr5:1875468-1876456
  binary

SEQ ID NO: 28079 - DNA, 841 bp, Homo sapiens; identical to SEQ ID NO: 27098
  chr5:1931173-1932014
  binary

SEQ ID NO: 28080 - DNA, 550 bp, Homo sapiens; identical to SEQ ID NO: 22922
  chr5:2038439-2038989
  binary

SEQ ID NO: 28081 - DNA, 830 bp, Homo sapiens
  chr5:31639088-31639918
  binary
cgccttgcccgcggcggggctcgctcggggaaatccccgcccaccttgttattcctgcaggggaatccccgccccccgtccctgtcactcggggaagggagttcccgcccctcgaatcaaccagggggagggaatccccgcccatcctggaggctcggcggatcccctgcgcagcgaggcgaggagcggaccccagcgccggtgcgtgccggccccgggcagcgggacgcggcggggcggcggctgcaggcagccgaggagccgcaggccgaacccaaggcaccgggattgcgcctcccgcggctgccggcgaaccgcggctctgcagctcggggcaggcgcggcggcggcaccggtggtggccgcggtggcggcagctgcgcggggacccgccgggcggcgcctgggtctggacgcgcgaggaagccgcgggagcctcggccaagccgcgagcaggtgaagcgaccgtcccgctgcagccgggacgcgcggctccgggtgggcaggggatgggggaggcccggcacccccgagaccgtgtgtgcccaggaaagtttagctacaaatccgggtgcgggaatcccagccctggcagggcggggagtgaggacgccgaaccggggtcccacgttgggcggcgcaaactcctctagcatccggccggggacggggagggcgcagcccaggggagggggctagacagagcgggaccgagacagcgggacaaccggagacgcactgccgggggtactcaagacagggccgggacctcctgctcgggcgcgcatcccgggtccccatccctgggccgtcttctggtcccttcctcc

SEQ ID NO: 28082 - DNA, 984 bp, Homo sapiens
  chr5:32711331-32712315
  binary
cgctggaaacacaagcccggcctcggcgcgccatgtgtggtaacacgctcagccgctgccacgctatttaaacgcgggctatggatccaggaaccggcgcgaatcaatgagatcaaatgcgagggagatgcaccgtcaattacaaacacttggacaagtctaactttttttttcttctacaaaaacgctttcaaaagcaaccttagcaacgcccaaataagaagccacctctaagcaaaatagtatatgtataaacggagggcgaatatatacaagtatatatatatgtatattacagacgcacaggtttacacccggtgaactttttctttttctttttcttttttttttaagaaaaactagtgacattgcagagaaggacgcttcctctctatcttttggcgcattagtgaagggggtattctattttgttaaagcgcccaagggggcgcagggaccttggagagaagagtggggaggaaagaggaagggtgggtggggggcagagggcgagtcggcggcggcgagggcaagctctttcttgcggcacgatgccgtctctgctggtgctcactttctccccgtgcgtactactcggctgggcgttgctggccggcggcaccggtggcggtggcgttggcggcggcggcggtggcgcgggcataggcggcggacgccaggagagagaggcgctgccgccacagaagatcgaggtgctggtgttactgccccaggatgactcgtacttgttttcactcacccgggtgcggccggccatcgagtatgctctgcgcagcgtggagggcaacgggactgggaggcggcttctgccgccgggcactcgcttccaggtggcttacgaggattcagactgtgggaaccgtgcgctcttcagcttggtggaccgcgtggcggcggcgcggggcgccaagccagaccttatcctggggccagtgtgcgagtatgcagcagcgccagtggccc

SEQ ID NO: 28083 - DNA, 761 bp, Homo sapiens; identical to SEQ ID NO: 22923
  chr5:33936135-33936896
  binary

SEQ ID NO: 28084 - DNA, 1833 bp, Homo sapiens
  chr5:37836623-37838456
  hyper
cgggctggtttgcaaactcgggaaaaagctaggttctgggtcgcgatgtgcagacacaggaaaactgcaccaggccatgcaaaatgagcccagaaaggtactttggcagctaggacctggggaacgcgagcttcccccctcaagccccccgccggtgccagctcccgggtgcgtgcgaaatggctggcggtccgaccggaggagcatggaggcgcggggttaatgcgccattccaaatcgcggtgcccgccagcaggaagccacagaggcactagatttcccttccgtcttaagagggttttcccttttttcctgcttggccgacggagggctttttaaattggacgtggagatcctcaattagaagtgtggcgaagctggcaaaagactacacagtggaaaactccccgcgtcgccagaggaggctcccggctgcggttcccgccctcggccgagcgccgccagcgcccggatcgagctcccctcttcccccgggacagggagggcgcattcttccctctgagcgccgccgggaccggctccagtccgaggggctctttcgttctcggtatttgctgggcgggggaaaaggggggaggttgggggactcggcacacacagcgtctactaggacgtttttcttagagtccgtgtgggctccacccctcggcttctcagtttgtctctctatcgctttcccaaaacacatctacatctgcccgacgcgcttctcctcaaccatgggcctttgcccgcggtgcaaactgctttacgcgccgccacgtgcgagaaccaagctctgctcctcaagtgacgggggctctgctctgccaggtgaccgcgcaccatttctcgtgcctggcaagctggtccccttctgggtccgggaccaccacgtcccggcagggcaaaagcagcaggccgtgggcgccggcacctgtgggtccccaggcctggggaggcaaggacgcccaggaaagccacagaagtgctcgcagaagcagccgctcgccgcgaggcacttctgagttcccggcagcagggggcaccagaaaccgtctgagccgtgtcgcgcccacgcggcccggaggctgtgttatcattttagttataaaaccggagaaccaccactccctctacgagcctcccgaaatcccattagcccgggaacctgtggaggtccttactggcatctctgcttttcaggctcccacccctccattctcgctggttttcctctccccacttcacctgagcgggtttcttggcaacctgctttcagaccatccctcaccccttccacgcgtcaccgtgacagattcgcaggaggcagcgctcccgccgtcagtgcccccgcaccttcttgtgcctggcaggctgggaggtttgtttgggctttgccttcaagatccaggtctcagagagagaaaaaggaggcggtggggcggggagacgggtttgctataaactcggtttttttttttttttttttggcggggggaggtagagacagaaattgctggaagatctattgcttttcttaactatgcttcgtgtccttgactgacagaggacttattctcccctcaaccccccataactgcggggcccaagatgagggaaggaaaaagaatttgggacacttctcgcaggcaaactgggaaagcggtctgtttaaagggccaggttccaggcccgagagcacccgaattgctagcgggaaagggctagggacacggcggacttcccagagatcggacacttgttacttgttgaaaaggcgccaccttccctgacaaagcgaaggcgcagcgaaacagtacgagtttggtc

SEQ ID NO: 28085 - DNA, 1455 bp, Homo sapiens
  chr5:38556107-38557562
  hyper
cgaaatcacctggcaggtcacctctccgaaggaaaaacatttcaagctccctcccatcccccaggtaacctctggcctcagaactcactgccctgcgtggggcagaagttctgggcgctggagtccgcgtcccccaggacacgagggtgacccaagggcgcgcggagagcggcgggacccggagcggcgctctccggggtcactcccctaggacgctccgcagagctgggagcgctgccccaccccgcccgggccgcccctggggaccccgctcggggctccgcggctcccctgctccgcgccgcgcccacccgcccccaggactcacggtacgctcccgcgccgctatcttgccatcccctgccgccggctctgtagcctcggccgccgccccggggctgcccagatcccacagccgcccgggggcaggagccgccaaggagggggccgggcacaatgcgccgccgcctccgcagccgccgtctcgcctcccctgtgtcggcgcgaggctgcttgaggcggccacgggcgaagggcggcccgctgcgctccgcgaaccccgcgggccgccgccgccgccagagcctcccagaggcaacggtaacggccaccgccacggccgagtcgctccagccgggactgcggcgcgcgggggcggcgcctgcacgccgctcggctgggggcgcagcgggcccggccccgcccctgacccgcccctgcccccggccccggccccgccccaacccgcgcgcccccgccgatccccggccgcgcgcccgcgcgcgcgggtgctccaaggagtcggaggaacgcggccgcgcgacgggccccggacgccgagggtggtgcttcctccgagcctccggtggtgaggccgctctcagaaggtcatggaagcgcaggggagagcgaggcggccgagcccaggcaaatcctcgagaaaggccgagtgcgcgacggctctgcggggaggaccgcgcctccccgaatgcggccgctgctgccgctgcaaacagtgccttgaggagaggaaagcggggaaccgtgttttcgccgcctctgtaaccactgcacacaagaaaaccagcttctgggagagggggatgattgttgggactttgcgaattacctaaacagcccagggccgaggcgccgccgctcgcgtcctggtcctcctgccgggtgtggggctcccctgcccgagatggccagcgggcgcgccgagagtatcctggagccatctagtcttgcctcggaggcggggtgggcttatttgtgcggagaagaaacggatctcttaatggggtgagatttttcctccgtacattgttcccatttccgcagtttcacttggcctcggttttctagcagagtaatcaccaaatgaaattagctggagagcgtttgatggcgcagaatcacggtctgaagatgtttacgctgtatgccggacgc

SEQ ID NO: 28086 - DNA, 858 bp, Homo sapiens
  chr5:38845617-38846475
  hyper
cgccaaatggaaacacggccaaaatttagttaaaggacttctcttgcctgaagattttcggacggggatctcacgggtttggcctctgggttgggatgacaagtgcccctgtgggatacacagccccaggcctcatcggtcactcggcttacctctggttccgccggctggcccgtgcgtccttggccggggcaggagcagcgctgcgcgcggggcacggagcctcggccgccgagttttcggtttccaagtttccttcccaggcctctcccacttcctcttctcaccagtgcccgcccgcccgcaaagtccgggttgtgaggctgcgcctcccccaggatcgcggccgcctccccccgggactgaagggagggaattcctgtgggtcccaggagtgccaagagtgcgcagcaagacgggaaattgcaaaagacctcacccctctgccctcccccgcggttttccagtaactcccgcccctccgcgcttgccccgcagctgattcatagccccggcccgggccgcctctgcacgtccgccccggagcccgcacccgcgccccacgcgccgccgaggactcggcccggctcgtggagcccttcgcccgcggcgtgagtacccccgacccgcccgtccccgctctgctcgcgccctgccgctgcgccgccctcggtggcttttccgacgggcgagccccgtgctgtgcgggaaagaatccgacaacttcgcagcccatcccggctggacgcgaccgggagtgcagcagcccgttcccctcctcggtgccgcctctgcccagcgtttgcttggctgggctaccacctgcgctcggacggcgctcggagggtcctcgccccc

SEQ ID NO: 28087 - DNA, 742 bp, Homo sapiens; identical to SEQ ID NO: 27105
  chr5:49736607-49737349
  binary

SEQ ID NO: 28088 - DNA, 1069 bp, Homo sapiens; identical to SEQ ID NO: 24517
  chr5:54518558-54519627
  hyper

SEQ ID NO: 28089 - DNA, 1269 bp, Homo sapiens
  chr5:76506029-76507298
  binary
cgctgggggcggcgtcgggatgagtgcagaagagacgaggcctctggacagcggaggaggaggggagggcgccgaggcgcggtgccagctgccgcgcacaggggccccgcggcggagccgagccgcgggcacgctctgccctgtcgggagagctccgggagcggcgggaggggcggaggggcgcagtggggcccgggcggctgcggccgcggagccggggcacctgaggaggaaggagggtgggagcgagggagggaggggacgggcgcagaccgaaagtggggaaagaaggtgcaggcaggcgggcaggcgggcgggcgccctggcccagggccgcgggtgcgggagcccggcgaggtcgagctgggcggcggcgggggccgcgccgagggaggaggggaaggcggaggcgcggggagcgtgtttggggcgccgcggcggggagggtggcggccgctggtgcgcgcggggcgctgtgtatgcgcgctcccccgctcggggaggaagatggcccaaaagggaaagttggggtgacgcgcgcggtccccggaggctcggcggggggcaccgcggccagcccgacggagcggcggacacacaggccggggggcgcgcagtccgggcgccgccgcggccgccccctcactgcaggtggcagcgggtgcgctgggtcccggcggccgcgggcgcgggcgggcgcgcgggggagcccggccgagggatgggctgcgcccccagcatccatgtctcgcagagcggcgtgatctactgccgggactcggacgagtccagctcgccccgccagaccaccagcgtgtcgcagggcccggcggcacccctgcccggcctcttcgtccagaccgacgccgccgacgccatccccccgagccgcgcgtcgggaccccccagcgtagcccgcgtccgcagggcccgcaccgagctgggcagcggtagcagcgcgggttccgcagcccccgccgcgaccaccagcaggggccggaggcgccactgctgcagcagcgccgaggccgagactcagacctgctacaccagcgtgaaggtaaatgccccgcgctggcacacgccgtgggggccgtccgccccgtcggcggggctcgcacgggtagggggctccggcggagttgggtgaccgtgaggcggttggtttggagaggttgtcactaaggaggagtttacttttcatttgtggagatgatgggagcccaggaaatgtggtcagaaaaaggcccctggaggggtcctggaagc

SEQ ID NO: 28090 - DNA, 1172 bp, Homo sapiens; identical to SEQ ID NO: 27111
  chr5:77147514-77148686
  hyper

SEQ ID NO: 28091 - DNA, 1132 bp, Homo sapiens; identical to SEQ ID NO: 25748
  chr5:77268330-77269462
  binary

SEQ ID NO: 28092 - DNA, 927 bp, Homo sapiens; identical to SEQ ID NO: 27112
  chr5:82767041-82767968
  hyper

SEQ ID NO: 28093 - DNA, 2405 bp, Homo sapiens; identical to SEQ ID NO: 27113
  chr5:82768232-82770637
  hyper

SEQ ID NO: 28094 - DNA, 809 bp, Homo sapiens; identical to SEQ ID NO: 23313
  chr5:88184868-88185677
  hyper

SEQ ID NO: 28095 - DNA, 1304 bp, Homo sapiens
  chr6:11043624-11044928
  binary
cggacacgggtgaacacacacacacacacacacacacacacagcttactgtcaggcagttcatcggacacgggtgaacacacacacacacacacacagcttactgccgaggagaaagaagcgttactaatccagagtggaggactggcctgggaaatcgggcagagagaggagttgtcggaaagaacacaccagaagcccctccgagcccagacactgatagaaacccagccgcttcccaagccaatctgcaaacccaggaggcacccacgagtgcacagacacacccccggggtgcaggcgcggtgaagggaggagaggggcaagagcttgaccgttagggcccgaaccccagaactcccgaggcagggtgtgtgccgcgcgcgggaaacgccgttctccgctccaggcgtcggcgggcggtggcgagagcaggttcgggggtccggagggtcggagggtgggctgcgcgcgggaatggccgccgcgaaggaggggcggcttcctcgggcatcccgggcgcccggccccgtgcatgcaacaggggactgggcgcgagcgggcgcctcgaggtgccggggcgggaccggggagaggggaccgagacaaagttcccgagacccgcgggcctcgggccgacccgcgcgcccccggcccaaacgctcagctcccgctccccaggcccgcgcggacccggcccctccgagggtagcgggttccagcggcgaacccgcagcgcccgcgccggcgcccgctcggccctttcccgcccggtgcgtgggtccaggagagaaagaaagcgcggcggtgtcggtggcggcgcgcggccccactcaccatgatccgcagcggctgtggcgcggcgacccgggcgggcggcgatgcgctgtccagggtagccgggtccctctgcccggcgctatctcggcgcccgcgccggttacccccacccacacccacgcccggcgcgcgcacacccgcccgcgcctccccgccccctcgggctcgcgccgccgccgcgcggcgctccgagcctcggggccgtttcgtccccgccccctctcccacaggggcctcgccggccgccgcgccaggagggcgcgcgggggaggggcgcagggcaagtgaggcggcgccccccgcccctgcggcctcgcgcgccccctcctgggcgaccgacctcgccctcgcgtccgcggcgtcccctgccggccgggcggcgatttgcaggtccagccggcgccggtttcgcgcggcggctcaacgtccacggagccccaggaatacccacccgctgcccagatc

SEQ ID NO: 28096 - DNA, 135 bp, Homo sapiens; identical to SEQ ID NO: 10696
  chr6:111766152-111766287
  hypo

SEQ ID NO: 28097 - DNA, 1961 bp, Homo sapiens
  chr6:127439798-127441759
  binary
cgggagcccagcccaacactggagcgtctcctgctcgcgcacgccagaagcagctcggggtctctccgccgccccttggccatggccgctgtgccgacggcgcccgctcccctgcgctccaggggcccccgccgctgcagccgcagccgccgcagcttctgagcccaaggggccgccgctgcagccgccgccgccgccgctcgcccgcccggatcccgcctgcggcagttgccgcacaacatgctacctgcggccgccccggcggctcctggaaccccggttcgcggcgatgccagccaccccagcgaagccgccgcagttcagtgcttggataatttgaaagtacaatagttggtttccctgtccacccgccccacttcgcttgccatcacagcacgcctatcggatgtgagaggagaagtcccgctgctcgggcactgtctatatacgcctaacacctacatatattttaaaaacattaaatataattaacaatcaaaagaaagaggagaaaggaagggaagcattactgggttactatgcacttgcgactgatttcttggctttttatcattttgaactttatggaatacatcggcagccaaaacgcctcccggggaaggcgccagcgaagaagtaagtgcagggttttttacgcgtttgctccctcccgccgcgttcacctgtcgggtcgctttgcctgtccggagccggctcccaactgcagcggtcctcccgccctgcgcctcgcagaggagatgcaggttcgggctttgggggtatggacggcgtctttcacccttgcctctcggcgcccctgccttccgcagcatcctagccggtgcgaggggcgggcggacgcggcgctaaggtggctcccgccccatggtaacttcaggttcgcgggaaagttcggtcctgggttagactcgcacccgggatttgtgctttccttttgaggatcggacaggggcacccagccgaaggcacttgggactcccagacgcaggatgcctctgaccgctgagtaaatgacaagggaggcgcggccgcggtacccgctcacctagcgcaaccgcctcgcgcggggagacctcggctgggcccttaggctggactccggtagccgaacgcccgctacccggccaggaagccagggagcgagcgcctgcgcggccgcatccccgacacgcaccagcggagccaaagggcgcgcgaggcgatggggttcgcgtgtctgcgcgtttgcagagctgccggacgtcccccgcccgagggttgaagacagcaaaaccccagctgtggggagccggaggtgcggagtttccaggttctctcttgtcacatgtgagcgtctgtaccatctctggccctttcaagtgtgtcccctgggacacacacgtacagagagtggggtctccctaaagattcgcctcctcgctgcccttaatgctgttatttggagggttggattgtgatggcttcttaagacggtgtcctagctggaattaagcggacaccaccacggcagcctcaacctgggttggtctgtctgaaaggtagaatcttcccaagatgaagggacagatgcgaaggtgtcacctctcctcgctccagggtagcctggcgccctcgctgctctagtgtctgtgttcccatggggagtcctttcgcagatctcagagcaggggcgaccctggctctatggttgggggcgctggtggagagagggaggaggaaacttctcctggagctcgcgaggggcaggaagcgatgctgctgctctgggctctcgcacctccgcggcgtgcagcccaggcccagcggccccacctggtttcccaaggggatccctctcccagcgtcccgcccgggaagcctttcggggcagacgtcggggcagcgcggaggacacaacaccggcttgtgtgagatggaaatttagtaatcgcttctcggcc

SEQ ID NO: 28098 - DNA, 824 bp, Homo sapiens
  chr6:132722209-132723033
  hyper
cgggccccggggacgacccgcacctgcgccctctctggggtccggacgggaccgggctcggccgggcgggctccgggaggagacgcgcttacctggaggtagggccgcccgtgggccaccccgcccacgacgatgtcggcggacgccatggccccggtgggcgagaagccgaagcccacgtagcctgcagtgcgcacctggaggcggaaggcgatctggctgccccgctggctccagcccagccagtacttgccctccgagtccaggagggtccggtgcggataggttcggcccgagccccccgccgccgtcccggggagcagcccccacagcaggagcagcggccagcagcacatcctcgggcgcctcctgcccgccggtaccggcctccagccgctggggagtgaggagcagaacgaggagcggcagcggcggcgagcgggagcccagggaccgcccctcgggccggccgcgcgcccgcccgggaggggcaggacccgctctccccgccccgggccgcctgcagggcgcgccgcgtcccgtccggtcccgtcccgttccgtcccgtcgggtcccagccccgccaactctcaccctgcccggcccttccagcggatccacttgcagcccccgacccctgacttggtccccgaggtcggggctcggtgggaaggaaagcgaggggcttcccggaaagaaagggaggaggaggcaggaggaggcagacgccgagagaggagaaaaggaggccagaggcagagggaaaaggaggagggcaagagaatcctagagcgggaagagcgtgggctctgcgggacgtgggc

SEQ ID NO: 28099 - DNA, 1482 bp, Homo sapiens
  chr6:133561947-133563429
  binary
cgaagtcccttctgtctcctcccttggggtaagtggaaaggagtccggcagggggcccgcagtggcctgcacaggggaactgggtagcgagagagttccaggcaattccgggggctgccccacagaagcaggtggggatcgacagtggctctccggcccagggaggagagcgcggtcgcgggtccctcccctcagcctggaggctgcagccgctcgagtcggcccgggtgggggcggggtgggggcggcgcggagggcacggagattacggcggcgccacccgggacatccagggccccgaggccctgggcggtccccacgcgagatcgcaaaccatgacaataggcagtcacccgaggtcaaataaaaacggagtgggtcccccgcgcgccgccgccccccgcgtccctggcggcctcccccgaggcccccggcggcctcacgagcccgcagtagccggtggcgacgtcgcccccgccccacctccctgcgcaagtgcgaggctgccggcagcgcggcgcacgctccggccgttcccggcttccgcgcaaaacttccatcctgtccacgtgaagttgtcgctgccttagagagggggaaagagctgcgggaaaagccggggagtgacgactgcggcggctgggcgcgctctctcattttcttttcttctcctttcccccctgtcgcagtccggagttttggctcctctcctttcctcctccccctcggagccggcttctccctccgccccgcttctcccccgcttgtgtacgctatttgttgtggggtggccgaaggggatgtcctgttttcaccagaggcacagcgcgaaggggaaacttcgacactggaaggaacgagaataaatacttaattacggacgcactgaaccgcggctgggacagacacttcgggaacccgaggcggaccgggcgacgaggtgagtgaccccttcttccaacccccgccccagggctcccgggggagcctgagttgagagaacccccaaactttccgggaaagtgcgcgaggctccgccggggacgccgagcgctgggtactgaggacgcgcagctggacggtgcgtgggcgcctgcgtccccggggggcgcttggaggccgggtgccccacgcctgagggcccgggccgctcggaccgcagcggtgctctctgccctagaagacgtccccaagccccaagggtcccttccgagcctgcctgtcccttccggggtcggcgcggagcctgcgcgtaacggagttcatccagcagtccagcgcgcggcttctacctgcaccccgcctccacctggcagaggcgcgagcatcggggtctcccccacatctttcttatgacgtgtattactttctgatgaccccctagatggtccaggcgcgaggatgctgacccagagtccttcggagggtcacaggcgcctgggctttcccggtgccgggtgcgtgtgtactttaaaggctcgc

SEQ ID NO: 28100 - DNA, 458 bp, Homo sapiens; identical to SEQ ID NO: 27136
  chr6:134638705-134639163
  hyper

SEQ ID NO: 28101 - DNA, 854 bp, Homo sapiens
  chr6:137244173-137245027
  binary
cgagacccagagagctccccagcgccccaccaagtccccctgccccctaatgtcctggcttccgaccctcgcccatgcttcacccggcatcgcccttcctgtcgccccctctcctggtcttcccctgtcaccccattctccgggagaggtgggagggccgcctgagcctgggagctggagtcctccaagcctggaccaagccggaaggagggggccgtgaacttccttgggtcacgaggggctggaatggaggtgggggatgggggcgaagctgagggttcccggggctactgcggggtgtctcgtgctgcgcagggggctgcggccctggggcagacgacccaggtgctgagcgagacgagagcctgggcagggggaagcttcactgggggccagaacaggcgttctcccccgcgcctggcccgctccgggttgcaggccactggctggggctccctctccctttggtgccccacggggcaggggctccggggtgcaggtaccacgcgcccaagtgacctcggtgccagctcggggaagccacagcacctgccccgagggcatctgcgctctccggggcctttgtcttggacagaggaagatggagtgacccggggatatggcgggaaggcgctctgagcactgagtttggctgtcgcatttgacacgggtggccgagggacggcgggcgtctgtcactcaggaatccggtgggcagagctggggcgcgaacccagtctcctttcctacccgacgcgttttccccgtgggtccccgcccacgccaacctgctgtcttctctctttttccttcccgcccgggctcggccgtcctcctcgtgcgccgcaggagcc

SEQ ID NO: 28102 - DNA, 973 bp, Homo sapiens
  chr6:137809520-137810493
  hyper
cgaagagacgcagctggggaaggcgccgcccccgggccccctgcgccaccctaaccgggcctctccttagcaaagttgacaaattcttgagagtgtcagcccagggctgcgcgtgagggcgctgggaccggggaggaaagagcacctgccgcgctcagcccgactttgaatttgtttgttgttaccgtttttgtttttcctcccagtttccataaacgcttagtatttcgaggcactttgcaggtgttggcgcaggtgatgatgggcctcgttggactctgcctcccacgcatccttttgttttctgcgcgccagcctgtctgactgtgtcctgcggggaccccgagacagtccggggtcagggcgtagagactcatgcttgccacttgacccatccgcaacccggggaccccctagcccgtcgcggagctggagtttgggcttccggctcccagctctccgccctggatacaggaagagggcgggagaggtcgcgcacccgcgccgctcggcggggatcgctcacaggggctccggggccaccgcgagcgcggactgcggctgctggcgggctccttcgtcgtccaacgcaccccatcctctcccgccccgcagtgtcccagggaaggcttcactgaaaacagacgctcgacggaaaactgactctgcaggcccgagctttcggagtttgatttctgtgggccccttaaacgggcactgggtacaggagaggccccaactctctgcagggacggggagggaagggcactcactctcccgcaagttttcctagaggcgagctgaagatgcaggccacctccctcccgcacggcccctcccttggcctagttctgtccaaagacacttcccagccctcgagcggcggctcctccactcgattcctgcctacacgtgaagagcttggacccagcggggctgcactcgggaggacaggcccagatcctgcacggcc

SEQ ID NO: 28103 - DNA, 974 bp, Homo sapiens; identical to SEQ ID NO: 24539
  chr6:150285366-150286340
  hyper

SEQ ID NO: 28104 - DNA, 1698 bp, Homo sapiens
  chr6:151560967-151562665
  binary
cgtggcctgactgcgttaacctctcggttccctgctcttgccacgtgaggtgcccaaatatggtcggactcaggaggagccagggagcgcttgcctttctcctgctaatggggaggaggctggaacaaatgtttggagttaaacacaatctgcaggaaagcaaatggggactcggactcgctcctgggcgagctgaaagtcggctgcagcagaagctcctgccttgggtgatccatcatttaataaaccccagagaatccagtgtccccggcaggctttttgctcccctgctctcttgccttctgaggccctgggtcgtccccgcagctctagtcgccctgttagaaacgggaggcgcccgagggccgggtgggcggctgcctggacctgggctggcgcgtcgcagcgcctctggtcccggcagcctgggggcagatgctgctgcagggcgtgtctggggctgtgctcatgtgatgaagcgagggaaaaaccggggggaggggggcggaggctaagaggtggcctttttttttttttccttttcttttaaggagtttgccgcgagcgcgtctccttcattcgcaggctgggcgcgttcgcagtcggctggcggcgaaggaaggcgctctcgggacctcgcgggcgcgcgtcttttggctcttgcccctgtccctgcggcttggggaaggcgtaacccggcggctaggcgcgggagaagtgcggaggagccatgggcgccgggagctccaccgagcagcgcagcccggagcagccgcccgaggggagctccacgccggctgagcccgagcccagcggcggcggcccctcggccgaggcggcgccagacaccaccgcggaccccgccatcgctgcctcggaccccgccaccaaggtacgggcgtgccgggccacctgcgccgggaggcgcgggtctttgggggtgggggtgggggtgggggggtccctccgatttccgccgagagaacttcccagcccatccagccgcatctgcaaactcaggagtgcgaacccctctttggaggcttttcagggtctttcgcgccggggcggggccagagcagcggcgagcgcggcggggggcttgcatctttgtcgcgggtctccaggggaggcgactgcgccatgcgcaataataaaacccgcgccctgcccacggcggctgagcctttctgcgcactcttccggtgggagccatgcagcccgaggcggaggagctgcgcggagggggatccgtggagaatggaccccgggccgggcctccggagctccgagatgcggaaagtcagctgtgaggccaggactcgtggtggagcccgccggggagcccagccaccctcgggttccccgtcgcgtaccgccctggatgccagcggtgcctggagcgagcgggtttggtacccagtcctcctgcggcagcggcccgagcaggcaccgccttcccgaggcagagaaagcctggggtgtagctcgctcagagccaggaaaaacctgggcaggcgctgcgtttccagaaggaatgacaggtttcgcaaaccagccagcgccctcgcgttcgctcagcgctttgcctgcagactcagttggccaaacacacgctagagtggctagaagttctcaaaggatggggtcagtgtaacgagcattccgggtactcttccctggacgcagtgctgaaac

SEQ ID NO: 28105 - DNA, 1068 bp, Homo sapiens
  chr6:151814891-151815959
  hyper
cgcgccagcaccgttcacagtgcccactggctgtatttatcgctgacataaggatgaggcctggaattgcattcactgcagagtcccaccgggaggaccgaccgttatccccgccgactccccccaggtcgccctggcagtttcggccgctcagttgcaggccctcgccacggaggccacgctcgggggttcggggtccaccccggcctcctgcggccgggccaccctactcgcgcgcagccgcgcgccgccgcgtccccgcggtgtttacccgttgcccgaggagacacccgcgccacccgccggctcccggcgccgccgcttcctcagggccggttccgggtccgagcgcgcccccgggctcgggtcgtcatgagcctggactgcaccagccatatcgcgctgggtgccgcttcgccagcgcccgaggtacggtcccagccgccggccgcgcgcgggggtggccctggggatagacgacccaggaggggccgaggcgcccctgatttgcacccttttcctcccggaggcgtgggcagaatcagagcagctctgtgcccgcgagggctgtggcctgggactgccagggcgctgatttcaggaggggatgggcaggaccggagtttgcggagcgcgtctgaattttaggttgtgccactctgcttctctgaccatttaaaccggtgacattcgaaagactgtggccgggcagttcctccccgccacccctgggagcaaagaattccttcatttaactttccctgcttagctactgaagtgtgcttcggagcaatttctggaaaatctgatgtggcaggaggagggccagcccggagtagagtcaccggccctttcgttgcgaagtaatccagaaacgttggtaattcagttgttcctgaatgcatctactcatttactcccaggagttacttaggtactggggactttcaggtattagatgtaccaatgcgcgcgcgcacacacacacgaacatgcgcgcatacacagacgctcgtgcacacacgcgaacaggcacatacgcgaacaaacacgggcgcgcacacacac

SEQ ID NO: 28106 - DNA, 1056 bp, Homo sapiens
  chr6:152957433-152958489
  binary
cgaccatcacaataagaggctggctgccttttgcttctgcaccattggagcccaggagatgtgccacaagcggaaatgacaactcagagagggggatattaatagggacatctacgtacgagatgcaaagaggctccccaacctcctagtctccttatctatgagtatcgcacacgtacacacatcactgccaccaccccctcccatcaagcacgcagagccccagcgtgcaggcacaaacttgctgacaatttgtctgcaatgtgttcgtcttgcacctctctctcctctccctgtctctgtctctccctgtctcccagtctctgtctttccttttaccttctctctcggcctcgttcagtttcccagcagcaaggcgaagcgagcgaacgcttcctcccggctctctgcgcccaggctcggcgggaccccggggatgcgcggctgtccgcccgccctgtcgccgggatcgggcgcggtctgcaggactgcgggagcccagccgccctggtgacagaggacaacaatctcagcccgctgcggccggcggccgcggcccggcgcccgcgctcaccctggctggctcgcccacactcactcccgcgccgggctgctcagccgcgctccccgccctccgcgaccggttcctcctcccggctgctcgctggggggtgaggcctcccccttcgccctcccccacgcatctactgctcctgtcgggaaggaaggtcgcccaggccggttcagcctctgggcagggtccctgcaccgccctggcccgccacaccccctccccggctccgtgccccgcgccccgcgcccggctccgggatgcgccggtgcctggaagagctgggggcggggacccggaggctcgcaggcttccctacctcctggagatgcacggccttgggcgtttctccgcagctgcaaagctgtgctgtgacccacccgctcagcgagcctttataccgggaccacctcccgggggtcgaggtgggaaggaaatgtccctgagagccgggacgcgctgcctccgctgcctggaggagctgc

SEQ ID NO: 28107 - DNA, 1636 bp, Homo sapiens
  chr6:159589682-159591318
  binary
cggcggcggacagcagcacgcggcgtccaggacccggccttcctagagcttaggtcactgtagcctccaggggcgctccgagtccatctggagggccgcgaggcttccaggctggaaggaggaatagggagaaggaggaatagggagacctggggcagtgttacaattacagaaaagggagaggcgaggtccgctgagtccttggcctgggcaacaaggcacactgaaaactgggttccttttcgacccgcatcgtgcgcgccctagaaatgacagccagacggagcagggtctaaggacgctgaaaacccctgacgtgggcgcgccgggtgcgggtagggacgtggaaggactgggctagccacaggaactacagcgctgcggaccgggtgaggggtcccggcccgagtccccacttggggcgcagaggtgtttctgtaaggggacaaagggcactcctcggcgcgatgggcgacttccccagccagaaaatgagagggttagacgaggggaggaacttcctcagccacttggcccggcacagcgaccgccccaagttcagaaccgctaagtcagtccggggcgctccggccccttcgtcccgcgccccgcccgcctccagcccgggccccgccgcccccgtcgcccctgtcgcccgggtcgcccccgccggccctggccccggccccgcacaccggcagggggcgcccgagcgcagctaaaaggctcggcgggaggtcggcggcctcagtggcggagcgcggctgccggtgtgcggccgggagcgatcgccgcggggcaggggcgcggcgggcaccgcgcagagcgcgcagaacagacggacggcggcggggacccgacggcggcgcctcggcactccccagactccggccagcgcccccctgccagccgcaagcacccagccccggcccaccccgggctctcgatggcccccgaggccggggcgaccctgcgcgcgccgcgccggctgtcctgggcggcgctgctgctcttggccgcgctgctccccgtcgcctcctcggcggcggcctcaggtacgcgccgcgcccgggcccccggcgctcctcagctccccgcgcaccctcctgcgctcgggccccgtcgtcccgctcagtgctggctacgggtcgtgtcactagcctgtgcgtcctcgtcactcgcgggtcggggcacttggcgccctgtgtgggtggcgggagcggggacgcctcggtgcccggggaccgcagcgcgctggcgtttaactttgccgtcgcccgccttggagtcgggaggctccagccgtctaagtgtcccgggagattcaggcacagcggggaaaaaaggaaaagaaaggcgactttcagcgtgcggactggggtaatgcctttctttgcccagaatttctcgggagcgtaggtggtcatcctactttctccgcgttcacctctcgcgaggcaggatgacgggcgcactcgggagaccggagggaggcagagcagggctgttctagaaggtcgtgggggaaaggctgcgagctgccgcagggcgtcgggtgcctctgcgctccagaggagaagcgctccagtgccagctcggctccaggcggcaggaggcccgcgcgcccggggggaac

SEQ ID NO: 28108 - DNA, 50 bp, Homo sapiens; identical to SEQ ID NO: 10703
  chr6:160455514-160455564
  hypo

SEQ ID NO: 28109 - DNA, 569 bp, Homo sapiens
  chr6:160511895-160512464
  hypo
cgagaaggagcaggtgctccgtgccctggtgctgagctcatcgccgagaaggagcaggtgctccgtgccctggtgctgagcgcatcgccgagaaggagcgggtgctctgtgccctggtgctgagcgcatcgctgagaaggagcgggtgctctgtgccctggtgctgagcgcatcgctgagaaggagcgggtgctctgtgccctggtgcggctgagaaggagcgggtgctccgtgccctggtgctgagcacatcgccgagaaggagcaggtgctccgtgccctggtgctgagcacatcgccgagaaggagcaggtgctccgtgccctggtgctgagcgcatcgccgagaaggagcaggtgctccgtgccctggtgctgagcgcatcgccgagaaggagcaggtgctccgtgccctggtgctgagcgcatcgccgagaaggagcaggtgctccgtgccctggtgctgagcgcatcgccgagaaggagcaggtgctctgtgccctggtgctgagcgcatcgccgagaaggagcaggtgctccgtgccctggtgctgagtgcatctccacgac

SEQ ID NO: 28110 - DNA, 554 bp, Homo sapiens
  chr6:161188084-161188638
  hyper
cggcgggtggacggagcgagatcgcgccctggaacacggagctggcgagaaggagaaaagcccagctggcggcgtaggggcgagggtcctgcctttcccggcggcctcgccctggccatcctggccctgcgggaaggggtcagcccacccgagcctcgtccacccctcgtccacccctccgcctcccgccccggcaccacgccgcgcccgcgtccccgcccagtgcccgcgcctttgcgggccccggtcctgcggggcccctcgcgcactccagaagcatcagtatcctccgggcggccacgggccagctgcggctcccaccctggcgaccctggattgctctccccattctcagcctcaccccccactccttccaccccatattttgccgcctcgaaggacatgaaccatctgctggctgaaggcgcttggacctgaaaccagcgacaggttttggcagctgcacgctcactcccagggaggcgagggcgcccggcgaagtgtggggtctgccgccccctgccggcttggctgacgttcgcttctgtttccac

SEQ ID NO: 28111 - DNA, 773 bp, Homo sapiens
  chr6:1624983-1625756
  hyper
cgtgaggaccgtgaccgcgatccacccccagctacctccacacctcttctccccaaggcgtcccttgggctcttaatgctttttttttttttttttttttttttttataacatgaagttgtcagggacgctcctatgagaactgtttggaattgctgcacttctctggctaggagggaagtgagtaaatcaccaggcgcccctcccagctgcccgtgtccctgcgccgctcagctcctgccgcagggctggccgcgccaagcgcgcgtcctacccaaagccaccagccccgcggggaagggactcgggctgtggggcgcgaggccccaggactcggggacccctctacctcggcggcagcgtgcgaccctctttctaacgcggccgtggatgtttcttcccgggccgcagccaagcgcggttcttcctgggcggtggctttgggcttttcgtacccacagtcaagtcagttcacgtcgcctcccgcacacacgcgttcataaaacgaaactggagtttcacgaagcaattcttaggcttagcgtccaggaacgctgtagacggtctattctattctacccctattctactcggttcgattctgttcctaagaaaatgccgatctcgacccacttgtacttccacgagcggagctgcagccagcagctctgcaggaccccgcactgcccgccaccgtcccctctggcagtgccttcctcctcccgctttccccaactgctccactcgaggaaacaagggcatttcatctccatc

SEQ ID NO: 28112 - DNA, 3637 bp, Homo sapiens
  chr6:163834157-163837794
  binary
cgtagatttagggactgccgacttctatagatcaaggacttcattggtgcagctgaggaaattcttccaaacaagtctaaatgttggaaatccaccaaactgcagagaaagacctcttgcctccgtattctttcttcatctgtaaaaatgttgacttctgcttttcagactacgcgcacagcctctttatttcctactgcggcttcattccctcacggaacactgacgccatcgcgaaggaagcatttcgagcacgactgacgctccccttattatttgctaagccgctgcgctcgggtctggctacgatttgctttcagaataacgggaaggtgcaacaagatcgcttccctagaggcgcgtcgcccgcgtggcccggaccccccacgcccgcccgccgccccgtgggtgcgcacgcgtgtccgcgcaggcttcccgcctggcgagtgcaaggctcctctccgccgtgctgctttccagcctctcagcaaatcacgaacaccgaaagaagccacggcggcgacgggaggggcgtcgcgcgtgcttccctcggcgacaaagcgggagccgggcgcgccggccgagggcgcccggcgcagagtcccgcagaggcggacgccgcggcacgcgcctcgaaaagcctcaaactcttatcctcggctctcccgccccacctccgccccgcagccaagacccgcgccgtggcgggcccgacggccaaggaaagcccaccagccctccgcaccgtgggcgacgggccaagacccggccctaaacggccagacccagcccctagtcggctgccgcccccgccccacgcaggcgcgctccggggccctcccctcccccaccgcgcgctcgcggggcccgacgggggcggagcgaccctcggaaggggcgtggcgaccgggctcgacgcgcgcacgcgctctggagccccacggctacgtgtcgggccacgtgatgcccaccccgaaagtcccccgtgaagcaacaggacgttaaaaaaaaatttctcttctgcggggtggataagaggttctgaaaaaactatagtaacgggaggcgaggcggaggcagcgctggcgcgtcccgctggaattcctctcgcctgccgcgccagccccgaccgcgcccgcagccccacccgccccgtgccgtggaaagccccgcgccccccccgcggccgtcggccccgcagcccacacccacccgccccgggcgccccgcacggcggcgacccagtccttgcgcccaggcccgccgagcgccgcagtccgtcacactcccgttgcccccgtcgcccgccccgccggggaggcagggaggagggggcgcggcgccggcggctgccccggtcgcggggcggcgggcagcaggcagcgggagcgcgccggccgggacccgctaacggccgccctgcgcggccccgcccgccgcccgcccccggccctccccgcgccgctgcccctccccccgccgccgccgctgctgccgccgccgctggcagcgccgcctgaactgaggcgaactccgccgccaagtgagtgaggaggaggaggaggagaaggaggaggaggaagaggaggagcgcagtcggagcgcggcggcagcggcagaggcgccgcggcggggaccagcccagagagaccccccgagcccgcggcacaggcggcggcggcgctgagcgggctcgaccagccgagcgagcggcggccccggctcctcctcgtccggcgccagcagcccgcgccccgcgcccgcactcggccagccgagacccgcctcccgcccgcccgccggcctcgtgagggacgcgccgagccgggcggccgagagcggcggcggctgggagcgcgtcgggcccgggcggaaagtgcctgcggggggcgggcgagcgcgcggtgccggccgccccggggctcggcgcgggagccagagcgggagccggcgcggagcgggacgccgggtcccgagcggcccgcggccggggctcgcccccgcccctccctcctctccggcggcggcggcggcggcggcgggcggagtgagctgcggagcctggaatatggtcggggaaatggaaacgaaggagaagccgaagcccaccccagattacctgatgcagctgatgaacgacaagaagctcatgagcagcctgcccaacttctgcgggatcttcaaccacctcgagcggctgctggacgaaggtgagcgtctccagggccccggccccggcccgacccccgccggggcggcccctttccccgcttgggatggtggggagggcgggaaggtcacggccgggcgggaccgagcgccggggggactgggaggccaggagggcgcacaaaggaggtgccgggccgggcttgcggcgggcgggcgggccggggtggacccgccggtgccggacgccccctgcccggccgggaccccgcgccgctggcgtccaagttggcgcgttgcggagggctgcggggtgagccctgcggcccctctagcttcggcggtcacatttccgagaggtcggcgggggctgcgcggactcggtggtcctcgccgagccctcccgagagcaggcccacgccgcgccgccggcctggaggacgcgtgtgcccggcgcgggccccgctcctccgctcggcctcccgagcctgctctgcgcggacccccaccgccccgcgttcgggagctctcccctcccgtgaggactaaagcggggtttcgtggttggggagttggtgcagctgttcaatactaagtggaagtcagtgtggggctcgttagtttaaagaaattccgtaggagaccgaaattatgctggcgtagccgacaaggaggactaagtgacggcgaaaagcacttttttcccttttgtttggggaagcgagaactgttagggagttgaacttcacttttcgggggtggggggggggggggtggagtgcgaaataacgcgatgacagatcggagcgcagcctgagttagaagaacttgggcggagggtttgctcccggggacgcagccgcctgagtttgtaggacagggtttcgagacgtttggaaagggcgaaataaaattgagccaaagtttccaaaaagctgtatggagcgctgtggggagtgaagaatgacaagaagattaatgttgaccaactttggaatttccttaagaagttctcatagcagtacctgaagtattaatttctagtagctgtgggtttctgtggacgcctagagaaaaaaaagaccacaaaaaaagtctgtttcgaaaatcgactggccaggagtttgtttgtttttttttcctgcttagaggcaccaccggaggactgtgtaaaggaaactgaaaactacaggttgaagagatgaacaatggagtttagatttttcgcaagaatttcgagattttaaaaatagagtcggggaacaggagtttgaagcttggggagttggaatgtcactagagaacaaaaggccggaaatgtttccatgataaaaaatggttaaagaaaaatcccaggagttctgttgtcttgaaagtcatagaaacaacttaaaagtagaaaatggttaggtgttacggctttctcgtcgttttgcttccgtatgttaaacatacagcactcaccaac

SEQ ID NO: 28113 - DNA, 156 bp, Homo sapiens
  chr6:163946675-163946831
  hypo
cgtgagccaccacgcccggccatcttgtttctttttattgttttcaatgaaataattgtaatcttgattatgttgacttttaagtattgtatttagcctttcttcttaataggtagttgtcaggtcgtcaaaggcagacgagtgtcatctgaagtc

SEQ ID NO: 28114 - DNA, 415 bp, Homo sapiens
  chr6:167834910-167835325
  hypo
cgtgcctgcacccgccaccgctccaatccccacgcagcccggtcacccggtgcctccactgccttggctggcgctgggccggggcctccaggtttctgtgtccaaagggcaggagagaggcgcaagcgggagctgctcttgctatgccagggcggtgctagagatagactttgccctgggctgggctgttttccccccacgcggatcctcacctccgcttctccactggctttccgcctttacatacgtctattttaaatttgtgttaggcacccccacactgtgactcccctcaacactgccgctcccccacgcacacagcggctcccccaacacacggctgctccccccacagcctgcggctccccacacacggcggctcatccacatatgctggctccccactacgcaaggc

SEQ ID NO: 28115 - DNA, 257 bp, Homo sapiens
  chr6:168462450-168462707
  hypo
cggctgcggagcccagcatacccagcccagccccaccttctgcctcctcccgctgccgcagctgttgcagagtgggccgcacgcggaggtggagctggtggctggcgcgcagcaggtgcagcaggtgcctggaccgccaggtgcaccccgtgtagtaaaccagcttctgtgctgcgggcagcccatccagctggatctccagcttctttccctgagcaaacaggagagaagttgccactccacaggtggaaaaccac

SEQ ID NO: 28116 - DNA, 94 bp, Homo sapiens; identical to SEQ ID NO: 10715
  chr6:24662806-24662900
  hypo

SEQ ID NO: 28117 - DNA, 629 bp, Homo sapiens; identical to SEQ ID NO: 23328
  chr6:27463044-27463673
  hyper

SEQ ID NO: 28118 - DNA, 850 bp, Homo sapiens; identical to SEQ ID NO: 23330
  chr6:27512842-27513692
  hyper

SEQ ID NO: 28119 - DNA, 795 bp, Homo sapiens; identical to SEQ ID NO: 23336
  chr6:28367069-28367864
  hyper

SEQ ID NO: 28120 - DNA, 251 bp, Homo sapiens
  chr6:35109297-35109548
  hypo
cgaggccagagcatgcatggggcttttcttcaggctgtttggacagccgagaagccgagccacacccaggagggttgtttcacagcgtgtgccgcaggggcgcaggggccgcgctctttcctcacatgtgggagaagcggaggagccgccagggctggggccaggctctgcccactggggttccgcccgttgtcgccctccgcctcctgggctctagcccttgcctttcttgactctaagtctactctgtc

SEQ ID NO: 28121 - DNA, 150 bp, Homo sapiens
  chr6:36178154-36178304
  hypo
cgagcagctgtccgcctgcgggacctgggaggggccatcctacggcacgcccggcggcaggcagagaacatcggctatgaccccgagaggggcactcacctgcccgagtcacccaaattggaagacttttaccgcttctcctgggaagac

SEQ ID NO: 28122 - DNA, 984 bp, Homo sapiens
  chr6:37664351-37665335
  binary
cgaagcagctagctcggtctccacgcgccctggagagggcggggacgcgggcatccactccagagtccgagtcgaggtctccaccaaaccccggcagcgcgcactttgcgcctcttgcaaagtttccgcgcgaggttaagccaaggtggagcgggacgcgggctcttaccgtagactccttgtccccggcagtggaaggggatcagcgccagaagtagaaggcaggtcacctccatcttcacggccggtgcttcatccccgcgaggcggcgcagcccgagaggcggcggggggcgcattcgccggggccccgcgacgcccctatgtccccccctttccctgagaggtgagagagagagcggcgacgaagaccaggagactgaagaggcggaggtggcggcgacccgtgtttctcctccggcggggccgctgcccgcgtggggacgcagggggcgctggcccagccccgggtgcctcggcgcgcccggcacagcagccagcgccccgacccgaggagcccggccgccgagccgccccgggtacccagggccgtccgcgcgggatgctaggcgccggggacctctcggcggcggaggcggcgcttcgatccaacaggccacggacgactgacaaacttgtcgtttccccgcactggggccgcccctcagcggagcggagtcggggaggccggggctccgctcgagttaatcaatctgctgtttccagtcctgcggccgctgccgtgggctcagcggcccgactccagggggccgggctgaaagcactcgcggcggcgaagcagccccgggcccggccctcctgatccggggagcagcgcgggctgggttcggccgagggacgagcgccgcgggtccccgggtccgtgaagttagccgagccgccgataaacccgggggaagaatagcagcccggcgccccgcgggaatctggagagcaattccaggcaagaagggccccagaaaac

SEQ ID NO: 28123 - DNA, 502 bp, Homo sapiens; identical to SEQ ID NO: 10719
  chr6:38141432-38141934
  hypo

SEQ ID NO: 28124 - DNA, 2706 bp, Homo sapiens; identical to SEQ ID NO: 22934
  chr6:391113-393819
  binary

SEQ ID NO: 28125 - DNA, 927 bp, Homo sapiens
  chr6:41605681-41606608
  hyper
cgctgtgggcgggtggcctgggagcccagatccctgtccctggcttaggaccccgggaggagaccgagggggtgggtaaaacgtgactgagaaacttgatcgcgcccatctttggggcaaagagatttggaggccgcaattattcagacagttccacgaagtggttgaggtttctctctttctcctgattttccagaaacttttgcagagtttggacaggcaaaggaaaacgtgcagcccgcggatctccgggcctcagagagcagggagtcggggagactgaggccccgctccgagagcgcggaggaagcgcgcccagccggcttcctgtgggggctcgggcctcgggcgccccgcggacagacgtgtccggctcctggctgggccaagcccggcgcgggggaggggacccgcagaggggcgactgagaaggcgaggagggggcggggagagggtgggccagggaagaggggaggggagaggcgagtaggggaggagcgaggggggctggagggagagaaggaagaaggaaggggcgaacggcgtgagctggcgccgaaatgggagaaagcagcgagtgagaggggaaggggcgccaggcgagcacccgggagccagcgggacctgggcaggggcgcccggagcaggcgcgcatggcgggccccgcgcggggatccggctggaagagagcgtagcacggctcgcacgagtgagtggacgtgggaggcgcgcatctgcgggggaatcgccccttgcccgcctccggcgccgcccgctgagccctgttttccgcaggtccggggccgatgtaccaggtgagcggccagcgcccctctggctgcgacgcgccctatggagcccccagcgcagccccgggcccaggtaggaccgggagtggcgagcgaagctggacaggggcgggtgggc

SEQ ID NO: 28126 - DNA, 210 bp, Homo sapiens
  chr6:42813329-42813539
  hypo
cgacagcatggccttttagctctccttcattgttctccctccttgttctcctggactaaaatgattgccccaggctatctttacattattccaaaccaagcatttaacagccactggcaggtgcgccggtttccaatacttaacaatacatcagaatcaactggaaagctttaaaaagttatagattcctggccgggcgcggtggctcac

SEQ ID NO: 28127 - DNA, 746 bp, Homo sapiens
  chr6:43969986-43970732
  hyper
cgccttctcccccgccgcccgcgcccacgccctcccccgcggggccgtggcagtgccaccaagggcctctttaagcccctttgaagccgcggagccccgcgccgcaggaggccccgccgctatgccagctatgccagctatgtccctgctgccgccggccgccaccgctcccccattaatgctggctaatctggctaataaataaactcccctcccagccccagccccgcgccgactcctccccgcccccgcagaatcgatgtcagggctcgactagagcaagcgcccgcactccaccccactccctcgagatgtagctgacgttttttcttatggctgccctaggtctgtagcccgtcggggattctcggggagacgtgggatttgggaggtctccgcctagccactgcgtttgccttcctcttttccagtccacctgcgcaccaggggcaggacacgtggctgggtgcagacgctggcccggatgtcgcggaggactcgcgggccggtagagcgcgcggcggcggcggcggcggcggcggcgggaggagacgcaggtcacgcccccttcccaccacctcccgccgccgacggggcgcgcgcgccgaggagcccgggacaggtgactcctagaggactgcgtctgcgcctcccccggcgggagtcccttcttcgcggcctctgccgccccctgcgtcccctcctgggcttccgagagtctgactcagccaagccggcatcgcttc

SEQ ID NO: 28128 - DNA, 161 bp, Homo sapiens; identical to SEQ ID NO: 10724
  chr6:4932028-4932189
  hypo

SEQ ID NO: 28129 - DNA, 746 bp, Homo sapiens; identical to SEQ ID NO: 25811
  chr6:56818408-56819154
  binary

SEQ ID NO: 28130 - DNA, 108 bp, Homo sapiens; identical to SEQ ID NO: 10726
  chr6:6984882-6984990
  hypo

SEQ ID NO: 28131 - DNA, 832 bp, Homo sapiens
  chr6:71665452-71666284
  binary
cggagtgcaaggggcgtgtgactgcagcccggccggcccggaggcccactcccgccctcgcccacccagcggggcaggctggcctttacctcctggaagagctccagactataggtgttgtcgtcgtcagcgaagaagagcacgccgggctgcgcgcgctggtgctggtgcctctggcgcagccaggcgaggcccgcgttgcgctgctcagtggcgcgcggcagcccgggccgcttgtagcgccgcggcgtgggcacgtgcaggtgagtgctgggcagcccggcccgcgccaggaagcggctcaccagctcgctgcgcgccgccgcgtcctccaccaggatccagtgcagctgcgccacctggcggaacgtgttggccaggcgggtcagctccgctttctgcaccgggcggctgtaggtgggcgtgatggcatagatggtgggcagctgcggctccggctgtggctgcggccgagactggttgcgcttttgggtcccgtgagccgggccgcccctgcggagcgggagtcgggcgcccccgcggcccaccgcgtagggagagaagtaggggcgcggggtgagcgggggcactggcctgcgcgtgtccacgtcgagcatgatgatgacaattaggatccagggcaggaggataaagaagcgggtgaaaagcgcggacttcatggtgcacgctccctggcctctcggacaccccagagaggggcgagccgagggaccccagtgcgcagcttggacagcggcggcgccagcacttagggagtggtgatgggtgcgctgtccatggggccgagggcgctgcagagacctggagccgc

SEQ ID NO: 28132 - DNA, 100 bp, Homo sapiens
  chr6:71955569-71955669
  hypo
cgccaccgatggcctgccgatgtctgctggtgtctgtgtgtttgcttttctgctcctcttgacgaccagccatttgtgtctgtgcccgctacggtctctc

SEQ ID NO: 28133 - DNA, 1130 bp, Homo sapiens
  chr6:72129577-72130707
  binary
cgcgccggcacccgaagagttcccacggatacggttcccaagtcagtggcatgtcagtgcccttcaagctaccgcaattttatttgttctccccgccagctccataaagtattaaaggctctctccacgacttcttcccaagcccaggtgccctaaaccacttgagcccacggcgcctaaagccgactcacccgcagcccgaggtgcgggagccctcggacggactccggcccgccccgcagtccccaccggccgcgctgcggccccggctgacgacgagtcgagaaagtcacccgcgatgaccgcggacgcgaggggcgggccgcgtcgcgccgccccgcggaggcgccgcaaacttttcccggttcgcaagttgccgggatctgcggccgcggaccgacttccttcgccggccaccggagggagggggcgcccctaccccgggagggggctgggcgagccgggagacggtcaagttggggtcgggggagcgcgggcgctccgcactctggggcacgcggggacgagcccggccgcattgtctgcgcggcctcggaacaagcacggccggcggtggcaccggcgggcgcggggaggagttgccgtcccctttcgccgccgccgcccaccgcgttctttgtgtgtctctcgccgccctccagccgcttcgccgctcgcctgacagctgatgggctcaccgcgccgggtcccgcgtcctctcggccgcagccggcggagcccggcccggcaggaggaggaggggagaagaggagcgttgacagatgctgtcttggagcgggcaccgccgggggaaaagtctggactgcctcggcgagaagcggccggtaggcaaccggccccagcctcgcattcgcctcaaagaccccaattggctaggagcccttccctccgcagcggctcgcgcagctccgctcttgcgccccgcgcccggctcagcggacggactagcgcgcccggtcaagaatcctggggaacccgctccgccccctggctccagcgccctccaatgatgtcggcgtacagagggctgttccgcccaatcaggtgtcggaaagcccagccagtccccgggagtgtagccaatagaaggcgactccggcaacacaccc

SEQ ID NO: 28134 - DNA, 759 bp, Homo sapiens; identical to SEQ ID NO: 27178
  chr6:72596036-72596795
  hyper

SEQ ID NO: 28135 - DNA, 2473 bp, Homo sapiens
  chr6:73330635-73333108
  binary
cggccagtggcaccgtggcctctctctccgccaagggcgcataggctttgggccacccgggtgccaggggtggtggaagacccagtcagttgttccttgcaacaggtctctaagcttgtatgttacaacataaggtgggtggggtcggaaccccgaaaagccggcgtcctggacaccccatcctccaggtgttctttcccagacactgggtcctcgccgccgctgctgaacttctcaatcatatgactttctcggacttaaatggaaatttcttgacggagggaactgggtttgttctcccaggcttcgcgctgcagtcaggcagagccccggggcagctcgctcaccgcggaggagccactttggagttttacgccctttccacaccccacccatggactggaaaggatgttcagttactcgcgagcttgtctgatactgggatggaaagtcacagtccgcaggctggagtgaggcgcgggaagatgcctggtccttgcctcgcggacttggcagccgcgtcctgcgggtctgtccactgaactgctgaggactcgcccgtgtgcggggacccgagtgccacttcccggagcgttaccttgcgctccagcctccaggctagataatacctggaaggcagggcagggctgttcccgctctcaccccttgcggaaggatggcaggatccggcgcagcgacgtagcagcgggagggcacagcgacctgcatctccagtttctcctcaggacacaaggctgacttcaccttccggacagctgcaaagcccctgccagaaccaaaccgaactcgcgcctcggagaggggcttctggggccgtttcgctgcagggcgtggggagtggagagagggaaggggaagcctggggctgggtgtgcgcgcgtgggagcgcgcctcggagcgccccgcactcccccactctatccccgggggcagtttgggaaggagggagtggtagtcgcgggaatgagggagcaagagaaaccctctcaaagtgacgccccaaacaggtccggatttagaattcgaagctaaaggctgttagaaattgggactcctcggcctcctctgcagcccctcctttcccgccccgaagcccgggcggtttgctggctgcctgcttccccgcccccggctcagaggtctctggctggcgggcgccccgtcggccgccggcttcctccttgaaacccgccggcgcacatgaggccgctgcccccgccgcaggcgctggcggccccctcgcggtgcccgtggtgatgccatgccccgccaccacgcgggaggagaggagggcggcgccgccgggctctgggtgaagagcggcgcagcggcggcggcggcgggcggggggcgcttgggcagcggcatgaaggatgtggagtccggccggggcagggtgctgctgaactcggcagccgccaggggcgacggcctgctactgctgggcacccgcgcggccacgctcggtggcggcggcggtggcctgagggagagccgccggggcaagcagggggcccggatgagcctgctggggaagccgctctcttacacgagtagccagagctgccggcgcaacgtcaagtaccggcgggtgcagaactacctgtacaacgtgctggagagaccccgcggctgggcgttcatctaccacgctttcgtgtgagtacccgcgccccctgctatgcccgctgcaggggaccactgtccctggccccctggggcgtgctccgcgctcgcgcccttgggcccccgcgcgcgtgcacacgtggtggcttttatttcttcgcacgtgttcgtggtcttccttctggagcctctcccctcccccagccccacttctctcatctctacagcttgaaccttttccccgaggacacccaatgaactgcccggtagcttcaggctcccggggcgagagccaggcagacgcgggacttaggctgcgcggataattgggagcaattaggtcccaagatacgtaaacttcaaccgaacggggcgcccgggagctagggaatgcaaagggaggacaggcgcccgtgtgaggcttgagagtatactggagaggttaggaggtgatggcggggtaggacggggagaagtgagggggcatcgagggctaggtcctcagtcctaggggcggagtaggggaagctgctacttggagagagctgctaggttttaagcgcgcccggaaacacgcctcgccaccacccagccaccaccaacggaaaatctgtcagtgcatgtagcccttcctgccacggagaaggtggccaaggtctagaggaggccagcaggccaggcgaagcaacgctcccgcgctgcagggggcggggaggcagcggggaacctggggcgcaggaacgcgggcggaggtgcgatagcagaagcgcaaatgggtcgcctctgacagagatcgggcagtgggttaagtccccgtttgtggcgc

SEQ ID NO: 28136 - DNA, 823 bp, Homo sapiens; identical to SEQ ID NO: 24580
  chr6:74019373-74020196
  binary

SEQ ID NO: 28137 - DNA, 1016 bp, Homo sapiens
  chr6:74161047-74162063
  binary
cggttggttgtctgatcgttggatgtgtagatgaataaacgaacggtttgtcgttttacttagactaggctaccgaaaaacatgcaaaagtctaagttacttccgaagggaagtgaggggcgcgacccggggaaggtagggactgcggattgcggaaggccgagcagcggggctcggcgggagggcgccaagcagctcaccttcacgtgctcatagtagctcccggtgttcagcagcccgacgcctctgaacgcggagtcgcacttcagtctgagcagcaggtggtccacaacccctttcaccatccccgccgccgtggagatatcatcgcggctgagcttcaacttctccaaaaccgcccggagcttcgaggccccaggcgccgcatccctccgtacgagaatgggggccgagaccggcaggccggggctgggcacgtcccagggcccgggcggaggtcttggcttcgtggagcagcgcgcgcccctctggcggcaagaaccagccctggaaagagccggctcccgagccgcaggaggctccagcccctctgccccaggggcgctggtggcgtcagacggctgcgtgtcctgggcgcgctgaggggcctttttggcgcgggccccagttgcgcggacgggcggcctctcctgggtgtccggggcgctctttttctgccgggatcccgacttcctggcggggccgaactttcccgccttaggcagggcggcctcgggggcagccggagactcggtgggatccatcggggcgcccctggcattccgtgcggaagccttgggggcagtggctccggcctcggaagctctctgcatggcctttccgtgccaaggctgcatggctggcgctttctgttccccgaaagaagaatccgtttcaggaaaaggccgcaagaggaagagccagcagcagctgttggaaaccaagcactactggcgggcacacaagagtctgcgacccgaaggggaaccccaggctgggaagtcgctgggagccac

SEQ ID NO: 28138 - DNA, 1498 bp, Homo sapiens
  chr6:7726839-7728337
  binary
cgcgccgcgactcgcaggagccagggcgcaggctgcagtgcagcccggactcagacgcacctggcctggaccgcgcgcctctagagacctgcgcgaggctgtgaggctccccttcctcccctccaagcggttctcctggtgatcgccccttcgccacctctctagcctgggcaactgggggcgccccggacgaccatgagagataaggactgagggccaggaaggggaagcgagcccgccgagaggtggcggggactgctcacgccaagggccacagcggccgcgctccggcctcgctccgccgctccacgcctcgcgggatccgcgggggcagcccggccgggcggggatgccggggctggggcggagggcgcagtggctgtgctggtggtgggggctgctgtgcagctgctgcgggcccccgccgctgcggccgcccttgcccgctgccgcggccgccgccgccggggggcagctgctgggggacggcgggagccccggccgcacggagcagccgccgccgtcgccgcagtcctcctcgggcttcctgtaccggcggctcaagacgcaggagaagcgggagatgcagaaggagatcttgtcggtgctggggctcccgcaccggccccggcccctgcacggcctccaacagccgcagcccccggcgctccggcagcaggaggagcagcagcagcagcagcagctgcctcgcggagagccccctcccgggcgactgaagtccgcgcccctcttcatgctggatctgtacaacgccctgtccgccgacaacgacgaggacggggcgtcggagggggagaggcagcagtcctggccccacgaagcagccagctcgtcccagcgtcggcagccgcccccgggcgccgcgcacccgctcaaccgcaagagccttctggcccccggatctggcagcggcggcgcgtccccactgaccagcgcgcaggacagcgccttcctcaacgacgcggacatggtcatgagctttgtgaacctgggtaaggatttggggtaacgtaatgacgagaacatttcccccttttcagtgtcccgggcccaggggatggagtgagggggtggaggagctcccggcgcgcgggtcccgcctggtgcgccagagaacgcggggacaggcaggctgtgctcccgccacctgcgcggcggtgggcggcacatgcgctcccccgcgccgcgggcagggctgcgcgccgaggcccccagaggcggctggccggccgggccgcggggctccgggagcgctgtccccagcgggcgtgtatttgcggactccctgagcacgttccgcgctttttttcacttctgcccagctctggccaggttaactcaactgcagcaggagagtccagcccgagtgtggccatcctgggaagagggctcttcagtacgattttcccctctaaactgccgccttttgccccctaacttggagtgcagttttcccaccgagacttttagggaatcc

SEQ ID NO: 28139 - DNA, 806 bp, Homo sapiens
  chr6:80656537-80657343
  binary
cggggaagagggaggcgagctcgggagatgtgggagcacagggtggggcggctcctgcgaggagctcctggctgcacaggctccatctgatatgtcagctcccgcatccgagagctgatgagagatggagggagctcagaagaaaaccctgcgagtgtcgggggaggggaggccttaacattcggatcagattaaccagtgctcaaccgcagtgcccgcgccggcccctccgctgatccgcagcatccgaaagccgcagggcgcgggggcctgtggggccgggcccgggagctgcgagaccaggggccggtgaccccccgcgggggaccgagcgaggatggggaagtcagcggctttacctgcgatggaccaggtccagcggtagaactctaccgtgtcgttgagtgccgtggacactacgtttaggacactacccggctccgagtccaggagccccatcgcggcgatgagcgggcgctggcggcaggagaaagcggagacccagagagagggctgaccccggaggcggtggcggccgacggggcgagcggcggccgggaacccctctaacggcggcggcccggctgcgtcttctcctgctcctcaaggcgccgcggcggcggggatgcggcagaaggcagggccaagcggaaggcgtcgtcaaggttcccgggagaaagacgaggaggtggaggaggcccagccgccagcacagtgcgctgcaccagtctgcagcctcgcgcagccgcccctccaatctcctcagccggcgtcacgtggccgcgcgcgggggcggggggccggcc

SEQ ID NO: 28140 - DNA, 829 bp, Homo sapiens; identical to SEQ ID NO: 23345
  chr6:87646737-87647566
  hyper

SEQ ID NO: 28141 - DNA, 1067 bp, Homo sapiens
  chr6:90142647-90143714
  binary
cgcggaaaacctcaccctactataggcccccttcctcccactcttcagaaggcggtggccccacccaggagagggctgcagatcggggccagccccagggcctccgcggtgccacctctctctcgcgagggtccctgccgtgccccggctcgccgctgggaggcgctgcggcaccggcgtaggagccgccggcaggggtggggcggggccggcgggacggggcagagggccctgcggcggcggacgcggcgggctcggccacaggtaacccgcaggagccgagagcgctgcctggcgcgcgggcggctggaggcacggcgctgggcggcgccgaggccctggggccgccggagccagcgggagccagtccccgtcttcgcccctcgccccccaccgtgtcgccggccttggtccctgcggcgcggacgtccggcgcgggagagaaaggtaccaggcgacctcgccggctccctgggacccccgcttacaccggggtgggcgcctcaggtcggggaggacgctgtcgggggaagggggcgctgctccctcggcaccccaggatcgccgactgcccgcggaggagacccggacaccgcgcctcgccccctggcctgcggcctccgaaaacgcccggcgcgagggggtccccccggggcgcctccctcttcgcctggcatcagttgcctccctggaatatggaacttcgggcgagggaggtggagaactttcttctggggctcgtccctcgttctcctgctcgcttgcagtttgaaggaagggcggtgggggcgggggtccgagtaccccgcggtctgcggcgcgtaggagggtaggtccctggcctgcggccgcctccgaatgaccccgtccctccccgccctggacgacagcactagggtgcagtcgcaggagaggggccgatacccctcaggagccccatcggcgaagcctcagcaagtggcatctcccggggtccagagagtcggcgtgctgtctggtttgggtccagacatcagctcacccaagcttatcttgggcttttaagtgtgttgcttccggtagatctc

SEQ ID NO: 28142 - DNA, 1298 bp, Homo sapiens
  chr6:91004776-91006074
  binary
cgaaggtgaaaaccaggaacgccgcgtctcgccgcccgcgggcccgccgggagactgcgggtccgtctcgcgggtggggcgccccggtccctctcgtttcctggaggccacaggtcacggcgacggcggtgaccgggagagcaggctgcgaggcgcgcctcatcgggccacagacaaaccaccccggcagcggccgcgccggaacttccctcaagttaccaaactcgcctacgcgcgggagagtgctggggatgccccatgcgcccgcgaccccagaagccaggagtgtgccaccccttcacacactcactcccggccctgcacgcttcccctcacggtccgagttcctgcaaatgcttggccagaccgaggtcgccgagatgctcgctccagtctctcccctcgtgggcacctagggtagcccgtgagcgccgcccgccgccgtctccagcggcgccgggctcccgaacacccgccgggtgagcgaagcacagcggggccacggagcgcctcgacgcggggacggggagggcagtgtccccttcataaaccagtctcctgggtgaagcttctggggcttggagactggagtgtagggtgtgtgtgtgtgtgtgtgtgtgtgtgtgttgcaccttgacttcatggaggatctgtgggagaggaggtgcaaggtttccctctcagaagcctggcgcccttaggtcttagctacgcgggacgctttccgacaacccgatctttcgctaggagagattcgatccaggtctgcgccgcgaggcccccagctcgcctcttcctgcgaccctaaacttgggctttgattccccgccggtcgcggtggtccgggccacccggcggcggctgacagctgagcgcaaaggcgccgcggccaaggtcctcgcggagcagcccgggatgcgcacgccgagggttaaggaggaggccgcccggcctggagctgggatcgcaggctgggggccgggacacccgggcctcgccgggccgggggcagggccgcgggtctgacagctgctgcggctcgcgcggacgcgcgcctcctgcagcccgccctccccatgcctgacttattactctctgctcctcctccctctgctgttccaaaacacccttcgacgccagcaaaatacaatgcgcctcggccgccgtaaacagccgggagggagagcacacattcggcgcggcgcggccgccggctcggctcccacccccttcccgttcctagaaaatgccataaaagcgggcagggcgcggggagggcggctgcgcgcccggcggcc

SEQ ID NO: 28143 - DNA, 1037 bp, Homo sapiens
  chr6:91320244-91321281
  binary
cgtgtttgtgtagtaagccgagttctttcttgactgtctgtttatttgggatagcccggcgagggggcgctggagattatgggggtgggggcggtttcttggggaggcctgggtctatggagtggaaaccaatctttgatgaatttggtcacaataacgaacacgggagaaaaaggagaattgaaaggaaatggattctgcgagagactggggagacaaaaccaagaggaaaaacacagaatcaaaaacgacaggaaacactagagaagagtaggcagaaaatagagaagaggaagaaacgagtcggacggagacggggccgggcactgggagcttgaggctgggtctccatccttcctttcatcctctcgggagcccgcagagacggcggcttcagtctcgctttacgggtgggaaagcagcgaccttgagaggttaggtgactgctcaaggtcaccgagctaagtgccagagccaggattctcaccgctcctcaccccagatcggggctccggccagaccacgctggccgccgggggagaggacgcgcggggcgggcagagcgcggccgggggccgggaaggagccggcgccaggcgcgcgcggaggaggcggccgggcggggagccatttcctccccaagcaacggcgcttttcaggggcgcgaccgggaagcctctcttggcgtcccttccccagccgcagtttgggcaggggagcgagggccgggaggcgtctaggctgtggcgaggggagaagcatcccccatccctccgctccccgtctcgctcaagctcttcctgcgccacgggcaggtctcccagcctcgccatcgcggggcgtccccgtcccggcccacacctctttcctctccagccacaccggcgcgccccgagggttgcaggcgggggctgcaccgggttgaagcccagtcaaccacacgtcccagggcttaggcgccgggcggggacaacgtgtctgcctgggctcagacgctgctagggggcatccctgtcggtgagaccagactcagacac

SEQ ID NO: 28144 - DNA, 468 bp, Homo sapiens
  chr7:100253722-100254190
  hyper
cgacgggaaaggaaggggcccggggccaggtggaggtgggttgcaaggtagggccctgtgcgcgcggggcgtctggggaggaccgagcgcaggggtggcgggagacccgagcctgagactcgacccgctcgtgcgcggaggtgacaggccccggggtgcccagagctcggatggatggcgcgggtttggaacgcagggctgcgggagccgggggcccgaggctcgctcacctccgccgtagacgcccccgctcatagtgcccgctgcgctgctagcggcccgtgggcggtggcgggatcagcaccgaggcggccggacagctcccgggatccctggcggggcgggactctcagcggccaattgggaggccggatcccccgctccaacggcgccgccgattggctgccaggcgagacaatgaccgaccgggggcagctgctttaaaggggaagatacactctattaagc

SEQ ID NO: 28145 - DNA, 528 bp, Homo sapiens
  chr7:100660381-100660909
  hyper
cggagtccagagagtgagtggttctgcgggaccaggaagtaagtgatcgctgtgctccgggaggatgctggaagaagattccagacgcagcttttttgcctgctatggttaccgttgctatgaaggagggcggccctgctgacccagagccagccctgtctcccgctccactctgacctcacccctgagtccagggctgaacgcacgctcctccgtggcccccgcttccaccccgtgcatgtggggggcttctgctccgctccctcctgttccggggtccagcgggcggctccccaggcaggctctgcacttacccgcagcccagtgatgcagggtcggaggggtggtcggcagtgggaaagggcgtagggcagatgccgggctgactcttccttttgccagaggaaatcccctctgccccctagtcctccccctaccaaggctcccatcactcatcacggcctctccctacagaccagaatctgagggagagcagattcggccttgagaacgcctacaacaacttcc

SEQ ID NO: 28146 - DNA, 468 bp, Homo sapiens
  chr7:101627660-101628128
  hypo
cgtgggacaatgtagataaaaacctcgatatacagcctagtacacaaaggacggtgtaaatattctcttccgtgcttcgtagatttcatttttgaacgctcagattgttctccggcaaaaaaaaaaaaaaaaaaaagtgcttgcagtgagaacctgccctgcactctcaggcgagctgttgggtgcaagtcctgcaggactgagctctgaaggccacccacaccctgggttgtgcttggatgatggcatccctcctggcacaagcgcagatgggcagtcgggagggaacatcagcctgggaaaactagatgtcagtgaaaaatgctggaggtggctggcgttcgcaaaactcagtcgtaaaaaacagcacgttctcagtacaaaatgagcactgttaaaaataaaccgcgcaagaagaaatatatgaatacgagggcatggcaaacagttttgcaaggtattaagatc

SEQ ID NO: 28147 - DNA, 151 bp, Homo sapiens
  chr7:102782123-102782274
  hypo
cgggcattggctgtacccttccgcttacctatgcccatatgcctgcccttccggcaggccaaggtgtttttccggcatcaagcgggggaatggaccatcacaggcttgcggatgatcagcccatctttgatcagcttccggatctgctgac

SEQ ID NO: 28148 - DNA, 740 bp, Homo sapiens; identical to SEQ ID NO: 27189
  chr7:103969373-103970113
  hyper

SEQ ID NO: 28149 - DNA, 313 bp, Homo sapiens
  chr7:105279344-105279657
  hypo
cgagggaatgctagagttaatccaggtgcaggtgggaggctcgattcggcccagacaaacagagccaccaagcagagagggccatcgccttgatcccaagaagcactagcagttcagcatgaaatacagggctttgggcgacccaatggcggccgccttgggtcagctgttcccctggccaccccggtgtggctggatcaggggcgcggcatatcatcctcccctccagggctgcctttcagggcgctgccgccgccgccgccgccgctgccgctgctcctgcatacattaaaacgtagcaggctttagaacc

SEQ ID NO: 28150 - DNA, 359 bp, Homo sapiens
  chr7:107483576-107483935
  hypo
cgagaaaaagctgaagaccgtgatcagtgaagcacacaaacggggcatggtgatagagaaaaacagtgggcacgcaatctagcttgggaaaatgaggtagcacccctttcaggaggtgatttcagcagagacccgcaggtacaaggacaccacccaggcgaggagccagaaagagcagccgcagcaggtggagcgcatgggcagaggggcggtggtgggacacgcgactgtttgggattgagcgaggccacctaagcagattgcggtgagtgagcgcggaatgacgtcactgacctccaatcaactgtcacatgaaaataccaaaagcggcagtgttcctttagtcatgtggatcacgc

SEQ ID NO: 28151 - DNA, 2448 bp, Homo sapiens
  chr7:108095249-108097697
  binary
cgaggaagagcccagtctcttagacccgcacttctgagcgttaaccatctgggactcggaaaggaaaagaaagctttcttctcaggacagttctgcgccggtggtagccaagggctggagcccctgatgcgaagaaaagggaaggagagaggcggggtgcgaaagaaacgccaccgctcggcgccctccctcggtgcccgcggcgcaggggccacccgccagcgtacgggggacgaagatgtggccgcgggcgcgggcgggaggggaggcgatccggggaaggaagcggcctgttcgccagccccggggcccggggagccctccagcagcgcttgcggccctgaggacaccgctttgggagaaatgacgactcccttgctcaccctactgcgacaccccgtccccctccgcactctagcagatgcgggccgggagtagctgagctggccaaccgcctgggaccaggatgcggcagcgcccacccgcgcggcgtggagggggccgggggcggcgctcggcgcagatggcgctcgctgcgagatggatgctccagggcgggtaatcactcctggctcaacacagcatcccgggcggagcggatgccagatcccaccgctaagagcctgggctgggaaagcaatctttccaggcagcccccagcccggtgcgccggccccgacaagtcccagccctcggaggcagggcggggcgcagggactcccgggacccgcacctgtaaggccgacaaagcccccgcaagcgccccacccctctgtcctccgtgtctctctcgttccgcctcgattccccgagccctctccaggcagcgactggagaagcgaagtcggcctcgcccccgaactccgtggtcagcacaggtgtacgcacttccgaacaaagcccacgcccagacgtgtccgcaggggcccgaacaggcacacgcccgtgcgctcccggcccggcccccgcgctcctcgccccgccggcactgtggcgtgacgccccgcgcctccgtgtccaagcccgggaagccgccgtgccgggcccgcaggctctccatgcccaactgcccacgagcaagagctctgggcagggcttcccggaaagcgtggggtgcgggcgcggagcagaagttggccacaggctggagggggtggtgggtgccggcgctgctggatttcagctgtgccttcacccaagcgcaggtccccctgctccctctcggcgcccgcgggagtgtcgggggcctgcaggggagaagggagttggagatctgctttgcccctcctgcagcgctgccagcccggtgagcgctcggctgaaccccgcggcggtgtccaagtgacaacgcagcagcctcgcgcgtcctcctccgctccagccgtcacccccgagcaggacccagtgtcaccgccagacgcgcaaggagctacttacgttctcgcgccgcgccctccgctcagctctggcgcgactgcccaggaccctggaccgccggtgtcctccgttctcgacgaagctatcccctctggctgctccagccaggcggcccctgcgccgtcccccgcgcccgcgcgtctgaggctcggactgcggcgcgcgtccgccagcgaccctggcgaagcgaggctggccccgcgccggcgcgcgcccccgccgctcccgccctctccgctccccctccccgcgccgtgcttttgcccctcccggctctccttagcgtcctcccgtccccctcccccgcactccctgcgggcgtcctccgcctcctcccctcctggccaaccccctcttgccctgctgctgcgacggcagcgaatgggctccagccgccggcgcctcgagggactgggtggcccctcacctgagcggccgccccaccgccaacctccgtcagcctgcgagcgcgtgtggcggcgggggtgggggtgcggggacggagggcgggagtgttccggggctaggatggctgggatttagctacaaaagatgttccagaaaatgggtagtttttgaatgccactctcatgggtttagctttctgtgggaggtctgtggtcttctagttttttcttttttaaaaagcactttcttcgaaattcatcagttggggtggttgagattgggtgagtggttttgggggttttgttttgtttttgcaaccgttctttccaaacactccccgccgccccccaccaccgcagaaaaaagagcttttagcataaggcggatgctatctatccgcggtagaaactgggtcttctggtcccaaggaatagggttagttcggatttgcttatttacaaatgggggagtattatggagattttttttttttttttttggcaatgtaaatcgagaattaagattttccaactgtatagtatttgagtaaacacactgcttgctgcatagttcaggctccgaagcgcacgtctccactctatc

SEQ ID NO: 28152 - DNA, 446 bp, Homo sapiens; identical to SEQ ID NO: 27194
  chr7:112726534-112726980
  hyper

SEQ ID NO: 28153 - DNA, 1385 bp, Homo sapiens
  chr7:116962417-116963802
  binary
cgccccactggggtgaacctggaatgtggaaggacgggaaataatacaaagtcacacgctttaggttctacaactcctgactggctgaattggcccgtcgatttaccttgaggcagttttggcggggtgggggctgggatgggggaggcggttgtagttttcaaggtgaatttacacacacacacacacacacacacacacacacacacgtctgtgctagagctggagaccaggctagcacgtctctcaacaggataagaaattggctgattttgctgtcgctcagctggatccaaataaaccaaacatcggagctctcatttgagggggaatgtggttttatggagttgtcaaagctgaaatgatcttctgggaaaagagaaggggctcaccatggggcgataagagggcagtagccagggttcgggccagaatccgagactgctgcggccgcgggggaacgcagccaggaagggtctatgtggccaatgcggtccccattccgatctccaaaatcccccgcgcccgtgcgcgtggacttaccaccatgaagagttgacctcgggggtgagccaggtcaagagcagagggagccagagccagattccaccgagaggggcgttcatattaacccccttgcgtctgcatcaggtcagactccgtgtgcgggcgccatgcgtgcccagagcagaagcgctcagctccgggagcgcctcgtcacggccgccggcgcctcgccgcgcccccgccccccgctcgcgtctgcgacgagtggcgagactcgctgataaagtttcaaacgatgggcccagcgagcgataaaggccagcccggaccgcctcgcccacagcccaattccccaggcgcagcgagcgcctgcagcccgaaagctctgcgcgcctcccgcgcgccccgtccgctctgctcccctccgggcgcagccgagggagggggtgctgcgcctggcgggggtggggagaaacgcggggttttagacacgggtgcatgaaatgatggcaagagatgtctggggatgaggtgaggcggggaagggggaacatcgctgcatggttacgagcacacgcgaatacaggaacctttagggaagctccaggccaaagagcatccgtgggctctcggagcgtgcgttccggattgccgaggccatccgctggcaaacaagtccctgagcgtgcaatgtgaggaaacgaggaagggggccaggggataaggagattactatgcatgggatacaagaatccagagatgattctcaactcattgcttcgcttctctccctgaagctgggatgaagagctagcacttgtaaatttggagctgccgcgtctatgcagggcaaggttagggaggggccaggcctctgc

SEQ ID NO: 28154 - DNA, 90 bp, Homo sapiens; identical to SEQ ID NO: 10752
  chr7:127679932-127680022
  hypo

SEQ ID NO: 28155 - DNA, 624 bp, Homo sapiens
  chr7:127744072-127744696
  binary
cgaggaaaggaagcgacttggccaaggtcggagagctcattctttgcagggcggggtttggaacccggggtctggctctcggcaacgcgccctcggcccgcagcctcctgccccctgtgccccgcttcggcccccagcgcagctgcagaggggcccccctcgacgcatacactcaagagcccgaccgcgcggctgaaatcgcggagctcggagccgcggctggctgagcgatcgcggttcctgggctgcgtgcgcgccccttggagctgaaaggagcgccaggatcgggggcgctgcaccgggctgggcccctcaacgctcgcagaccgggccgggctgcagctggagatggcagcaatcccgggaggtctccgggcctcttcagggtgcgtccaggaggcgggttccgtgcgacgcggcgcagcccacccccacgagaccgcttaacttcgcgggggcagcctcgggcgctcggagacgcggaggcccagactgcagcctccggatgctggaagcccagactccctggggtcaccggctctcccgccaccccagctgcaaagagtcccattgcttcaccgtccggagcttagtctccttgttcctctaccagtccctccctcc

SEQ ID NO: 28156 - DNA, 71 bp, Homo sapiens
  chr7:128097004-128097075
  hypo
cgcgcctggcctaagaaagtaaaagttttaagaagtgttcttgaattagtccaagaagcaacactggctcc

SEQ ID NO: 28157 - DNA, 287 bp, Homo sapiens; identical to SEQ ID NO: 25831
  chr7:128337620-128337907
  hyper

SEQ ID NO: 28158 - DNA, 263 bp, Homo sapiens
  chr7:1333595-1333858
  hypo
cgccgtcataaacccgcgtgcaccgcgtcactccccgggcgccgagttccgccggcctggcacgggctcacgggcacccttggcccccgaggggctgtgggaccccgggaccgggtgctcgctgagggacggcccttgtctgcggtcatccctcccctcctgagtggaaggtgatgccgtgggcccagggctggctgcgtctgccaggcatgccctgcattcaggcagaactcgagggaggactcatctccaaacagaagagc

SEQ ID NO: 28159 - DNA, 1138 bp, Homo sapiens; identical to SEQ ID NO: 25842
  chr7:134142980-134144118
  binary

SEQ ID NO: 28160 - DNA, 171 bp, Homo sapiens
  chr7:140156493-140156664
  hypo
cgaatgcacttgagacagtaggtgtggttgcagttggagaggatcccgaagcggcgctcactggggttggctttctcatagaccacctccatgcagatcccacacaccatgtccttgctgcgctgcacggcaaatgagagctccatgtccttctcatgggcctcaatgcac

SEQ ID NO: 28161 - DNA, 1041 bp, Homo sapiens
  chr7:149411354-149412395
  binary
cgcgcttccttcccgcatcacacgtttatttgaggcctactatgtgccaggaacaactggggttaccaccccagcaaacaggcacgcaaaatgtgacacgaaggtaggtcatggctgcggcgagcgggggcgcgggcgaaagacgtgaggatgtacgggggcctggcagctgctctgtcccacccacgcccggccggaccctcgacccctttcactccaggtcgggtttccccgaccgcggcctctgggaaagatgggtccctcttcatccccaccatcagcccctggcacatgggacgcgctgagtggtggctgcgggaatgaatgagtgataagcggcgcgtacccgcgggcttgcacgcccacagccgccccggctggtctcggcgcgcaacctctacccgcagctgggggcggggacgaggggagggggcggggacgaggcccgagccaggtccgccccgccctgtctccgccccccgcttccgagccggcgccgcggcgccttctgggaagtgtagtccgcgtctgcgccggccggccgggccgccgaagccgggggctccgggcggaaacggcaccacccaccaagggatgcgaggcgctcggggcgggctcaacgaggccgggggcgggcccgggcgcgcccacccccgcccctccccctcggcccaggcccccggccccgccttctcctgcgcggacctgggccgccgccgacgagggtcgcgtgcgcccgcgccagggcccgcgccggaaaccgaggagtggcggggaggctgagcccggggatggcgcgccaggtaaggcaggcggacgcgcggacccctcggcgcagtgcggccccgaaggcggtagggcgagaaagagctgggacccccccgcaacttcgggatcggctgggtgaggctgggcaggcctgatgctcaggggttcgtgccgggaagttcaggtcctcggacaacctctctccagctctccgccgccggtacccacggcccagtctccacctggggaaacccccttggcgtggcttgtttc

SEQ ID NO: 28162 - DNA, 256 bp, Homo sapiens
  chr7:149917125-149917381
  hyper
cgcgggtctacaaaacagcatacgttctctcaacccctgcgatccgccaaccatcctcagtcaccgacccctgcaagggatgcagacgcaccagcggctgctcacactccctccacaaacctgccggagtctccactcgcccgccaactgtagcctccatctgcgccccacgcccccgcacaagccccctccgtcgcgggtctcttaccttgtggcctttccccgggggatacctgacgctattggagactcctgc

SEQ ID NO: 28163 - DNA, 1885 bp, Homo sapiens
  chr7:150068558-150070443
  hypo
cgccggtgccaggcccggctgcccttgccctgccctgagtgtggccgtcgctttcgccatgcccccttcttagcactgcaccgccaggtccatgctgctgccaccccagacctgggctttgcctgccacctctgtgggcagagcttccgaggctgggtggccctggttctgcatctgcgggcccattcagctgcaaagcggcccatcgcttgtcccaaatgcgagagacgcttctggcgacgaaagcagcttcgagctcatctgcggcggtgccaccctcccgccccggaggcccggcccttcatatgcggcaactgtggccggagctttgcccagtgggaccagctagttgcccacaagcgggtgcacgtagctgaggccctggaggaggccgcagccaaggctctggggccccggcccaggggccgccccgcggtgaccgccccccggcccggtggagatgccgtcgaccgccccttccagtgtgcctgttgtggcaagcgcttccggcacaagcccaacttgatcgctcaccgccgcgtgcacacgggcgagcggccccaccagtgccccgagtgcgggaagcgctttaccaataagccctatctgacttcgcaccggcgcatccacaccggcgagaagccctacccgtgcaaagagtgcggccgccgcttccggcacaaacccaacctgctgtctcacagcaagattcacaagcgatccgaggggtcggcccaggccgcccccggcccggggagcccccagctgccagccggcccccaggagtccgcggccgagcccaccccggcggtacctctgaaaccggcccaggagccgccgccaggggccccgccagagcacccgcaggacccgatcgaagcccccccctccctctacagctgcgacgactgcggcaggagcttccggctggagcgcttcctgcgggcccaccagcggcagcacaccggggagcggcccttcacctgcgccgagtgcgggaagaacttcggcaagaagacgcacctggtggcgcactcgcgcgtgcactccggcgagcggcccttcgcctgcgaggagtgcggccgccgcttctcccagggcagccatctggcggcgcatcggcgcgaccacgcccccgatcggcccttcgtgtgtcccgactgcggcaaggccttccgccacaaaccctacctggcggcgcaccggcgcatccacaccggcgagaagccctacgtctgccccgactgcggcaaagccttcagccagaagtccaacctggtgtcgcaccggcgcatccacacgggcgagcggccctacgcctgtcccgactgcgaccgcagcttcagccagaagtccaacctcatcacccaccgcaagagccacatccgggacggcgccttctgctgtgccatctgtggccagaccttcgacgacgaggagagactcctggcccaccagaagaagcacgatgtctgagacggtgggcggggccgtgttggctgagagagggctggggtccttcgtggtgggagtcgcagtgggctgggggtgcctgcctagtgctggagtaggggacaatgggaatcctagaggggatggaagacgcggggagtgagctgggtgggccctgctagcgagagaggtcaaccccggtggccagggaacccacttccaagcgcagggacgccggcctccagctggtgtgtgctaaggctccgtcctgactgccctgtgccctggaaaagcagcaatagcatccgccccttagagccctctggctagaggagccaccagtggaaaggaagaccctccatcctctggtattaacgccttaatgcccctgtcttttactgtaagttacttaagatcatttttggaagcaggc

SEQ ID NO: 28164 - DNA, 252 bp, Homo sapiens
  chr7:150079253-150079505
  hypo
cgtggaggctcctgtgtggcgctgggggcctctgagattcccaactggctggaaggagtgatggcttaggaggagtgagtggcagcggggacgctggcagagaggcttgtacagatactgcccgatgcatccggctcaggcttgccgccctgtggtgctcctcccaaactcagggagcaggtatttccgttcacctgcgccttcaagaacctgagctcaaagcgctgcaatgactggccagggactagcagc

SEQ ID NO: 28165 - DNA, 339 bp, Homo sapiens
  chr7:150081096-150081435
  hypo
cgggcctctccacctgctgctagctcaatcccctctttgtgtggttggtcttcagttgtcatggcagctgggcccaggctgaggcctgcccactgtgaggctcttaactgaactgcagcctgacccggtgcgcggagggccgggccagggccaggcgtgggaagggggcccctgtgtgtcctgctcccctcagagcccgaggggcagcagagaggaaaggtggtccggtaggggcccgggggcccttgtgcgatagacaaagcggccttccaagacttggtgtgggcactggtgggagatggcgcatctggcccttgatgcctgtcttccagccggggc

SEQ ID NO: 28166 - DNA, 977 bp, Homo sapiens
  chr7:151106536-151107513
  binary
cgtccgcggtgctccagagccgggccgtgccgtcctcgctgcccgtcagcaggcgctgcccgtcggggctcaggctcagccagttgatgcccccgcggtggtcggcgcagaccctcagggccgacccgccgccccccatcccgctggcagggcggggaacaagaaggagctgcgccccgctagggaggggcgccccggggtccgcgcggcggctccgtacgactgcggcccgcggccatcgcggggaacggggagcccgactcctgcggaggcacgcggcgaggggagggtgaaggaccctagctccccgctgcctccagcctctgggcccgcgaacccagggcgctgcggggggcggcccactcgggacctccgccctgggtagagtcctgggcgcgcgggcagagagaacccccttcccagcaccgctcggaggatccacaccccaccgggcgaacaaggcagctgcgtctctggtgcacaaggagccccccgcctcctctcgcgcccacggggctggggcggggagaggaacacgggaagccgagcgccccgcgccctccccggccgagcgcggaacaatacggtccagcctggctcctcctcagagaccacccctcacccgatcccctcccacttctcgggctgcgccccagcccccaccccgcgcgcctgcagcctccccccttcgtcgctgtgcgggtccgggggacggctccacgtgcgaccctcctagctgcccgggctgcgcctctgggctctggcctctgccacctccgccgccgccgcctgggtcccctgagccaagggccgggacgagggagggggaggcggacaaagggtcggggtcggggagaatcgcgcgccgggaactcatttggggcgcagctccaccgacccctcggctactcgcctccaccaggcaagccaggtcctcccatgctctgagccctaaggactctgcccgaggggctctc

SEQ ID NO: 28167 - DNA, 967 bp, Homo sapiens; identical to SEQ ID NO: 23352
  chr7:155165412-155166379
  hyper

SEQ ID NO: 28168 - DNA, 812 bp, Homo sapiens
  chr7:156794976-156795788
  hyper
cggatgagggaagggacaggtccacctcctctcccttcgagctgtttctttactccctgacaccagggattaaccggggtctcctggctgcctctcacctggcagccggagctccaggaggggctggaaaggagccccctgggcctccgtctggggggcgtgtgtgaactgttttctcccgtcacaaaaaaggcttcctccacatgcgtttgcacgcccggcagaattcgcccacagcaaggcccccctttctaagaagggaggagaacccacattggagcaaagaaaacggtggccaagaggtgggggcctcggtagggcaaggaggcaaggctgggttccaggggacagggtcagctttgggtggggcccagagccccgggtcgcagtgacggccgccgcaggggtctccccccgcgtaccttcgcttctgttgaaggcagtgagatccgcaggcctccgggacagctagaggacagcagacatgtcccgtgggggaagcctgggcctgtctgaaaacaccgcctcagctccctccggggtccccctgcgtagacctggcttcaggtccggagaaccggattcttgagggctgcaaagactttctcccccatgcgcggggtcagctggcggctcaggtgcgattggaggcctgggccccgagggaccaccgccccaggccgagccgagtcagcgaccccgagcgcggcgcccaggggtgggggtcgcgcccgcaaggcgggcagagccgggcctcgagaccgttcattaggcagaatgaattgttcaccgtgcccggagtggatgaggac

SEQ ID NO: 28169 - DNA, 1200 bp, Homo sapiens; identical to SEQ ID NO: 24608
  chr7:157262486-157263686
  hypo

SEQ ID NO: 28170 - DNA, 851 bp, Homo sapiens; identical to SEQ ID NO: 27223
  chr7:157476570-157477421
  binary

SEQ ID NO: 28171 - DNA, 407 bp, Homo sapiens
  chr7:158301266-158301673
  hypo
cggaagtggctccgctcctgtgggtgtcggggcaacgtgggacgctcggagcaggtgcggaagtggctccgctcctgtgggtgtcggggcaacgtgggacgctcggagcaggtgcggaagtggctctgctcctgtgggtgtcggggcaacgtgggacgctcggagcaggtgcggaagtggctctgctcctgtgggtgtcggggcaacgtgggacgctcggagcaggtgcggaagtggctctgctcctgtgggtgtcggggcaacgtgggacgctcggagcaggtgcggaagtggctccgctcctgtgggtgtcggggcaacgtgggacgctcggagcaggtgcggaagtggctctgctcctgtgggtgtcagggcaacgtgggatgctcaggagggggcctcagcac

SEQ ID NO: 28172 - DNA, 140 bp, Homo sapiens; identical to SEQ ID NO: 10762
  chr7:158556274-158556414
  hypo

SEQ ID NO: 28173 - DNA, 207 bp, Homo sapiens; identical to SEQ ID NO: 10763
  chr7:158570568-158570775
  hypo

SEQ ID NO: 28174 - DNA, 157 bp, Homo sapiens
  chr7:1688965-1689122
  hypo
cgtcctcatttggcaaacagggatagtcgtgatccctcccttagggccggtgcttggaaagaatgaacgaacatgggtaaggtgtgcctggtgagcgctgtctgggctgaaggaggagtttgagaaggcggctttatgaagggaggtggccgggcgc

SEQ ID NO: 28175 - DNA, 976 bp, Homo sapiens
  chr7:1705266-1706242
  binary
cgacgtgcgggcagcgaccccgccccccgcccctccggtcgcccccgccgcggcccccgccccctccccatccctccccgcgcgctctcccacatgaaaccttccatcacgctcagaaagaatgtgctacaacctcggcgctgccgcggccgccaccactgcgcccgcgcccgagcccgagtcggagccggagccgccgctcccccgcctgcccggccagccccgggctccgagcgcgcggtccccgccgccgccgccccgcgctcgccccgcgcttgacgcagtgagcgccgcagcctggctcccgccggctccgctgggctccgggtcgcaggccgagtccagccgggcgggctccgggaggggccggcagggcgggagggggaggagggctgtctggagccagcgagcccggaggaggaagaggaggaggaaggaggggaagccgccgccgccgccgccgcgctcggggaaccggggtgcgcgcgctctgctcgcccgcgacagtgcctccagcccggggcccgcaccccggcccaggtaagaaggggcctgaggggcagggggctgtccggggccgggggacccctctgtcgccgctgcgggatcggagggtccccgcccctaggggaggcagggaagaggatgctctctggggggggcggcggggggcagcgcagggtccccagcggctctcgcagcccgggccaccccatccctggtgccctgacctcggcgtccgcgccagggccgagtctccccgcccgcggggctctggatgcggcgctcggggcccgcggctcccgggcgtccccatccacccacccaggttcggaggcgggcgcacccgaagttagcggccgccgagcctgggccggacaaacttccctccccgacgccgcggctggaagggccaggactccggacccctagggctagggaggcgccgcggggaccccgaaactttccggagcgc

SEQ ID NO: 28176 - DNA, 2232 bp, Homo sapiens
  chr7:19155978-19158210
  binary
cgaaagaaagggtggcgctgacaaaacggtccttacccgtgaccctgggtgtctctgtctcccctcctgtcacgcacactcacgcgcacacacacccctcaccagggcgcatccccctggagactgctctccctagcggggtcagaccggccttccggggacgctgggggcgcgaggcaacggtgccaagtgaggtgggaaggctgagcggagagtgggagaggggaggaaatcgaggtggactgggaaccgcggcctggccggcctgccgtctgccacctgagaggcgaaggggtgcagcggcgcggtccttacctaggtctccggccctgctgagggggtggggggctccgcctgctagtgggacgcggacatggaccaggccccctccatcctccagaccgagaaggcgtagctgagccgctcgtgagccacatagctgcagcttgccatcttggagtccagctcgtcgctctggaggacctggtagaggaagtcgatgtacctggccgccagcttgagggtctgaatcttgctcagcttgtccgagggcagcgtggggatgatcttccgcagcgcggcgaacgcctcgttcagcgactgggtgcgctggcgctcccgcacgttggccatgacccgctgcgtctgcagctcctcgtaagactgcggactcccgccgccgctgctgctgccgccgccgccgcccgcgccgccgccgccgccacagcccgcagacttcttgccgcgcttgccctgggccgggctgcccggctcgtcgccgcctccgacgcccccacccgcggctccgccgggccccgcgccgccgcccgcgctgcgcctgctgctgcgccgcttgcgtcccccgcgcttgccgctcggcggctgctgccggtctggctcttcctcgctgttgctcaggctgtcgtcggccggcgagactggcgagctggacacgtcctgcatcatctctcgagcggcgacgcgtggcctcgcgggcccggggcagaggagaagagcggggcgcctcagcccgccagcttcccccgcgcgcggcgccggcccgggcgatgcggcccgcggaggagagagcaggaggacggacgggagggacctccgcggggagggcgcgcgggggaggcggggagggaggcgggagggggaggggacggtgtggatggccccgaggtccaaaaagaaagcgcccaacggctggacgcacaccccgccaggcctcctggaaacggtgccggtgctgcagagcccgcgaggtgtctgggagttgggcgagagctgcagacttggaggctcttatacctccgtgcaggcggaaagtttgggggcagcagtgtcattggcctgacgtgaggaggagggacttttcgaagttttataggaaagtttccgctttccagtccccctcccccgtcccacctcccttcctcggggtctaacaattcgtcctcccaaaccattcaaaaacgacctggcccgggcggccggcccctccacccgcctcctagccgccctcccccttccctccccgtcgccttcctccggcgggcgcggggcgatttccttccccgccggagcgtgcgggcagcgcccccgaaccctagcgcagcccaggaagcggtcggaggagactgtcctggccgcggtggcagccccatccggagtggctgtgacagcagcaatggcaacagcttctacacagtgggtgatgtctcatctcgcccaagagccctctaggtccgtggggccgatttgggattgctggggctgggggggtggtgtggcgcggggtgggggggcatgccaagaaaagtgtcaaccgcggagcccacccaatggtcaggtagacgaaccccttggagttccaaaggccaaaccgcggcggcccagcccggaggtcctgggcgtttctgaagacgtggccgcgccgcgggggctgaggatttgcgtcccggcctgctctctcgcccttctgggccctcctttcccctctacaacgacccagtctgacgctccccaacatccaaaggactacgcctcggaaggtgctcgaaagaggcagaagttcactcttcggtggaaggaaacccagtccatgggaaaggcagcagagccagaggggggcagcgcagcgcctttgctgcggccctaacagctggcaatgccaacccaagggagagaccctgtggccatttcatccccacccccaaattaggctcc

SEQ ID NO: 28177 - DNA, 1157 bp, Homo sapiens
  chr7:21582471-21583628
  hyper
cgcactgggggctcagacccaccccggacacgcggcttctcggccgtgttcgggacctagagcccgagggcctctcccctcggccttggccttggcgtatactgggcggtggcgcggtgcgctcactccgcccccagcgggctggggcggggacaccgtcccccgggaaacgggacgcgctgcttgtcccaggccttcgcttcggcctgcgaggctacagctgtgcgcagtggcgcggctgctaagtagcagcaggtgggagactagggtctgcgctcgcggcgaccgcggaggagggtgggcgcctgcggaggtgtcctcgctcacttcggggggcccagagtctcgggtgaggagccagccggcctcgcgttccctcggacggttgcccaatggcagcccaggtggcagcccgggaggcgcgagacttcagagaagccccgacccttcgcctaacctcgggggccggcctggaggcagtgggcgctgtggagctcgaggaggaggaggagaacgaggaggaggcggcggccaggagagcgcggagtttcgcccaagacgcgcgggtgcgcttcctcggcggccgcctggcgatgatgctggggttcacggaggagaaatggagccagtatttggaaagcgaggacaaccggcaggttcttggggagtttctggaaagcaccagcccggcttgccttgtgtttagcttcgccgcctcggggcgccttgcggcttcccaggaggtaagaggcgacgggcaaggggacctgcccatccaacaaaactacccaggggagacagcccagtcgctcccctttggattcccgcggggcgctcactcgggcactttaacaaacttggcttgaagtccccatcctgaggcccgcaggactcctccccacgtgcacccactctgcagttcagcagctgcaggttagtttcctaagtcagcagtttgtatctgaccgagaatcccgcgttgagcctgttcgaccaggataacccaagaacaccagcgctttctttagctgcttgggtgttaggcgccaggtgggctttctgtgccaaaaaacttgcgtttcagttgctcttgggtcactctggagtcacatcctttaaaaaatggggtgtttggcagagcgcatgtaactcgtcac

SEQ ID NO: 28178 - DNA, 857 bp, Homo sapiens
  chr7:23052818-23053675
  binary
cgaggattcccgagtatgttaaaatgagcctcaggagaggaataactcatagaaagaaggggcaagggctcaagaagagatcttcagcgaaataaccaaggaaggaagcgtggctgctgtctgaacctctccgccctgcaggggaccaaagaccgactcgggccaacgctgctctccagggggcgagggcggggggtcgacagtgaccattgtggccaccagaccggacggacagtggcggcctcgccgaagtagagggcgcgagtgggagaggaggcagaggccagagcatccgccgcggcagggaggggacggggggctcccgccccaggcccacccggcagaggggcggccggtggggccgaggcggcggcacccgggtcacagcaggaggctggactgctcctcgccgggaaggaaagacccgagtcgcgcgcacaaagctgccgccctccaggcagcgggcaggctgcgcccaacttcggggcgagcagcgccggccgcagcccacccgcccgccagccgcccccagcgccccgcgccgcctcgcacccacccatggcgcctcgcgcgggagccgttacccccagtggagccgcggccccagggacaaagtcccggtcctgtcctcgccgccgcctcgccccggctcctccctgacaaaaaaaagttatccgttgccggacgccctgggggcccggcgtgggtctctcggctggactcaccagggcggctgccggagctccacctgcaggacctcgactcgtgaggctctcagcgacagcgacggaggctgctctgcttcctcccgagtagcagcaccacctgctccccttcttcctagcagaacgggtccc

SEQ ID NO: 28179 - DNA, 1260 bp, Homo sapiens
  chr7:24796336-24797596
  binary
cggggtgcagacggcaagcggctctggaaagggtcagaggtcctcaaatggagaccaaaggaagccacgcgggcagctcttgagagccattccagcgcatgccaggcacaccgagtggggcttggcctcctccccaagctaggagctctctagataccggagcaaagtggagggggacttttttccgtccagagagactgaactccgtatctgttccgcggtccgcctccctgcacacacgcccccgagccgggagagcctccgcagcacccagagaagagaccggaacacaaaggatgaacgaatggggagggggggtttggggggttgggagaacgaaaataccagctgcgcttccaacatccaaggaaggaagtggcagcggggacggggagaggatgggaaggggatgctgactgcgagttggggcgggacgcggtgatgggaggggaccgggccgggaatgcgggaggcgaggggagcgacgggacctgccgttccggcggccgggcagccaatcgattcgtctcccctaggaaggagcgaggggagggtggcccagagagaaagcgccgcgcggcctcggctgcccccggcccgggacacccaaacagaccaaagaggatccggagtggagcccggagcggatcccgcagcccgcgcccgccgcgcacttacccgcgcgcccgctgctgggtccccggcagccgcgccccctgcgctggcggagtcggaggagcctgcgctgggccggcggggggcgggcgcttggggagggcggagagagggcccgcccgccgggacctttgctcggtccgggcgccccagagccgcgggactggccgccggaggctgcgggaggggcccgggccagacctcccagaagccccagagagagccgcttcccctccttcgtgtgactctctgggagccgggttgctgacggcccagcgctcagccggagtccccgcgcgcttttcgggactcacccgggagatgtcggggcctctcgggaagagtgggctgcgcctgccttccgcggccgcctcgcctcttcgctgcgcgggaccgtggggtttgagagcggcgcctcctcgcggggccgaacccgccacccacagtggagtgtggactgacaccgcggcctcacggttcaaccaggaaagtccaaggcctgtccagcctgtgggagcccctaatgcccgtgcctggagtagtatctgggtgtgtggtgcgacagtgcccacacttaggcctgcc

SEQ ID NO: 28180 - DNA, 79 bp, Homo sapiens; identical to SEQ ID NO: 10771
  chr7:26198616-26198695
  hypo

SEQ ID NO: 28181 - DNA, 487 bp, Homo sapiens
  chr7:2727815-2728302
  binary
cgacgtcaccgggacctcccgatcctcccggcccaggccgagctgcccacgctgctgcccggggctcggtgcccggcgcggcctctgccggctccggcgggcgcgggactgcgaggtaggggggcgcgcggggaagactcgggggcgcagggaccgagagggacctccgtgccggggcgggtgggtaggggcagctccgggtccagcccggcccgcgcaccaagtcccgagggcgcccgggcggcggcggctacgggcgcgcggggaccgcggagacgcgaagggcgcacttggcgagggtttggtgcagcgccgcgccggggtccgcacagccccggcaggtcctgcagagggaaggccgggccagggaagggccacgcgccccctccccgccatcctctcccaggccagggcgacctgcgcgcttcccgatgggagcaaactggggacgggtcgggaatccagggccaagcgcccgaaagaaggc

SEQ ID NO: 28182 - DNA, 1980 bp, Homo sapiens
  chr7:28448716-28450696
  hyper
cgtgtcacacggcgctgggctctgcaagctgttgcttgcgcagtcgcccccgccgctgccgctcccgggcgggtgcaccagggtccgcgcgggcggggcggggtcggggcgggaccggggcggggcctgccccctcgacgcgccggccccgcccctcgctccgtccctccccagcggaccgcaatgatttagaagttcaggaatcccacgtgacgtcaccgggggggtgatgtaatgcactctaaatagaatgtattgtaatctttgctcagtccaacgtggtcccttcacccgggctccgctcttgccttctccacacttgtttggtaagttcctaaaaatacggctcggccacttctggggcttttgcatttagccacttttgttgcacttgccgcaggagccatctcgggagtgtacttgtttgcaggggttggttctcggcagcagccgcgaggttacttggtccagtgggcaggtcacagggcaaggagtagggaagatgcgatgcatttttttctggagggtgatctgtgtttgtaaacattttggcggaccagagggaagtccggccccgagtgctggtagactgtggaattcggctgtgtcctgaggccaccctagagaccccgcgccgcgtgagtgccggagcgctcggtggccgccgcgccgcgcgcctggagggatgctaacgtggagccggcgccgagtccgcccggcgtgcgtgcgtgtgtgggagcgcgcgagtcccctgacgcggggaccagttatgaatcgggggtgtgtgtttgcctccagagacctggcaaggtgcggagccctccagaagtgcggtcaagcggcagcggagacggcgagccaggaacctccccccgcgtccccagcttcccagcgtggcggcggaacccccggagaaagtttgcaaacttccagcgggcgcggcgaggacgccgggtcacctagggggcgggtgggcgcgcgcgcagggggctcgctctccccggtgcggagctgcagctgccacctctcccgccgggctgccggctgcagcgggtgggcgcgcgcccggggaggggaggtcgccctcggagggcgcttggctttcgctccaggcgctccgggctggagagcggcgaggctccgtccgctccagtccactcctccggccgcctcctgcctccgctgctttcttgctggcatcgttacctcttcccggccgctgccccaaatgacagctccggctcgagctttggcggcgcccaggcaattcccaagacctggcggcggagtctccccctgcggcagattctcggcagaatcacttgaacttttcacgaagttcttagaggggcaagatgcgaaggaaggaaccaaggagatgttttctctcagcagctgcatcccgcttcttctttgccatagatttatttttaaggggcgtctggtagataaagccctagaccttgtccacactctcacccccatccccaactttccctggaccggtgccgcccccacttgatgcttgctcaaggccggggactggagcgggctacttgtatatttcgttgtcagtctgcagaatgtgtttgatttttatttttccctccttctctgacatgtgtcaaggaataaagactggatacaggtccattacgtcattctgcaggccagtaagtgtttgattaacggcttgagctcctcaagggttcaggagcttagaatgctgacaaagcaactctgctttgcatccccctaccctccccacaacacactcgtgcaatcgccggctccctgggcatctttattgccctctcttcccagcccctccctctccaccactcccccgtctacaccgttatcactctagccccgcccccgcctttttacagctttccctggggcgagcacggtccctggagtgtgggtaaaagcttctggggtctgaggggaccactgtacctgatcagcgcgcaatcc

SEQ ID NO: 28183 - DNA, 1047 bp, Homo sapiens; identical to SEQ ID NO: 10774
  chr7:299930-300977
  hypo

SEQ ID NO: 28184 - DNA, 955 bp, Homo sapiens; identical to SEQ ID NO: 22944
  chr7:3082731-3083686
  binary

SEQ ID NO: 28185 - DNA, 951 bp, Homo sapiens
  chr7:31091717-31092668
  binary
cgcccccgacccccgccgctgggatttcccgccgcagctcctgctccagtctgtgctgcgggtggggtcgggttgagcagcccggcgccccccaccgcgccccccaccgcaccgccctcgatctaaccccgcccccgggcgctcattggcctgcagcaccccctccccagcctgtgaagtgagcagggggaggcggtggtcggtcgcctccctccagcgcccagcctggcttcgcggcggaggcggcgcctctcccgcaggacggagccaagctggactgccgcgccgcgcggggcgggcaaagggggcgctgcgctcggccccgggcagggagtgacggcggcggcggcggctccgggcgagcgtggtccccgcgtgcgcacacgcacacgccgccgcgcagggacacacggaccccggccgccagccggccacacaggcgcggagacccggctcggcgcgcgctcctcggcgcacacgctccccatccccgcgccgcgcgggccgcggacttgcaggctgcgcgtcctttgcggagtctgccccggccccacggacaggccccgcagtgagcaggtaagggtcgccccgccgcggctgcccctccacgcctcggccgtcttctccccctccagaaccttcgcccagccgggacctcggatcccctcctctggcttggcggtctccgccagccgcgacctccaccgacggagagcgggcgagggccggcgccaggcaagcctcccagatctgaaatgaagccccctcccgccgctgcgcccttcctgcgcgtcaggctgacaccccccaacccaagtgtctggcgctgcgctcggggcggccgatcgccgcagactgccggggtgggggtcgacctagctatctcacgcccctcctgatgcggagaagggagaccaggggggcaggcaagccatgcggccggagggaccc

SEQ ID NO: 28186 - DNA, 118 bp, Homo sapiens; identical to SEQ ID NO: 10778
  chr7:325309-325427
  hypo

SEQ ID NO: 28187 - DNA, 1414 bp, Homo sapiens
  chr7:3340861-3342275
  binary
cgaccgcgacgtgcgggcgggcgcactttcttctcagcgccgggcgggggcggcggcggcggcggctcctccgcgcccggcggacccctcggagctagcgcggcgggctcgggactgcgtgagcgccggacgcgaatttcccccgttgacaacttcttctcgcccggctcgtccccggcccgcgccgcgcccctcacgcggggacccaggacgccgcccctcagcgctgggcggccgctcacctcgggccggggggcgccgcgcctcccgcggagtggccgcgcccgctcggagccgtcccgcctgtcctgcccgcccgtccgtccggcgcggcgctcggggtggcggctgctcggcatggcccggggcgcccggccctcggcggccggtggcggcggcggcggcgcggagccccctgagcgcgcgggccccgggcggccgcggggatccccgcccggccgcgcccgcccctcgctggcgccgcgccccggcccggagccctcgcgaccccgggcggcgcccgagacctccggcggggacacggcgggcgcggggcggtgcggcgggcggcgggcggcaaagttggggccgggccgccgcggctggtgggcgctgctggcgctgcagctgcacttgctccgggcgctggcgcaaggtaggtgcgcgcggggtcgcgggccgggggcgtcgcctcggggcgcggaggcgcgaacttgagcagcgagagtgtgtccggggtccccccgcttcccggcccgggtcgggatgcgccttgctgggggctctagggagcccaggggctcctccacgccagactcggaggagagggaaacggagccccgtagagcctgcaccccgtctgctactttgcgttttattttttttataccgcagtagcacaaacaaaaatttttaagttgaggacccatttctcagctccttaaaaggatgcccgagtccccttcccattgcatggatgaaaaaggggctggtctgtacctgagtcttcgcaccgcagggtctggtttccggtgagtgacatccagaagacttggaaatatcaagtgccagtcgctgtgaaaagccttttccagcccctccccagggcctcgtcctctccccagcccccgcctgctcctgactcccccaagtcccaaagcccgaccccaagtgggtgctgcgcggccggtggagcaaaactttcagtgcccacagcttttgcacttggctttgtttttctccctctattggcttctgtttagaatacagtggtgagctctgaaatagggaaagaggatctgctgaatggaaatgaccttttgaaacgagagatgggatctcttgtgaaacgagctttccttcccaaatctgggcttccctccaccccctccccgcccccgacaaaacccgtaac

SEQ ID NO: 28188 - DNA, 360 bp, Homo sapiens
  chr7:35839776-35840136
  hyper
cgacattcatcgctacagtagaaactcacacaatcgcagccctttattagtattttgttacccagtagttcctgtgtccattcatttcctcaactggagtgtgagctccaagaggaccgaaccgggcaccgacaaggtgagccaatatgaatgtggcgagtccgcaatgggggctacagcggccgacctctggggctgtgccaggccactagagtgtgatggcgcgagggaagggtcggggaaacagggcctaacctcacttttcaccccgaaagtcaagatagccacggaaacagggatgaatggggagcacagacacctgcctcgaagtgtctcttcactttcactcacaaagccgtc

SEQ ID NO: 28189 - DNA, 1809 bp, Homo sapiens; identical to SEQ ID NO: 22945
  chr7:37487365-37489174
  binary

SEQ ID NO: 28190 - DNA, 618 bp, Homo sapiens
  chr7:44143892-44144510
  hyper
cgggggtggggagccggctccggaagccccggcgcccccgccccgggccccgccagcgctttggagacggctatccgcgcgggagtgcgccacgcggggccggagcgcctattagccgccaggacctcggagcgccccgaccacccctgagcccctctggcttcggagccccccagcaccccttcccgggtcccctcgcccaccctaatccactctccctccctttcccggattccctcgctcaccccatcctctctcccgccccttcctggattccctcacccgtctcgatcccctctccgccctttcccagagacccagagcccctgaccccccgcgccctccccggagccccccgcgcgtgccgcggccatggcggccgtgcgcggggcgcccctgctcagctgcctcctggcgttgctggccctgtgccctggagggcgcccgcagacggtgctgaccgacgacgagatcgaggagttcctcgagggcttcctgtcagagctagaacctgagccccgggaggacgacgtggaggccccgccgcctcccgagcccaccccgcgggtccgaaaagcccaggcggggggcaagccagggaagcggccagggacggcc

SEQ ID NO: 28191 - DNA, 1180 bp, Homo sapiens
  chr7:44364447-44365627
  binary
cgcggatggggccacgcgcaggagcaggcgcaagcaggtcccgccacccccgccgcctgccgctcgggtgggggtggggacagcgcacccgcgtcggggacgaccctctggggccgcagccgacccctcccggcgctccaggcccgggggccacccccgcgcgcccctcctctctgacctccccgccgccaaatgcgtcacgtctgccgggcgctccggggacacctgctgccgcccccgccgcgccaagtcgcgagcccggagccccggcccggcagccgcgctgggcagagctgggcagggccgcgcgcgctgaggtcaggcagccaggcccggggccgggggctcgcgggtcggggccgcgcggggccgtgcgcttgggcccggagcccagagaagccggcggcgcgcgggcccgcagtgcgcctggagccggcggcgcggagggtcccggaggtcccggccctctggggtccccggcccagcccgcgcgcgccgctgctcttacttgccaatatcctcgtagagctggtactcgtcggtgaagcgggtgcaggtcaccgtggtggccatggcggcggcggacgggctcggcgtgcgctcggctgcgctcgggcggcggcgactccggctcccgctcgcgggcacggcggcgacacgggcgcgggcgcgggagacacctcggctcgcggcgccaggcgggggccgggctgggctgcgccgggcggcgagcgcacgcgagatctgctcgctccgtcctcgccaggagcgcgccgcacacctacgcgcggggaggcgcgggcgccgctgtcaccgccgccgccgccgcgcccgccccgcccgccgccccctgcacgcgccttccccgcgccctgcacacgctgctcctgcacccgcacccgcagggcaccggcgccctgcatctgcacacgcgccctgcacacacacccttgccccgcacccgcaacgcacctgcacctgcacctgcactcacacgcgcgcccgcccccgcccgcccccgcaccccacacacacacccgcgccctgtactgacgccttcatcctctacccgcaccacgcccgcacctcgcgcacgcaggccacttgctgctgccgacccctcgctctcacataacacagaagagtgcacataatgaacgcagcctcctctctctctctc

SEQ ID NO: 28192 - DNA, 685 bp, Homo sapiens
  chr7:44924093-44924778
  binary
cgttcctggatttctttcatctcatccgcataccggcaaaaggcgcctccgaacttgccccaggctttgaagggtacggtgatggcattgcggtaggacggcttcacctcgctcactcgcagaaacaccccgtatttgttgcagcccacatcgaagaagaagcgcttggagtccacggtgatggaggtgccctccgggagctctccatacaggccgccccctgggcccccggcgccgcctcccgggccgcctgccagctcgtcgtcctcgcctccgtagtcgtctatgagcttcgccagcgcgtcgcggaactcgatgaggccctgcgcaggcagcgcgatggtctggccgctctgcaagccgcccggcccggggcccgcgccgaagccgccaccgccgcggttgaccgtttggcggatgcgcaggaagcggccgcgctggttctccttgaggtccaggtagtacttgcggttctcacgcaccaagaattcgctcttgagcgcgcgccgcggcccgccgccctcctcggcgccagccgccagctgctcggggctgctagggcccagctgcgcgtagtgttctatgaagtcgcccagcgagtcgcggaactcggcggccaccgccatggacagcgtgaggcggctcttggaaccgcccgcgcccacctcggcgatcttgaggaagc

SEQ ID NO: 28193 - DNA, 883 bp, Homo sapiens
  chr7:45613422-45614305
  binary
cgcccacagggtctccgcgaccctagagcttagggaagaattgccgaggggcggggggtccctcatgcgcatggaagggacgtacgccccaggcctccaccttcctcctgaccccggggattcttggacgtcgattctccgtctcgtaggggcgagggccctgggttcgcagtcagacgcgggcccctctcaaatctagtggcctggttttattgagtgggggaaggcacatattttccaagattaactgccccgcaacagggaatttcgcaggatttcagtattttcgactccccaggtgacgccaagagggtgggttccactgtgcacggtggggaaactgaggctcggaggggacaaggaaggtactcgaggtcacgcggctcctccggcgggcgggaacgcaggacgcggagttggggcgcgggctgtgcgcgcccaggttcgcggctcccggggctcggctgtcgcagcgcggtcgccgccgaggaccacggtcggggcgcgggcgggctccagtgcgcaggcgcggcgggcgggaggggacgcgctccgggcgcgcgcgcggggcagccggcgccccaactccgcccgccccgcgccccgcgccccggcgcctcgccgcccgccgcccgcccgccccggcgccgccgcccgcgccccggcgccccgggccggcgaggggcgcgcccgcggccgcggccgctgcatggcgctgagatggcgggggcgccgcgcggcggaggcggcggcggaggcggcgcgggcgagcccgggggcgccgagcgggcggccgggacaagccgccggcgcgggctccgggcgtgcgacgaggagttcgcttgcccagagctggaggcgctgttccgcggctacacgctgc

SEQ ID NO: 28194 - DNA, 997 bp, Homo sapiens
  chr7:49813979-49814976
  binary
cggggagtgaggcggagagaggctggattgccggtgtcctgcggcgtctcgggctctcccagcccctttgggcggcagaaactttggaatccagaaaggctggccgggatccagcgagtaggagggtctcgcgcccactctgcgccctggggccccagcctcccgcactgcacaccttggtgctgcccgggcgcttctgctccgcagccaggacactacaagactgagcgctgcggccggcgacctggctcccaaggctcggaggggcgggccggcagaggagctgaagccccgggaatccccgacccggccctctggcaaggggccgagggcatcctttcatgcagcggggcttagagagcggggagggggcgtctgctcccgagacgggagtcttttaagaagttgttagaaatgaatcgtggagtcctaggagaagctttgtttaacctccccgcattttcccagcacaaccccctaaagcaaatgaggaagagtttccctcttatcttcctgtacattcgtccgtctctaactccactgctgaattctccatttaataaccttcgggaaatgtggccaggacctagggagggacaccctgggtgcctgaattacgtggttcaaggcagagctttgcaggggggcgcgggcctggctcgctgcgttccctgggctccgcaagccgcccttggccatctccaacactaatcacgactacatcagaaacacgccggccggtgtcgttcttggatttcgcttccaatgtatcgctccacagtttgtgatgtctaagaaccccggccgtgcaccgacgctgggcatgctgcccccgcccccgtcgcccagctcgttaatctagagctatgccggagcccgggtgggggccgcggcgggccggggcgcgcgcgggccgcggggctcagttgtgctgctgttctctccgcagggacggcggctcccggctggcggcggcgcgcccccgggctgtgaatgc

SEQ ID NO: 28195 - DNA, 1629 bp, Homo sapiens; identical to SEQ ID NO: 24645
  chr7:50343211-50344840
  binary

SEQ ID NO: 28196 - DNA, 111 bp, Homo sapiens
  chr7:5441319-5441430
  hypo
cgtgggccacatttggctagactgctcaccccagcattactaggtatgctacgagttattttttattcctagtcctatgctgcacatcggaggtactcaagtagtatttac

SEQ ID NO: 28197 - DNA, 777 bp, Homo sapiens
  chr7:55145822-55146599
  hypo
cgtgccgtgttcctgtcctggggtatttgggtgtgtggcgtgtggggaggggagaaggagcaaggcggcagggaggggatgaggaccaccctgtccatgggacaggccctgggccccgcacacaccccaagccccgcgtcccgcgtcctcactgtcctgggacaccccccaccccaccccaccgccacagcccagagcggtgccaggaagccgcctcgacgcagccgtatcttgaggctccagccccatccccagggtaccacgccacgtagagacactatttttcacttcgtgtttgtcactcctaaagcatgtgtgctagctgcaccaaccctgggatgcctcggtgcatagggtttatgtgcgtcctcctccttccctctgagctggtcccccgtggggaactgctgcccagactgacctgcgtccttccgcacgtgcaggaaaatgtccacgtgcacttgtcagggtgggggccacacgggcaccaccactgatcatctgtgggatcgagttactgcccatgcagatcccacgtgcagggcccagtcgctttggtgagagagtggacgctgtggtgactccacggtctgtggctgtgctcaggaggacagagaggggacatcctgagatggtttgggcagcccgcggatcctgtgcatgtccccagagcgtccactttctccatggagcagtggagtggcgttgctgagacagaaagttcaggttctccactccccatgcagcccccactcccctgtctccggccaggcacgc

SEQ ID NO: 28198 - DNA, 729 bp, Homo sapiens; identical to SEQ ID NO: 27252
  chr7:64974264-64974993
  binary

SEQ ID NO: 28199 - DNA, 170 bp, Homo sapiens; identical to SEQ ID NO: 24650
  chr7:6524924-6525094
  hypo

SEQ ID NO: 28200 - DNA, 999 bp, Homo sapiens
  chr7:69062533-69063532
  binary
cgtccctaggtcccccgctggaagacgaggcgggaatcccaggggtcatccgggcgcggggtcgctcgtccacgcactgtggtgccacgtggaggaaaagtttccaactctgccagttggtgctcccactgcgcccaggcggagcaaaggcccgcgctttggcacccgctccccgttctgtctcctccagtcgcgccccctcccagggacgccccccttgtaccccttctctgaattcccttctctcctcgcagcgcaggtagccaagggaaaacacccttgggggctggtggggcttcccgagaaggcggcctcgggccggccaggggtagaggatccagggacaagtgtcccgaggaggatgtggggggcgcgcgcgcgaagtggcctgggagcaggggcccacacgcgtccccgctgcgacaggcgggatcctccggcggcttccacgccctggcgcgccaactctgcccggccgcggccgaccccacgcgggcgccccctccacgcccccgcccccgcccccctcacagctccccaccgcccccagtgcgcaggcccggccgccccagcgcgcatgccctgggctcgcgagcgcggccagcccccagccttttgctttctacacactctacaactggggagggggcgggggaggagggagcccagccgtccacgtgatcccgccggccggggccgcgggggcgggagcgcgcgccgagagaggcgcggggagggcgggtgcgcgggagcgcgcgcactcgagcgagcgagcgaaagcacgaacgagcgagcgagcgagcgagcgagcgggcgggcgcggggttgggctgaggcgggcggcggcggcggcggcggcggtgggctggccgcggagggggaggagcgggagctgcgcgaggcaggcgggcgggcggaggatggggcagtgcccgggctcccgctgcagccgcccggggacacgccgtgcaccctccggctcggggctttctcggcggc

SEQ ID NO: 28201 - DNA, 1308 bp, Homo sapiens
  chr7:69064053-69065361
  binary
cgaggcgtgtgtgagaggcggcgggggtgttttcctgcgcgaggggcgggtgaagttcattgcccccacttttcccgcgacctttttcggacccgattttggatcgagttgaggggggcgcgggcgttttcggggggcggggggcgcggcggagaatggccgcggggagggctccccggagcctcccagtctcttgatcaaagcattccgctattctgatttattgcttgcttggtgagttatttttttttcctctaaaggagacctgtgtgttcagccattactttgctcggcgctgctcccaggcatctccgaccctcggtgctgtggggagccccacacttgggctcctcgcctctcgccctcgctccccgtccctcctcccctctctccgccccttcccccttttctttctcctctctttcttcccctctctcccttctttcggccgccgtctcccccgcgccctcctcggggcggagggaagccgtgaagggggagggagggctcggtgtcaatttttttttgtgtggctgcggccgtagcctgtggcgggcaagcggggagaccccggcgcagcagaaccatggatggcccgacgcggggccatggactccgcaaaaagcggcggtcgcggtcgcagcgagaccgggagaggcgctcccggggcgggctgggggccggcgcggccggcggcggcggggctggccggacccgggcgctctcactcgcctcgtcgtcgggctccgacaaggaagacaatgggaagcccccgtcctccgccccgtcccggcccagacccccgcggaggaagcggagagagtccacctcggcagaagaggacatcattgatggatttgccatgaccagctttgtcacttttgaagcgctggaggtaagggggaccccccttcccccgggttccctttatgcacgaccccactcggctgcgcccggctctcctgcctccctcgccgcgctccgggctgtctgtctgtctgtctgtctgtctgtctgtctaggctgaggtcttattgttggtggggggagctgggggcgcgggcagacaggcagcaggagggagtcgcaaagccgtgcctggtctcgtttcctcgctcgcctttcccctgcgccccctccctgcaccccctccacagcagatgggcagaaagaaaggggttcgggcatcacaacaatgcgccccctctccacagagagctctgcccccactccttcctcctctccctccccaatcatggcttcttggctggtggaagtctctttgctgggtttggggcgcctgtggac

SEQ ID NO: 28202 - DNA, 1482 bp, Homo sapiens
  chr7:71800958-71802440
  binary
cgagtaaacccagactgtccggggaagacggatcccacccccacctgggcgccagacccatccagctgcttggagctcagagactaggtcccagccggactgcagaggcctctctggttaccccttgcaccctggcgcccccggactcggggtgggtggcggcgaggagcgtgcgcccagaaaggcaagcagtcagcgctaggggccggaggtggagagaaccctgcctcccgcctcccccgatcgccatgactccggcttcgcgaagagacctggttgccgccgggcgctcccacctgggctgcggtgcggctccgagtcccctgccctccctccccatcgcccgggcgcctgcgggcgggggcgcgcagcctggtggccactggcgcctgggggctagaagagcggctcccagcctccagcccgcacggtgccgggacagccgagtccgccgcggcccttccctagccccacgtccccaggcaggcggccaggagccagctccacggaaggcaaggtggccggcgcggcccccagcccgcggggtgggtgccccagtgtcggagccaacaggtacgggaggcgctgtctgccaaccatctgcccactctgagcaccagggcccgcgacagcccgggggtttggacaccctagagagaagcgaggaccgagggaagaagaaaagagagcgcgcgcgcgggtaagctagggagccggcggcggcactcacctcttgctgggccggggctccgcagcccggcagccgaggcgcctccgcacagcgcggggggcttcctccgaggcccgcagggagggggcggtgcggaatggatgcgccgagcgggcagcgctcagcctctcgctcacacccccagcaggcagccgcgtccccgtgccggcatcctcgctgccgccggctccctcggcgcccccgggccgctccccacgcgcgcgccgggacctgcacgagccccctcgtcgactcggagcgcgatctgggcgcgtgcctccctgtccttgtcctctgctctcgtctggggacgtgtgccccgcaccccctgcaccgcgcgctcctctacccctcccgctcccgctggccgcgcgggttcagcccatgtgcgcggctgcctcgctgcgccccggagcccagtggccgaggccccgctggagttgcgcgccctagaaactccatgcagctccggcctcctccccagctcctccccagcggatcccccagggccttgccgccgacagcaccacactcctcgctctgccggcgcccgcgttcaggagccgggcttctgggctcgccttggccgcctgcgccccagctcctccgagggtcggggagcccccaccccccaacctccgcctctccaatggctccctcggtttccaagcagcgcaacctgaggaacgcctcggcgcgcgcgcactcacactcgcgcgcacacacacacacacacacgcatgcacatgcac

SEQ ID NO: 28203 - DNA, 945 bp, Homo sapiens
  chr7:834245-835190
  hypo
cgggtccaggggatgtctctgagcccccaatcctttacggggccttttcctggggtccctgtgggctccatcccgggatgcaggacagagatgtgggatgcggaagggttccccgcagggatccaggtccgggggcaggaggagcccagagggtggcaccatcacgcaaaggcctccagaggcgtggcccgggacaagcacagcgccagccgcctgcgctgccagggcagggtccacacccacagactgtaacctggacccgggcagggcggggtccacacccacagactgtaacctggacccaggtggggtccacacccgcggactgtaacctggacctgggcagggcagggtccacacccgcggactgtaacctggacccgggcagggcggggtccacacccttggactgtaacctggacccgggcagggcggggtccgcacccgcggactgtaacctggacccgggcagggcggggtccgcacccgcggactctaacctggacccaggcagggcagggtccatccacacccacagaatctaacctggactggggcagggcctaaacccagggactctaacctggacccgggcaggggaagggtccacacccgcagactctaacctggaccagagcctgggagggtccacacccgcagaatctaacctggacctgggcagggcagggtccacacccacagagtctgtctaatctgcagaggacaagggtggggtctcccacagagccagcctgaggggtgggtgcacctgaggggtgggcgcacctgaggggtgggctcgtcgccctctgcctcatgctggcaggacccgagaggcctgggagtgctgggaactgagaaacagtcatcaccaattaaaagtcccgctgccttttattaacaccatgcgtcacccttctgtacaatatcagtgagaaaacactc

SEQ ID NO: 28204 - DNA, 926 bp, Homo sapiens; identical to SEQ ID NO: 25902
  chr7:8483083-8484009
  binary

SEQ ID NO: 28205 - DNA, 1282 bp, Homo sapiens
  chr7:90225450-90226732
  binary
cggttccgcgccgcggctccttctgcgctgcgcccgcaactctgggctgagaacttctcccgccggcccactcgccctcgccccgcgcactcggcgccaggcgactcccgcaccttgtacccggcccgccccgcctcctccttcggccgcaccactccccctgccggccgcgcttctctccgttacaaaggagggaaaatgagccgggcggcggcggcgcggcgcggggccaccacggcggcggcgagcgcggccgcccccggcaccacgtaaaccgcccccgcccgcccagctgcggcccaggccggagcggagcctgccgtcctccgcctgcctgctgctcgcctccctagacctgcgcgtcgcttcccggcccgccgaggaggtggtggaggaggaggcgccgctttccccgcggcgcgcgccctcgccgttgtctgagctgtgcctggaccagtttggggaagttgtcggggctccgcgtcgcccagatgtgtgacctcattgagccgcagccggccgagaagatcggcaagatgaagaagttgcggagaactttgtcggagagtttcagtcgcattggtgagtagcgcgctgcccccggcccccccagcgcccgctcccctcggcctgcgcccccgccgcgttcctggcaccagccatgcagctgccagcggggctggcgtggggtgcgttgtaggcggggatcgagggcacagtgctagggacccgggggagggcaaggacgtaaaggaaagagacccctcttcctcaggatctgggggttcatttgtagattctctcaagcctacaatatgggttctcccctcctccgccactagtgctcgccctttcgcgcgcgtgggggacgggcgaggggacccctcggcccccaccgcgcaaggggctgcgcggctgcttgggccacttgttattttttgcgcacaggcttggatattgggcgtttagtcagtaatttagctttggaaattggtgaaacgttagactgtgccctggtattgtttaacgtatccaacctaaagggaagtgggacagttaccttgggacctattgttcggtacttcgggtcctggaaagcgagatttgggtgttcagtctcgaggtctctgaatcttcccgctgctggagagaaatgcgcgctgtggagttgtctggacatttaggaatgtctctcgaacttgttccatttaatagagctcaggggctgttgtctttaaaccaaacaacaaaccaactgaccaacagtgtttaggacagtgac

SEQ ID NO: 28206 - DNA, 1233 bp, Homo sapiens
  chr7:93519219-93520452
  hyper
cgcacaggcactgaattatgatcaatgtcagttgggagacaggaaatgtgttagtggttgtaaatttgtgattacttttaagaaactgaaaaccatgaggtttgcttaacacttgagaaaacccaggctaaaacttcctgtagaaagcgagacgtgggaaactggcgaagctgctaccagccgccggcgcaaggagcgcgagagtcctgggtgcgcgcagggcacttactttctatcctccagcaagcatcgtcgcaagcctcccaggtgtagaaattgttggcgttgccctcgcagcccccgtacaggaactggcggcagctctgcgtgtacctgtcgtagtagtaacggagaagtagggcccggcagggtccgtagtctaggggcaggagacagatctccgcgttatttcctgaagaaggggcagaaggagagcaaaagagagggaaagtggtcaggcgtagctcctaggaggaaagaacatcccggggagttctgtccccttccgagcggaggggcctctgcagagaaagtgcaaacttgggagcgagtcccccctgccagcggagcgcgcggcagggacctggagaaagcgaggcttggagggcgcctacacggggccccatggcccgctgcgccctctccgccggttggggagagaagctcctggagcggccagatacctgttggctcctgagcagcatcgcccagtgcagcctccgtcaggaaaagcagcagaatcgacagccccagggggcgagcggggtccatggtgcagggggtcgggcggcccgctgggcaaggcgtccgagaaagcgcctggcgggaggaggtgcgcggctttctgctccaggcggcccgggtgcccgctttatgcggggcgagcgtccggccgacccccgccggggcggagcctgaggggtggctgattcatgcacggggactgtcaccccgccgcccccgcgctgcaaactgtgtaagagggagaggaattccccgccaagttgaaaagttgaacctgcctcccaaactttctcctgtagtccagacggggacgccctgagggagcgtttgtgtcagtaatgggaaatctgcaagctagacggaaatgacctgctagtgattgcgctgtaaagaagccggaatccacctcttgaaggcatgaagttcaggtatttgaaaggctggtggagagaaagtgcggagttcttgggtcagagcggagcgggattc

SEQ ID NO: 28207 - DNA, 708 bp, Homo sapiens
  chr7:965802-966510
  hypo
cgtccgctcccgccctgaggagccagggcaggccccgaaacaacagccgcccctcccgttcccctcccagaccgccaggagcacctgggagggcccctcagatccacccgagacccccaaggcctcagcgaacctgggtgggctgtagctactgatgcacaatgaccttcccagccccaccccagcgccccccgccccagaaccaaagcccggtggtggccagcagacacaggcggcacctcggggtctgggggacgcagctgcggctggcttctccccgaccctgtgggcggcacccaactccccaccctgccgggtcctcccggggccatctcggagccacccagcacttgaccatggccctgacaaggcccctttgtactcactggcagtcggagggcgtgggccggtagtagaaggagggtactttggactcaaacctggctctcgcggcgtcgttcccgtgggaggccatgaactgcaagagaggaggggccgggtcagaggcctggggtcccaggggcagcctaggaggtgccagctgcccttggggccgtcaccacagtgacccgcagacccaaggctctgagggctccaccagcaccaggacgggaacgccacctcctcctgccccagggacaccatttctgagtgatcgaccctcccctgggacagggaaggagccagcgtccctaacgacggggtccc

SEQ ID NO: 28208 - DNA, 202 bp, Homo sapiens; identical to SEQ ID NO: 10797
  chr7:98639739-98639941
  hypo

SEQ ID NO: 28209 - DNA, 1387 bp, Homo sapiens; identical to SEQ ID NO: 25905
  chr7:99155672-99157059
  binary

SEQ ID NO: 28210 - DNA, 96 bp, Homo sapiens
  chr8:101717065-101717161
  hypo
cgatgtaagtgttctgtacaattaagtccccataaaaagccacgtaataactgtgtaagaggcaacttggtaaataaatttaaatcaccttagaac

SEQ ID NO: 28211 - DNA, 89 bp, Homo sapiens; identical to SEQ ID NO: 10802
  chr8:103315038-103315127
  hypo

SEQ ID NO: 28212 - DNA, 1427 bp, Homo sapiens
  chr8:104512485-104513912
  binary
cgcgcgggagccctgtgatgcgtcagccggcgggacggatgagttgcttctccgggaaaccgtcctcgcttcctcacgaccctctcggctcccgcctgggtgcccctcgggccggcagtactccgcctccgggcgctcgaagcgagttccccgggggcttgttcgcaggcaccccttcccctccgaggcggcgcgcgcgctcccggccctgaccgcggccggacacactcgcgccccggtccgcctgtcgccctcccgcctgctccctccagtcaccccacccttagctgtccccgccaccttactccaccaccctcccccgcctctccgcgcactccgcgtcccggcctccagttcccctttcccttgaaccgctcacttcacagcccttcgcccccgggaagaagaaacatttcccgaagcgcactcctcagccctccttccccacgcgctcgccctcccctccccctgcttttcttgggggaggggggctgtcgccttggattgaaggccattgatttgtatgtatttgtcccagcgctggaggctgccccagccgccgcgccggtgccgccgctgccagtggagttgcctccccgcttccctagggtggttcggctccaccaaacatgtcggctcctgtcgggccccggggccgcctggctcccatcccggcggcctctcagccgcctctgcagcccgagatgcctgacctcagccacctcacggaggaggagaggaaaatcatcctggccgtcatggataggcagaagaaagaagaggagaaggagcagtccgtgctcaagtaaggacctggctccatattcccgcctctctccctgccctccgccccctcgcccactgccctgcggccgcctgcgcgccccagttcgccgccctccctcccgctggcggcgcccaggccacgagggctgcggccagcgccggccgcccgggctgttttaggggtgtctgagagcaggggtgtgtgtcggggagggagggcgccaaggccggctgaggtgagggtggcgagccttaggcggtgtgattttccttggcgcctttccggatttcctcgctggtcatcttggctccggggccccagcgggactggggctgaacccaggctctgtgcgtaccctctcctttcccgccgcgctgaggcagtgactggggcacagaatccaatatggccgtgcacaggtgctccctggacggacccgggcgaaggcgcgctggcaggggatgcggacgccaccctggtcccacgcctccgcggggcggctctaccagcaacgcgggacagagcagggctgcccacagtggctgcgagcagcgggcggcggcgcgggctaggggcctaagctctgtcgcggtcgggtgggtgtgcgtccgccgccatcttccagcccctccccctcggc

SEQ ID NO: 28213 - DNA, 97 bp, Homo sapiens
  chr8:110406036-110406133
  hypo
cggtcagcggaagatcccagcctttataaagggtaatccttttgtatgcttttttatgtcaatataatttcttaaaatcaactgtagggccgggcgc

SEQ ID NO: 28214 - DNA, 843 bp, Homo sapiens
  chr8:11204845-11205688
  binary
cgtcacttgccagggagccgctaaacagcaagaccgcgcgctctgcggctccagagtgcggatttcggtcgcgtgcggctctgaccgcgtcgccccatccctggcggggccacgcacggacgccatggctggcgccgcggagccgggcgatgcgcgcggactctcccggggccctgactgtccctgagtcctccctgcggggggcgtgcgcggcccgccccccgcggcgccacgcggcccctcctcggccggggattggtgcgccgggcggggcggggcggggcgggataaaggcgcggggtctggctgcgcggggtctgcgggcagctccaactctgggttcgtagtttgcgctgggtgcgcaggaaggtcagtgtgggggtcgcccgacatttcccccccgcggaggtgggagccgagccacatcttggagtggggactggccgcggagcgggttgcccagggccggccgaggtcggggcgagccctgcgcggcgctggagactctgcattcccgggcgcgcgcagggtccccggccgtggtcgcagagtcaggaggggcggctccggagcccggcgcggggagggcccaggcgcagtcggggttggcagggcgcgacactcgctcccctccacttttgaaagggcttcccacgccgagaagaggggcgggcatggccggcccggcgaaaccggtttgtacagactttgggaagccatcgcctgcggagggtgggaccccacagcttgtccacctgcccaggctgagacctcgtgtcctagtcctggatgccccacgggtttctcgtcccgggcagcggcgcacgggaggagaagactccc

SEQ ID NO: 28215 - DNA, 875 bp, Homo sapiens
  chr8:11561282-11562157
  hyper
cgggcaccccgggtgacccagtgccccacacaagatcgagagttgagcccaagaggtcaccttcttctctactggccccgcccctcgcccgccgctgcgggatgaggaccacaggaagggggggcggggagggagaaagggaactcattaataaagctgaccctgggcaccacagcgaacccaatcgacctccggctgggttgcgggtgattccccgctccctggcggtagcacttgggcattttccgcggagaccccagagcctggactttgcctgctgggggagctttccgcacagtcccgcagcctgcgcccagcggaggtgtagccggggccgcgcacccccgccccgcccttgcacgtgactcccacaggccagtcagcgccctagggccgagttgctgggccggggacccgagccgcgagctggggacttggaggcggccggcgcaggggccgcgagaggcttcgtcgccgctgcagctccgggggctcccaggggagcgtgcgcggaacctccaggcccagcaggtagggcttttttcttccctttctttgctccttcccgcggtcccccaaactcggagcttctccgcctttgcttgtctggaggtagagaggtagctagtgggaggaaaagagacgtgcgctactcacttcaccgaaattgcccaacccctgctctgcttttgactttgccttagcaacttctttaagtcaaagtaagacttgggggcaaaacagagaaatattggaagcgcctttggattctttccgtgtgaacttgaacgctttcaatccctgtccccgtgtgcacattctccaacccttgtttgcatatcgcaggccggggcctgggtggtgatggtggccgc

SEQ ID NO: 28216 - DNA, 624 bp, Homo sapiens; identical to SEQ ID NO: 23376
  chr8:117950334-117950958
  hyper

SEQ ID NO: 28217 - DNA, 1418 bp, Homo sapiens
  chr8:132051918-132053336
  binary
cggtgaagaagcccagcaggatgcccttgagcgggtccatgggggccgaggccaggctcaagtgtaggaccaagagagtgagtttggtcagcacgtccagcacgttcatcaccacttccgatttgcgcctttggcccaagaaatagcgctggtagaggcgttccaaatcccgagatttgaaggagttgcgcagggtggggaaaatgacccctcggtagctatagcccccattaagaaagaaatccgagttgctaggggcacagtcaaggtgcaggaagcccaggtcgcccccgcctccgctgccgctggcactgccgctcccgctgcgttccgggaagactttggtgccgcaggtgctgtgcgctcgctctcccgggcccagcgagtagaggggcagcgccgagtcgcctgacagctgcggcgcgtggtggttggggccgccgcccgcagggtccgaggctttgcccgagcctccactcccgctgccgctgcctccccggtgcccgtgaatgaagcgctgctccgtgatgtgtcgcaccgccgtctgccacagcagccgctgcggccgggaggcgctcctgccgtcgccggccgggggcgtcgggtggatggtgtagagttcctcgctgcctgtaaggcagcgcacatcggagagctccatggctctgggccgcagggaaggaggcccagaaccttggggaggcagccggaggaggggttcctaaagactcaaaggcggcctggtaggagcttggcaaggatcctttttatcctaggctgccccgttgcaggagccctgcgctagggctccctgtaggtcgggtcatactgtgcccaggggcaaagggcacctggaagatcgcggcggacctcggcgtccttgcgtgctgctctcccgccagccggcgcagcttgggtacgcagcggcagtggctatttgtcctcaggagccgcagcgctgtgagccacgcagccccttcctgggctcaggctccttggttgattctaggctcagcgttttggcgcagcctttgctctccaagagacgcctaagcgcctgggcgccgtgcttctgctgcgcgtcgggcgggtcctggctgctgcactgggctttggacgcccactgctccgcggctgcagggggcctggccggcggtgaccggcggcagcgatgggtgcgaagttagcagatgtggctggaatcatcgcccttcggagaactccattgcgccgggatggggagcaggggcggagctgggggcgggggcaaagaaggaggaggagggggtcacggtgaggtggcggggcgccccgcgacagggttggagaggtggtagcctcggcgctaacaattcaccaaatagttaatttggaggaaggggtatgctgaggctccctcctaggctctttcctagttc

SEQ ID NO: 28218 - DNA, 1983 bp, Homo sapiens
  chr8:134582236-134584219
  binary
cgtccgggcccctgccagcaccttccaccttggggccttgtcaatgaacactgcgttagcacctacgacgtgccaggcgccctggcgactattggaaaacccggctcccctctcaccccgttttcctcgttggcgagtcggcctcgcctcctcctcccgtctcttcctctcaccacacacacccagccgcagagcgggggtgggcgctcgctgtctccctggagaaccagctcgtcgcaaacttgcggggcttggggacccgcgagggggagaagtcgggagaggccaggggtgcccggaaacaatcacgagaaagccgggcgaatgcctgatgcagggacgcggcgagccagtcactgccctcagggtcacggctgactccctctgcgggactcgcccagcccgcgagacgcagtgacctgcccaacccccacccccttgcgcgcttctgggtgcgcacgtgtcccctcgcccaacacaccaccgagccccgcgcatggtacggccgccgaggaccctagcgtaggagggaggagcgagtcagggctccagctgacgagcagagccagacgatccccacacgcttcctgggagacccggctgcaaggccaggctaatgcgcgctccgacgtctctgtgccaagccggggcgcaagctcaacccccatctcaagttcagccgcgcttcctcccgcaaggtcacgcttaaacactcgcgcagagaaaggaggagcggaaagttgcgccaccgtcccgattccaaactaactgtaccctcaccagagcgcctcgccccagggtcaccgctgtccgtccccgtgcgctcccagaaggggtggccctgcccccacgcaggtcacacacacgagagacacaggcaagttgctaacttttgtcagattatttcttgggagctgcgacgcctcacggggttggggcggattcagagtttcgagttgccactaacacgactccggccgtgctctccttggcccacccgcgtcccccactgtccgccacgccgcgttcagctctcttgtcccgggtgtcaacttcacccccagatccggagcagcgcgctctgacggcgtccccggggccgatagccacctcccggatctgcgcctgcttgcagcggattgggggactcgatccggatactgtcccacggccgctcgtccagaacactggcggcctccgcggtgtcccagcctgtgaccccaaatccgctcgagagcgcctgagcccggccacccagcgaggtctcctcccacgggcggccccagcggaggagatcccagcccggcgccgggtgcaatgtcactggggctgctttcgggaaccgctgcccgggacttggcgtaggttccccacagagctccaggcagctcctccagtgtcggccgaagacccctaagcccgaacctccaccccgaccttcttcctctcccaaagccctgggtggtcgccgctgccaaggaaggggtctcccttcgaatgtcttccactagaatcccggggtcttcagtcccagctccactgtcacaccctcctagtcccctccccaccccttcagttcccgggtccagacaatcaaccttccactccgagaatccacaggaaactgcccgagccccaactcaggcggacgcagcccccgcgcaccccgagcagggttcgcctccgcgcgcgcactcaccacggctggagacacgctggagtttccgggatttgggcatgaaggggttcggaggagaatacaggggtgtgggtgtcccggacacttgcccccttcccagctcacatcgcctcttccttctctctccgctcttcttcctcctcctcctccctccggtctagggctctttgtctttgcaaagtgtcgaaactgtctggcatagtgggctccgccggcggaggctggagccgaggaagcgaggaggcgggatgagggtgggagagggctcgggaacaccttccccc

SEQ ID NO: 28219 - DNA, 1444 bp, Homo sapiens
  chr8:140714896-140716340
  binary
cgcctccccggactcctcccggggcgcgggagcccagcggcgcgcccagcccttacctatggtggtgatgaccgtgatcgcaaagtagaaggagccggcgaatttccactggacgccggcgcggtgcggttccgactgcaggatcaccagctccagctgccggtagtcctcgctgctgatgttgtacttccccttgatccggatctcctcggctttgagtttctcctcctcgcgcatctcgtggtccgactcgagggcgtcgaacacggcggcgcccaccagcaggtaggtgaaggtgcagacgatgagggacagagtccgcacgttctgcctcttcatggccgccagcaaggagccggcgcggggggcatgtcccgcaggctcacagccgcgcgcgtcccactgcagcgcccggcggccgccgccgcctcctcctccgccgccgccgccgccgcctccaagttgtaagcggcggcggcagcagcagcagcagcagcggggaggcggggggcggggaggctggggggggccccctccgctggggccgccacagccaccgccaccgcgaggcggctggcggggcaggggcggcgcgggcccgggctcagccgagaaggcggacaggcacaggaggctgctcgagcgccggggccaggcgtccgggaaccccgacaccctgcgccagacccggccgaagcagcccgccccactgcgcagggccatgcagggcggccccgctgggtaccgcgcgggccttgctgccctccgcaccccgccccccgctcccgcgggaaacgcagggacgggaaccggagccagaaagcggccggagggcggccgcggggcccggtacccctgtgggtccagctcgcgggtggcggtgcccagcaaggagcctgcaggtccgcgcgcccagcggaacctgcttccccttttacccctcctcgccccctctcggtggtggggaggaaaagtttgcgaagtggcggtgtctctggagtcccctgcaagcggggagggggccgagcaggtgcagcgggaggggcagcccgctccccaaaggtccgcgcgcccagcgcccacccgggcgcgcgggtgcgcagcggggtccccgccgggcgtcggccggtgcgcgaagtttgctcggctcaacccccaaggcgcgggagcggggcgcggccccaggacggcagggaccgcgatggagcggcttcgggggcggccgggggacggcgcggtggcggtcggccagcccgctcctccgggggcggcgggcgcggcggcggcggcgggaggggtcccgcgggcctcgcggagcagcggggcggacgcgggcgcatgagccgcgcgggggtcggggccctccggcgtccgggcgtcccgggaggcggccgccgcgctggtctgccccgggcgctacgtgcgtgcgcgccgttgggagccc

SEQ ID NO: 28220 - DNA, 420 bp, Homo sapiens
  chr8:142243860-142244280
  hypo
cggcaggcccctgggaaacggctatggagcgtggcacccgttttgctgtgcttttcccgttttgctggtgcagggccttggctaggcaggtccagcaggtctgcggctggacctgactctgggctgagctgagcttcagaggccagcactagggccccatggttgagtggaggctgaattccgagtctgaatcccagctctaccatctactagctctgttgagtgtccgtttcctgatctgcagaaatctgtaaacatcatcaccaggcttttatgagaactgagtcatcctgaacagctcactgttggcataaaccattagcgaatcgtcgccaacatcggggcctgcatcgctcacctgagggagtggggactgttcttctctatgtccactgaggcctaattcacatctcgtccctc

SEQ ID NO: 28221 - DNA, 975 bp, Homo sapiens
  chr8:143530860-143531835
  binary
cgccggcagccgggtggggggaagcagctctcgcctctctcctcctccttctcctcgtcctcggcctcctcctcctccccgcgccgccccgcccccggctcggcttggctcgcccccccccccccctcgccaggaaggggaaaaaaggcgagaagagccgggcaggcgagaggagcggagcggcggcggcggccggagagggagcggcgggcgcaggcggcggcggcgggcgcggcgttggcggcggccccggcggagcgagcgcggagccggagagccgggagcacaggcggccgcgccgcgtcctggcccggcccgggcccgcgcgccagcatcgtccgcagcgcgggcatccggaccctccgggcgcccggggggctccagcaggcgcgggggaacgggagggggcctgcgtgcgccggcgggtgctctccagggggcgtcccggcgaggcccagagcgggccgggggcggcggcggctggaggagccccccccacctccggtcgggcgcccggctcagccgccggcgacgcgaggcgctcgcggggatttgcaactcgccggatcgagtcctcgccggcggggccgctgctgctggggaaggtaaggaaggctccggcggggggctgggggcgcggcgggtgggggcgcagcgagggtgggagggggtcgggggaggggcgggcgcccagacttcctaacttcgccgtttggggcttcgcagctccgaggttttgcgctcagagctcaggagtttggacccccaccccctaccccctcagccccctgccttctccagcggtggcgatggaatgtggcaggtccccgcgagcccgcattgggcaggctgaggagggggcgaccctggacgcaggagaggctcctcggcgccgccgcctcctccccatccacacaccacagcctggcacccctcttcatcacatgcacagggcaggctggggagggcgttccc

SEQ ID NO: 28222 - DNA, 2491 bp, Homo sapiens
  chr8:143531858-143534349
  binary
cgctggcgggggtctaagggagccccccatggcccccaacagccacacatagacgcagcaggctccggagagcccccgagcgtgtccccctcctgctaatcacgtccagggccccctacagacattgtaagggcccgagacgtcctccccccacgcacagagctcggggcaggcaggagaaaaccccagactccttctcgaagccctcgctcgtagaagccctcgcctgtagacctggcattggcagtggagactccctggaggtactctcccccacttcgggcggagggctatttttgcgccccccacccccacgcgaacgcctggctcttccctccttgtctacctttccactgggtcggacaggccgcgcggataagccgctctcaactttgggccggccctatgccgtctccgctccaagcgccgagcactcccgggcgccgagcactcccgggtccgcgtcgccggtgagcagaggccgccggccctccaccgtcgccgcgctagcttggagccgcgcggagctgcctcgaggaacgagcacggcccccgccccctcctggggaggctgggagctctggacccggccaggagccctctccctaggtccccgcggccccctgggcgaggtagagagctcctccggcctcgggagggggcggcggagctgagaatcaccgcgaagcgatgcgaccgggagggcttgacggaggctgcggctccgagcccgcgtccctcctcctggccgcggcggctcctgcttggccactccccggcagcctgaagagaacgcctaatctggcaccccagccccaggccgctgggcaccttacccctttccacttttattttgggcttctaagtttcttggagcgcaggcgcctaggctgggacccgaagagccctaagccagccctctttcagcacccgtccccgccgcgacctccccgttcttcctccgggtctggggcgcagattcctgggctgcaactccggagtagttgaaaggcaggaaggcgtgtgggcgggtagggggcctgcactcccgccccagaggagccgcttgtcgtttgtgttggggagggagctgggaggtctgctctcccgctccatcctgggaacccacggagaccctcggtactctccccacagacacaaacacacgccccctcggagcgagagccgccgcgggggaacagcagaggccgcgcgggcggaggcgggggaaaggggagctgggtcccttttctatctgggagggaggtggtatacggtgtgtggggtctggggaggcgactgtcacgtctcctagaaccctcatgccttccactcgtctgcgaccccggctgccgaggaggcaacgagggaggtcgagccgctccctcccgtgggcggcagcgaaactctgcgcccgcacgccggggtgccgccgagtccggctttgagtacccagcaaggtcaagcaggcgaaggagggggcgggggttcctgggcgcgcccccgtccgcgcacagtcggggccttggaagggggtgtgcgcagcccgccgagtcagtcccgctcgcctgccgcccgcgcccggtccccggaggcggacgttgcgcgcgttcggggatcccggagcgcccggcgccccacgccctcccttcggctcgctagctgctccttggcgctgctttcagacttgttgcgcctcgatctggggggcagaaggctggcccgggagacccggcggctgagggccgagccgcgaagcccagggatgcgccagagaggcgcgcggctccgcgggtgggcgctgcgctggggggctcgagcctggggtttgccgcctccgatcccagggacgggcgcttgttcctgccggggtcccgcgcaggggcggatagagggcgattcgtcgcctcggcctcaggcagcactcatccggatcccgggctagggagggggcgcagccaagttgtggagccctcggaggcccttccctctcccgcaggctccggcccctctcggacctcggtggccgcgtccgtgaaatggggacgcgggctctgctctcggatcccttccagcccccgaccctccgcacttgtcccgagatccaacgtgcccggtccgcagcgtgctgggtctgcggcgtcagggtggcccgagtcccgagaccatctgcgcttgcggacacagccgcggggcctggcatgaagggccccagggagggcctagcaagcgcccggggtccgagcagcctcctgcggcgtcctccgcccccggtcggcccgaccccgcctccgggagtgggtcgtggggcgcggagcccgtcctccggggacgccgcggggctccaggcccaggcggccggcgcggggccgcagtggcggaaggcggagggccggcgcgctgccgctgactgccgggagagggcgcccgcaccgcgcccgcgcggccctgcccgccccttccgtctcctccgcgcctggcccgcggctcc

SEQ ID NO: 28223 - DNA, 829 bp, Homo sapiens; identical to SEQ ID NO: 27283
  chr8:16884178-16885007
  binary

SEQ ID NO: 28224 - DNA, 831 bp, Homo sapiens
  chr8:41166533-41167364
  binary
cgctctggtacgggccgatgtccgactggaagctcacgtagtcgtactcgctggccgagcccacggccagaagcgccgcgcccagcgccagcagcacgcccagggctgccccgcggcggcccccctcgctgcgcccgatgcccatgccggctctgcgccctgttctccgcgacgtcggggctgcctccgccgcctccccgcgcgcgtcctgccgcaaacttccagggacctccggggacaaaaggcgcagtccccagcgttgcccggctccgcggccgcaagctgctgcccggtccccccggccagtggcggccctcggcctgcggtcggaggcggcgcgggcggggaggcggcgctgcgggctgggtgcgccccggctcccggaggtgcggcgagcaggaaggcgcggggcggcgggcgcgcggcactgactccggaggctgcagggctggagtgcgcggggctcctacggccgagccctcggagccgccccgcgcagccaatcagctcccggcggggcgagccgcactcgttaccacgtccgtcaccggcgcgggagccaatcgcctccctcgcgagcgggttcggtttactagaaccagacgcggctcaacaccccttaaaaaacaaaaccaaaaatacataaataaaagggggaggaggaaagagacaaggggagaaaaagaaggggaatggatcacggcgtggggtggagagagaccagggcggacgctgtaattaactcgcattggcttgcagagaagcggggagcctggatcatacttgcaaacccatgaaattatgaagactttttttttttgagacagtttc

SEQ ID NO: 28225 - DNA, 1000 bp, Homo sapiens
  chr8:41753753-41754753
  binary
cgccaactccgccgcaccgggcgccgcgccccaccgcgtcccgggccgcccgacccctgcccccagcagccacttgcaggtgccgcggtcgctgggctttcaccgccgccccctcctaccttcttctttcggtcacgggagcggtttctccgcttcctgttggattcctccttctccttctgctcctggagggcctgcgcctcgatgtctttgattttcttcagctgtttggccgcttgagccatggcgggtcacggcgctcccgtccccgcctcctggacccctagcgctcagcgatccccgaggcgacaccccctaagaaggggaagggggtctctgctccacagaggggacagcgttcgtggcgccccgagggccggctgctgcggggtcgcgggaaggcgaaggcagttccggacgcggagggcgaggggcggctgcccgcggcccgggatggcgctgccgccgcggccggagctcgcttgccggcgcccgggacgggctctgggcagggcccgccgcctccctccctccgcctccctccctctcctgcggcggcggcggcggcgaagcgggggggcgggggcggggaggcggctcgtactgcggcggcggcgggcggtgagcggccgcggaaggggcggattcgggcgctcagcgcgggaaggcccgggggcccggccggcgcggcgaggctgggcgcactgggcgtccgcacggggtcatggcgagcgccgagcttccgcctttgcagagccccgcgccgtcgggcggcgggaacaaagcggccgctctaccccggaccccgctgcgggccgcagggccaagccgggggaagaggggaggctgcggcgggcggcgcgccccgcgcccgggcgacccggcggaccagcgcgcctggcggcggcgagcgcggcgacatcgcgggagcggaggctcggcctagagggcgggcggcagagggcaaggaccgggcttggggagcccccgggcggtggcc

SEQ ID NO: 28226 - DNA, 100 bp, Homo sapiens; identical to SEQ ID NO: 10811
  chr8:42316852-42316952
  hypo

SEQ ID NO: 28227 - DNA, 881 bp, Homo sapiens
  chr8:54163303-54164184
  binary
cgcccagcccccagcgctgcgctgtccccgcgctcaccggatgatcacgaacatgaccagcgagttgcccaccaagcccacgacgaacactacggagtagaccgccgtgatgatgaccgggatggccggggagatgtgcgcgggctccagctgcgcgtcctccgagccggcgctgccgttgctgtcgggctcggcccagccgggaaaccaggcgctgctgttggggggcaggcaggcgctcggggcgcaggtagggcccggctccccgcggaagatctggatcggggagtccatggtggggcgattgcagcaggaaggcgaggacaggcggcacctgcggcgctgcgggagcgaaagaaccggctggacgcggagaggcaaactttgcccgcgccctggccagcggcgctggggacccggagcctgcggactcccacccgggccgcaagtcgccgggggcaggacagggagaacggacttctcgctgcctttccggccagcaggcgcgccgctgggtgccagagaggggcgaagagcgctcgctccttctcccccagcccctgaggtgcctccctcaccaattctaggcaccggcccctggtggaactgtccccagactgcctgagtccccagggtcaagcccccttcccacctcccagcacggagctctacctagaactgcacctcgaaagcccaaagcttacctatggttcccagagacaggcgaaggcgaggttttttacgggacgccctggtaggtgctgaaccgcgcgctcacgagtcccgctcagctcttggcatcacctgctctcggaccccggccccgctctccgcccgagggctgctgttccgccgagcgcagcccccgcctctcagcgcac

SEQ ID NO: 28228 - DNA, 987 bp, Homo sapiens
  chr8:54789485-54790472
  hyper
cgaagcaaaatgcctaatgaagcgtgcctgaggaaggggcaggggcttgcaagtgacttgggaagaaggactggggcgaagggagaaaggaggttacgagttcgcacgttctcacaaaaccatttgaaaacatgagctggagacgccaaattctgggacccacgaaaggctttggagctcgctcgggctcctcgaagttgggcgtgcgtcgcagaacagtgctgggcgctctctttcagcattttcggcttttttcaagcccttgcgtagggtcgggaaggccgtgggtgggctcagtcaggctttaggtcgccaggaacccggctggtcctctctcgacttcttagcgtggggtcccgccggccctgccgcccgtggccgccgaagttcccgccctcgccgagggccctcgctccggagtggggcgcagacgcggccgccggcccgcagtcccccgcaggtgccgcccaggactagctgcccggcggaggccgagcacgcttggcggcagctgagcctccaccccaagccccagccggaggggcgcgtcccctgtcctcctcccgagcgagacgaacgctcagcagctcgttccctgggcgccaagaccgatttccaagtcgcccactttccccctcgagggagctgttggcgcttctccagaagcctcctcggctcccagctccagcccctaaaataaaagcaccttgccagagagcgggggaggggagcagctgaacgaggagaatgaaaatactgggagaacgaccccattctccaggaaaaggtaatgaggggaagtgaaacagtgtgaacttactcggaaatgcaaaccgagttcaactcacccaggagcaaacaaacgacagcaagacaaatcagccaccgcactcgcggcttcccagaaagggcctcatgaatgagaatgggttgctaggtttccttccctctctcctgacaatcgcttcccacaagacttccaccgcc

SEQ ID NO: 28229 - DNA, 1270 bp, Homo sapiens
  chr8:54794077-54795347
  binary
cgcccggggctggtggtttgagcgccgctgggaagggtaaggagacagagcctcctggaatcgtagcgcctccttttaggagaagtgcaaccagggcaggggcaccgaggggcagggtgaggaagtggacgccccacgcgtggaccctagaagaccgactaggtatgggcgttcactcggagcctctgttcacgctcttgaaaaccgaatgaacagagaagtgccctccacccttcgcctgcgccagggcagttaacgtgcaggcgccgccgggattttcctggaacaaacccgggcacttgatcttccgcaccctcggagctgccctgggaagtcgaaacaagtctgggcgcccggactgcggagactggaaagcagggggcggagggcgggagactgggggcgggaagtggaggtgcaggctgcagctggggaccgcggtgggcgttggaggggagggtctgtgtgcgcggctgtcctccagcgctgggggagcggacgggccaggggcctctagggaagcggcgctccgggaccggggtggctttcccgtctctgtgtgcgcggcgatccccacacccagctcgggcggaggagccctgagagaagcggctagctgagagtggggtgggcgttttggggaaaggtttgcgtgcgctgcggccctaccgctgctagagaagtggaagagagagagtgggcgccgggagggggtctataggcgccgcgacctaccccatctccctccacgcttgtgggggagtgagtggggaaggggctttgggagaggcggcgcgcgggcactgaggtgcatcgtgagcttcccggacttgacagcatcaaaggaaaatcctggcgagcagccagggccagcgagcgaccccagcagcagggacgcggccgtgcgagagctcgcggacaggcgagggggatcccaggggagcagctgctgcccacgggccacgggcgatgcacggagtggagaagtgaacgtggtctacaggatttctgtccggaaggtggagagcgctacaggggaatctcctcgattcctgtccgtctcgtaacttggcaaaagctcgcgccactgccctccggcctgggcgacagagcaagactccgtctcaaaaaaaaaaaaaaaaaatggcaaaagcctatcgctctttgtcgaactccccacgttccccagtcacctggctggggttcgttggtgtcaaaaccccagccttggtgccctcggtgccagcaggaccctcgcccactggctagc

SEQ ID NO: 28230 - DNA, 1259 bp, Homo sapiens; identical to SEQ ID NO: 22956
  chr8:55366368-55367627
  binary

SEQ ID NO: 28231 - DNA, 971 bp, Homo sapiens; identical to SEQ ID NO: 23384
  chr8:55370128-55371099
  hyper

SEQ ID NO: 28232 - DNA, 674 bp, Homo sapiens; identical to SEQ ID NO: 25941
  chr8:57069543-57070217
  hyper

SEQ ID NO: 28233 - DNA, 875 bp, Homo sapiens
  chr8:58906804-58907679
  hyper
cgtgcggacataggtgggagtgggggatagggaggaaatggaggcgccgaccgagtggaatggggggtgggtcagggatggggtgggatgggcatcagtagcggggtggagatgttgagagagaggcagggcttggagtggaggtgcgagaagggtggggacccggaaggtggggtgggggcgggatggaggcggggcggggtgtacgaggggcgtgtacactggctcagggacacgcgctctcggccacagcaactggctccaagttccctccctcactctccggcgaagcctgcctgagccctcccactcggtgcagaccgaaccatcgcggccgccgccagccgggcccttcgcggccgcgcgtcctgggcccgttccgccagccccgtctgctctctacccgcggccccgcggcggcgaccgtgaacactcggcggcccctacagcccgctctcggcccttcgtccctcgcgggccccgactctccctccttgcagtcccccggagcctggctcccggctcgggccgcaccgccagggactggggtgagcggcccaggtaagactgggccgtgggggccgggagagagactgctgggcgggggttgggattcgggttcagtggtcgcgccgcgccccgactgcggacaatgcgggagctgcgcgcggccaggcggcgcggagctaagccggctctgcgcctgcagcttccccgcccggcccgggtctccgttgagcccggcctcactggcccaggcggaccccgtccggctttctgggctgccgggggaggcgcagcgccgctgcctgccccgcgccccctctgcgctcggcttggctgcacgtcccgggctcggctaggaggctgggcac

SEQ ID NO: 28234 - DNA, 1431 bp, Homo sapiens
  chr8:65289998-65291429
  hyper
cgcgctgagcagcgattgaaaacgttttggtcctctgcaggtttgaacagggctagcaggtctctctccggatttctagggctatgggtatatgtaattctttctctcatcgatcgtttcgattctcttgccggtcttgcagtttgcagggtcctaaacgaagaggggtggagattcgagagtgcgggtctggcgtgtggtccaagggagggggtgaggctgggaaagggggtgcagaatgcgggaacggctgggactgcacagaaggaccatctgcggactcgttttcactgctccagctcccgaaatcgtttctctggacgcggcagtatccgcagcgcatgcaccctcctctggacttccgcagcccagacctgcgcttacagtcatcgcgccaccccctccccccgggctgcgggccccgcgctccgtgggctcagggtcccctccgcgtccccctgaagcctggggacggaggtcgcgaccggccgactggggtcctgtcctcttgtcaccttgtatccctcgcatgctccctcccgcctcgtgtccctctccccaccctccccctcctctctcccgcctccctaacactgcgctttgattctgtttttcaggggcgcattctggggtctctgcgcaagaccagctctcagctctctctcctttcctcggactctggagcgggagcgggcctttccctcgggtcgaccacgccgtaggggacgccgtgaaaagagccgtcgcgcccgctgcctcctgcccgctgcgcagagggctccgcccgtagaggtcaacttccctcacccttttctctctcctgcttgccctccctccgcccggcccaggcgcttccagccccagactgtggccactggctgaggagtgcgagtcggctgcgctgccctgagcctaatccctcttccgggcccagacccgaggtccgcgctcctgggcagtggggaagctttagtgagcaggcttttctctccgcagcaaacttgtagccagaccagatgggccgcccagctctctcgggactaggcaggtgcggatgagttaatttttccgcattacaaagaaagatgacccagcccgcccttggactctcttttcccaaaatctcccaaccaaacccgcggtaacgttatcaaaggacacagagcccaggcatatctgtgtgtttatcttacaggcacacacgcatggttttctcttttatatgctagatttcatccctgacagcagaaaatgattggcaatggttatgacggagaacatgcaatagcgtggtccttaaaaacctgccattccttacaagtgccttagaaaggattcagggcgaaccaactgggttaattgcattcagtaaaataacacgattacaaaattagatctgtaccagaggggtaattaacttggatccacgcc

SEQ ID NO: 28235 - DNA, 780 bp, Homo sapiens
  chr8:67089303-67090083
  hyper
cgccgcgctccgcgagagccgcggggctgtcgagcgagcgccgaggcagcagcagctgctgcagcaacacgcggaaaaagttggcggtcgcctgttccggcgaagggcggctgccgctgcctccggcgaggagcgaggaggcgggcgaaaggggagcggccgggctcttgttgaggttccccaggcggaggaagtactcctctcccatgcggagcaggaccggccgagcctgcggctgctggggctgctcggactgcggcggcggctggaagaaatccaagggctgagggtgctgcggcgcctgccgagctcccgggaccggcccgcggctcaggagcgccctgcatggcgggcagggcaggagagccaccagcaggactcccgcggacacaagcagcggcagccgcatgttaggggcactcgctgcggcacagaggtgggcggagggcggaatgagagaggggaagagagaaagaaagagttggttagagttcgctcagctgggaggtgcacacggggtcttcctacgggactgccttagacgtgctgggctttggcctcagtgattcggatgggcgctgtccgcggtgctgaagcgcctggggagcggggaaagggggcgcctgcagggctccgcacctaagctcatgcgctcaccggccaggagtgacccttctttctagactctgaaaggacggtccctgcgtcctcttcctaacgatcctcaaaactaattttcccgatcctagagaagagccacagatttaagatcccacccgc

SEQ ID NO: 28236 - DNA, 583 bp, Homo sapiens
  chr8:67344497-67345080
  hyper
cgaggcctacggagcagttaccttctacggcaatttcaagggtggatggtgcgagcgccgctggggcagctggcgttctggttcttactccgtgggaaaatggccctgagcccgactggcttgaggcttagacaggtgaccccgcgaagcgggtgggcaggcgcggccgaggggcgggaggcgggcagcctccgtgattggccggcggagggggcggtgtagcgacccgaggagggaagaggactccaagcgccatggccgctgccgcccgagcccgggtcgcgtacttgctgaggcaactgcaacgcgcagcgtgagtgcggggccggcgggcgggcaggggaccgcagggtgcccacgcagccccctgggtgtgacccgctcagatcctgcgcagtcttctccgcttactttcaagaattcggagaatttggataccgccctgggctcccaccgcgcgccaggcggaacagcgaggtcacagagtgcgcgatgcagcctctcagggcgcagtgaggcagcctttactctgcttgtctaccgttaaagaaactgaggcccagagaggacctggtcccacatc

SEQ ID NO: 28237 - DNA, 913 bp, Homo sapiens; identical to SEQ ID NO: 24696
  chr8:67874755-67875668
  binary

SEQ ID NO: 28238 - DNA, 1631 bp, Homo sapiens; identical to SEQ ID NO: 22967
  chr8:72755373-72757004
  binary

SEQ ID NO: 28239 - DNA, 984 bp, Homo sapiens
  chr8:73449197-73450181
  binary
cgcgccccagccgcgccctgggcaccagagcgctgtccccggccgagcgcacagctccggcgccgcgaggcagagccccggcgtccccggcggtgcgctgccggctcgcgcagcccagccatcccgccccgccgcccaccttgacagccgggagcgctgaggaggaagagggggagggggaggaggaagagaaggcggcggccgctccagcccgcgggtgcgcggagcgcgggaggaggcggagcgggaggctggggtggccgcagccctgtgtgcgcgccgggccggctagctgcggggcgggggagcggcgccccagagcgccccgcctagcctcccgcgcgcagcctctaccctgctccgccacagacacacacccaccaagcacccaccgccctccgccctccgccctccgcccccgcggccgccgccgccgctgcgcctcgggcagccccagcgagcggcaactcccgggctggcgcggctcgctttctggctccttccgcgcggcgagctcagccccgctcgatttttcctcttctgttccagccctctcttgtctgggtggctgtggcggcggcagggggatggggaccccgtgtggggaaggggttgaagatcgatgaagattattgttcttttaaaggatgccttagcttcctcccgccgcctttcctctgagccttcctactagagaccgtgaaccagagtcagggatgtaaagacagggggaaagcacgccgggagctccagccagccggggagaccctcctctctgtggaggggagggggatttccagcgacaggtcattggcgaaggggatcgtcgcggggagaggctccccggagggagcggggaatcccacagccctttgtggtgcccgagcccgtgccgcctgctgagcggggtctgtgggagctaggtaagtggcgggggcattgctgctccccgaagggggtcttcctttaagaatgaatcatcgc

SEQ ID NO: 28240 - DNA, 943 bp, Homo sapiens; identical to SEQ ID NO: 22968
  chr8:75896528-75897471
  binary

SEQ ID NO: 28241 - DNA, 730 bp, Homo sapiens; identical to SEQ ID NO: 25948
  chr8:79428304-79429034
  hyper

SEQ ID NO: 28242 - DNA, 812 bp, Homo sapiens
  chr8:80803343-80804155
  binary
cgaaaatctttgagtacaaatcgataaagctagagattcaaagactgcctttataaaactggagaagatgcactctggccataggcggagggggcagcccggggcccctgtcaggaagccaagcggcccggggcatccctggaaggctgccgagggggcagcgccttctctggggacggcttcgtggagagtccgggacgggcgagacagaaaaccgagccctatttgttattagtatttttttttttatactctcaaatgccaccggcacattcttttaaaaaaaaatgaaaggaaagaaagaaagaaaaagaaaataagagaggaaaaggtcctgagaaatgacggacgcttgaacctcgggcccgggaagaccagcgccctttggcggctaggcctcgggggcgtgcggagggcgggcccccgcgcggccgccgctttcccaggccgccaggggtgaggaggtgacgctgcgggcttggtggcggctggtttttcacacaggaatcctcctcgccaccgctccctcgaaggccgccccccgctccacccccagcactgggcgcccgcgcctcccaactcagcccgccgccgagcagacggcgcgccgcggtaattgggcacaggggcctttttcagagtcgctcagtcgataaatgaaacgtcagctcccctgtgatcccgcgtgtgtggggcggcggtggctgcgagccggggcgcagggccggccggcagccgctgctctttcacagccccagaccctgcgcggcctgccggcggctggcgacctcccttcccctcccgaggcgccc

SEQ ID NO: 28243 - DNA, 828 bp, Homo sapiens
  chr8:85095274-85096102
  hyper
cgctggatcagcacccctgagctgcccccacagcacacactcccaatgcgaggcggcggcggcagcaacagaggcagcagcagcaatcgcggcagcagcggcagaggcggcggcagctgcgcgcctcgggcccaaccccgctcggctccccctctcgccggcgccctgcctgtcttgcgtgtgcgtgtgcgtgtgctcagcctcagcgtgaggggcacctgctcgtctgggctcacagcgaaggcagcctcgccgcgagctgccgctgccgctgctgccgccactggtgttgccgctctcaggcgccaggctccccgtcgccgccgccgccgcctcgccagccagagttgggctccgtgggcttcccccctcgcagcctcggtccttccccgctgcctgcaagtcagcctggctccgagtcacgtgtcagtgcctgaggcagagactgcgagaaaaaaacgcgcttcattccttcttccaccgccatactgtattttatactaaatctcatttttattccaacattttactcccgctcggtgagtaccttctcagtggcattcttgtcctattcttttttttgtccttttttttggttttttgttttttttgtttttgttttttttctttttttccacttctttgattattgtttatatttgggaaagctggaggagcatggttttgagccttttcctgaatccaagtttttctagcatgcgatcgttctgtagacaaggcgctgtgtctcggagtccgcggcgaccgtgcccgctgggagcgtctcccaagtccagcaaaatgtgcaactggttttatggaaaaagc

SEQ ID NO: 28244 - DNA, 1072 bp, Homo sapiens; identical to SEQ ID NO: 25956
  chr8:91996920-91997992
  binary

SEQ ID NO: 28245 - DNA, 71 bp, Homo sapiens; identical to SEQ ID NO: 10824
  chr8:92120822-92120893
  hypo

SEQ ID NO: 28246 - DNA, 990 bp, Homo sapiens
  chr8:97172008-97172998
  binary
cgacgccgctcgcggactagttcctcagactgtgggactccctagtgccggctttgcccagggctttccaaggctgtctcatgccctagatctgccccagcagctcaggccttggactgcgaacccagtatcccgagacaccgattccatcagtccccatcccgacccctctccagccgggttcatccgcctgctgcctcccgtcctccacgtttcccccaccagccaccaacaagcggcaaccacgctgccttctgcaaaagaggaagaaggaaagaagggagagagaaagaaagggggggaaaggaagggaggtttagagactggaatagaatccgcagccacattcagaaacttactcgagcttgagaaaaacaatttaagaaaagtaaaaaggaagtgtccagagcaggaagggaattcacaaatgtagcctccagcgggaacagctccctggctgccgagctccagcgggaggggagtcgagcgttttctttgccacttacctagtcccctgtctacaaagctggtgatcgtattagccgacttggaagactggaaaaagctggcattgatgcccagcttctcagcgatggagtaagtcctgtagattgacagcatgtactcgtggggcaccacgcgcggacccctgcctggcggctcctgcgcccggggctgctgagcccggggttcgtcctgaggccgcggctgtggttcctggccctcccggcccgcgtcactgtcgcgcggcgcccgctgcatcttgccttccttgcggcttcgcatgcccttggtggaacccagctcggcggacgacgaggaggatgagatggaagcctgctggaaaccgggcaaatcccacagaaaactgatgaggaagacggccgagagcaggaccctgggagtatccatggcgggcaagtggctgcgtctccccaggaggcggtggcggcggcgcaggacgcgcggggcacggagcggctggacagc

SEQ ID NO: 28247 - DNA, 2216 bp, Homo sapiens
  chr8:97505592-97507808
  hyper
cgtctctcgtttcttcactaattgttctctagaaaagggaaagtgaagaagggaaagagaaaagacaacggggaagaaaagagcatagaggagagaggaaaagtggggagagaaaggaagaaaaggactgagaaaacgcaggagccctggcttgccggtgagcagagccggcgcagccacagcgcggagccgcggcgcccactggtcctcggagctgccaatcggcgtgtaatcctgtaggaatttctcccgggtttatctgggagtcacactgccgcctcctctccccagtcgcccaggggagcccggagaagcaggctcaggagggagggagccagaggaaaagaagaggaggagaaggaggaggacccggggagggaggcgcggcgcgggaggaggaggggcgcagccgcggagccagtggccccgcttggacgcgctgctctccagatacccccggagctccagccgcgcggatcgcgcgctcccgccgctctgcccctaaacttctgccgtagctccctttcaagccagcgaatttattccttaaaaccagaaactgaacctcggcacgggaaaggagtccgcggaggagcaaaaccacagcagagcaagaagagcttcagagagcagccttcccggagcaccaactccgtgtcgggagtgcagaaaccaacaagtgagagggcgccgcgttcccggggcgcagctgcgggcggcgggagcaggcgcaggaggaggaagcgagcgcccccgagccccgagcccgagtccccgagcctgagccgcaatcgctgcggtactctgctccggattcgtgtgcgcgggctgcgccgagcgctgggcaggaggcttcgttttgccctggttgcaagcagcggctgggagcagccggtccctggggaatatgcggcgcgcgtggatcctgctcaccttgggcttggtggcctgcgtgtcggcggagtcggtgagtgggccaggcggaggatgcgcgcgccgtttagggtgtttgaagctacgagaggagcccgcagggaataggggagcgccacctggggaacccccagtccccaagtatacaccggagatccgctgggacaaatgcgctcgtccggtcaccctttccccctcttcccttcctcagaaaagcgctgctcgctggcgttaccccgcggtccgcgggaatgggggcaccgagaattgcggtttggtctagccgcagaggcccctgaagtcactcccaacttcttcgccctcggcgggtcttgctgcgtggtctgggaaggacggaggggaaagggtggcaggaggggggagcctgggtcgggcccgcgagggaacggctccactccgcgcgctcctcgagaccagggatgacctggaaacttcggggtcccttcctccgcacaccatcccccccgcgccagctttcctgtttgactgcatgcaagttctggggagatgggggccagatttaagagacccgcgagtgtccagagagaaaagtttgcaaaagttcttttgtttgatgctccctgcggctagggcgaggtaaccgacactacgtggaatcgcagtaggcgatccctcaaggggatactgggggaggcacggaacgcgtccgaaaatgctgggacgccggccactggattcccagtcctgcggcgaccccctcctcgttgaggggtggaggttgcaccgcggggcgtcagggacgggaggacattttcataggagttacacgggagtgccgcaagcagggcgaggcggggtacgtgtgacacggcgctcggcttcgggtcgcctggccgctgggggacagaggcttccctcccgccacgctcgccctctctggccctggcggggcgcttctggggccgggaggagtctcgtctccggcggagcgcctgccggcacccagcttccctcccccgccctggcggtgggaacttgatttctccttttggtcgcgcttcgggggctggagcttgtttccccacgtcgcccaatgagcgccctctaaagggaactgcctccttggcctcctctcgtccgcagctgcctccacctgggcgccaggagctctgtcgggccaggtggaagcttgagcaccccagatttcgtctgcagcctcagtgccctctggggtctcagggagtgcggctgtttctggcccttctggttccccacgtcctctccctttgccatttaataac

SEQ ID NO: 28248 - DNA, 1914 bp, Homo sapiens; identical to SEQ ID NO: 27314
  chr8:9763158-9765072
  binary

SEQ ID NO: 28249 - DNA, 555 bp, Homo sapiens
  chr8:98289833-98290388
  hyper
cggcaggcggcctcctccccgagccggaggagctgcgcggacgcagcggcttccaggccaccccaccccgcgccagcctgcacctgtgccgcctgggtgtcttccccgagactctggtactgtgaagggtccgggtcgcgcggggcgtcgtccggagcagggcggactcgggctttggcgcggcctttgccccggtttttggcgcgggaggactttcgaccccgacttcggccgctcatggtggcggcggaggcagcttcaaagacacgctgtgaccctgcggctcctgacgccagctctcggtcgggaccgagcgggtctctccacggcaaccgccgacgtcacgaacgtacaactgtaccgtcgcgagaggacgtgatgcgcccggtgattggcgccgccgctgcggctgcgcaggagacgacccccgcgggcgctcccacccccatctcgcgcggactcgctttaggtctcggcgagtttctctgatatgcgctcgcgggggtgctgccatttcatctcttccgcgcgggctcatcgtgctctcagggtctc

SEQ ID NO: 28250 - DNA, 2992 bp, Homo sapiens
  chr9:100614615-100617607
  binary
cgctgcgggaaggggctgcttggctgcctctgggggtcttcagagctaccctggtcccgggggattggaggaggaggttacctatcctgcgtcgtctttaatccgtgcaccactatccatcaaatagagacagatcctgggcctctcaaagacggatgattgggggtggtgattggcctatccctaaatatctaccacgcaaggactcttgagagatccagaccccggtacagtcgagggacctggggcccaaaaagggaaagcggctacctctaccacacagttgggaagcgcagtcctaaaggagacgcaggttggagactccgctaagcggagaagccgcagtggggccatggcaagtcaccttccctttcgggcctaggaatactcattcgaaagatggggggactggagtgccgagtggctgtggcagccacgattggggtttggaaaccatcctgaaaggcccggggagccagtctcctggaacttctccctccccattcccacaaaaaccaagcgccctctcggccaattctcaccctctcaggacaaaaaagtgagatgagcccgtcctttcacctgcgagtccaagcccttggcagaggcctgaaaagtccgaaaactccgagttcgggcgctgaggtctcccgagccggttcctgaactctccgggcctcagtcgatcggggtgcggagggggccgacccgggggatctccaagcgccctccccgccctgacgctgtggggctcctaccgcgccgccacagctgctcctacctggggaggtgcgcccgggccccggggggcgggcagtcggggggcgggcagggaaccggtgccgccccacgcttcgtggcccctttaaggaggggaagccggcggagggaggagccggtccggtgtgtgcaggggagcgcctcgccagcggtccgcagggctggagacccacgccgtggagaggaccagcctcaggtcgccccgcctgggcccgcgccccgacctcgctgcccccgcctcgcctctctgcccgtggcgcttacggccaccttggcctcgggggcagggcatgggcggcccccgccagatcgcccagcgccagtactaactgccctcgctctggccttcgagcccgaagcctcttctgcgcgcacaacctaggcagtaatcctaaactagcgggcaccacagaccagctgcagccaccccaacccagggatcacttccggacccctcgaccgcccggcaccagcgcgcaagggacccttcagccggagaccagagtccagtcccggtcacgaggccaccgccgctgcccgcctcgagaagcaccacgcgggctgagccgtcggctagcgggtcactcccgagcctctgtctgcaccgcgccagccccagaccacggacgctgagcctccagcgcgtgccagcctgggccgctgggctctcggggccagcccgcgacgatcccctgagctctccgcagaagggccgagcgtccgttccggggacgccaggcccgcccccgccccccgacagccgcggggatccagagcccgggggtgcgggacgcccgcgccatgactgccgagagcgggccgccgccgccgcagccggaggtgctggctaccgtgaaggaagagcgcggcgagacggcagcaggggccggggtcccaggggaggccacgggccgcggggcgggcgggcggcgccgcaagcgccccctgcagcgcgggaagccgccctacagctacatcgcgctcatcgccatggccatcgcgcacgcgcccgagcgccgcctcacgctgggcggcatctacaagttcatcaccgagcgcttccccttctaccgcgacaaccccaaaaagtggcagaacagcatccgccacaacctcacactcaacgactgcttcctcaagatcccgcgcgaggccggccgcccgggtaagggcaactactgggcgcttgaccccaacgcggaggacatgttcgagagcggcagcttcctgcgccgccgcaagcgcttcaagcgctcggacctctccacctacccggcttacatgcacgacgcggcggctgccgcagccgccgccgccgccgccgccgccgccgccgccatcttcccaggcgcggtgcccgccgcgcgccccccctacccgggcgccgtctatgcaggctacgcgccgccgtcgctggccgcgccgcctccagtctactaccccgcggcgtcgcccggcccttgccgcgtcttcggcctggttcctgagcggccgctcagcccagagctggggcccgcaccgtcggggcccggcggctcttgcgcctttgcctccgccggcgcccccgctaccaccaccggctaccagcccgcaggctgcaccggggcccggccggccaacccctccgcctatgcggctgcctacgcgggccccgacggcgcgtacccgcagggcgccggcagtgcgatctttgccgctgctggccgcctggcgggacccgcttcgcccccagcgggcggcagcagtggcggcgtggagaccacggtggacttctacgggcgcacgtcgcccggccagttcggagcgctgggagcctgctacaaccctggcgggcagctcggaggggccagtgcaggcgcctaccatgctcgccatgctgccgcttatcccggtgggatagatcggttcgtgtccgccatgtgagccagcgtagggacgaaaactcatagacacatcggctgttcacacgttccccgcaatctgagaacgaacaggaatggagagaggactcaactgggacccacgtggaaaagaccgagcaggccacagaggctcggtctccccgcgcacagcgtaggcacccggtgtactctgtaaacgggaggaggtggggcgaggcagccagagcccttggactggcacagggaccctcgatggagcgaagccctcaaacgggatgctttctggtattctatcggggagggtccttggc

SEQ ID NO: 28251 - DNA, 30 bp, Homo sapiens
  chr9:101009718-101009748
  hypo
cgtaaagctgggctgggcacgatggctcac

SEQ ID NO: 28252 - DNA, 808 bp, Homo sapiens; identical to SEQ ID NO: 22973
  chr9:101469196-101470004
  binary

SEQ ID NO: 28253 - DNA, 778 bp, Homo sapiens
  chr9:101705883-101706661
  binary
cggctgtgaaagagtgctttcttgcgggtcagccccgacaggacagacttaagggcgggagggagcccatcccgcttgccccaacgaacgcgggcgcggggctttcctcgcaggttacataaggcagccgcgggtggaggcagcagaggcgagcgcacgtccgtcgagggggaaaggggcgtggggaggcggccggggcggccggtatcccccgggcgtgagtgcgcagcgcgcgggggagcgcagggcgcggcggagtcgggtttcagagcgcgggtgactcggggcgcgggccgggagccgggattctgcccgccgccgccgctgccgagcgccgcctttgttccctgcaggaagggcgagcgcggcggccagcgctcagcgacccttcgtcctccgctaagctccaacgctctgctcgactagccgcgcgccttccggggctccgcagacccgcgagatggcaccaaggtaagacccgcttctctgcttcctcgcgtcccgggcccctccaatactcttgcccgcctcaccttttctccctcgggcacatcttgcaggaggaacaacgggcagtgctggtgtctgctgatgctgctctcggtctccacgcccctccctgctgtcacccagacccgcggtgcgacaggtaagcaacccggtcggagggtggcaccggctgcctccgcgcccgtgggggaagtcggttttggcggcggacgcggctgcgatgcgtgcctcattcctggacataaaagggagtcttgccactcagtgc

SEQ ID NO: 28254 - DNA, 310 bp, Homo sapiens
  chr9:117267153-117267463
  hyper
cgcgacagctggatccccgggagcgcggagacgacggctggagcctgggtttggggagcacgggtacagtggctggatcctagggggtcgcggagaccgctgctagagtcccggaggcgcgaagacggcgggggtcgcgaacctggaatccgggggacgcggagacgtcggcgggttcctgagagacacaagagttggctgctggagcccggaggtggcggagactgctgctggagtccggggggcgcggggtcagcagctacattctggagggcacggagacgacgggtggctggagtttgggggcgcc

SEQ ID NO: 28255 - DNA, 1023 bp, Homo sapiens; identical to SEQ ID NO: 10827
  chr9:124131788-124132811
  binary

SEQ ID NO: 28256 - DNA, 169 bp, Homo sapiens
  chr9:124461166-124461335
  hyper
cgcacggggaggacaagctcggaggcggcagggaggtgagcggggcggccggccctggcggtccccgggggtctccgcccctccgcagccccgccccctcgtcccggtactccccctcgccccggcgcccggggggctcgggcagcctcggccgcggtcggcgcggctc

SEQ ID NO: 28257 - DNA, 171 bp, Homo sapiens
  chr9:126139066-126139237
  hypo
cgtcctccccttctctgcggtcttaggcctcggtgtcgtgtctcttgcagaagggcctgcccctgccgctgccattcccactgctggaggtggccgtacctgcagcctgtgcctgcctcctcctcctcctcctgggcctcctttcagggatcctggcagcccgaaagcgcc

SEQ ID NO: 28258 - DNA, 57 bp, Homo sapiens; identical to SEQ ID NO: 10829
  chr9:128274789-128274846
  hypo

SEQ ID NO: 28259 - DNA, 511 bp, Homo sapiens
  chr9:129485513-129486024
  hyper
cggtgtccatggtgggtctggttcccaccgctccctccctccccgcacagtctgagacccccttccccgggccgccccgtcgatcccaggtgatggatggagccttcagggagcccgcgcgggcgggctaggctcgggcggaaatgaagaggataagatctgcgagcagagccgcctgacaccgtgatatccgcctggctcgctgcgctccgggtgatggatggggcggagctccccaccccccagccccggaacctggcgcccctcccagaaacaccgctccgctgccacacacgcggccgccggactcccagccaccggcgcactcacgcggcgccccccacgcatcagcccggcgcgcacgaagggaaccgttcctcttcccagtcccctggcgctagcaccagcaggactgcccttagcgcacaccacaccttacccacttgcccatcacacagcctcttccgcgcacgcacatacacatgcatgcaagctgcacgccacccctccc

SEQ ID NO: 28260 - DNA, 456 bp, Homo sapiens; identical to SEQ ID NO: 10831
  chr9:130674546-130675002
  binary

SEQ ID NO: 28261 - DNA, 861 bp, Homo sapiens
  chr9:131842789-131843650
  binary
cgcctgctctgtgtgacttgccctttcgccggccagtatggggcagagggaaataagccccctctgctctctggtctcagtttactcgtaactgaaagtgggtcggttcaaaccccctggagctgaggttgcctctcctcttcgagcacgcgctatcggacgcgcaggtccccaagaccgcggatcggcagggggtaccagggaagccttcattcagggcgcaggtcccagccgaaccaaagctcccaccaaagttcaacacgcccccaaagccagcgcctgattggcccgccctgcccacaagctgaggcagcctcaccttctgattggctgttatgctccctgttcggtgctggaaccctccccttctctgattggccagatgcctacctgcgctcgccccagattgggcgccagctggggcggctcgttggctcccaggggccccgctctctgattcgccgctcgggccagcccccacggcctgcacgctgaatggctgcgccgctacctatattggcctccgattgggtgcacggcgcctccccggcgtgataggtcaggaccaccgcccccctggctccccattggctgctcgaagaagcccggtctccgggtaagatggcagcggacggacagtgctcgctccccgcttcatggcggccggtgaccctcacccacgtcgaatatcctgcaggtaaaaggcggtcccggctccaaggacgccttcccagggacggcctctcagtcccgggcgctccggcctgctcgagcccgcggagggggcgccgggggaccggggtgggaactgtcaaatagtgaaccacggaggggctcggccggcgcgcgcgccgcgcaggc

SEQ ID NO: 28262 - DNA, 814 bp, Homo sapiens
  chr9:132382203-132383017
  binary
cgggttgcgagggctctgagatactcagctaacattagcatccttctagcctgggtggtggggtggtgggtgcggggacacaagggaccaccccccaccggaaatgactcgggcccgccccccgggccccgcggggcctcactcagtggctccggctcctcggcgcacttctcctggagctggtgcaggaactcacggaacctgctggggaggagctctcctaggaaggcgcccaagaagtcggggtcctccctggccacgcgcctccgggggcgctcgcgctctccaggccctggctgcctgggcgccgattcccgggacgcgccggccgacagcaggggaggcggcagcagggaccgcagcagcccccgcttccgcacggcccgccgggtcgcggtgagcaaggcgggcaggcgcggcgggaggcgtccgacgcccaccccgggcttggcgtccccttccggccaccacgcggcgccgccccccgggatcctccagtccccggagccccgcgcgcccagagccgctcggagcgcgggcggggtcagcttgggcagccgcgggtcgctgctgcgtcggaagtctccgtcgccagggagccccttgggcgccaggtcctgggcccctgggcgaagtcgacgccagaacatgcttggccccgcactcagctcaccgcaccctcagcgcgcgtgggtggggggcgccggctgaggtggggagggcatagtccagccccaggccatagtgccccgggcggggcagcgcggtgcggggtgaacgccaccggcccggcggacagcgagtggcttcaggc

SEQ ID NO: 28263 - DNA, 131 bp, Homo sapiens; identical to SEQ ID NO: 10834
  chr9:133513763-133513894
  hypo

SEQ ID NO: 28264 - DNA, 109 bp, Homo sapiens; identical to SEQ ID NO: 27327
  chr9:134126685-134126794
  hypo

SEQ ID NO: 28265 - DNA, 968 bp, Homo sapiens
  chr9:135036595-135037563
  binary
cggtacccactgcttggggccttctgggtggcagcacttcacagagagagaccgaggagcagccctgagcccttggctgtggggggtgggggaactgactcacttggcccccctccctcgtgccgatggggcagcccccacacccatgggcgctggcaccccggcaggcccccgggttttggaagaggaagctgcagcccggctgcgcctgaccggagccggctgaggatgcgctctgggcgcagggacccgctggcccccgggccgggaggcgatgtttaggcagcgaccccccagaggctgccggggccaccctggccacgggcccgccgggacgcccctgctcgccgcgcccctccccgggccgtggcgcgtcccccgagccgcgcaatatttccttcctgcacctttaagaagaccgttgctccgtggtgggatggtgtgttaaagccacacagaggaagttacgcagcccggatcagaccgagagataaaagccccgatggtgatcgtgagtgatggcaagaggatttagcctcggcattaacttggagcggagtgcaggggggcagtgaagcgcccgccatctggcccgcgccgcgccggggggatgccccggctccccgacgagacgccgcgaagcccacccgggccgggggctgcccggcgcccgagcgcgggtcctccccgggccgcccaggggggccaaaaagtttgcacttgttagcggcgacctcccgctcagcccgggcgggcgatgcgggcggcgcgggcggccccctcccccggcccgcgtctccgggacggctgcgggcggcccccccggcggccggagggctccctggccccgatctgacggcggcggcggcggcggccacagcggcgggagcggcgcggggaaggagcagcggctcgcagccctcggcccgcgcccccacccagcgccagcccgaggggggaggcgcagc

SEQ ID NO: 28266 - DNA, 1320 bp, Homo sapiens
  chr9:135285310-135286630
  binary
cgagccgggctctgttggcgtcccgtcgccaaggagacgggccgttgcattcgtcctccaggggtggtcttggttttctttcctctcccagtctgcaacgcggggcccaggagacgccctgaggatcccgcggggctcctgcattgctccggggctctttgcgatgaggggccggcgcgagcggggcgcgcctggctccggaggggtcctggcatctgagtttccccctcaggatcccggtggtgcggcccgggccgcccggcaggcccttcggagctccaggctgtgcccgacgtggggaagcgcgcccaaaccagcccgcgggccggctccccggcgacctcaaggatgccagaggccaggagctccggcccggacctcacgcgatggaggaagcagcagcagcctgtgcgccgcacggtcagccaggtctgcccgcccccgcggcggcccctgaccgtggcggacatccgttccggcatggagaacgagcggctgggggtcgtgcgggactccatgtttcagaaccctctcatcgtcaaggtgagcaccccacgcccaccgcgctttcgctgtcgccggctccgggcacctgcgccgccgggggtccccacccgcagcgccctggccccgcggcccggggtccgagcgcagcgtgggaagctccagctctggtccagacaggcctggacccccatgcaggtcgcgtcgcctctctcagcctcggtttccccatcctcacagtgggatgataatggcaccactaaagggactgattgggaagattgaatagggtaatttctgcgggacctcgggacagcgcctgacatggggtaaggctgcaatgggtgctgctgtggtttcccacagagtgaacccacagggtgacagataggtcgcacacgcccagtctaagtcgtggctgccagccctcccagggtaaaggccgcctctccggttccgctgcacgcctggggtacgtctatgcagcggtggctccgtgtctgtcctggaagcatcacgtcgaatgttcatttccgttcgatcatactaatttcttacccaaattacaaccctaagagaaaaaaagcataatctttggcctaggaggctccgcagacaagaatgagggagctgcggtttcgggctggatcactttcccttccattacacttccctcctccccacctttagcctcgcttcccgctgatgggaaaccaacactgctgtggcggccacaccttcccgggggccactggagaagtcaggctgaggcttgggggtcagggagcaagcctcgaggcgaatttatcttgcgcc

SEQ ID NO: 28267 - DNA, 141 bp, Homo sapiens; identical to SEQ ID NO: 10838
  chr9:135523845-135523986
  hypo

SEQ ID NO: 28268 - DNA, 233 bp, Homo sapiens
  chr9:135898877-135899110
  hypo
cgggatctggatgcagcggctggggttggcagggcccactgcagggaaacggttaaaatgcgctgggcttcgtttttcccggaagccctcattacctggtattaccttaggtgtggattcctttattcgcctgctgtctgtctctgccaatcaaatgtgagctccgtgagggcggaggggggcggtcctctcggcttcatcatccgagcccagcacaggatcgggcacatcgc

SEQ ID NO: 28269 - DNA, 258 bp, Homo sapiens; identical to SEQ ID NO: 10839
  chr9:135926595-135926853
  hypo

SEQ ID NO: 28270 - DNA, 557 bp, Homo sapiens
  chr9:137299004-137299561
  hyper
cgaggtccatgtgaaaggaggctttgcggtggtttctgctttgcttgcattgagcctcaaactcttcctgtcccgtgagaaggggggatgggatttggaggcctgaggaaggaaggaggggagcttcctgcgcacaagcggcggcaggggtttgcagaagtggaggctgggggctgcctggccaagcgcttaccgccctgcgcagccaggctggctggcaggctgcagcgggaagcgcctgtgggtcctcggcgctgactgcagagctgggtggaggcagcggaaccaaaactgctgtgtcactgcacgctgcagctgttgccagggtgaccgggtgagtttcccacgcttgcccgggcggcagcgtgcgggccggcgggtggggcggaggggtgtgcagagaggccagtggtgtcgtgccacccgatgcccgggggtgtccactcccctctcctgggtcacgtgaccagggcccctgccctgcggtgttgtggggtgtatgtgtggttcttgggggggtccccagccctcctccgtcctgggaactgggcttcggc

SEQ ID NO: 28271 - DNA, 747 bp, Homo sapiens
  chr9:139421476-139422223
  hypo
cgtgagacgcgctagctggggggaaccgggccgagcctggagaaagttttgagccaggtgtgggggtctgtgtgtggggggcagctttgggcccagtctcccgctgctgctgtgggcagcctccagcctgtgcccgccccagtctgtacctctctcccacatggccacagagctggagcaccctacagacggcgaacacctgccctccgcacagcacccagacgtccctgagaaggtgggagggacctcaggcctgcagcatggccatggccaggaccaccagcctgtgagcaaatccttcacagctttggcgctggccacacccccggtacccgggccactctgtcttcaatgctgtcccggcggccaggtgggtgtgggccgcgaggtgggcgccagggcttggccgagtgaggtggcacccaacagctgccgcgcccacggggatcctcagggcttccatgagtgacccgcaccccaccttccaccgtccccgcatctcctcctatcaggggcggtggggagacccctctggggctaaaaagtgaggcttgagatagggaacgccagtctcccccgactggacgagagagctgccctgtccaccaagccacccagctctcgggctcccacggaggagacccaacccacgccaggtgtgcccccgtggactccccttccgtgcgtccctcttagggtcacccggcacctgcctgtcccatcccccacgctcagtggcctggcggc

SEQ ID NO: 28272 - DNA, 397 bp, Homo sapiens
  chr9:139506149-139506546
  hypo
cgcgtgcccggtccccactcacattgccacctgcctccggtgtggctgcgaagtcggagggaggagagagccagccaggggtgtgggcgccaagatcagagactcgcacgctgctggacggaatgtggaccggcccagctgctgggtcacctgccggcagctcccgaaacaaccagtcaccacgagacccagcaactccacccctaggtgtgcgcccaagataaacggaagctcctgtccgcacaaacacccgtgcggcttccttcactaagggtggaaacggcccgggtgcccatgggtgggtgacggatgaaccgggtagaccgtctgtacaatggaatatttatccttccgccacaaaaacagaagaaattcggacgcaggcttcagtacggac

SEQ ID NO: 28273 - DNA, 45 bp, Homo sapiens; identical to SEQ ID NO: 10844
  chr9:139687851-139687896
  hypo

SEQ ID NO: 28274 - DNA, 1196 bp, Homo sapiens
  chr9:140023880-140025076
  binary
cgcccaggccccgctcggagccgcaggctgggagggcggcgggcgcagcgaccccgggcctcggtccgcccggcgcggtcctcaccctgcagcacaagagccgccggcagttcttgctgttgccgtagctctcgccaaagctctgcgtcaccgaaatgaagtcctgatgaagcagcggcggcggatgcgtggaagggggcctcgaggaaccaccggcggcatcaggagacccggtcctgtaaaagactgagagctccgcctctccgatactcgcgggcagccattgcggcgcacagaaccgtccgcgtgtgagcagcgcgcacgcgcacgcaatgcgcctcaaccccgcagcctatgcgcctgcactgagagctcacggcttgcggcgcctgcgtctaccccgcgcgcagtcgccacggcaacagggcgggccttggttctgcttcgggcgtggtcggtgcatggtcctccagcactgttcgccccgcgggtctggtcctgggttcctttcgcctcctgtcgtcggacggcaccggctttgcccacggcctcgcggggagacgcagacacccgggacccggggaggcgcccgggcgccgccgccatgttgtcagggagcgcccgctcccagctcttcggttccgggacccgcggcgcggggatggggctgggccgcccttggtagccgtcctgggctgggggccaccctggccgcgtggtcaccggcaagaagcccagggcctcacccgggcgcggcgtcgcgggggccgagggaaggaccggaccctcccgaggtcgcggacccggccggctggggcgaggctggggtggcccctaccccgagctaagctggccgcgccgcatctcaccgtcgccggggcccgagcgctgcgcctggaccggcgccgagcgagggggccaagcggccggctggacccacagtccccgcgccataggcgggtcggggctttcagactcggctccagccctcaaacctggtagccttggaggtcagcttgagatgactgcgcttcctgcgcgcgttgtcctccccagaaacgctcaaaatggcaaagcggcgtccgtggccgccggaggcctgtgttctcccctgccgaacctcacgcgcggcccctccctcattttcttctggccaggctgccccctgccccttgggcgattctgctgcgtcccac

SEQ ID NO: 28275 - DNA, 465 bp, Homo sapiens
  chr9:140382238-140382703
  hypo
cgagaggccgtcccatccagcctccacctgcctgtcaggggcatctcaggagcctgggccaccaccacaacctggcacgccctgcgaggtgtccccagcatcaccttcaccgcacgcacttcagcccctcactgcagctgagccttggccacacgggaggagcgggggactcaggcccagatgatgtgtctccgcctctaggcgctgagtggaaggcaggtggcttctataatcaggaggaaataactcccagatagcaaacaaacaatgcacacacacaccaaagtgctgctgagcacagaaagacggagaaccgcctcctcatcctgagcttcggcctgaacgctgctctcgtggtctgatgtctcgtcccgagcttcacttgcagtctgatgtctcgtcccgagcttcggcccgaacgcggctctcgcggtctgatgtctcgtcccgagcttcggcccgaac

SEQ ID NO: 28276 - DNA, 616 bp, Homo sapiens
  chr9:140392392-140393008
  hypo
cgaagtgtgtttccgagctaagctggggtggggctggggaaatccagccttccatgtgtggtttccacagtaacttccgtgtgtggtttccacggtaaccgtgctttgcccatccccagctcctgcatgccagggcagcatggatgcggagtgtgtggcacccacggcctcacctgtatattgctcgcccggcctccacctccacccagtccagggcaaagtcgatttgccgcacgaaggacgacatcctcttcaccacagtgtgcgccacacccaggacgacggtcggctgcttccgcatgattctgccgggcagcccagagtcaatcctgccccatccctccaaccctacccttcgcccagggccgcagtgctcgggaatggatgggacccacaacccccaccccacccggaaagtagagagaccactggcaggggctgggacggggcacgcaccagtcagctgcctgccccacggcacagcactgcccaccacgtgcccagtggccagcagctgttggggagcccagagagccccctcctggcaggcccgcgagtgccccttggacacgggccctgtgtcaggctgcggtcctggcaggggactgcacatgcc

SEQ ID NO: 28277 - DNA, 370 bp, Homo sapiens
  chr9:140682727-140683097
  hypo
cggtggcagatgaccgagcggctggtaggactggcatgcagcactcagggggcccaggacgttggcgaaggctccacccgcaccgccttctgccagcgcctcagccggggtgacgctcacgcaggtgtaaggaggttgcaggtttagggatcttgtaggtgaaaggaggttgcaggcgtacggaggttgcaggtgtagggagattgcaggtgtagggaagttgcaggtgtaggggtccttgcaggtgcagggatcttgtaggtgaagggaggttgcaggtgtagggggccttgcgggcttagagggcctcacaggtgtaggggattgccgtgctgcaggtgtctcttgtcccctcggggactgggagagc

SEQ ID NO: 28278 - DNA, 395 bp, Homo sapiens
  chr9:21031427-21031822
  binary
cggtagcgctgcgccttgctggcgggcggggggtgccgcccgcccgcccgccgcagaggggagctcccgcctccaggccctccacccgcgccccctcccctcgggattcggccgagcgccctacctgggctgcagccaggcgggcagcgccaagggccccatgggccgccgccgccagggcttccagcgcggtccaggaaggagtaccggggaggaggcaggggcggccccgcggctgggcgcggaagggcggggcctctccacactcagcagtttacaaaaagaaaaagcccgaggtcgtgcgttggggaagagatgaaaacgaagttctcgaagtttctgcagcactgctagagcgcgtcagggcgcaaggctgggaggcggctcgcgttccc

SEQ ID NO: 28279 - DNA, 234 bp, Homo sapiens
  chr9:21994206-21994440
  hyper
cggcgggcgcccctggcgctgcccactcccccgtgagccgcgggatgtgaaccacgaaaaccctcactcgcggcgggccgcacgcgcgccgaatccggagggtcaccaagaacctgcgcaccatgttctcgccgcctccagggccgagctcggcagccgctgcgccgccctttggcaccagaggtgagcagcgccactcctgcccccttaactgcagactgggacccacgcacc

SEQ ID NO: 28280 - DNA, 1147 bp, Homo sapiens; identical to SEQ ID NO: 24721
  chr9:36257857-36259004
  binary

SEQ ID NO: 28281 - DNA, 2374 bp, Homo sapiens; identical to SEQ ID NO: 27341
  chr9:37025701-37028075
  binary

SEQ ID NO: 28282 - DNA, 384 bp, Homo sapiens
  chr9:6412586-6412970
  binary
cgcctccgccaggcgacgggaaaccctcggaagtgggtttccgcgcgaaagtagcattgcggccaggcgggaaacgtgttcgcgaagcaggagggcccccggggcctttcccgggcgacccgacccgccaggccgcgtggcgggagctttcctgttgagcgcggtggagcgcacacatttccttcagttctttctcggaagtttaggccgcacccacccgcgccccctttccaggattatacaagtgcacgccagggtttcttatttttggtgtgtttttgagaccaaagaaccatatccgctaagcctgaggaggcacccgccccctcagctctgaaacgaggcctcaaaacggcaaccgatgtggtagccgcgcaatcttcc

SEQ ID NO: 28283 - DNA, 1404 bp, Homo sapiens
  chr9:6644756-6646160
  hyper
cgactacaaagccttgtgggaacctcattgaaatcgcctaattagggttctttttaaaagaaaaggaaaactctgagcaagccagaatgatttggaggaaagaaaatcgtgaagtggggtggagattccgccactcggggttggatttcagttgcaaccggagctaaccggtaagcccactcttaatcagggggtcttcctcctcttgcaaagtttaggtccatccacagggccacttgggctgggggtggtttaaaaatgtacacttttgaggcacgaagactgggtgcaggagaaagtaagctgttaagaagtaagaaggcacgaggaccaaaggcacgaatttgcttccacgccacggcccgggacccagggtgcggggaccacgcggagcgcagcagagctcagggtaggagccgggaggccgcgcaggcagagcccgggcagggcggaggggaggccgcggagggccgggtggaggtccttaccgccagccccaaggtctgcagcatctctctctggtctttgtccccagggccgatgtgcctccgagcgaagtcgtcgtgtctgggcagaaggcgctccaggaggcgcgaggccccagccgcggcgctgtccccgccgccactgctgctgtcccggctccgcggcgcccagcacggccccgatcccccagccaggcggcggccgcccccgaccccgcggcccaggcgcagcccccacgccctggcacaggactgcatggccgcggccaccgtcccctgccccggcccgcaagggtcagccgcgctcttggcccctctcctggcctcggtcccccgggtggcggctgcgcccggcctggagcccctttcgctggacagtcggccggacagatggatggacgctcgcgggcaatgaatgggcgctgcgctcaaccaagacactcgcgcaaagttgtggctccacccaaggcacctgctccgcacactttaagcggcgccctggaggcgggaggtgggttggggccaggaagcccttggccaatgaaagtagacagagggggagggggcggaacagttcccgcccccgccccctcttcctaccctcttcccagcccttccgtggagtcccgcttcccctggaccggaggctgccatctccagtcctacccactccgacgctggctggtgccgggggccgggacgctccgtacgccgcccgccagggtgtggagccgcactggggcaagatcaggtgggacagcccaaagactccgggccaagttcctgggggactcggcggagatggaagatgattctcgaagctctccatttccttaattttgaggtatctttctctgtcacatttcatctcagggaaattaatatgggcagatggcggttcttttatctttgcgggagc

SEQ ID NO: 28284 - DNA, 183 bp, Homo sapiens
  chr9:66494093-66494276
  binary
cgcccagtcggcggagcatggtctgggtggctgctggaatgcttgcgctcgaggcctgagggacccactgttggtgccacctgccctgctctgcgcctctccacgcctgcgccggcgccccctccgcgcctgcgccccctccgcgcctgcaccccctccgcgcctgcgcctctctgcctttgc

SEQ ID NO: 28285 - DNA, 95 bp, Homo sapiens
  chr9:71583917-71584012
  hypo
cgtagcttctgagggcctcatgtgcttcatgtgtgcaactgggatgttaatacctaccctgatgggttgttaaaactgtaaatgaggccgggcgc

SEQ ID NO: 28286 - DNA, 1232 bp, Homo sapiens; identical to SEQ ID NO: 24723
  chr9:71788570-71789802
  binary

SEQ ID NO: 28287 - DNA, 1396 bp, Homo sapiens
  chr9:77112712-77114108
  binary
cggcggcggcggcaaacgtcaccctgcagccacggcgtccgcctaaagggatggttttctcggcagagcagctcttcgccgaccaccttcttcactcgtgctgagcgggatttttgggctctccggggttcgggctgggagcagcttcatgactacgcggagcgggagagcggccacaccatgcgaggtaagcgagtctgcgggcaccgaggctccccgagtccggccaactccagccagacggggagatgggggaggggagggcacccagcagaaagggaaagaggttgcccaggcgcagttccccgaattcgctctcgcaggtggggctgcaaatggcctgggcgtagaaagttgcgggaaggtgttgatgtctttcgggagttctggagggacgcgggagggcgcttttttggagaggggagacaggctagttggttcttaccagtccttgagttgcactgaatcttttttgcttgtcgctctcgggtgcggaagcggacgcgggatggagaaagccgaaagagggatgcctctggacaggagcagtttggaagcgcccggcgcgcagtggtcgccggccgggtttgggcgcgcggggcgcaccggccgggggcagggtggacacgcgcgggcacacactcgccaggttacgaggcccactaagcgtcctggccagcaggcatgtcccttcgctggagtagcaagcagaagagcagtgctgcgaggctggacgcggctgaggaaacagttagttccccggcacgcggctgaggaaacagttctgcggcgcgcgccttcgtgccggcgctgcgccctggccaggtcctcgtgcccgagcccgcgcggcccagggagtagtgcgaccccggaaaagttgtaatgagaaagttctggaggcttggaaaggccacactgctcacagtcggagagtcatgggctccggctcttttgtcagataaagggccggtagtggaaggaggtgctggtgcaccctcgggccaggaccctcgcagtcgcaggcggtggcggcggcggcggcgggaccccggggcgagctggggtctgcagggatgcgcgccagggactgtagcgttacgcttgctccggctggactctgggcctctcgaagggctggagggtgggtttcggggagtcacttggtctcctctcctgccttgccggagacctcaggtttccttcgcgctgtgctcggcctttcttcactcttttactgaagagccaggcgggtgtccgcttgacatggggatctgtgcaagctctgggcacccacccccactcccagtccctcttcctggccacacagcggttaatcgggggctcttctctatccttcgcacgtacccctgggtcttgacaacagaaagttagtaac

SEQ ID NO: 28288 - DNA, 96 bp, Homo sapiens; identical to SEQ ID NO: 10856
  chr9:80007524-80007620
  hypo

SEQ ID NO: 28289 - DNA, 877 bp, Homo sapiens
  chr9:841339-842216
  binary
cggctctggtcttgacctggggagcccagcttcctcggtgcaccgtgctttggcaaccgggtcttggcgcctccgagagcggggcgaggggtgccacgcgattcccaggccgctctgtatctctcggtgcgcttgcagggaccctgcagcaaagccctggatgcttgcagccggtgcaagtttgcaagcagctggagagcggtggctggagtcggggggcggtgggcgtggccacgctccctcccaggcagtcccgggaatgttctgaaaagtatccgaaagttctgagtcgcgcgcgcgccaaaagaaaaggcacaaccccccaccactccgggcgtggcgtgcccagacctcgccactccagctgcgcctccggctgcagcgcacacgtctcctgcgcctcctcctccggagcgtcgctgtccgtcgggttcatccctcgcagcagtctccaggcgagagagggggccagagtgctcgcacttctcctaggggcaccatgcccaacgacgaggcattcagcaagccctctacaccgtcggaagcccctcacgcccccggggtaccgccgcagggcagagccgggggctttggcaaagcgtctggggcgctagtgggggcggccagcggctcgagcgccgggggcagcagcagaggaggcggctccggctccggggcgtcggacctgggtgccgggagcaagaagtccccgcggctgcccaagtgcgcacgctgcaggaaccacggctacgcctcgccgctcaagggccacaagcgcttctgcatgtggcgcgactgccagtgcaagaagtgcaacctgatcgccgagaggcagcgcgtgatggccgcgcaggtgggtgcgggcgtgcgggagccc

SEQ ID NO: 28290 - DNA, 561 bp, Homo sapiens; identical to SEQ ID NO: 23406
  chr9:88137539-88138100
  hyper

SEQ ID NO: 28291 - DNA, 988 bp, Homo sapiens
  chr9:89560777-89561765
  binary
cggccgcccgatgcagcagcgccgctgcccgggcgcggtgggtgcgggacgccgtcgtcgtcgtccagcggctgctcaccacccgcgcccccggtgcgctgctcgtcatcgtagtcctcatcgtagtagtcgtccaggcccccgtccgagccgctgctgccggggccgttgcccagctcggcgccgaagcacaggcgggccatgttctccttgaccgactcgcagatgggccgctcgaggccgtcgcacacgcagtcgttgagcagcgccgccttgggcatagccagcatgtcctcaatgacggtgcggcattcgtccgtgcagcgcagcccgttgaagactttgccgcagtaggtcaggtagcggctcagcgccaggttgcagcggctgtcgcggtcgcagcgccgccgggcctcggtgcagcccatgaccccgcccgcgccggggccgcccgcgccgccgccgctcgtccggggcaggcacggctcaatggcgcgcttggtggacttgcagttctcgtcctgcgcgcagtcacagtcctccagggcgggcccgcggcgcgtgtggttgagctgaatgagggccgagatgcagtgactcgggcagcgccagcgcgacgagaaagaggcggccgaggccgggaaagcggcggcggcggccccgggcgcgtcgcccccgccgtgctgcgccagcaccggcgcgcacgcctcggcgtactggttgtaggcgtagctgcactccggctccccctggcactgcagcagcgcctgccagcagatgaggcggcggccgtgcgccagccccgatccccgcggcgccgagcccagcagctgcagcagcgccatcaggcacagccaggcgcccggcactgtccccccgcgggcctcgccgccgccgcccagcagcgcggccaccatcgcgggcagcggcggccgccgggagaggaggggaaaggagacgaggcgcggggagcggcggacgcggagcc

SEQ ID NO: 28292 - DNA, 86 bp, Homo sapiens
  chrX:44202877-44202963
  hyper
cggcaggcagcggcgcctcccggccgtgttgtttggcccccacgttgcctggagacgggaagcggcgtcacggagggaggaggggc

SEQ ID NO: 28293 - DNA, 1398 bp, Homo sapiens; identical to SEQ ID NO: 24730
  chrY:16635744-16637142
  binary

SEQ ID NO: 28294 - DNA, 111 bp, Homo sapiens; identical to SEQ ID NO: 10860
  JH636052.4:789300-789411
  hyper

SEQ ID NO: 28295 - DNA, 168 bp, Homo sapiens; identical to SEQ ID NO: 23420
  chr1:100928315-100928483
  hypo

SEQ ID NO: 28296 - DNA, 2283 bp, Homo sapiens; identical to SEQ ID NO: 22736
  chr1:108506290-108508573
  binary

SEQ ID NO: 28297 - DNA, 280 bp, Homo sapiens; identical to SEQ ID NO: 10864
  chr1:109839458-109839738
  hypo

SEQ ID NO: 28298 - DNA, 1801 bp, Homo sapiens
  chr1:110610350-110612151
  hyper
cgacctgcagaactcgctgaggcccaggctcctgcagctcccgccgaagactcaaagccagagtggacataaacgccgtgggcaggaccccggtgaggcctcggtgcccttcttgggggttctcagcgttggcccagaagcctcagcccgggtctaagaacttgggactctcctcgactttggcgatcggccgggtcatccggctcagggcctcagcggcagcgggcaaaactctagtaggagtctcttgccgagggcgtgtttcgacgtcagagccaaactcgggacagactagccaagcgcggacggcgcgagagtggctggcagcgccagcacgcagcctgggttcagagcaaggctgggcgctctcagcaaagggcggcctggggctgcgcgggcggcggactgcaggcgggagaagagcgaggtgcgccaggctctggggcgcgcaactgcccagcctcgtgaaagatcgcgccgcagatggggcgcagctgcgcgctcactcgtgtggactggaaacgctccgagccggttattttaaaaaccgggaaataaggcgggttccctcttcgcccgccacttcccaccaagtaggctgtgcggccctgggggctgactgtcctcaagcagccaggctccaccgcgcgccgcgctgcgccgaggtccgctctgccgcagggacgctggcagcccgttgaacaccggcaagagcgccagaggctagcggccgccaggatctctaccaggctctgctcgcacccgcctgcctccctttcgtttggcctgtcctccgttcaactgaaatcgttaattttcttacccccttgttctcattttgatatattctacgctttaaacatgctccgttttcttttgtttagtctgctccctccctctttgtcctttcccccttctctagttatccgtttcgttcgatcttgctcctgctttttttattcgttcgttcctcatttattcattttagttcatcccagctcgccgactgccatttaccctctcgttctcgccgcgctctccgttgttttgttcaatttcccttccccttttcttggttgtcgctcgctttctttggttttctttctcggtatttcgttgtcaaggccacccttgccgtcggatcccggggtgctgggtttctcccggccgctcgttccgcaccagcgctctctgcagttcgcgcggcaccggtgtggtccgggggcccgagctgtcggtgccggatgcggcgcgcctagcagggacgcgggcctgggggggtggctcctgcccgacgcggagcgctgagccaggccgggtacctgtctctggcggtgctcaccgcactgcgcggcctctgccgtctggctgggatcagaggagccaggccaactgcttctcattaagtcccaactgtggtttttatcaggaaagcctctttcaaagggcacagacacgaagctccgcggactcgttcatttcctccgttgacccacacacacctccccgccctcccctacacattcccaccgccccggctgggcgaaagccggagatgcccggccactccgtggaggcccgcgaggcgccagccgggcggcggcagggggttgaggcggatcttggaggatccagttctgggcctaggctgcgggatatggcagcgcagataaggtgggtgcagtgcggaagccgagacgccttacaggtcatagggtgcggcggacggccgcagagctgccgatcagcctgccaggcccctgccttcaggcgcattctcggatgccggcgcggtccagcc

SEQ ID NO: 28299 - DNA, 910 bp, Homo sapiens
  chr1:111216710-111217620
  binary
cggacacgatggcgatgccccgggccggcccggagctctcggggtactcgaagagcagccacacctggcgctggaagtcgcggcggggcaagggccgctcctcctcccgcaggaagccctcgtcctcgcggaacttctccatggcctcctcgcccagctggtagaagcggatctcctcggagaaaatgtcgatgggcacgttgaccggccggcggatgcggcccccggactgatagtagtagaggatggcgtcgaagctgggccggttgcggtcgaagaagtactcgttgcggagcgggtcgaagtacctcatgcgccgcttggggtcgcccagcagcgtctcggggaactggcaaagggtcttcagctgcgtctcgaagcgcagcccggagatgttgatgaccacgcgctccccgcagcagtcctgctcgcccgcggccggcagtgagggcggcagcggctcgtagcggtcgcagccgccgccgccacagccgccttgaggcggggcccctccaccatcggccacctccggctccagcaggtggtccccgggcaccacggtcatgtcgggcggcagctcgcggcctgcggcgggctccgcgtagccgtggttcaccagcgtgtgggcaccgccgctgctcgctgggcgctgaggagggtgggcgcggtggcgggctgagggcggcggcggcgagcgcagaaggctgaggcgctcgtccatgcggcggggaagaggcggcagcggtgaggccaggtcgctcctcctcgcgctccccgccctttcgccgcctccgcccccgagccgagcccaccgcctgttgcagccaaagccgcgatgctctgtctgggtctggcgcggtcagccgggctcccgcacggggacgcctcctccctccttctcgcgctctcc

SEQ ID NO: 28300 - DNA, 360 bp, Homo sapiens; identical to SEQ ID NO: 10865
  chr1:1152902-1153262
  hypo

SEQ ID NO: 28301 - DNA, 1171 bp, Homo sapiens; identical to SEQ ID NO: 23421
  chr1:1168275-1169446
  hypo

SEQ ID NO: 28302 - DNA, 367 bp, Homo sapiens; identical to SEQ ID NO: 6346
  chr1:1194390-1194757
  hypo

SEQ ID NO: 28303 - DNA, 311 bp, Homo sapiens; identical to SEQ ID NO: 23424
  chr1:12304451-12304762
  hypo

SEQ ID NO: 28304 - DNA, 575 bp, Homo sapiens; identical to SEQ ID NO: 6349
  chr1:1562211-1562786
  hypo

SEQ ID NO: 28305 - DNA, 304 bp, Homo sapiens
  chr1:156468615-156468919
  hyper
cgtataaagaggtcctcagccactcccacaatagtcctaccccacccccatctcctgcccaacacactgggaaaccacaggaaggaaattcattcccaggcagggccgtgggagctgggacagccagactaagtcctggggcgggtgtgaccccgtggccacaagcgggtggacatctgtgaacactgacatgtgccttttcaatgctctcctcagctactgagaccttcctgttggggttgggagaggagtgggaggtggacagctcccaaacgccaaaacacccaatctcaggctgacctgc

SEQ ID NO: 28306 - DNA, 571 bp, Homo sapiens; identical to SEQ ID NO: 26029
  chr1:158150571-158151142
  binary

SEQ ID NO: 28307 - DNA, 158 bp, Homo sapiens; identical to SEQ ID NO: 6663
  chr1:161367435-161367593
  hypo

SEQ ID NO: 28308 - DNA, 334 bp, Homo sapiens; identical to SEQ ID NO: 23682
  chr1:161367769-161368103
  hypo

SEQ ID NO: 28309 - DNA, 571 bp, Homo sapiens; identical to SEQ ID NO: 22984
  chr1:161368929-161369500
  hyper

SEQ ID NO: 28310 - DNA, 678 bp, Homo sapiens
  chr1:161369566-161370244
  binary
cggtggcaggttttccacaaatgactctgaaaagtcagaggctcaccactgtgtctctgacccacgagaaaagtacccgggcgggccacccacagcttcgggatcggggcgcgcagggaagtagccagcaaagcaggtaagtcccgggctgctcgcggcggggtcatgactgagggcacaggggtgaactccatggtgcttcctcaggaaacttccggcgcagtcagggctgcagccagagcccggagatagttgggcagggctccaggcgtccccgaatgctcgtcgtggagttttcctgatcctgtcgggtccctaaggaacgcttggcggggagcgtggacgccctggggccaggccaccgcggtcactgagagccacccccccggaaactggagaaaaacggagtagaagagacctaggggacagacttggccgggtcaagggaaaccagctcatatttggaacaaaatacgccttatgtttgcccagcactgaatttagaagcattttcacattctcgagtttaactagttttgcaacagtgccacgagcaaattattaaacgtgttttaaagatgaagagactgaagctaggtaaattggacttgggtaagatggaagcgctacttaacgttaaggagagtctgcgaccctgatgttctcaggctgtatctc

SEQ ID NO: 28311 - DNA, 248 bp, Homo sapiens; identical to SEQ ID NO: 23428
  chr1:167393552-167393800
  hypo

SEQ ID NO: 28312 - DNA, 557 bp, Homo sapiens
  chr1:170640136-170640693
  hyper
cgagaactttggggcttatttttaccatcattgagtctgcccaggctcagctctcttacaaaggtataaatctgaaattcatgtattaatttgaatccccaagatccgagttatgagaaagggcaagggcaggctctactcctattttgtttactttcaccgagttactgtgaagtgattggaaactttcttaacgggcagagagagaatacacggaaactcggatgcagtaataaagttgacataggagtcggaacagggggctctttttggatctcacctttactggggcttgaggttgtggaatgggtggaagagtaattaactgaatgaagaattttaacgttgaaaacagagcccacagtatttttggttatagtggtgtggtctctgcctcggcaaagaaacaaacacccccaccccatcttcgcagttctcctctctgctgtagcgacgccaggcgctgctttccgccgggtaaattagcggcgagcctcgccagacgctttcctccttgccttctttcgccgaaagggggcgcgctcctcccaggctgc

SEQ ID NO: 28313 - DNA, 247 bp, Homo sapiens; identical to SEQ ID NO: 23429
  chr1:171554936-171555183
  hypo

SEQ ID NO: 28314 - DNA, 692 bp, Homo sapiens
  chr1:177140120-177140812
  hyper
cggagcgcggagtcggagcggggacgcgccgggctgcagctctgggatgcaatccgcctgcctcgcaagctgctcgccgctgcgctggcagcgcttacgctgagctcggaggatcccattaggacttgcccggggatgtgcacctgccgtgcgctccgaggtcagtggcaggtctgcaggcagccgagggagcggtgaagccggaagacctgtctctgcccatgtgcaaggcagtgatttcgggtgagagagcgggtgggtgagtctctttagagttggaaagaaggcaaaatcttgggtttctcctcggcggagggacaggggactcccccagttgggtcttgcacttcccttacctctcccaccccgcgtgcgccccggcccagtgccgaagccccacttcaaagatgctctgggagaccgggatcctggctgctcagcgggaaggcagcaggcaagtggtctaacgttggcggcggtggcggtggcggcggcggcggcaccgacagtaaagcggggagcaagagaatttgaaaagagacatccgctccctctcacacgctgagggggaggcattcgcgtttccccaaatgagaaagaaccacaagaaatcatgaagtaaaaactttggaaagctgccactggagatgttgcacaaaaacctggaatcttttaggagtctcctcccagtc

SEQ ID NO: 28315 - DNA, 498 bp, Homo sapiens
  chr1:177150742-177151240
  hyper
cgcagtgaggactgtgggggcagctaatgtctgccaccccctcactcggtgttcagccatttatcatcaatacgtcgttaggcaggagcaggggcaggtggctgacgggtgtgccggcggctggcggggtcttgggaggcgccctgcacacgcctcttctttctgaaatctccgacctttcggatttgagccgcgagggaccgcggagcaagggcagcctcctccggaagcctcgggtcactagagacccctagaggcgaaaagctgtgttacaagcccccggccgcagaggcgcaggcgggattcttgccccggaggttgccgaggagtggccggtacctttcctaaaacccttatctgtaagtacactccggcaagctcgaaagggacagcaggggagccatgtgtgcgtgcgcgtgtgcggagaaggaatggggagggacagttgcatttgcagaagcaatcctgtctggaactaagctgattagtcctggtgcc

SEQ ID NO: 28316 - DNA, 209 bp, Homo sapiens; identical to SEQ ID NO: 23692
  chr1:178531640-178531849
  hypo

SEQ ID NO: 28317 - DNA, 161 bp, Homo sapiens; identical to SEQ ID NO: 24786
  chr1:180925259-180925420
  hypo

SEQ ID NO: 28318 - DNA, 43 bp, Homo sapiens; identical to SEQ ID NO: 10884
  chr1:181286822-181286865
  hyper

SEQ ID NO: 28319 - DNA, 1034 bp, Homo sapiens
  chr1:181451311-181452345
  hyper
cgtgttcgtggagcctgggaggtgcggaggagcggcgacgcggccatggcgctaggcgcgcaaaggccccgacaccttactagggcggcggcgggcccgtggcaccgctcccggcaccgaacagggcacagcactggggacacctctctgcagggacccaagacgcgcgtgcgtgtgcgccccacgccaggccctcgctctcttgcggagactccgccgcatcgctggctgcacctgcctctctcttctcggcattacttgggggaaaggggactcttcactggacctttgcagaggtggctgctaccctttggccacataaatcaagaaggcaagccagcctcaccttccaggaacctccagccttccggctgcgtccccgcccctcccgcctggccagctcctcccccgcttctcccagcgctcttgcgcgcctcgctgcgcctctgcgcgccgctcgctgtcctctgcctcgcctccccattctccttccgcatcttctccagtgctccgccgagggcgctgcctgcggggaagagggagactgagccgttagtgaggaagttcggtctgtggacaagtgtggtgccaggccgccgcgaggctcggctgcaacctgttcctcgcccgccggtgctcgccgcccgcccgctcgcactcccgccctctcggcggcgcagccgcggatcgctgttgcatgctgatccggggaggcggcggtggcgagcgctccgggcggatgctggcactcaggcttcgctgctctctggatgctgctcaacttctagcccaagcgcaggagctttgaagtcatttgtcccttttcgcttggatcgacttcttattttgagattttgggcattgcggtttacgcaggaacctcaatatcgctctccccacctccctccctctttctccaacctttggatgcgtctctgctggcagatataaagacccaagtcttcgcggtggaatttcttagatggacttgcaggggctggcgttataaagcatgtcatcgtaaccccgtcctc

SEQ ID NO: 28320 - DNA, 487 bp, Homo sapiens; identical to SEQ ID NO: 23430
  chr1:19676386-19676873
  hypo

SEQ ID NO: 28321 - DNA, 398 bp, Homo sapiens; identical to SEQ ID NO: 22986
  chr1:200009765-200010163
  hyper

SEQ ID NO: 28322 - DNA, 148 bp, Homo sapiens
  chr1:201851133-201851281
  hypo
cgatcagaggctagacctttagttagcagtcacgggaaaattccccattctcacggggatttagactaggtcttaaccatactttaccaagattccagtagcaaagcacccaaaagtaatcgcaataaaattccaatttttgtaggcc

SEQ ID NO: 28323 - DNA, 225 bp, Homo sapiens; identical to SEQ ID NO: 6679
  chr1:205245793-205246018
  hypo

SEQ ID NO: 28324 - DNA, 530 bp, Homo sapiens
  chr1:205399667-205400197
  binary
cgtggttcccatgagacaggagaaagccgcccatcaccgtggagaaccaggaatggcagaccacgcggacgccaacagtttacgcagctccccagctaggtgcaaagtggccaaaggaagagccggtcttccacacgcacacctccgcgcccacactgccccaggagcttcccactcagccgggggacccccaagcagccggcgaggcgcactgcgcacgcgcactcaggccgcggctccagccgccctccctccgcagtggggcgccccgcccccgcgccgctcagttttaaactcgcagcagacggaactcgacttaaaaataactattttgacagttcagatgtaaatatgtgagtgacgcgtggggctgtttttccttcacacttcccctcacccctcgctccctaccccagctcaattcggctgaggctgagatgatgggagagcgccgtctgcaggatgctccctaaaatgcagcaggaggaagagacttgtcctagagagcccagcgagcttgggggtggggc

SEQ ID NO: 28325 - DNA, 829 bp, Homo sapiens; identical to SEQ ID NO: 22742
  chr1:207669273-207670102
  binary

SEQ ID NO: 28326 - DNA, 207 bp, Homo sapiens; identical to SEQ ID NO: 23699
  chr1:2141579-2141786
  hypo

SEQ ID NO: 28327 - DNA, 221 bp, Homo sapiens; identical to SEQ ID NO: 10891
  chr1:2142332-2142553
  hypo

SEQ ID NO: 28328 - DNA, 203 bp, Homo sapiens; identical to SEQ ID NO: 22991
  chr1:214387644-214387847
  hyper

SEQ ID NO: 28329 - DNA, 775 bp, Homo sapiens
  chr1:220101064-220101839
  binary
cgtggggtgagaagaaagggaccgggtgggaggaggaaggaagggccaagcggtccaaaggatgcaaccgaaaggcacctgctacgtttgcgaacacggtcgcccccttctcccgcttcctttccaccgaggtcccccggagggttacggccgagtccgagcctggggctgtcgggtccgccgcgcgccgcgggtcctccgcgccctgaggccccccgaaagcgccggggacacagccctccgccagctgctgccgctgctgcaggcggcgactgcgtccccggaggcagcacgcgaaccaggcggcgcagtcctggaagatgagcagccccaccacgttgaccaacagccccaggacgccgacgatgagcaccagctcggggtcatcgatgcgctcgggccgggccaggcgcagcacggcctccacgaagatggtgaagcagagcgcggtgaggaagaccgcgttgctcagcgcgcccaccacctcggcgcgggcgtagccgtaggtggcgctgaagccccgggtggggcgccgggcgatgtagccggcgctcaggcccacgcacagcgagatcaggtcggagagcatgttgaaggagtcggagagcagcgcgatggagttgcccaggtagccggagaccagctccgccacgaagaaggcgacggtgagcaccagcatgaagagcagccggcacgtcttgccagagtagcggcccatctcgccaccagccccgggcgcccggcgccgcccaggggagcgcagcccaccccgcgc

SEQ ID NO: 28330 - DNA, 320 bp, Homo sapiens; identical to SEQ ID NO: 24805
  chr1:220700617-220700937
  hyper

SEQ ID NO: 28331 - DNA, 653 bp, Homo sapiens; identical to SEQ ID NO: 22745
  chr1:223936543-223937196
  binary

SEQ ID NO: 28332 - DNA, 64 bp, Homo sapiens; identical to SEQ ID NO: 8881
  chr1:224368640-224368704
  hypo

SEQ ID NO: 28333 - DNA, 984 bp, Homo sapiens; identical to SEQ ID NO: 24808
  chr1:224804868-224805852
  hyper

SEQ ID NO: 28334 - DNA, 405 bp, Homo sapiens
  chr1:2265957-2266362
  hypo
cggggctcccttgggggagcaggcctggttttgggctgcctgtcccaacacgacgagagggccctggctgtgtggccgtggagccggcaggaggcaggggaagtggccgctggtcacagatgtgtgccccgaagagacgacatcatttgaacactgaacactccgactccgcggccaggtcgtcctgggattgaaacaatcctagtccaacgacacttaactcgaggacagtgcgagccctttggctgggaggcccaggctgggagcagacgccgacccctccgttctctcaggtggaaaagaacgaaagccttctttctgctgaaataagacgttccaacatcaccctcagcgcggaggttgccacggttctggagcgaagtggaggtgccgccctgggcgttc

SEQ ID NO: 28335 - DNA, 932 bp, Homo sapiens
  chr1:2275654-2276586
  hypo
cgagagcggcatcacctgagggctgggcgtggccaggcacaaggggctggcgggcctgggagggatctgcagggcaggttgagacatggttctgaagccaggcagctgctccccagaagctccggtgagcacactcgacaaggtggtgcggcgagctggctccgagcgtcccccacagggccacattctcactattggggtggcaggaaggcccagcgaccaggagcatgtgtggggtctgggaaaggcctgggggacggggtgtggggtgcaggagccccaaggccgatgctgctgaggaggccaggagcggggaccgcacagacggcagttcctctggaggggggtcccgtgtgggccgggctgtgcaaaggacacactggtccctgctggcctctcagggcaagcgtgaggaccctggcctgctccggcctccttccctgggggcctcgtccctgcgctgcacagatggggcccggccgccccagtgggaagggaaagggggagcgctgtgccaactcacaggctctacgagccacaacagctgcctgcagagcctgggggcagggctgaagctggccatggaggaccttgggggccacctccaccttccagcagcaaatgccaagtccccgaatgcagaattctgccagagggagcatgaccgtctctctgttggcacaaagcgagagcatcaaagacagcgtcagcccccgcgagggtccacgcatgctcacactctgcgctcatggatggccacacacaccctgaaaacggcgtcagcctccgggagggtccacgcgtgctcacagcactcatagatgaccatatgtgccccgaagacagtgtcagcctccaggagggtccacgcgtgctcacgctctacgctcatggatggccacatgtgccccgaagacaacgtcagcccccgc

SEQ ID NO: 28336 - DNA, 1280 bp, Homo sapiens
  chr1:228195275-228196555
  binary
cgagagagaattcgccggagactttcctcaaaaaccgtatcttacacacaaacacacacacacgttttaaaacaaagtcgatgagacaagactgaacagctcggagcagcgtggttacgtaaagaaagctgggacccggcggggagtggcgcagagccggcggcggggcgcactgggggccggccctgggccccgcgcgcctccccgccgcagtccgggcacgggggtttccaggggccctctctgcgagccctccgcatgggtccacctggcaatgaggggctgctgtagagagagttaagggtgagttaagcacggggtgtgaggggctccaggaccctcaatcagaaagcgctgtgctgcgccctccacaccagaaaaggcgcgttccgtgagaccctccccagcctggcgatggaagtgcagataaaccaaaggaagggtcccgaaaggtctctctcaggcctcccacctccactgcacatatcctgtgggagggggaacggtggccacactttcgccagggcttgtgatccctcagagccctcaccaagcaaggatcaccccagttccgaattaagggcgctctgagatgcccaagattgaggaacacaagtgggaggaatgtgggcgcgcagggccgggcgcagcgctggtaggacccacagttggagagaagcctccccacaagcatgcacactcccccccatccttctccgacggcagcctggaattataataattacgccgaggggaaggggggagacccagcgagccgaggtacatctaatccgataataatttttctcttcgagatggttcaggagcgggggctcccgcggtaggggcgccgggccaggagcagcggggaggggaaggggcagccctaggcagctgaagggcctggaagaggccacgaggccgcggggacgcgcttcggggacccccgcgcgcccctatttccgcgtgccccatttcccgtgcggcacctgctgcgcccagtggcccacctgagggtcaggctcggggctcgccttggggtgcggggatactgacgcgcgtccagacggccgcagggagccaggggcagcgcgtccgtccgagagagccccgagggctgccggcttacgcaccaggcttctaattagaacccgccgccgcgttcctgagcgcaaaaggaagctccttcgccccgcgcccttcccataaatgtcgccagcctcctggcaaccccgcgccctaggatctttgtcttgtcggccctgagggttcctagcctc

SEQ ID NO: 28337 - DNA, 331 bp, Homo sapiens; identical to SEQ ID NO: 6688
  chr1:228280981-228281312
  hypo

SEQ ID NO: 28338 - DNA, 203 bp, Homo sapiens; identical to SEQ ID NO: 7694
  chr1:228361379-228361582
  hypo

SEQ ID NO: 28339 - DNA, 999 bp, Homo sapiens; identical to SEQ ID NO: 23709
  chr1:228528433-228529432
  hypo

SEQ ID NO: 28340 - DNA, 304 bp, Homo sapiens
  chr1:2331316-2331620
  hypo
cgaggttaccttttcccgtagccagagggttccacaggcagctcactgtggtgcacagagaccgccgggactctaatgccagcatcgggtcgggtcaggctttgggcggccttctctggtttctgaggagctgtgagctgaagtgttcctggtgcttcgtgctccactattggaagacttacgcagctcctgggcctgcctgggccaggtaggggccctgagttcatgcctgactggccagccccaggcgaggaacaaacaactgcattccaggacgtggtggccattgagggaaaacccacac

SEQ ID NO: 28341 - DNA, 35 bp, Homo sapiens; identical to SEQ ID NO: 10906
  chr1:2331916-2331951
  hypo

SEQ ID NO: 28342 - DNA, 454 bp, Homo sapiens; identical to SEQ ID NO: 23432
  chr1:234724591-234725045
  hypo

SEQ ID NO: 28343 - DNA, 162 bp, Homo sapiens; identical to SEQ ID NO: 5877
  chr1:234812061-234812223
  hyper

SEQ ID NO: 28344 - DNA, 470 bp, Homo sapiens
  chr1:2359894-2360364
  hypo
cgtggactgcatctgtcctgcatggggtcctgcgtctggctcgcccggtgccgtgctgtggggcccacgccaacggctgacctcatggtcctccgtggcctcgcctaggcttgcggcagccgacgtggcgttgttgcctaattaggttggactgtgccagccccagcggagcccacgcccggcccttgcgccggcagacgtgtcggggcacggctcctgcactcccactgccgcaggaactgctcaggaacctgccggtctccggctgggacggtggctggatcagctcaagcctccagggccctgaggctgaggggctgagtgctcattccagccgcctcggggaacccgggctgggagaccccatgcctgggggtgagcctggagccagggcagtgcggtgagaggctccggagagagggctgggcaccaccaggcttgggtgaggagggaggcctctggtcgagagc

SEQ ID NO: 28345 - DNA, 185 bp, Homo sapiens; identical to SEQ ID NO: 23433
  chr1:23693488-23693673
  hypo

SEQ ID NO: 28346 - DNA, 1272 bp, Homo sapiens; identical to SEQ ID NO: 22747
  chr1:237205449-237206721
  binary

SEQ ID NO: 28347 - DNA, 807 bp, Homo sapiens; identical to SEQ ID NO: 22748
  chr1:2374848-2375655
  binary

SEQ ID NO: 28348 - DNA, 1257 bp, Homo sapiens
  chr1:239549378-239550635
  hyper
cgtcctctattacactgctctgcagaaacagactcactaaatgtcaaaaagtagatgcatcagactgttccttagagaaaggtttgccatggagtcgtatattgtaactgagctgaagttcactcatcgataagttgtgcccaaggaatcgaattccttccagtccttctaagcagtccagggaaaccaatttaaaagcgaacacaacaaaactaacagaccggcaaaatctatctttgaagcgccgcgggaggcacaatttgggaacaggtgaggccatgctgggtgggtgaggcccccctctctcctgcttggtgttccgctttcagccaacccaccccaggagtaccctgggatctcctcgccccctgccaggcggagaacgcggagcccagcgggcacgcgggaatggagctaggcgccggcagggcaactgggcatgctcagaagccgggcaggttttggtctcaagcacgcagcctgtgcattacaccagctctctcagtccggggaggaggaggagcaggaggaacgcgaggaggaaggagaggaggagcggccagcagtagccacgaccgccaccaccaggcagaggaagagttcgtggggaggaaaagacctctcctcccccttggagcgccttctctctgcttttggagaaagggaatacacgataaagaaggagacggaaagaagagaaaaagtgaggcgggagacagagggaaaagggcgtgaacagaaagggccggagcgtgcaggggagcacagggcgcgggggcggcactgccgagccgggagcgctgccgcttgggcaggtgccgcggccgctgcccggaggcggcatgtgacgcgcggccgcagctgcccgcgggcggagcgctctcagaccccggagcgcacaccgcggggccatcggtgccatcgcggatctccaggctcctcatcagtccgccggggccgcagcagcgcttctgggaagacgggcgatgaactgaagggcggctccgggcaggggggcacgatcttaaggacagtcgctccctgaacgcggagccggaggagacgaagggaaggtggagcggacgccacccgcgcaccgggcaggcgcggagaccggcgtgggacagccacctggagcgcagctgccaggtagggacggcgcccgccacccaggcgctgggcagagcgggtggcggtagcggctgacctggtttcttgccttatctcgttgcgaaaggaggaaaaagttttcggcgc

SEQ ID NO: 28349 - DNA, 1845 bp, Homo sapiens
  chr1:240254834-240256679
  binary
cgatggcacctctaaactggaattgggcttcagtttttctccgtgtaaaaatttcttcttttttatttaacttttctcttggcaggtccagcagctttgaagatcagagtgcatcttccagctgacgatctcttcggtcggggacaatgcattcgattcgcacggtggagattaaagtccccgagatagaggaaacgtttttcgcgcccaggttcagcgaggagccgcgcgggggcagagggggcggcggcggcgggcggggagccaggcccgagctgcgttctgcgcagccattggtgggcgccgcgctctgcactgagcatgttcgcgccccgccggcccctagccgcagccgcagccgcagcgacggcagccacgggagccgccgcgcattatgcaaagcggcggcagatgcgagcggggccagccgggcgcgcgtcggcctcccctcccagcggctccccccgccgccgcctgactctcccgggagactccctaggcccggacctggggccgaggagggccgggatggcctgagtgcccgcggcgcggcggcgcagcagcgggattgcaccatggggaaccaggatgggaagctgaagaggagcgcaggtgatgctttgcacgaaggcggcggtggcgccgaggatgcgctggggcccagggatgtggaagccacaaagaaggggagcgggggcaagaaggcgctaggcaagcacggcaaggggggagggggcggcggcggcggcggggagtcgggcaagaagaagagcaagtccgactccagagcctcggtgttttccaacctgcggatcaggaagaatctgtccaaggggaaaggcgccggcggctcccgcgaagatgtactggattcccaggccctgcagaccggggagctggacagcgctcactccctgctcaccaagactccagacctcagcctctcggcggacgaggccggcctgtcggataccgagtgtgcggacccttttgaggtgaccggtccagggggtcctgggcctgccgaggctagggtcgggggccggccgatcgccgaggatgtggaaactgcagcaggggcgcaggatggacaaaggaccagctcgggctcggacacggacatctatagcttccattcggctacggagcaagaggatttgctttcagacatccagcaggcgatccgcctgcagcagcagcagcagcagcagctccagctccagctccagcaacagcagcagcagcagcagctccagggcgccgaggagcctgcagcgccccccactgccgtctcccctcagcccggggccttcctgggcctggaccggttcctgctggggccgagcggcggggctggggaggccccgggcagtccggacaccgagcaggcgctgtccgcgctctccgacctgcccgagagcctggccgccgagccccgggagccccagcaaccgccgtcccccggcggcctcccggtctccgaggcgcccagtctcccggcagcgcaacccgcggccaaagactcgccctcctccacggctttcccatttcccgaggccgggccgggggaggaagcggccggagcccccgtgcgaggggctggggacacggatgaggagggtgaggaggatgcttttgaggatgcgccccggggctctccgggggaggagtgggccccggaggtgggagaggacgccccgcagaggctgggggaagagccggaggaggaggcgcaaggacctgacgcccccgcggccgcttccctgcccggcagccccgcgcctagccagcgctgtttcaagccctacccgctcatcaccccctgctacatcaagaccaccaccc

SEQ ID NO: 28350 - DNA, 533 bp, Homo sapiens; identical to SEQ ID NO: 22994
  chr1:240774935-240775468
  hyper

SEQ ID NO: 28351 - DNA, 182 bp, Homo sapiens; identical to SEQ ID NO: 23436
  chr1:246330213-246330395
  hypo

SEQ ID NO: 28352 - DNA, 1005 bp, Homo sapiens
  chr1:248020330-248021335
  binary
cgggggcggggaaccacaacgttaattttatccccgacatagggagcgcctgagtggtggcttttcaccgggtgtggctcgtctgagctcttgaactgaagccagcggacaccacccgtcggcgcctgctttcctggggcgtgggctcctccccctgtgcagaccgcgaggggagacggtgcgggcggccgggagcgcagccctccgggaggcgggtcatggcctgggcgccgcccggggagcggctgcgcgaggatgcgcggtgcccggtgtgcctggatttcctgcaggagccggtcagcgtggactgcggccacagcttctgcctcaggtgcatctccgagttctgcgagaagtcggacggcgcgcagggcggcgtctacgcctgtccgcagtgccggggccccttccggccctcgggctttcgccccaaccggcagctggcgggcctggtggagagcgtgcggcggctggggttgggcgcggggcccggggcgcggcgatgcgcgcggcacggcgaggacctgagccgcttctgcgaggaggacgaggcggcgctgtgctgggtgtgcgacgccggccccgagcacaggacgcaccgcacggcgccgctgcaggaggccgccggcagctaccaggtgaggcgccccccggcgggggctgcgggcgctgcggtgaccgggaagcgggcgacagtccggagcggagccgccgaggccacccgtctcctgagcggctcccacggccgctccccccaccgcgcgccgtcccccccgcccacgcggctcactcagtgtgggtctctttgccttggctgtggtaaccccctttgcgacacacacccattattttacaccgtccgcccctcccccaagcactctcctgtcgtcgaactcgcgctgggctggtttctcccgatgcggatagtctggtccctcagctgggctctggtcgggagggctgtgtggtccagttcattcttggtaacaattgtacgtctatatc

SEQ ID NO: 28353 - DNA, 574 bp, Homo sapiens; identical to SEQ ID NO: 22996
  chr1:26551673-26552247
  hyper

SEQ ID NO: 28354 - DNA, 625 bp, Homo sapiens
  chr1:27189675-27190300
  hypo
cgccgcccgcctgtgtgtccccagagccatggagagagccagtctgatccagaaggccaagctggcagagcaggccgaacgctatgaggacatggcagccttcatgaaaggcgccgtggagaagggcgaggagctctcctgcgaagagcgaaacctgctctcagtagcctataagaacgtggtgggcggccagagggctgcctggagggtgctgtccagtattgagcagaaaagcaacgaggagggctcggaggagaaggggcccgaggtgcgtgagtaccgggagaaggtggagactgagctccagggcgtgtgcgacaccgtgctgggcctgctggacagccacctcatcaaggaggccggggacgccgagagccgggtcttctacctgaagatgaagggtgactactaccgctacctggccgaggtggccaccggtgacgacaagaagcgcatcattgactcagcccggtcagcctaccaggaggccatggacatcagcaagaaggagatgccgcccaccaaccccatccgcctgggcctggccctgaacttttccgtcttccactacgagatcgccaacagccccgaggaggccatctctctggccaagaccactttcgac

SEQ ID NO: 28355 - DNA, 1508 bp, Homo sapiens; identical to SEQ ID NO: 24837
  chr1:32180009-32181517
  hyper

SEQ ID NO: 28356 - DNA, 589 bp, Homo sapiens; identical to SEQ ID NO: 23726
  chr1:32410105-32410694
  hyper

SEQ ID NO: 28357 - DNA, 317 bp, Homo sapiens; identical to SEQ ID NO: 6367
  chr1:32826720-32827037
  hypo

SEQ ID NO: 28358 - DNA, 871 bp, Homo sapiens; identical to SEQ ID NO: 23727
  chr1:3321510-3322381
  hypo

SEQ ID NO: 28359 - DNA, 413 bp, Homo sapiens
  chr1:33441518-33441931
  hypo
cgggagggtttcaatagattctgccccgcaagcttcccagccacctttctcatacctacagctcatggtgtgtcgccctgccttaaaccccacactggctccccgtgcccgatgagagagcatttagatccttcataactaagactcaccttcaccctcaccagtcccaccgcctccttgcacgggagaccccatccctctggacccggggcccttccagggatagccatcacttgcatacttgcgactgctcttgctgtagggtcccctttccccctttgtgaacctagcgaattcctagaccctacttaattataataaagcaacagagggtagaaactggcactaaaatgccgcttagcaaaggtcacaaaggtgaaagcctgcagaagtcaagcaggagagagaaatac

SEQ ID NO: 28360 - DNA, 390 bp, Homo sapiens; identical to SEQ ID NO: 10923
  chr1:3389586-3389976
  hypo

SEQ ID NO: 28361 - DNA, 268 bp, Homo sapiens; identical to SEQ ID NO: 23730
  chr1:3408504-3408772
  hypo

SEQ ID NO: 28362 - DNA, 1246 bp, Homo sapiens; identical to SEQ ID NO: 24846
  chr1:36042458-36043704
  hyper

SEQ ID NO: 28363 - DNA, 190 bp, Homo sapiens; identical to SEQ ID NO: 23734
  chr1:3659512-3659702
  hypo

SEQ ID NO: 28364 - DNA, 334 bp, Homo sapiens; identical to SEQ ID NO: 6718
  chr1:41281568-41281902
  hypo

SEQ ID NO: 28365 - DNA, 148 bp, Homo sapiens; identical to SEQ ID NO: 6368
  chr1:44132677-44132825
  hypo

SEQ ID NO: 28366 - DNA, 187 bp, Homo sapiens; identical to SEQ ID NO: 23440
  chr1:44351032-44351219
  hypo

SEQ ID NO: 28367 - DNA, 56 bp, Homo sapiens; identical to SEQ ID NO: 26106
  chr1:45156613-45156669
  hypo

SEQ ID NO: 28368 - DNA, 955 bp, Homo sapiens; identical to SEQ ID NO: 22751
  chr1:50798667-50799622
  binary

SEQ ID NO: 28369 - DNA, 838 bp, Homo sapiens
  chr1:50880863-50881701
  hyper
cgctgctgctgctgttgtgcaggaggggtggggcggggaagctccccaccagtcggagctacccgcggcggcccgggttcgcatcctcccactgctcagaccgagtcggctccagcttgctttgggaagcattcaggaataaacgtggacagtagcggtcaggaaggagattcccgtttccccttctcccaggaggaaaagaggtaacgctgccgccactgccctctctttccagggtgggaacgccgcccgagaccggggtaccccacactcctccctagcgctgatcccagcggagctcaggccgcagtcccctcctgccggctgcggaagctcccagaagcggagactcaatcgcccccctgcccctgctaccaggccagagtctggagtacagatactggctccctggggcctgggtgtgcgaccccaggccggtcattgcaggtctctgcgcctccctgttcctgactgtgcaatgggcagcgggtcaggggcgcaccgtgggcgcagtacgttcccaggcgccaagggctgtgactgaccgacctgggcttccaccgcggggcctgggccatggagacgctccgggcccaggaacgggggacctcgggtgccccactacctcactcctagaacgcccaccgctcacgaagccttcctgagctctacccgaaggtgctgacagcctggagctgaggccaaggcgcttgggggcacgctgcttctccctgggcctcctatgttcacggaaggagagtttccgcaaacctctcactctcggccagcagaccccgcttcatgagaggaggagacccactaggggcggtggagaggc

SEQ ID NO: 28370 - DNA, 914 bp, Homo sapiens
  chr1:50883216-50884130
  hyper
cggcattgttttcttagaaaataacatttatttctagctcatatctatgcaaaggaaagcacaaagtgctgctctgcagcagcgttttccgctgcgggcccttcagtcagggcgtttggcgagtcccgggaggcgaggatgggcccgcgagcgggcggttctggctcagtcacacgtcgctctgttcctgcttcagtgcgcaccttgacggctccttagggacagaccagccgcaggcaagaggggcaggtgggcaggattcatcccgagtttccaatatatttaatctctaaacctgataagtacaatgcgcgcatagtctaatttttttccattttgtccctttttttgcttgttttgaatgtttttcacgttaataccgaggtcacctacagattacaattaataacttagaattccattttataacattatacactggcttgtatatatatatgtatagattatatatagatttatacatatataaaaacacactgcaccaaggaaacccatgcttatcggcataagcaacaaagagagcgacaaataccgcaacgaggaaagtgcaccttaaaacttgtttcctttttttttttttacaattgtatcgatatatatgtgtgtcccaaagactcagtgccaagagatttatacatcctaaatttatatttgttagagcgaatatttaaattttttaaaagtgagggctggggagacacagaaaagactctcggattatcctgccatccactgagagccggatgagcacagctaaggagccgcaggagcctgcgctgctgtcgcagcctctgaattctcatgaattcccagccttttggaaagggggccgggtgaggctggaagagggatccggaggtaggagatgaggacccaggccgcgcaccccctcc

SEQ ID NO: 28371 - DNA, 1321 bp, Homo sapiens
  chr1:50885965-50887286
  hyper
cggatccctcctttccctcaacggctctggcctaatttcttccctccccacaaaaagccacgggggtccagaaaaagagggtggtgctaggcaggcagtaggaagcgaagaggaaaagacataggaaagcagacctgagaaaccagggagggtgcggaagaaactagaaggagggagggcgcagcaagcggttgtccagagggcgttaggaacgcgagaaggggaaaagaaactagggcgtctcagaacctagggcgtctcaaaacctagggtgtcagttaaagggggggggattccttaagggagttgggaaggagcagagggaaagggcctgtggagaagcgcagagcgaacgaagatgcgcaggtttccacctggggagaagacgaagcaaagaagcagggacctgcctgcgtttgggtagaggcgagtaaaaaaattaaagcgtgtacatttcggcccgatgcaggagaaaggggtaaagtgcaaatgctccagaagcgggagaaaggagagtttctgtacccacgctccatacccgaggctgggcgagcggtgaaccctagcagtcgcggcgactggacacgggggttctactctttctgaaccgagacaagcccctgggccccgtgccccagagctacgatcctgctgcccctacctgcggcctggccgcgctctcacctgagccccctgcgccagctgctccgcctccggtccccgcgggcgctcccgctccaggtcccccgccgtcggcggcgcacactgaaccgaagacctcgtaggcgggcctcggggggatgatgccgttggcggcggccagcgccagcccctcggcagtgccgtagagcagctgcagctcgcgcgcctcgttctcctcctgcgcctgctgcctgcgcagcgccacctgcgccgccatgacacgctggcgctccgcgatgagcgtgcacttggcgcacaggcagtccttccagcgacagtagcgtttgtggcccttgagggccgacaccacgccatggttgcgacagcgcgcgcacttgggggtccgcgggtacttctcggctgcccgcagcaacagtggcggcccccgcagcaagccgcctgccacgctcaccggtagcgatgcagcggccgccgcggctgccgccaccgacgccaccgacgccacaggcggccccgtcgctgttgccgccgccgccgtcgccgcgccgggcacgctgggcagctccgagcgcagctccatgacaggacctgacgggaaagaaggtgggagaggggagagacctggtgaggagcacaccgcgcgctaggccaaagcgcc

SEQ ID NO: 28372 - DNA, 1384 bp, Homo sapiens
  chr1:50892607-50893991
  hyper
cgccgatgggggacccgggaggcattgacttttgcgctgtttgcccgcggcctcggagcaagcagacgccatctgtttgccggctgcgacgcgtcccgtttaattaccctcccggcagcctaatagagatgatattaaactaaatctttctgacattaaaagtaattatccccaaaccggtggctccgggacggaatggcccctcccgcacccaccccttccctggccgcgccggattccgttagtttggctgatactctccgcccgggaatggggcgcagaggaaagggggaaagtgcctttgggagaaggaatctccacgggttgccctacacgcgttttcccgcacaaccacagactctcctgttcctatgtgaacacacgcacgtgtacacacagacacgtagcgacattttcctccagatcaactcatgagtcatgctgatgaagaccctcagccgcgcacaccctctgtggacagggagacgcgcagcttggtttcctgtccccgtcctctgacaccgctaaaatggtcattttccgtggtcatagccacggatctatgccacgacctgggaccgggcataatttcggagccagaaagtactcctgtggtggcgccgggtttctcaggcgctcttccagctaagggccaggagcccagcgatttccctacagttgcttactgaagtcgcaccattctctgcgaggcaggtccgattattccacttgtcaggtgagaaaacagactcggagaggtgagatgacttgttccacattatcacaattagtgagtaacagtgcaaaaatcaaacccgggagtaccctcatccaaagccaggtctgtctgcacagtgcaggcgcagcgggcgctgcgaatcggctcctggcccaatgcacccctccacacccgttggccgggaacccgctggtgctcagcttctatccggaccccggacctaaaggccgggcagaacaaccaactgaaggtggaggagcgagggcactggtgctgattgagcggcaggagcccccgaggcggagtcccagcggctgcagccctcctttggatcaagccctcgcgtcttccgggcaggcggaagggaggcgtctgcccagtgtcgccaggcttctcacgattttctggttgggagcatctaagcctgagacaaacgcatggagagcggtgttcaccgccccactatttgtttctatttgtgagcgtctactgagtacagccactctgataaacactcggtgtgtgctctcttgcttggcacgcagtccttgggggaagatgcgatgttccacatttcagacacgaggtagccaaagttcaacaaggcgacataacttgcctggggccagagtgctgccgaacttc

SEQ ID NO: 28373 - DNA, 356 bp, Homo sapiens; identical to SEQ ID NO: 24863
  chr1:54940346-54940702
  hyper

SEQ ID NO: 28374 - DNA, 938 bp, Homo sapiens; identical to SEQ ID NO: 23747
  chr1:63785002-63785940
  hyper

SEQ ID NO: 28375 - DNA, 887 bp, Homo sapiens
  chr1:63786671-63787558
  hyper
cggaattaaatccacatcccagcatcttctgcaaatatttcactaattatttcctctcggaactcctcccctcgtgctccttcctctggtgaggccggcgctcccctcccaggccgcagcggacagacagggattgggttccgtgtgcctgccacaccaggcaggctcttgcggctcccaactaggcggcctaaatgagggaggaaagaggaggcgcatcgctgattcaccgcgtcaagagcactgactttccttggaggtgtgaggtccacgcaccccagccacgcacttgggggtcggtttgcggtgcctccccctccagtcccagtgaaatccccacagtttttcctactatcactgacttgccttgcactccgcgtgcattggccacacatcctcgcctcctccacccgctccgccgccggttttcttggaagttaaatcttggaggatttgtccacaccttaagagaagaaaatccacgttagctggcagcaacggagatcccagcatgctggcatgcccaagtctgcccaggttcccccaaggccatgcccgccgcccgggaagtcactgcccgcacccctcacgtttcttcagccgcccctgggcgctgcgtctaacctgaagacaccaggcctcttcccggatccactcgacttacccaggccgctgccaatcccagctccttccccagcgcctcatttccgattttttcatatgctaagtcgtttaacaactccaagtagccagttatggcttctttatttataggttccctgctattttacgtcgtttttatttctctcggcaactattctagtagattaatcaatagccattttctgaccttcgggaaccccagctgatgctttttgtggccgcac

SEQ ID NO: 28376 - DNA, 406 bp, Homo sapiens
  chr1:63791875-63792281
  hyper
cggctcggccctgcgcgcgtccttttggttaatcccggccagtccccggtgttgtcgtccactttgcctccctggtggtggagatgcctccccgtctcggatcccacctcatttctccgctgtcgacgtgggctgggggtcgctttgaaagacacttccttgcaaatacccaatctgttttcctggtaaacggtaaacattattgtgtcttgagtaaacattccttcgggatcagggtcctaaaataaaacaagctgccgggggtgagatagtttaacttgataaacaagaacctgataaccaccgccgagagaggagcaatggtaaccttcaccgagaggagattatggaccacacggtctccgggcgggtcccttctaatctccttttacaaggaaaactaaac

SEQ ID NO: 28377 - DNA, 768 bp, Homo sapiens; identical to SEQ ID NO: 23005
  chr1:63792564-63793332
  hyper

SEQ ID NO: 28378 - DNA, 1123 bp, Homo sapiens; identical to SEQ ID NO: 24868
  chr1:63795363-63796486
  hyper

SEQ ID NO: 28379 - DNA, 916 bp, Homo sapiens
  chr1:6545237-6546153
  hyper
cggccgccatgggccgcatccttcccctgggggccgcggggcccatagtcacgggcaccccctccctggcctcccgcacaggactgggcggctgcaggcgagaactgggcacccagccccgttcccgccccgtcccggccccgtacctggctatcaccgtcgcgggcacgacccccggcccaggagggctccgagtcccggaggggcagccccgggcccggcctggaggctgctaggcgtccggagacaccgggtcctgtccccatggcggccggaggaagccgcggtctgcgccgcccgccggacaaagcgcggagccccgcttcctgccattgtgcggccgcgcccgcccccgccgagcgcggggaccccggggagggccgggcccggaacagcccccagccccccaggaaggcggacacctccctcccgcccgggccctcgccacccagccccggggatccccgcctccccgcccgggaacccctacacccccgcctccgcctgcccgggcgaccccccgcctccccgcctctgcccagacccggggactccacacccctacctctgcccggccgggggacccccacagccccgcctccgcccagtccccgggacccccaccttcccacctctgcctggcccggggtacccccacctctgcgcctctgcgcggccccgggcccctctcttctctgactccctcctcaacaccaatgccgggctcagagggctcctcagaacttgctctttctcctggggagctccttgaatgctggaggcagggggcgctggtgacacccccccccaccttggagactgtggagcccctcccctgggtgactcgatccccgcccagccctgggggtgcccactctgctgtggtccccacctcaccctcagcgccaacacgcac

SEQ ID NO: 28380 - DNA, 344 bp, Homo sapiens; identical to SEQ ID NO: 10937
  chr1:6546495-6546839
  hyper

SEQ ID NO: 28381 - DNA, 904 bp, Homo sapiens; identical to SEQ ID NO: 24872
  chr1:66998805-66999709
  hyper

SEQ ID NO: 28382 - DNA, 912 bp, Homo sapiens; identical to SEQ ID NO: 23012
  chr1:77333644-77334556
  hyper

SEQ ID NO: 28383 - DNA, 970 bp, Homo sapiens; identical to SEQ ID NO: 23014
  chr1:78956569-78957539
  hyper

SEQ ID NO: 28384 - DNA, 693 bp, Homo sapiens
  chr1:8277128-8277821
  hyper
cgaggggaggggaccggagagcagagggaggcgagggagcagaaggaggagcccccaggtgggaggacgggggtctgcccagctcggccggggagtgcagtaggggggcgtcctcccgactaagggcaaaggaggtgacggcggggacgcccgccccgtgacgaggagggctcggccgagccgtcccggggcgacaggaagcggccgccctttgaaggcccagcggcggcgctgggtcagccaggccagcttgtgggggagcggccgcccgcgcacggctggggccggggccagggccggagggcgccgcaggaaggggccggggccggggcggcttctctccccgcagccggcgcctccacgcggcggtcaagctcgcgcgtgggctttagcagtttcgggcgtgcacgtgcgcggaggctcctgcctctgcggagctcgcgccctcaagagacttccaggagggtttggagcccgggtttctctttcccccagccccggaacccgagtctgctccaagtgcgcatctgcgcggcggccgacggggacgcagcccggtgtccccggcaggaccccggagcaacgtctcctggagcctgtgcagaagctgggcttggcgagggagggggtgcttccggggacacccgcgcagggaaaaggaggatgctagtgacccatcctttctcgccgtgc

SEQ ID NO: 28385 - DNA, 475 bp, Homo sapiens
  chr1:84326267-84326742
  hyper
cggccactcgccgtctcagcgccccctcgcggcccttctctacccacctcgggacttcccaggcctcctggctgcgccgcagaccctccccgtcccagatcccgccagggcccactcgggctccagccgctgcctgggacagccaaaggccggcccgggcggttcttccccaggtggtccggggcgtcccgggccgcactggcctggcccatgggccccgaagaaggcgctcacccaaggaccactgtccgagcggcttcccccggcccggcctggtgccgcgtccccaccagcccggggtggcaggttctactcgggaagcctgttttatgtcttctttcacgcccatatcacaccgacaagggtgaagctgtggaacttatacctcggctgggccccgccgccaactcctagggcacgggaactgcgcacaggccggggttccgcgaggggcggagcttcccgctctgccctc

SEQ ID NO: 28386 - DNA, 619 bp, Homo sapiens; identical to SEQ ID NO: 23443
  chr1:898245-898864
  hypo

SEQ ID NO: 28387 - DNA, 1493 bp, Homo sapiens; identical to SEQ ID NO: 26135
  chr1:91182654-91184147
  binary

SEQ ID NO: 28388 - DNA, 943 bp, Homo sapiens; identical to SEQ ID NO: 24880
  chr1:91189449-91190392
  hyper

SEQ ID NO: 28389 - DNA, 911 bp, Homo sapiens
  chr1:9712089-9713000
  binary
cggggccgtcccccgtgggcccgccgagaggggcgtgcgcagctccccggcgcctgcactgcgcgccttgcccgcctggcccggcagcggggtttcagctgcgctcacagcggcggtgcggcctccggtgcgccggctgaggcgcgaggatactggaagcgctcagcgcgtgcgcccgctccgagcgctgactagaggaccaggggcctcctctgtacggcagcggggtccacagagagcgcgctggtgatgtcgcccgagtgccctggcgcggagagagggctgcgcacagttcgccggcgcccgggtcctgtgcgcccttcccagcctgggcaagtggggagcggggctgcagaggggccggggtggaagttttcggggcttcctcccggctcgtggacccgcgccccgcctcccagtcccgggcctcccgcgttgctcgccgcgtttgctgcagcggcgcaggcgagatcagctccggatctgcggccgagccggggttacgccggcaaaaccgcccccagctttgcatttccggactttttaaaaaaatactcttacccgtaattcagcctgaatgaggctttttaaaaaaatcgagtttcctgtttttatttaggcttcctcatttgcacctcctcctttgaggtagagaagaggggaactgggacgacctttcgtgggcaccaggatgggggcgttgcagggcggggagacgggggtccagagaaccggggaagggccgctgggaggtcccgaaaagtgcgctgtgggtggggcgagggtgaagcaggtaggggcgagatttccggggtcgcgggtggggggcgccctggagcggccaaggtgcagggtcctcgcgtggcacccttgggatctgcccagtttgcggatggagcgcggggctgatc

SEQ ID NO: 28390 - DNA, 89 bp, Homo sapiens; identical to SEQ ID NO: 6728
  chr1:9725455-9725544
  hypo

SEQ ID NO: 28391 - DNA, 913 bp, Homo sapiens
  chr10:100993468-100994381
  hyper
cgtggctaccccagggtcttgtaaccagaatggtcgtttggcagaagtctccgggaccgcactccaggacaggcacagtcagggcgtcgcgtgggcctactgtggcaaaggagacgtccgcgcgaatccggtcctggggaaagggcagttccaacaacctttcatccagaagcctgcacagccaatgcgaatgcgccccgccaggacttcttccccgaaaatctgccttccagactcttttctgaggcaggaaagcattaggcgaacaggcagattttttaaaaaaagaaagaaagctggtgggggaaagggggtctgcgcagctgaaggagttcaatgaaagtgggacaagcgttgcggaaaactccgttgcaccctacattcggacgagctcatagacgcgctctgctgcacgaaagagctttcgaagaggaagctgggccgcgcggagctggctgttccgccctcgcggcaaccgcaccaacaggaaccgaaacggcctcggcaagggcagctacagcctctcagtcctccggctacctttcctccacgtggaaggagcgctccacgtggcgcctcccgctacctgccgcgtccgcagacccgacccgggccagggggacaaccccaagagctgagaggcgggcgcacctcaagaagcaaaactcgaatttcgcaaggagtgaaaaatacgaaggacgcacaacggacctggcctcggggcaaagtgggactgagagcgctgagggctcttcgaggggaacccacagctgaggctccaacttgtagggaatttttaaaaactcaacacttggattcgacattgcagaggatttatttcttattttacactgcaactctgtccctgatgggaagggatcgcagttgcctaactgccaaactgcaacaaccc

SEQ ID NO: 28392 - DNA, 967 bp, Homo sapiens
  chr10:100995729-100996696
  hyper
cgctcgctcgctcgttttgtttttttcttttttttttttaattttttttaattttttttttcagtgttttggtgctggtggagcgaactcacgcccctagccagccttccccgtgactcttgccaagagaactcgtacaccggcaccgcccctttaagagatttctactgcagacattttttaactttttaaaggtaaggggaggggagcaggcgggaaggaggagaaaagggtggcgttgtaccctcctaatttaaccctctagggtcaggaagcagagggaggaatccaaaccatgccgttgtaccgtctgggtacagagcaaagggtctcgtttttacgtccttccctgagaggctctggagggcggttcaagctccgactccgacccgaaagccccagcgccaacccgggacgcgctgggatagagttcccaccgacagcacgcttgtttctcctgacagcgtcaggcacttcgtccgctcagggcccttttctggttgaagcagcaataccaagggcggttaagttgcagaggggtcttgaggcggtgattcctgtcaaagcatagagccctgaaggacattccccgaagaggagccctgatctctgtgacgcgttggatagccacaccgaagcatcctctgacctccatagggcaaagagtagcaagaaggaaaaacatagtgacctggtcaagcagcttttccgatccgagggccaaaagggacatgcgccctcgctctgctctgctcttcccgcaaccgaggaataagcgtcttgggagcgtcaatacatgctggctttggccaagtcgaagctacctgagctgtgcttggatagtcagggcggctctgcgtccaactgtgccacttcttggccactctattctgctgcacaggtagagtcccccctccagaccctcctggaggtcaatcctatacttagccctcctgcagggaagtgc

SEQ ID NO: 28393 - DNA, 328 bp, Homo sapiens
  chr10:101283158-101283486
  hyper
cggggacgagggctggcagccccatactgaatagaaagcgaaggacggaggtagggagaaaggaaactgctctggggggcggaggtgggggtacacgtaggagggaaggggagggggctagaggaggctccgccccaccgtccggcagtgtttattttcaaggcagcttcccgtcaatcctgtcaccggggcacattcttttcgggggctgtgaaccaccgtcagggctctgcaggaagatttgaggagggggagggctgtcgagtagggagcaggaattcgcagagtagagagaactgcgtctgggcaggcagtccctgcgtggcgc

SEQ ID NO: 28394 - DNA, 835 bp, Homo sapiens; identical to SEQ ID NO: 27460
  chr10:102894440-102895275
  hyper

SEQ ID NO: 28395 - DNA, 1261 bp, Homo sapiens; identical to SEQ ID NO: 23752
  chr10:102899421-102900682
  hyper

SEQ ID NO: 28396 - DNA, 738 bp, Homo sapiens
  chr10:102995986-102996724
  hyper
cgttaatggtagtcagctccctccctttcacagaggtctcactactgtcggggggcgccgggcgcaggccgggcatggggcctgagcttaggccaggtggaaaggtggaaggacctagtggggacagacgaagagaccgaggagccgcccgcccggctaaatggacacaggaaaggcctgagtcaggcttctcataataaataaactgcacgtgaataattcagcagtcgcgcgggggccggttgcatcagcgccgccgccgccgcgcggcgcccaattccccgcggaggggagtagccaattaaggcacttgaaaagggagtcgggtggaagatcccccgcccaccagtatcctggatttacccaggtcgagttcagagagcctccccggtcccaaccccctcgggccccatgggtcagggggccgcctgctgggaagtgctacctcagctaagccgctcaggtgtcccgagactccgggcaagggaagacaggcggcgagacggagccagaataagggatgcggacgtctgacctgtggaaaacccagcatctgcagtgcccagccgcacagggaacgtgggcggcgtggttccaagcacagtgaagacgccaggctcggatctgtgctcagagccgggatccctccgggctgcttcgtcctggccaggactttccttgccctgaagtgaggcgccagggaagctgcagggccctccgccctctctgaactcccac

SEQ ID NO: 28397 - DNA, 590 bp, Homo sapiens; identical to SEQ ID NO: 22755
  chr10:112431835-112432425
  binary

SEQ ID NO: 28398 - DNA, 1260 bp, Homo sapiens; identical to SEQ ID NO: 24898
  chr10:118890928-118892188
  hyper

SEQ ID NO: 28399 - DNA, 1372 bp, Homo sapiens
  chr10:118892808-118894180
  hyper
cgtagcaattgcttttattgctgattagatcaaatttatcagtgtcgttgcctactacgacgtttgttactgtttcctggggtcgggggtggttgtgattggagttgccctaaaggggagaaaaaccgcaggatttgcccgccaggaagctgtgttgtgtaccgactatcccgagaggtccgcaaagcggggcccaggggctcccacaagccctggtttccctggcaagaggaaggaacgtcctccttttttggtctaaagaaacctggaagcccctggggtctgcgcgcagttttcctctttcaaatattcctaggaatagtcggcagcggcagcagccgcagcagccgcggatctagagcaaacgtcctgtgctttggagttagaaccagtcttttccctcctgggctgggcacggggtcagggcatcaggttgactaactcgggcatttttcccaattctttggatcgctcctggattcagaaggaagttgggggttggggaggaatctcagaggaaaggtagtagaaaaaaaaaatagcccgaatgagatgaaattggtagcagagtctagtgggaaaggagagctgtcagaggcctggtgggagccaggagcccagcgcaggagctctgggcacctaatgcgcgtgagtccataaatatcaccacaatagatactataaatataaatacagggaaacacttaaaatcagtccagcgcttttttctcggccccttctttattgttggtccgggagtaaggctcgaaggccgaggagctcagatatcgggcggagagttcttgcaaattcccagctagcgaaccagccattgttaacggggcggaggacaggcggctggcgacggagccgagcagcgagggcaccggcaggctgaagaggctgtggcccgcggccggggcgcctgcgtgcaatccccccggcccggcgggcccgggacctggagcaccgcccacagccggcgggtgcggggatgcagcgcccgctgggcccggggcggcggcggcggctgcggcggccgagcctgcagcggcgcccgcgcccagggccggcaagctgggcccgcgcagcgctgagccgagagcgcccgtggcgcaaggcggcagcagcgcaggcaggccgggcggcgacaacaggcggccctgctccagcagccgtagcacgctgcacgtggccgcggtctccgacaccaccgagcgtagctccgagtccttgccctggtccttcttctgcttggtgcgccggttctggaaccagaccttcacctgcgcgccggggtgcggggagagttggagagaggggcagggaagaccagcgtcaaaggaagcgagctcccggggcgcgcggctcc

SEQ ID NO: 28400 - DNA, 817 bp, Homo sapiens
  chr10:118899685-118900502
  hyper
cggcgggttggtgaggcgggtgggagcagagacgggtaagaggggtaagggactttgcggccaccctgttctgaagatgtagagtgggattgtgttaaaatccggcgaactctcctgttacctcccgcaacgctcaaaagcccagactggcgccttgaggcaccgagggctttgctcccatgcggccaagccgtcgggggtgcagccgccgggtcttgactcccactaccgcgtcgcgggtgcgggtccctgggattcgggtcctcctgatgggggtccctgcagcagatggggcattcacttccctgcagagctcggcccgagggagctcctgggcctccttgggcagggaggggtgcgaccgaattccctggcacaccggcccttccttgccccctaccctggaggggttggaggggtcggaccctcggactacgcgagatcgggtgcgcaggaggattctaggccttcctcagccctttaggagccctgcaggcggcggaagtcccaaaccgcagccttggcccaaatgggacccagatggctctgggtccccggcccggccgcacccctctgtacggcctccttctgtcggtgaaggccgcagcggcctgggaaacccatgcggacacctgcggcgcccggtcaaagacctggaagaaagctttttaaaaaataaaaatggcccaacccattacattttcttttaggtagatgggggagctggggggcggggcgggggcagtcagggaacaaacagctgcccttagaaatgacacgccctgtgggcaatggcggcgctgggacgtctgcagcc

SEQ ID NO: 28401 - DNA, 744 bp, Homo sapiens; identical to SEQ ID NO: 23022
  chr10:118927281-118928025
  hyper

SEQ ID NO: 28402 - DNA, 388 bp, Homo sapiens; identical to SEQ ID NO: 24900
  chr10:122708510-122708898
  hyper

SEQ ID NO: 28403 - DNA, 958 bp, Homo sapiens
  chr10:126135815-126136773
  hyper
cggacactttgaaggacggcagatccctgaccccttggtggcccgcgaggatcgcgggtgcgcgcggcgggcaggggtgcgctgacacccgcgcacctgcacccccggtggaggagccgagggcacacgacgatgccaatccctcgtgaatcccgcgaaagaggggccagggggctccggattcatagacgcggggcgtagaagggggtcaggtaggaaggcccaaggaacggcgcgaaagggctcccgggggcggcagccgtcagcgggaaggaggcggcggacgggaagaggacattggccgcggagtaggaggggaaagtctggaagtgcagagcgccggtgccgggagggccaggactgccccccgagccgccgccgccgccgccccccgccgcccctggctggggcgcgccaccccccacctgcgccgcgccgtcggcacccgggttctgcttcttccacttggtcctgcgattctggaaccagattttgacctgcgtctcggtgaggctgagagacagcgcgaggttcaggcgctcgcacactgacaggtagcgcgtggcccggaacttgttctccaaggccaccagctgctcgtaggtgaaggcggtgcgcgcgcgccgcggcttggcgcagttgggctccaggcgccggcgcctgggacgcggggagccgggggatcccgggggggacctcacagggccgcccccgccgtcctcgcagggctccccagacgccaatgccccggccggggcgtcaggtgagcgcgctaggcccggcagcaagcgcgcagcccgctcccgcagccgcggcctcctcggatcctccgcatcctcctcctcttccgcctcggaaccctccaggggggacgcctggccggcgcctgggcccgcagcatctaggggagaaggggtcggtgaacagaagcctctccaggtccccaaacctcgtcctc

SEQ ID NO: 28404 - DNA, 918 bp, Homo sapiens
  chr10:126137196-126138114
  hyper
cgccgtgttaatagagtttcagatttgtgcggggccggatcgatagatgtcatctattaaaggtaagttttaatcgaacaatattaggatcagacagggaaagggggtttgaagtcggtacctgcaagctgcgggcaggagatatgcaggcgccagtaatagaatatcgatcacgagggtgggggaagggagggcggcccctcggagagaagatccgaacaattaccaggccgcctgcctgggcccaagtgcggccgccagaggcgccccgggccccaggcaatcaccgccaaacttggggaggggagcagggggctgcgcggcatccagcctcccccgatgacctgagcctctgaccctccagggagccgcctttccctgtctgatcccagcaggactcctgctgtcttccgtccttccttccagccacaaactttcctaaccccttcatcaggtgtccgccagcgttgggagtaattcagaaagggtttcgagaagaaagtaccgaaagcttcccaacactccatccgagccccgcccccagcccagtcccagttaacagttgagtctggggagcttgagcgcctggggcagcccagccccgcaggcgtctccgggtggcacctgacctcgctactcacgaagacccccggcgcaagccttagcgtcagctcccccatccataaaatggaggtgatgttaatgatgctgtccatctctcaggttccgaagttttcatcacctttatcccagcccttagcccaggtcctagcacgtggcaagcgcattaaatgcccgataaatgagtaagcctggcaagacaggcgccaggtaagtttccaccgcgagcatcagaactgtggtgcgggtgagcttggcgggtgagcagggatgcggcaaatccctgccctgtaatgc

SEQ ID NO: 28405 - DNA, 197 bp, Homo sapiens; identical to SEQ ID NO: 24901
  chr10:126314011-126314208
  hypo

SEQ ID NO: 28406 - DNA, 278 bp, Homo sapiens
  chr10:126314669-126314947
  hypo
cgcccgaacgcgtgccagcgttttctgcgagctgtcatgtgaggggcctggggcgtggcctgctgcgagtgttttctgtggcctcgcacgtgaacgcagcaggagcgcagcctgcgcaatcggacagacgccgcacagcgcttgtctgtgctcaccctctcggtcctgctcggagcttcccactgacctcctctggcataaggcgcaggtagcgggggtgcctaacttatggccaccatgattgtgtgggtctcggcactaaccgtggtgctacggtc

SEQ ID NO: 28407 - DNA, 422 bp, Homo sapiens
  chr10:134676272-134676694
  hyper
cgccggcctcggggagcaggttcaggagaggctggagggggacggggcggccgggctgcactggctgagggtgaggaggggcgggaggggagggcagcacatggaggcaggctttctgtggtgtggatgtggctgagaagccagggtgagctgagggcaaagttgaggacgggaggtaggaggccttcaggcaagagggcgggaaagatcaaggaaacaaacaacttcctgtcagaagcgcctgctgtgaaacaaagtccctgcaaaacagcggctgcaggaaggagggtggcgaacccacgttcgcgggagtccagcacccatcacgtctgtcctgggtctgggctccaaggtccacggtggccccgggtatgaggcaggttcactccccaagtcccagagctcaggaccacggaggcccc

SEQ ID NO: 28408 - DNA, 375 bp, Homo sapiens
  chr10:134913663-134914038
  hypo
cgtgcccccggcctgggcctgggcctgggcccagcatggccccggcggaggagtcgctggcacgcacctgaaggtggctaaggtcagacgtacctcctgcctccttaatcattcctctggtaagctggaaacaaccacagcaagtgcccgggaaacgccattgacgtcccgcctgtaagtgcctgcgagaggccgtcaccatcacgtctgcactttgccaccaagtacgccccacactgggatgaagcctgctggatccgcgggtgaggccccccgagggccttcagcaaaccccgcccgcgccttcgggaacacctgccactgcttgcctggacggagctcctggggcccaggcctgcggtgacagctcggggc

SEQ ID NO: 28409 - DNA, 1397 bp, Homo sapiens
  chr10:15760931-15762328
  binary
cgccacaaaaccgtgcgcatgcaatgcagtctctgtaacctcctgcccggggacactggggcaggcgtggagggcatgaacgtatttatgatgaggaccgactgtcaaacttgatttcctcttggaaacgggggtccgcaacctggtttgcaagaatgcaaacggtcctgcttctctaggtggagctctgtgggtacagtgagatgagagaagggggtggggtaggaggaagccaaggacagagcccagctgctggtagccgacagctcttgcgcccagacgcaatggttacagactctgcataaacagacctcgctgtggtggcggttttaactggcttgggtcttctgggtcctgttctctcctttgtaggatgcgtgcgtcttggtacctggaacacccaggacttgcgtgttctatgcaagtggcatgtctctagctcaaaattcacaaggcacatctagcatggcaggggagagaaggggctggtggcggggagagggacgggaccccgggcaggcggcaggacggggatcccaggctgcggggggactccgcggcagagccgctgggacctgacccgggagcgccttcgtccccgcgcgcacctccccgggtcgggcgacttacgtgcgggcgtcgggtatgtggaagtccacggcgtagccgaagtagctgcccttggggccgctgtacactgtgagcttttccacgtccaggttgaacgcctgacaggcgggggaccacagcaacatccccagcgcggccgcggcgcagcagaggggcgcgatcagcggcgcctggcttccccggggaccgcggctggccccgggcgacatctccctccgccccggtgggtggctgctacccaggagcgcgagccgaggacccctgcggggcaaggggggctggtggaatctggcggtccccagctgcccgtgtcccgggtcggtgcgctcggcgcacccgtggtgacagtgcccggcgtctgctcccacccgcccgcccgcccagccggctcggggggctggcccaggggctctagccctcctccggccgcgggcagggaccagctctctcgcggcgcctcctcgcggctggtctagagccagggactcccgggcggcccagctggtggctggagcgctgggtgcctcttcgggctgcccggatttctattgcagtcccatctcaaggacaatcagtttcgtctctgtcacctcaagctatttattgctttagaagcaatgccccaggtggagcgagagcttgctccagttgtgtcaaaggcgcagcttggatggagaatgtgaaaaccaaccccaccaccaggaggggcaaagcaattatctcttcatcacctctgcagcctgacctcagcgttcacggctttgcac

SEQ ID NO: 28410 - DNA, 908 bp, Homo sapiens; identical to SEQ ID NO: 24913
  chr10:22764575-22765483
  hyper

SEQ ID NO: 28411 - DNA, 628 bp, Homo sapiens; identical to SEQ ID NO: 27478
  chr10:23001886-23002514
  binary

SEQ ID NO: 28412 - DNA, 276 bp, Homo sapiens; identical to SEQ ID NO: 27479
  chr10:23216840-23217116
  hyper

SEQ ID NO: 28413 - DNA, 1457 bp, Homo sapiens; identical to SEQ ID NO: 22759
  chr10:23461640-23463097
  binary

SEQ ID NO: 28414 - DNA, 869 bp, Homo sapiens
  chr10:23487757-23488626
  hyper
cgaacaaaggccagggccggggggaggcgggggaagggctcggctgtaatgaagcgcctctaaggcggaggtgctgccgtggaggctgaggcggcggcggagcgcgctgctgcgtttgtgcgcaagtgactctcctgtgccacacacaaaaggcctccctcttcccaccttctgccgcctttcagccctccggctcctgccgagcccgctcctgggactctgggggggatcctggctgcatccccagggcagcctgacctttgggacatccgccgctgccagggcaaacctcgccaaactttccccaaactccgcaggccggggagggaccctggccggaggcgcgcatgcgccccgcccgctgctccgcgttcccagggttccggagagccggggtggagtcggacgagtgtccccggaggcccgcctagcccttgctcccaggggcattcgggactcctgtgctgcctgtcttcgcttgaggctggaagtggctgcccgacgccttgctctccgcagttctgctatctttgcgcatggaagtctccaagaggggctccaggaagcagcgagcagggaggggagcgaacggccaaaaggagatccggggatgggaccccaggcttcttcggaggaggcccggggcaactacgccccgcggccgggagggaagccctcgggcggccgcctgtagagggccccgtggcccggggcgcaggttgtggcgagctggtttttgcctctgggccgaggcgccagcgctagcagcgacagcagcggggggcgcaggtttctagccagtccccactttcggacctctgggggtctgcccttgcttctcggggagtcttggcccttgactgatcccc

SEQ ID NO: 28415 - DNA, 1187 bp, Homo sapiens; identical to SEQ ID NO: 27481
  chr10:26726986-26728173
  binary

SEQ ID NO: 28416 - DNA, 590 bp, Homo sapiens; identical to SEQ ID NO: 24918
  chr10:43697752-43698342
  hyper

SEQ ID NO: 28417 - DNA, 997 bp, Homo sapiens; identical to SEQ ID NO: 23023
  chr10:44185124-44186121
  hyper

SEQ ID NO: 28418 - DNA, 386 bp, Homo sapiens; identical to SEQ ID NO: 23447
  chr10:524407-524793
  hypo

SEQ ID NO: 28419 - DNA, 940 bp, Homo sapiens
  chr10:54072919-54073859
  binary
cgtcaaattcactttctaattcactttcagctcttcttctcctcaaggttgtttcttttctccctagaaagggtattgcgtggtcccgtgcaaggtaagacttgggagcaaaccctgcattcggaagcgttgcgatgtgatatactaatgaggaagtcaggcgctaagccctaagggtttcttatttctccacattagcccaccactgagaagggagaaccggggaaaggcgactgacctggcacgttggaccctgtccgctttggtcccggccactttgatctcacgcgtctgcctaatcaagttcatctaccgccgcgattgccctgattcaaagaacaacattaaatggtttgattatcggatggtcatttccctcttccctccacccctgatctaatttctaaacgccagtctctcgcctccctctctaaacttcccatcaaaagagaattagctcttcttccttcttaccctcgtttgatgtgcaaatttccttctctttgcacatttttctcgcagtggcggggggaggtgggggaggagggcaactgaaggacctcaaagccggggatctaactcagatctgcaaactgcgactctaaagggttaatgagcaacttgcacccgccacctggccctctcagaggcgtcttgctagagccattgaattacagaccggtttgtatttaatactgaatatgacttgtgtgcacagtcagcgagtattggcataaaggagaggggcaaaaagtgcttttgcagagcctatcacccctcggctctgtaaagtatttcagatccggataattcaacccttactgccaggcaagggcacccaagttcccagagttcctgctgccgcctgcatttattaaagtcgtctgctataacgctcgctggtagccttcaccccgaaggtgagccgggccagccgagc

SEQ ID NO: 28420 - DNA, 70 bp, Homo sapiens; identical to SEQ ID NO: 23448
  chr10:5523206-5523276
  hypo

SEQ ID NO: 28421 - DNA, 1455 bp, Homo sapiens; identical to SEQ ID NO: 23450
  chr10:5540271-5541726
  hypo

SEQ ID NO: 28422 - DNA, 214 bp, Homo sapiens
  chr10:5576085-5576299
  hypo
cgctccctcgcaggcgcacaggccctttctcaggaaagccccacacttggcttaaggctctgctgttgctgccttgaactcttaatgagttttgaacaaggcgccccgcattttcattttgcattaagccccccaaattatgtgcctgccctgctcaccacgtcccactgcgctcccagggcagggcccgccccacccagacgcagactgtcgc

SEQ ID NO: 28423 - DNA, 421 bp, Homo sapiens; identical to SEQ ID NO: 10976
  chr10:5960358-5960779
  hypo

SEQ ID NO: 28424 - DNA, 902 bp, Homo sapiens; identical to SEQ ID NO: 26172
  chr10:63212437-63213339
  hyper

SEQ ID NO: 28425 - DNA, 219 bp, Homo sapiens
  chr10:63656701-63656920
  hyper
cgagttccctgtgtctctcttggctccggctccaagttcatgagaaatctgtccccatacccatccttctgaagcttccagcctttaccacctggacctgggctggagtcccacccccaccacagctcttgagacaggcgacgaatagacccaaatttgagatgtagctcaacctttgaccactagaggtctcctggaaagcaatgacccgtataaccc

SEQ ID NO: 28426 - DNA, 634 bp, Homo sapiens; identical to SEQ ID NO: 6385
  chr10:71133924-71134558
  hypo

SEQ ID NO: 28427 - DNA, 316 bp, Homo sapiens
  chr10:72015065-72015381
  hyper
cgaaggggaaggcgtagacggtgaccaggtgcagctgcggcgcgctgagctgcccgtagtcgatgagcagcagcagcgcccagagcggcagccaggacagcgtgaagaacagcgccaccatgaccagcatgtgcaccacgcgcgctctgcgccgcgatgctcgcgggtccgcagcctcctcgcccccgggggccgggcccggggcctggcagagcttgcgcgcgatgcgggcgtacatgaccacgatgagcgccagcggcgccaggtagatgtgcgagaagagcacagtggtgtagaccctgcgcatgcccttctc

SEQ ID NO: 28428 - DNA, 4167 bp, Homo sapiens
  chr10:7449896-7454063
  binary
cggtggtcggccgggctcctgcccagtctcggctcctccctcctccccaccagaaggaaaaacttgggcccttcgagaaccctgtggaatgttctttgtaatcaactgtacatccgcttccacggcacggcctcgtgcaaaatcgcgggtttcggggccttggagcaaattgcgcttgtcagcggcgacgtcaggaggacaaggggaggggttcgcggctgaaactgcagcttcgcagcacagagccattttaggctgctccccacctcgcggggcccatgggaaagccggccccgggagggcgcgcccaaacgcaggctggaggagccacggacgcgtcctggccggcgtgtcgccatcgttcagcctcgctgcccaggtgggaggggtcacctgccgcggggtctccaagccagtgccgcttgctcccggcccccacccactgacagcacggcgtccgagtgaccctgtctagcctcgttctgcgctcctgcaaaccacgttgctgcgctaactacaaacctggccaacatgtctttgtaaccctatcatttaaaaacgcttccaggcacctggccgctgccagatcaggttcgcgggcccggaggaggtcctcccacctgcccccgccagccccggggaccgtgcgcggcctccgtgtggcccccgcccacgaggtccctcgggcaggaaccgccgcgcgacctctgttcagcggccgcgtcctggccacgggcgacccctgtcgggaaccctgttcccggctaagctgcgttcccgcattccggtggctctcacccgagctcgcgtttgctggctttccctctggctcctctgcctgaccccgattttgtctccgaactccactcccagatcctccccgccctggaacgccgacctttcccccgcacttcgccgcccactcacatcccccggcgactgcccggcctccatgcccgccaagacaagaagatgcccctctccgatgcgccgagagggttcctaagccgagcaagggacaatttcttccccaaacgctgtccccatcccccaccttccctagagcgcgaaacccaaaagtaaggaaggcaacccctcgcctcgaccctacgtgcttgtctcccagagccgcgcgctcccgcccttctgccccaccccaccaccaccaccaccactttggtcttctccaagcttcggtcccggtcccccacctcccaccccagagcggcgtggaggaaagcaggagcccactattaagtgcagcgcgccccctgcacacacgaaatccggctggcgtctgcagcccgattgcacccaatacccgggacagttagtccttttaataagcacctcctcgccccacctactcggggatctacccgcgcaggatccagcacacacaaggcgagagctagctcgtctcctagaaagacaaaataaatcactccctctgccctcatgtactttacaccacgtgtccgcagtttgtcacgtcaaatcatggcagggtctggttccaagacgcacacacacattcggggtggttctctttgacacacacacccaaaaaaactgcgcacacgcaggcctgcacactaatccacaggcacacacgacagttgcgtttcggtgccctggtccgggccaggggcacttctccatccctttcccccctagcaatggacttgacacacagactctaaccacggaaaaaaaaaaccggacagcccattccttctttttttccccacttaattcgctaaagcgcttcctggggtagccaaagagagtcgaaactaaggggtggaaacttcagctgggttttttcccacctcaaaacctttattttcagtttttaaaagccaccttagcccgccatattgaaactggcacggtttctaaagactccttccccgcagttgtggcgcttccaagaaaacacgagtacggatcaggctctggatgagtgtccggccaccgagaatcagccacttcccaccctccaggatcccccagctccctccagccccttcccaccgcccctggtcaaaatcaataaatacatctcgcagttcctacagttgcattttggcggatttctgcaaaacatacacacacatacacatacccacgcacgcatattaaaaaataaactccagaaccagctcaagtcagcaattttgaaagggggtcgaataagaggagacaaccggaaagcccctaagtgacaggatattactttaaagagaaaataatgaacaaaaagaccatcctcgctggagcacgctccaaaactactactgccaattttatttcagttgctcaggcaaatgtttccaagggagcgattccgaatgtctgcacgatttttacccccatgccggtctccgattccccgtcctcaccatctttttctcccacccaaaccaaaagaaaggggagaccccagcgcggaggagacgcgggagcgcggggtaggtagcagcggcggctgcgtcgctaaaatgagtgcagaaacgaggaaggtgggcggcgggaggggacaggctgcgcccggggaaggaggacactttgcaactccggacggactcccgcacggctcggcttttccgagcccggagacgcaggcgaaggggacccgggaagcaaaaatgacaacctggagcgcacagaggagtttgaagcttcgctcaagtgcagtcgctttcttctcctgcccttctctttcgctcccctgcaccctccccagccttcccccacccgccacctccaaccccagctccctcaggcttccttcctttttttttttttccttttttttcctaggctggaaaaagcccctgaccagcgcactcaacctgcgggccgaagggctgctctccggccagcctgggcgccggggacagcagccggcgcggcgtcctacctggtgaagttcgtcctgccctcggcgtggacccaggccccggtcgccgcccgggagggcaccggcctcgctcgcttgctcgctcgcccgcccttgcccgctcgctccccgcccgccgcctccctcgcgcgcccgctccggtcctccggctcccactacagctcattccaatatggcatcctctctgtgcgcatgctcggcgctcttttttttttttttttttttttttttttaagattttgtgtgtgtgtgtatgtgtgtgcgtgcgcgtgcagcgaactccttcaacgaccttttccagcgcttgcaaaatttcttaagccaattagcctgcgggacgtgatcggctccttccccagccagctccgcgccattccctgcgcctaagcaggcgggcacccccaggaccctgggaccttccacgcccacgcggcctcctccccaccgcgctccccttcctcctttttgtgagctccctccatacatgatctgcagaaagttcccatcgcgggcgtttccgcacacccctccgcaaggacaactgggcaaactcccgtttccctggctgcggttcgtgagctgggtttccaatggctcagtcgaccgtgtgcacaaacttgcgctttatccgccggggatcgctgggagcggagataaattcaatccccagggcaatcttggccccgcccgccccaccccatcctgtgcttaaatagagcctttcttgaagctgcgaacatttccaggccccttgggcagggctggaggggccgaggagagctattcgagggaaaggtgccccgaggggcaggaaattaagttggggctgcccgggcgagctgccaggtagccgtgctcgccacggcgtctcatggggcacctagctagtggcgggcctcatagggcgggaaaagaatcgtcgctcacaccccagcaaaacgtggccctcgacggtccgttggagagccccggcggccgtgagccccgggcagggctggacgtctgcggagccctcgggcactttgtcccgggcgcctggggaggaacgcggagctcccagggccttaggtgcaacggctgcgcagagcccaaacgaaatgtccccagtgcggaaaagccggtgacgccctggtagcaagaccaagagcttccgaagaacgctgcgcccttaactagggggcctcgcagagatgcctgtgtgggcctgcattgtatatttctgcgaaatagcgaatggacac

SEQ ID NO: 28429 - DNA, 116 bp, Homo sapiens; identical to SEQ ID NO: 10983
  chr10:75574077-75574193
  hypo

SEQ ID NO: 28430 - DNA, 42 bp, Homo sapiens; identical to SEQ ID NO: 10984
  chr10:7729428-7729470
  hyper

SEQ ID NO: 28431 - DNA, 973 bp, Homo sapiens
  chr10:8095120-8096093
  hyper
cgcatgaaaggaatccttcagaacttactttcagggacggcttcttctatctcgaatttttgcatttgtagggaattttatggggtagaggagcgaagagggaacaatgtctccaattcaaataaaaccccaaattaagctctcagccccatcggtgggatagcctgcgggggaacccactccctctcctggcagcattgccctgggggcgagcagagagtggatttggagtcttcttttcccgcctgacccctgctcgcccgagcagcattttcgggccagcggctgcagccacccgggcgccgctaggggatgcagtggctcaaaggaccgagcgggcggtgcaggttggaacccgcggggcggaccaatcgcggctcggccacagcctcgcccgctgattggtccctccaggccccgcccccgctcgccccgcccctctcgctggggcgcctcggagccgcgtgccctccgccccggggtgcccattgcgcagagcgtggcctggagacccgcgagccggggaaggtcgccgtggagtcccgaccagaggccggggttggggtcggtgcagaccgagggctggtttccttgactgtgggagaaacgccgggagccggagtaagtagggctccgggcggggcgaaaggaaaagttgggtccctagagtgaagaccgagttctttctgtccgtctacactgagcgtactcggggaatgagttagagccagtctcttcctcccctccccccttctcatccctcactgttgccactcaagtcaaaagcacacattgattacaaatattaggtctggaaagggcagctgcaacagctgaagcgtgttcactctgggggcttgagagcgcagaaggctcgggaaagaggtgacaatgacaacaaaattgacgcggacgctccagtcaaaggcatctcccctttatccgatgactcaccctcttaggaagtcggccc

SEQ ID NO: 28432 - DNA, 955 bp, Homo sapiens
  chr10:8096151-8097106
  binary
cgcgcacgtttccccacatcgatgcgctctcccaaacaccctgcattagatcctaataatgatccatgcgtgcctattttttaaaagtctgaaaaagaaaattctgcccatcgaaatgaacttcatgaatggggcaggctggctgcaccgggacggaatcgtccacccgacccgaatgaattggcaggagccgcggccacatttaaagggccagagcgcgcgttccctcccgtccgcccccaagccccgcgggcctcgcccaccctgcccgccgcccctccgccggcggccgccctctgcggcgcccctttccggtcagtggaggggcgggaggaggggcgggggtgcgcggggcggggggagaagtcctggagcgggtttgggttgcagtttccttgtgccggggatcctgtcccctactcgccagcgccaggctcctcccccccggcgcggatgacactagaacctccttaagttgcgtcgcgccacagctgtctgcgaacactgagctgcctggcgccgtcttgatactttcagaaagaatgcattccctgtaaaaaaaaaaaaaaaatactgagagagggagagagagagagaagaagagagagagacggagggagagcgagacagagcgagcaacgcaatctgaccgagcaggtcgtacgccgccgcctcctcctcctctctgctcttcgctacccaggttggtactggtgactttttttttttttaagtttgattttttgcccccaaccacttgggaggacctaaatcaattttaaaaactcaactctcctcttttggaggttttctaggggctgagaggacggtcccgggaccggtgtccccgagggagggacttgccctccaagtcgtaacagtcagccctgggacttgccctccaagttgctcagccagccccggctcccgcgagccgggctgcagggacgtcccc

SEQ ID NO: 28433 - DNA, 571 bp, Homo sapiens; identical to SEQ ID NO: 23452
  chr10:851108-851679
  hypo

SEQ ID NO: 28434 - DNA, 438 bp, Homo sapiens; identical to SEQ ID NO: 24937
  chr10:94180315-94180753
  hyper

SEQ ID NO: 28435 - DNA, 761 bp, Homo sapiens; identical to SEQ ID NO: 8961
  chr10:98479725-98480486
  hyper

SEQ ID NO: 28436 - DNA, 1147 bp, Homo sapiens; identical to SEQ ID NO: 22765
  chr11:104034057-104035204
  binary

SEQ ID NO: 28437 - DNA, 474 bp, Homo sapiens
  chr11:119612049-119612523
  hyper
cgaatgaatgagactgcgggaatgctgcccccacctcctctccgcctccccacctcgcctccaggtaccctgggcgcctgggaccctgcggggcctcctggaggcgggacgggcacggcgccacctagcggtcgtgggccgcggagagagcgtccctgtccttccccgtgtgggacctgcaaccgccccatagcgcagagtccgggaggctccagccaccgcctctgtcggccccattctctaggtccacagagggtagagacactcgggggaacgtacttttactggggtacggggagccctgccccacggctgtcagctcgggtcgggcgcgccgggtgcccaggaggcagcctcccaccctcccccgcacacgtcgttccagtccctccgccacaaagagaccattgattgggaagagcggccgggttgtggtaggaaggctggtggggacacgcacgcacacacacgcgc

SEQ ID NO: 28438 - DNA, 452 bp, Homo sapiens; identical to SEQ ID NO: 24941
  chr11:119613005-119613457
  hyper

SEQ ID NO: 28439 - DNA, 685 bp, Homo sapiens; identical to SEQ ID NO: 23795
  chr11:120008024-120008709
  hypo

SEQ ID NO: 28440 - DNA, 939 bp, Homo sapiens; identical to SEQ ID NO: 22768
  chr11:123228638-123229577
  binary

SEQ ID NO: 28441 - DNA, 1291 bp, Homo sapiens; identical to SEQ ID NO: 22769
  chr11:123300826-123302117
  binary

SEQ ID NO: 28442 - DNA, 394 bp, Homo sapiens
  chr11:126272994-126273388
  hypo
cggaagccctggaatgcctggggccactgagcaatcctcaccctcagccccacaaggggagggcgtggctcgtgaaattcctgattgggtatagcccagcaagccccaagactcgcccagtttgcttagcgcaacactgacgctgttttggaatgaagacaagacaatgtagaactttactggggaagaggtcgaagaagggctaattgtcttgttgttcaagactggttagcgctgctcacctctgacgctgctcacctctgacgccaaaggtttttccctggaaggcagccctggaggatacctgtgtatctgtctttcacaaaaggtgaaatgagctctttgtagtgtttcccgcccaggctgcattttagaatcacagaggaggtacggc

SEQ ID NO: 28443 - DNA, 1308 bp, Homo sapiens; identical to SEQ ID NO: 22770
  chr11:128564211-128565519
  binary

SEQ ID NO: 28444 - DNA, 937 bp, Homo sapiens; identical to SEQ ID NO: 26195
  chr11:131780712-131781649
  hyper

SEQ ID NO: 28445 - DNA, 480 bp, Homo sapiens; identical to SEQ ID NO: 26196
  chr11:132952521-132953001
  binary

SEQ ID NO: 28446 - DNA, 842 bp, Homo sapiens; identical to SEQ ID NO: 22771
  chr11:133938756-133939598
  binary

SEQ ID NO: 28447 - DNA, 225 bp, Homo sapiens
  chr11:1471339-1471564
  hypo
cgctcccgcctgtttctttctggtcctcctgtgccgtgtgcatgcgggggactggggtgcatgtgccgcgcggctgcccccaccccgctcgctccctgcgcctccccgtagcctattaggaagcttgtcctgcccccaccgccccccgagccgcccttcgtggcccgccccctggccacctccacggagcccgaagcttgtgggagcgcctcgaggcctggacac

SEQ ID NO: 28448 - DNA, 227 bp, Homo sapiens; identical to SEQ ID NO: 6389
  chr11:1521171-1521398
  hypo

SEQ ID NO: 28449 - DNA, 408 bp, Homo sapiens; identical to SEQ ID NO: 26204
  chr11:16634123-16634531
  hyper

SEQ ID NO: 28450 - DNA, 591 bp, Homo sapiens
  chr11:2209823-2210414
  hypo
cgtaaaaaggcaactcccagaacaggagaaaatgccgcaaatcacacacctgatcggggagtagtacccggaacccacagagaacccctaaaacacaaccgccaaacaccagattcaaaagtgggcgaaggacgtagacgggcgcctctccagggaaggtgtatccaggacagcagccgcagggaaaggtgctcaatgccacgaatcattagggcaatgccaatcaaaatcacggcgcgacaggattccacacccgttagggtggccaccgtcaacaaacccaaacaatgcagaacacaaaatagcaagtgctcacgagaatgtggagaaatcagagcccctgcggtgggtcgtgccgcagggcagccgctgcggacagcaccctggcagctcccccgcgggttaaagaggcactacaggctgccgcaatcctgttcctacgtggatgcccagaagaaatgaaacctatgtccacccaggaacgtgtgtgtgactgctcacaacagtgttattcactattgctggaaagtggaaccaacccagtgtccgccggctaagagcaaaatgtggtccacgcatacaacggggcac

SEQ ID NO: 28451 - DNA, 887 bp, Homo sapiens
  chr11:22214520-22215407
  hyper
cggtctccgagggtggggcgccggccggtcttgcggtctggaggcggggaaagaggcgtggaaacagggacgcagcgaaggggaaaggaaagctgccagagggcaggagtggaaaggatcctggcgagcaccgggaggagtggcggctgcgggatcagctgccgagcaggcacagggacaggtgcctggagaagtactgggagagcgcccaggagcgctaccggctgagggtggggaagcgcagggccaagcgcgcgaagcaggttgtgggggaccgggtcgagtggaagtacccgccggagaggaaggccggctggctgtggcgcccagagacggtggagtccgaggaggaggagaaggaggcctgcagaaggaagagcaggcccttagaagtccagcagcagcaactccggcggcccacagtcagattcagcacctgcctcagatctccacgtctgtctcagctgcccctctcctgctgcctctcaggcaccagtgccattaacgagctggcgaagatgggcgacccggatctcctggaagtgttggcggaggaaggtaggaccgcgccaagaggcgtcaagggagagccaggctggctgcctgcacccctccacccgcggcgcagaggccccgggggacgttggcggccctgcggcctgagtcctagggaggttcgctgcgtggcgtgctcagcgcgaaaccgggactgcggggcagagtcccccgcctggggtgagtggggttggtttcggcgccccacagatttctctgctgctcctgcgcgccagggacctgcgacctgtgacccctatggttccggaacaccctccttgctcccctgcaggcctgggaaccgccgagtaattcagggctgctaggctagc

SEQ ID NO: 28452 - DNA, 330 bp, Homo sapiens
  chr11:308125-308455
  hyper
cggaactactggggaaagggagggctcactgagaaccatcccggtaacccgatcaccgctggtcaccatgaaccacattgtgcaaaccttctctcctgtcaacagcggccagcctcccaactacgagatgctcaaggaggagcaggaagtggctatgctgggggtgccccacaaccctgctcccccgatgtccaccgtgatccacatccgcagcgagacctccgtgcctgaccatgtggtctggtccctgttcaacaccctcttcatgaacacctgctgcctgggcttcatagcattcgcgtactccgtgaaggtgcgtatggccctggc

SEQ ID NO: 28453 - DNA, 1938 bp, Homo sapiens
  chr11:31819317-31821255
  binary
cgactcccccacccccacgataaacctaagtggtggacaattaagatatcttcttcaaaaggcgccccctcggagccgcgcaaagcaggggccttcagtgggtgccgttcaccttccagcctaatccgtgagaaagcgagtgaaagcgcctcccattatcccagccccaggaccatctgacgatgggaataggatttgtttcctggaaggaggtgagagagagagagagagagagagacagagagagagttgctgggaaataaaatcattccttagtttcttagtgtcttaatcagtgaggcggaaaacaagcaagaaaagatagcaacccggttgcggcaccttttcagctctggagcgcggatcaaaacattgtagcatctgttgaaagagaggctgactaaatcctatagagggcttgggtattatggggggtgggggtggggtgaggggaggagataagaaaaagtgtctccgtgatccctaaaaccaccaaatcgccggagaattggggctggatagagttgtctcttgttgttgtcagcccacgtcgtcgcgattttattcaccgccgcatggcgttgatcagatggaaaccatatttgtctccctctgagacctaacccccgccttatgcttttggagtatggactctttaaaacccaagaaaggcttcctgggctgggaaagggggctagggagggagggggaccctcttagcaccaaaaagtctgaggattccccgggaacgtgaagcgaagctcaccaccggtgcccgctacccccacgccggcaactctgtgcttcgtttggcccacgtgtcctccccacgcaactaggggcgacggtcctgtgcctgaggtgacaatcaccccccaaaaacctcacttgcgggtgggggggtggtgattgccagttgacccagaattttctagcaactaggcgcgttaaagtgaaaagcccctggactagctccacctccggccccaaccatcacaggcggaccctagctgatttgactctcacttcccgccctcagactgccggcgacgaaaatccgcccgaatcgggcgccacctctggtggaagctgctgtcctcggcttctgcccaactccaagaagcggaaggggggtgtatcctgcgccccaagctcatgggagcccacgcaccggggagagcccggagtggaggctctgggctcagccctcccaggcctaggccaccgtgccctgagtccctccccaagacttctcggactaagtgggccagactcttgtcaggggagggatcaccaggacctcagattgctgggggcggaggggtggacgctcgtgagtgcgaagttcgggtgtcacttgggtgtgtccagtgtctacaagtgggaatcctacggtttcaaaagtcaggcagggatggggttgcctacactcggtggggtcaatcgctagtctcaccagaggcgggagcgggcctgggggccctctgagctcgcggaggcggcgggttcggggcccgtgcgggcggggtcgcccaggggagcccgggccccgcgcgtcaggaggcctccgccggccgagcggccgcgctgggaaacaagaagcgagcgctttgctccctatcttcccagtgtccgtcctatattgttttctgctcttaaaactgacatgtctaattggcaattggtgccgaatcgtgtccagaggtctcttgtggaacatttctacagctgtctccttcaactagacgcttattcatgtcgccttaatgagaaacaaaacgttctctaatgagcaattacagagcgacaggattgttcccataacaaattcttgcgagtgacagaagcatcctttgtaccagatatttcgcatactgttaccgattttcccttccctcgcccgactccatggaggcgccgggcatccggagccggtcc

SEQ ID NO: 28454 - DNA, 687 bp, Homo sapiens; identical to SEQ ID NO: 26210
  chr11:31824579-31825266
  hyper

SEQ ID NO: 28455 - DNA, 1443 bp, Homo sapiens; identical to SEQ ID NO: 23807
  chr11:31825604-31827047
  hyper

SEQ ID NO: 28456 - DNA, 880 bp, Homo sapiens
  chr11:31835195-31836075
  hyper
cgtcattgggtggggaagggggctccgggaaagactcctggaaactcctccgcacaaacaaaaaacaaaaaggacttggctgcttcccatgtgtcaatatttggggaggggagttcaaccccagaatgaggccgagttttcaaagtttaaggagagaggggtgagagtgagatttcctcgttctctctggactggtctcaaggaaggtgggggtgctgttctacctcgtggggagcctcactccctctgccaagtaccggctctgggggcgaagcggcctaggggtgtgggggccgagactgaggtgcgggcgcggttgccagaggtgtgtacaaaaccgagacaactcgcaggtcgccattttaattgcggctaccaacacgcccgaggcccacttgctgccctccaagacgcgggggggcggcggggattgcgctttaggttctgtctcctttccccgcctccccacaggcccctgttcccccctaccctccgccccctgtggccagagggaggacctctcaggccggcgggtgcgttcccgcgggggccgccggggtcgtcccacccggtagcggggctgtctgcgtggagggagtcccgctgggggaccgtggctcgccagagcctgcccagagcttctagccagtattgatgcgtcaacatgaggtgaggcaagcatctcacccgcaccgatccctggcattcccctgtgcccaccccatcaggccttcggggaggcaaagaagtgcccacttctggggggaagtgcctccagctcccagcttcagaaccaagagcctcccatccggagttctgacagttctgacacctccaaactctctctttccccggtcaagcagaggcgcagcgccggcgc

SEQ ID NO: 28457 - DNA, 906 bp, Homo sapiens
  chr11:31839253-31840159
  hyper
cggggccacttggggcgggctttgatttggggacagcagtcgctggcagcggagaggccccgcgggccccgagccgggccggggccggagcccgggcggttacctgggagcggagggcggggaggcaggtgagcctggcagcgccggttcccacacttctcaccgccgctcggcaggggaagtggcagatctgacagccgcgttctacgcgaggacctgccccagagtttaaatgtcaatgataagaaaagagggtgctcaggcaggcgctaactttccttaatatccacgccagcgccgtcctcattggctgcccggcccgcgtgacgtcatggcggctagagttgggcacagctctgcgccgactagttttccggccgggcgggagcctgcttctccccacccagggtccggccggctccaacccctgctttggccttccttggcccggcctgtgactgctctagcccggcccggtccagcctgggccgccgtcctgtatggcgtagagtcgatccccaggaaactagtcttgccgagtgcgctcctccgcaccttcgggcactagggccccaagatctctgcccttaggctggccagctacctctctgggtaatcaccctgtcccctcctccgatccccaagggagtcccttcatcggagagacccgaaggccgcgccgggatggagaggcgcttttggcaggaatcatttttaggaggagttcgaggctcgatgagtaccctcaacctggccctcgagcccgcaagtcactagctgggcacagacgggggctccgggaagaggacatgcgacccctttttcagggcctaggccaaaggtctctccaggcctgctgggttctcaagagggaagccctaaagggggcctacccgggcttccctc

SEQ ID NO: 28458 - DNA, 991 bp, Homo sapiens
  chr11:32456416-32457407
  binary
cgctcaggcactgctcctcgtgcggctccgcgccgccccagctcggctcctgtttgatgaaggagtgaggcggcggcggcgggggtggcggcggagccggtggcggcgcggggccgcccaacgacccgtaagccgaagcgcccgggggcgcaaagtccagcaccggcgcccactgcgccgcgccgctcacaggcagggcacagccgccgccgccacccagggaggggacggcgggcagcagcgcgttcaggtcccgcacgtcggagcccatttgctgcggctcagacccggacgccccgcggctcctccggccctggagacgttcagcgctggcctcggcggcgcctaacttggcccagatgccgcccgggtcccggactccctgctgctctggctgctgtaggcacccaggcccggagcggagcgtgtgctgagacgccggctccgggacacacgtggaagccgggtcctgcagcaagaggaagtccaggatcgcggcgaggagacggcggggcccgggcgcctgggctgccgtcccggctctgggtgggtgggtgggtgaatgagtaggtgggagggagggcgggaagtgggggagcggacaggcggtcgggttgcggagagcccccgggtgtgggcgctgccttgaactccttaccccagctgcctggctgccctcagcttcccaaagctcaaataagaggggccggcggcgcggggaagaggaggagccaggaggctcggccgctccattcactcagcagcccaagcccggccaggcagcgcgcgctgctccttgggggcgccctcgcagctggggtgagggcgggtccgagggagcgtccctctcggagacaccctcctcttcaacccaacacgcgctctcagctggccggtgtggcacaaccctccccccacctccccttcttggccttcgccagtgtgggagcctcgtctcactggagagtccgttcaggtaagcagtgagtcc

SEQ ID NO: 28459 - DNA, 95 bp, Homo sapiens
  chr11:33874006-33874101
  hypo
cgtgccctgttcactcggcccgccatgctcaagctcttcttgcgaggaacgcgtgggtgaacaagtgcaggatctggccggctgctttgggcagc

SEQ ID NO: 28460 - DNA, 115 bp, Homo sapiens; identical to SEQ ID NO: 11001
  chr11:34897239-34897354
  hypo

SEQ ID NO: 28461 - DNA, 808 bp, Homo sapiens; identical to SEQ ID NO: 11002
  chr11:376596-377404
  hypo

SEQ ID NO: 28462 - DNA, 1622 bp, Homo sapiens; identical to SEQ ID NO: 22773
  chr11:43599961-43601583
  binary

SEQ ID NO: 28463 - DNA, 1390 bp, Homo sapiens; identical to SEQ ID NO: 23809
  chr11:43602408-43603798
  binary

SEQ ID NO: 28464 - DNA, 351 bp, Homo sapiens; identical to SEQ ID NO: 23038
  chr11:45376873-45377224
  hyper

SEQ ID NO: 28465 - DNA, 433 bp, Homo sapiens; identical to SEQ ID NO: 23455
  chr11:47358910-47359343
  hypo

SEQ ID NO: 28466 - DNA, 524 bp, Homo sapiens; identical to SEQ ID NO: 23039
  chr11:59333339-59333863
  hyper

SEQ ID NO: 28467 - DNA, 125 bp, Homo sapiens
  chr11:61036523-61036648
  hypo
cggtgacaccggcccctgcctccccgccctgcaaaagaaacagcaacgctgcaaactggccaaggcttgccctgaaaggcaacatgacgcggctggaagatggcaggtctcccctaaagaggatc

SEQ ID NO: 28468 - DNA, 459 bp, Homo sapiens; identical to SEQ ID NO: 24965
  chr11:61664527-61664986
  hypo

SEQ ID NO: 28469 - DNA, 357 bp, Homo sapiens
  chr11:64129097-64129454
  hypo
cggctccacccggcaggctgtggactggtggagcctgggcatcttgctcttcgagctgctgacgggggcctcgcccttcaccctggagggcgagaggaacacgcaggctgaggtgtctcggtgagtagggctggacgtggagggcggccagagggctgcagggcctgcctgggcagggctgtgggtggggggcttgctgcccctgacacccccccaatcctcccagacggatcctgaagtgctcccctcccttcccccctcggatcgggcccgtggcgcaggacctgctgcagcggctgctttgtaaggatcctaagaagcgattgggcgcggggccccagggggcacaagaagtcc

SEQ ID NO: 28470 - DNA, 242 bp, Homo sapiens
  chr11:66454439-66454681
  hypo
cgagagcactgttccctgttcctaccccagcttgaagacatgtttgcgctttcggtaatcaaaggcgacgctgccctgggccctggccaggctgacaggcacttctccgtggtatggcactcccgcgctggctgccttggcatccttgtaaaagccgaggctcccacgccgcaggacacagtacacgttctgccaggacctgcgagggacgcggtgctgactggccggcctcagtggcgccc

SEQ ID NO: 28471 - DNA, 353 bp, Homo sapiens; identical to SEQ ID NO: 23820
  chr11:69192459-69192812
  hypo

SEQ ID NO: 28472 - DNA, 161 bp, Homo sapiens
  chr11:69970463-69970624
  hypo
cgaagagtgggcacgctatggagttttctataagtaccagcccatcgacctggtcaggtaagaacgcgccacagcctgcgggaatcaagtccctactccgatggcagtcggataacatccctgtgggtttcaaccgctctgaatgttcagtacccgggaac

SEQ ID NO: 28473 - DNA, 545 bp, Homo sapiens
  chr11:70022862-70023407
  hypo
cgagacgatgaaccccattcaaatggttcgggggacccttagaattttatttttggtttacagagatccttagagcagtgagtgtcaccctggaatgtgcgtcagaataactcggggctcccagccccaccccaggagaggcggatcccgtgggctggggctggggtgccggttcagcatttctctaacacaccccgcggatgtgcagggccacacggagagccatccgcctggacgtagatatcctgcagacctgtcaggacaggctccatcggggcccggaagcgaggaagaccccgctcccggctccatctcatccccgcctcatccctcccatttcctgttgtctctctgggccggttgggcgatcacctgggcggacccccttgcctgcctgagtcctgcacttcgacggccctgaactcaggagccacgtccctcgggagccccaaagacttcaacctccaccccaggcccaccgcacctcagcaccccacttcggaggtctcaaactcagcgccccaagggccaggtgggccacacgc

SEQ ID NO: 28474 - DNA, 931 bp, Homo sapiens; identical to SEQ ID NO: 23822
  chr11:71192127-71193058
  hypo

SEQ ID NO: 28475 - DNA, 295 bp, Homo sapiens; identical to SEQ ID NO: 23457
  chr11:71507748-71508043
  hypo

SEQ ID NO: 28476 - DNA, 632 bp, Homo sapiens; identical to SEQ ID NO: 23826
  chr11:75152263-75152895
  hypo

SEQ ID NO: 28477 - DNA, 782 bp, Homo sapiens; identical to SEQ ID NO: 22775
  chr11:76381512-76382294
  binary

SEQ ID NO: 28478 - DNA, 659 bp, Homo sapiens
  chr11:858985-859644
  hypo
cgcacccctgggtcacacgcatccccgctcacatgcaccccagctctcacgcacccccgggctcacaccaacagcttgcacccccggcacacatgcaccccggctcacacgcacccccgggctcacacgtgccctggctcacacgcacccctgggctcacatgcaccccggctcacacgcaccccaggtcacacgcatcccctcacatgcacccaggctcacacacccacccccagcccacactcatccccgctcacacacacccccactcacacacaccctggcccacacgcaccttggctcacgtgcaccccggctcacacgcaccccccctttcacacgcaccccgggctcacacgcaccccgggctcacacgcaccccccctttcacacgcaccccgggctcacatgcaccccggctcacacgcaccccctctcacacgcaccccggctcacacgcacccccctcacacgcaccccgggctcacacgcaccccgggctcacacgcaccccgggctcacacgcaccccctcttacacgcaccccgggcccacatgcactccggctcacacacaccctcactcatgcaccccgggcccacacgcaccccagctcccatgtacccctgctcacatgcaccccagctcccatgcatccc

SEQ ID NO: 28479 - DNA, 978 bp, Homo sapiens
  chr11:86382607-86383585
  hyper
cgcctctctccacgcataaaagggagaggagggacaagaaagccaaaccaagtcacaacaagcccctgcaaggcaaaaacagaaaaaccgctggaagggcgcccgggaggatcctttctgggtccagggggcggggcgcaattttccggcagccacgggatcgcaacgcgggccgtcctgccctctggcccattaccttgttgagatgagggttcctggtgacatcgtatccgcgcttcttcaggggcacagggcgcgccgggccaggcttggagtggcagccttgggcgggcgcggtgggtgtccagcgcgggagggcgccgcaggcccggcccggccagggagccagccgcgtgcctgtccccagcgcggcacccatggtccttggcagacctggcacgggagagaaagcaaggtcagggcctccttccagccagccaggacccacgcgcgctgcggggcaccgggcctgatccggggacgcgccctctgggagagggcaggtgctcccaaagggttaaatgttccagcccccgccactcctcggctgccacctgctcggctccgcgcggggcgccaggcctagccaagagccaggcaaagcgaaaccaagccctggaagcagatccggtgcgggtgacagccggcgccacccctgcccccatccctgtgaaaaagaggcgactgcgcggcgaggggtccccgtacccctaatcccgcgtggtggcttgcctcggtcctctccttccctggcccacctgcgctgctcggggagctgaggtctacgcggtcccgctgcggagcaggcggggtgaggagctgcggtctgtgagtcctctcccgccaatgggtggaccgcgctggcggccgcgagctcgcggagctggtgagttcctcaaagagcggtcccacaacctttgttctcagtgcctggcttcccctgaggacgcgcgtggggcgcctcagcactgcgtgcac

SEQ ID NO: 28480 - DNA, 311 bp, Homo sapiens; identical to SEQ ID NO: 6799
  chr11:9554670-9554981
  hypo

SEQ ID NO: 28481 - DNA, 513 bp, Homo sapiens; identical to SEQ ID NO: 6394
  chr11:993208-993721
  hypo

SEQ ID NO: 28482 - DNA, 1674 bp, Homo sapiens; identical to SEQ ID NO: 22777
  chr12:103351149-103352823
  binary

SEQ ID NO: 28483 - DNA, 278 bp, Homo sapiens
  chr12:110783979-110784257
  hypo
cgtgacacgtcttccctgtgtgtcagctcatcttccagatcacaccgctgaacgtgacccagtggctgatggtgctgaaaatctccttgcccgtgattctcatggatgagacgctcaagtttgtggcccgcaactacctggaacctggtaaagagtgtgtgcagcctgccaccaaatcctgctcgttctcggcatgcaccgatgggatttcctggccgtttgtgctgctcataatgcccctggtgatctgggtctatagcacagacactaactttagc

SEQ ID NO: 28484 - DNA, 113 bp, Homo sapiens; identical to SEQ ID NO: 11026
  chr12:110784858-110784971
  hypo

SEQ ID NO: 28485 - DNA, 226 bp, Homo sapiens; identical to SEQ ID NO: 23460
  chr12:110983646-110983872
  hypo

SEQ ID NO: 28486 - DNA, 432 bp, Homo sapiens; identical to SEQ ID NO: 23461
  chr12:113725566-113725998
  hypo

SEQ ID NO: 28487 - DNA, 146 bp, Homo sapiens; identical to SEQ ID NO: 7861
  chr12:114334084-114334230
  hypo

SEQ ID NO: 28488 - DNA, 504 bp, Homo sapiens
  chr12:114337479-114337983
  hypo
cgacaagttatttcttaactaaaaagcagtgtttgagacctcccttttccgtggaaaactctgcgatgcgtgaggggagagaagctgttcctaaagaggaatcccccaagctgtctggggctccctgctgcctttcaccacccagaatgctggaagacatggcgcgcaattatcagctccaacaatgagccaacggcggccctccgagcaagcccagacaaagcacagagaccttgcagctgaaaaggctctgaatgcagacaggggaggtgtgaaagcaaggttagagtgagctgccgcggctgcttggggcaggaggggaggaatgagggcgcacaatgccacccttcccccggtacaggcacgctctccctggggcaccctgttccactgtctgagcttttgtcgcccactctggaaccagtctaggcgtgcagtgagggaaaacgccagctgcagcggaagcccgagcctgcgaaatctcaaaggaaggacgaaaacaac

SEQ ID NO: 28489 - DNA, 528 bp, Homo sapiens; identical to SEQ ID NO: 25003
  chr12:116946078-116946606
  hyper

SEQ ID NO: 28490 - DNA, 972 bp, Homo sapiens; identical to SEQ ID NO: 23463
  chr12:121687598-121688570
  hypo

SEQ ID NO: 28491 - DNA, 373 bp, Homo sapiens; identical to SEQ ID NO: 26245
  chr12:122439414-122439787
  hypo

SEQ ID NO: 28492 - DNA, 855 bp, Homo sapiens; identical to SEQ ID NO: 23464
  chr12:122622048-122622903
  hypo

SEQ ID NO: 28493 - DNA, 360 bp, Homo sapiens
  chr12:124788624-124788984
  hypo
cgcgagaggcacttcccttgcccactccccaggctggctggagtccacagggcgccacgaccgtttcgatgttcgaatagccctgcagccagaaagacgaagctgcgagcctcaggatgaactggtggctgccaccatcttcccttggtgtccagccctgcagctccgcgggagtgtcctgggccttggcggggacttcccgagccgtctcaccgcccaggcccacgggacgccagcctatatcggtctgggctttcacggcttctggtgtctcctgcccagcgcttccagcttgggtggactttaggtgttttttcagcgggaccctttggcaaatggtgcccggagctctggcttccc

SEQ ID NO: 28494 - DNA, 756 bp, Homo sapiens
  chr12:128750713-128751469
  binary
cgcgtggcagaaagagcagagcatgagcatcaggaaccgcacagggaagccgctgagatcacctgggatcaccaccatgagggaggccagccctggagaaatcagagggaaaagatagagagaacgaagtcgggggggggggggggagggcggatcttccttgtctgagtctgcagagaaattgcctattgcaggagcaagtctagagaggggctattctccacccactgaaaagataataaaacacatgctatgggcggcggggagatgattggggagtggaagccccacagacatgcagtgaaaaatgatcctttcttcccctctgcgttctcgtccccttcccagagacaccgctgtgatctcgtgcctcgccccctccgcacacgcacaggtgcacacccgcatctgtcttgagcccgcaccccgccttcacgctccgctgcgcgctgcttttccgcgctcagtgatccagttaggagctctccccgcagcagctgcgcgggactttgcattccagatgtccccagccctccaggctaaagcagcggccacctgaagttgaggaatggggcgtgacgaccaccaggtcccgcagtgaccacgggagggtggggagaaggagtccagctccgccttgagcgtcgggtccctgggcaggaccctccgggccacgggccgctgtccgttgggcacccgggcaggagtctgcgaacgctgagtttctctggaaaggcgcggacccccggaggagcc

SEQ ID NO: 28495 - DNA, 306 bp, Homo sapiens
  chr12:131268374-131268680
  hypo
cgctgacatatgtagacaaggggacaacccctgggaagcagacgtaaaatagaaacaataaatttaaaaactgatgagggacatcaacgcctacgtaccagagacaggtttcacaggttgagcctgggcaagttaccaacgaagaaaggaattaaaaatgaacaatcaaaaacgcagcaacaacaatcatcttcgcggatccaattccaaaattactacattactaaaaacatccagctttaaacaaatgatacatgcaaagaaacatgaaagtggaactcatccatgaaagcataaaaaagcagc

SEQ ID NO: 28496 - DNA, 1341 bp, Homo sapiens
  chr12:131271740-131273081
  hypo
cggccacccgcgcccagggcagggatctacacttgagtgtttccgcgtctgggtcctaattcctagtgggagcacggaaggacacagggaatgttgggagctgcatgggccatgtcttggtcccatgggacctggccctacttgacccgaggccacaccagcttgtagacatgagcttttgggggggctttgagtcctaagagacccagctgcccacgccacacagggggaaaggaagcagctggagagtccgctgcccacaccaccccgggctccacggcctcacccccaggccgtcacagagctccagtctcccgccacttcagtgcaaccctcgctgtctgcccactcctccggacatgacgcttaggaccttaccttgctctccagctcagagcccggcccccatggccgggccagacctgccccggcctctcccctccgcctgagccacgccccggcttcctgctcaccaggcctgcgttagcatctgcagctgtgcttcttcaggccgccgcaacaccagccttcccgcactgctccaagacactgagcctggtgcatgctcaggaaattcaacaatttcaaaacattgtcactctccccgcctgacgaccagccttgtactctactcacagggcaacctgctttagcaaactcaacgacacattaaaaagtacaatttgcaaaggagagctaccacctggctgggtgttctgcgcctagagactgggccccgggagagcgctccacagtgaacttgcgaaggatggaatttacataaagaaggcaccgtctttagtcctggaaaggcaccctgggattctctacctccgtccgtctttttcacaggcagggaactgaggtcccaggaggcccaggtcaccccacccaaggaggcagggcctcccctgcactctctggaacctctccctgccaagaagccagaggccctgttttctcaggcttaggaatctgcactctcttgttcaaagactgtgagtcagaagaggagggccaagtgccgccttgaatttctcttactgctcaaatggaaaacaatgaaacagggctgtccacatcacagcctgccacctgccagtcatttagagcctggcgcgcatttccatagctcctctgacgccaggacaatcagacccgtctccggagggctcctgcctctggatgtctaaatgttcttgccttaaacccggtgtgacgctccacccctcccacaccgcacacatacgaattttaacaaaatcttcaaagcagaacttaacaaaaggttgcgtggtaccaggtccatttggttccatgtgaaaccaactaggaagatcc

SEQ ID NO: 28497 - DNA, 623 bp, Homo sapiens; identical to SEQ ID NO: 6405
  chr12:132218722-132219345
  hypo

SEQ ID NO: 28498 - DNA, 177 bp, Homo sapiens
  chr12:132332958-132333135
  hypo
cgtggtgagcacactttactatttcagccattttgaagccacagctcggtggcatgaagcacgttcacgttgctgtgcagctgtcacctgcgtccacctcccgaagatttccaccttcccaaacggaaacgctgccccgtgaaacacggatgccccgccccgcccctgggcagcccc

SEQ ID NO: 28499 - DNA, 99 bp, Homo sapiens; identical to SEQ ID NO: 11046
  chr12:132411621-132411720
  hypo

SEQ ID NO: 28500 - DNA, 804 bp, Homo sapiens; identical to SEQ ID NO: 26251
  chr12:132643296-132644100
  hypo

SEQ ID NO: 28501 - DNA, 635 bp, Homo sapiens; identical to SEQ ID NO: 23855
  chr12:132665953-132666588
  hypo

SEQ ID NO: 28502 - DNA, 126 bp, Homo sapiens; identical to SEQ ID NO: 11052
  chr12:132675105-132675231
  hypo

SEQ ID NO: 28503 - DNA, 258 bp, Homo sapiens
  chr12:133481383-133481641
  binary
cgaagacgcggcctcaagtcatccccaagccggggctcctgggtggcttctcaggaagccaagctccctcaccctgtggcgacgccgcgggcggaatgcgcatgcgcgccacgagccacaatcgtagggttgggcgcgccctgccggccaccaggggcagcgcaggagctgagcgcaccccatcagcgaaagaagcgcgcctccccgctcttttctgaaccgtatctcctaaactataattttggagatcaaaagtgc

SEQ ID NO: 28504 - DNA, 1272 bp, Homo sapiens
  chr12:133484584-133485856
  binary
cgcgcccggcctcagacgtttttctctaggtaaagccgcgggatgaaccagcccctgtggaaatttagaagtaacgacgtccgtcaatttctgtatgaaaaatatacagatcgtgtgacacgtcttctgggaatgaaagtctgctaaactcgccgtcacgagtagatgaacacatttaaagtttgtagttaagaggaaaacaacgccaacgacacaaatgccccaagcgctggatgaagcagcgacctaggatggggctggcctggaacgggaaccaagacgcccgcccggacgaaaacgagcagggaaacccgggccggggtcggccgccccacacgacgcactgcgcagagaccacgcggctccgggtctcgcctgcgccggcgcatccctcgcagacgcgctcctcccacgcgagggccccttccccgaagcgcacgcctaagactgcgcgccgcagcccgccctgtctagctgaggcgcagacccggatgggtcccagaggggcgggtcggggcggagagccgcgcccaaaggcaatgggagccgcacgctgctaggcaacatgctgtctcccggcaacgtagaggcggggaattcgccaacgtgtctgaaacagacaacaattttagccaacggctgcgtgggccttgggcgtcctggccaatgggaatagtgaggggcctgtcactaagaaacctgtccctgagcaacgcataggaggggtggaacccagcagcgctgactgagccgccgcgaagtgccggaacgtattacctgggagccaaatttcagagcgtcgtttgtcttcccaagcccaccagctttcagcgttctccagcctcgccacacccccgcctcgggccgtccccgcccagacgcttgtccccgcgagaagctgagcgcactgaagtgagcccggcggctgccgccggaggaggagcccggctctggacacggccgtcaggaagctcagaggctgcagcaccgcttctgcgttgatttccgcttgacttttactcttttcttgggttaaaaatcaaacgccgacccgaggcgtcagagatgggcggtcgttaggcgcagtggcggcccccggatgtttgcgatgggacggcgggctcggaacgtgtggacgtgggctttggaggtgcgagccccattgggccagggctgggtccgggcagtggtacggggtctcagctgtccgtcacaggagatgtgcaggcctcgtcatctggggtcttacgtgtcagtgatgtggggtctgcc

SEQ ID NO: 28505 - DNA, 796 bp, Homo sapiens
  chr12:14133128-14133924
  binary
cgtgtgcatgtgaggttagtggctggaatagatttttaacgcttcttctggcaattacggtttttggtttttggagcgttagtggaggaggctctgtgtggagaagctgggggccggctccgtccctcggtggagcatggtcattcccaaagcgtccccttcctaagggggaaaaagaggcggtcagggcttgattcgcgtgtcccccggagggtgagaaaaatgcattccgaaaaagatatcaattcgttttaaggaaaggggggaggaaaccccgcatttcccacagagtgcacacgagaggaattgaaaacagctggtaccggtctataaataattcagaaaaggtctggctataccattcctgggacaggcacggatgagaggtgggaaagccaacctgaatggaagaggagagagggagggagcgagcgaaggagggaagtgggaaggaaggaggaagggggggagaagcggcaccatacagcaacacacactcacacacacgcagaaacacaattcccacttaactcgccagcgagtgcggcccccagccccatctgcattgctgctgacttgtctcgctcgctctccccatcgcctccagcagcagcgccgcctcccaccccgggcttgtgctgaatgggttctgattgtgcacggggtgcacactgggcatttcttggaaggggcacactgacgcgcgcacacacgcccccgacgcgcacgcgccccgcgcgcactcacactcacccccgcgcacactcacccccgcgcacactcacgctgccgccgc

SEQ ID NO: 28506 - DNA, 998 bp, Homo sapiens; identical to SEQ ID NO: 22780
  chr12:14133936-14134934
  binary

SEQ ID NO: 28507 - DNA, 527 bp, Homo sapiens; identical to SEQ ID NO: 27558
  chr12:15374050-15374577
  hyper

SEQ ID NO: 28508 - DNA, 612 bp, Homo sapiens
  chr12:16500402-16501014
  hyper
cgccaaatagaagggctcaaagggaatcagcaggcgatggttactgtgggcgggtaaatcaggtgatttagaggaggggtttggcgaggttggggtcgggctttaaacgtgggagggctaattaacaggagattaactggagaggggcggtgcctgcgtccggcccgcgcggccacagtccctgcattgcgcgcgacccggcggcgggacaggcttgctgcttcctcctcctcggcctcaccgtgcgtactgggaggggagaaggggaccgcatgcaaagggtggcaggcagggagggccagggtgggtggcagatggaagacttgggggggtctctgccagctggaagtgcttggctccacttagcagctaaacttagcttttcaatcgatcgcttttgaaagggaattgtatttctgtccccgtgcgggtaagttttcccatttctcaaactccaggaatgaaacgagagagtcttttcatgcttgagtgatgatttccaaacttagccttttcaagtcaaagtaacctcctgtttgaaagggtcccttgaactctggggaaggaggaaaaggcacgtgtagtaatggaggaaatgcctgtagtttgaac

SEQ ID NO: 28509 - DNA, 910 bp, Homo sapiens
  chr12:16758691-16759601
  hyper
cgagtcgtacttgagacgttccgcgccgcagccgctctccctccttccatcaacatcttccgcctgcatctatttcatgtctcatcataaaaataatgaagcctcacatgatttaaacaaaaccgtctcagtagagctgcagcccgagtgaaagttgcagtgcggagctgggttgcagctccagtttatgcctcattagcagaggttggggaagaaaaaaatacccacatccgcacacgcacgcgcgcacccgcagacacacacaccacaaataagccgacgcgtgtgtacacagttgctgcacttaccttctcaattaagcgatacagggggaggccgttcagtaagcacagtggctgctttgtagcgcttctccttgggaaaggtcaaaaagaagcattgtttgaaaaaaaaaaaaaagacgggggagggaatgtctatttttttttaagtttaaaataatgaggtcctcaaggatacgccaagcaatggtgttgaccgcatctgagccacaggtgtcctccttttaggcaactgcagtccgaggctgtctctctccgtcctggttcaagacaacttaccccagcagcgtgcgaggagccgagctgaaggaagctccggctctcagctgcaaaatgcaatcccttcccagccagacataatacagccaaagaaaaggtcactcagttattagtgagccggcggagcccaggcagcgcttgtcaagaccacagagaagcagctcccttccgatttaagactatttacctctcgcccccacccctcccctcttctttccttctctccctccctctctcgctggctccctcgctcgctctcgtgtgcctgttctgcagctcagtcaagtacagccgccctcggaaagtgcaaagcagccacgagacagatc

SEQ ID NO: 28510 - DNA, 116 bp, Homo sapiens
  chr12:1762097-1762213
  hyper
cggccttaggtcggagcaaatgatcagcctggaacccactccagactggtctgcagttctgcatgtgaccacacagtgtcgctatcttctcagttctagccgaatagctctggccc

SEQ ID NO: 28511 - DNA, 155 bp, Homo sapiens; identical to SEQ ID NO: 11058
  chr12:1992067-1992222
  hypo

SEQ ID NO: 28512 - DNA, 1303 bp, Homo sapiens
  chr12:22093660-22094963
  hyper
cgctgcttcaaacccctgccggtgcacttgagctaccttcaaaacaccgacttcctacactgtcttaagatgtaaatttcaaacccggacgcagaactcctaaaaaaaagtaaagagtaacaaaaattaagcagatagaaaactacttcttgaacatacaagaattgtctacaagaaaggcggtaataataactcctaataataataactcctttcactgtttccagttgatttgagtaggagacggcagttttgaagtaaaactggaaacctgatccccaccccttcacttctcgagccgggcctcgtcccttaattctagaaatagcgatcgcgaaagctaagtgccgagaagtgcgagagagtgcgagggcgtttttggatagcagaaatgttagctcaaaatcgacaacttacagttattcctaaaaatgtttaaatggcattcatgtaaaagacacggattcacttactccgatgacagttttcctcccctaggcgaagcacgcagtgcgccggaacggattatttttagggtggtgggagaccagctgctgcctcctatcgagtttctaaattgcacagactgctctgggccggggcagacaccgcggctgagaagcaggaaactgggcagaagccccgcgcgccgcgcctggggccggagaccttccccatccctgctctgctcagctttgacttggggcgggcgcgacgccgcgattttacaaacccaagtaataggcgtccccttaaacttcattagacactgaaacttggaatatgattccatgattctccggagtcgggttttcaaacgtcaaaacactcaaggtattcttgtttctttgttttgtttttccatgctctgtaagcacccctttattagccacgtaaggaagcggatttggggatttcgctgtttccccctgaacggatccgggaaatgaagggctcattctaggtagaggcacccactgctgggttatgagtgcacgaatgtctcacaggagcaaggctggctcaagtctaattttccgcttttccccggcgacctagaaaacttggtttctctggtggaccagccgccgcgctatcgaagggcgacccttgcccaccgtcccctaaagtgagacgctgattcccatggactgcgtaaacagtcaccctcttctcctgtttccaaccagagacataattaactctcgagataacgtgtttatattaagatcaccccacaaccactcccccgcgaaacacaagccgtgaattttgtccccgacaaccctctttaattaacacc

SEQ ID NO: 28513 - DNA, 600 bp, Homo sapiens
  chr12:30975325-30975925
  hyper
cgctccacagaagctcagcacatcttcatttggtgggcgctggtgccctttccctgtgggcggcgccagctcctttctcggctgcctgcccagctgctgggctggagctccgcgtgctgggtgtaggtcaagtgatcccgtcgcgggcgggcggaggtggccgggcagccgccgctgtgcccgggtctggggtgagctgcactgctgccctgggccccggctcccacgcctgtttcccggagctccgcggctccggctgcttcgccctccctctgtgggctgggctggggtcctcgcgagaagtcctgccccgctcccttctccaaatccacaggccctgtttctctggagacagggaggctcatacaggatatgtgcaaatgcttttattacaagctgagttgaaagacacccgtttgctctcgggtccttttggtgagcgccgcaggaagccgggctcctctctccccagaggcggccgcaggttcgcggcgcagggcctgcagtgccaggagcaggcaggggcctctgccctccccttcgtccctgatctcccgcctcctcctcacccgccgtctctgcgaactcaccctgggctgc

SEQ ID NO: 28514 - DNA, 838 bp, Homo sapiens
  chr12:43944719-43945557
  hyper
cgcataagctgacgacggccttgtaatcctcctgtgagttgacctggccgcggtagaagcagtggcgcaggtccgagggccctgcgtcgctctcccaggccccgcgctccggggttcccaagtgcacctcggtgtagccggcggccagaaaggatgcatcggcggtcaggttcagctggaagagctgcccgtaggcagtgaagcgatagtgggttcggaacggcatgggttccagcgcctcggagctgcgtttctgccggctgaagtggtggctctgagggaacacttctccaaactcattgacccgctcggggatcactacttcgtaggaggtcagtgtcctcaccagggcttctgcaacaacagcgacaggaccagtgagctcccacgcgttcctcattgtccaactctaaacttcttccaccaaacgtccccgctaaaggtcccaggtcccagtacagccaggggcaagacaaatgcacacatgctgatgcgcacgcacacacacacacgtgcactgggacggttagtgctctgctttcccacacccccaacttgccctaccctccccaagcaaagaccctaccactaatggccctaagcaacccacttccttccccagtacctcctaacctccccgcagcccccaactcgttccctccgggtgcaagcgaccccctgccccttgcgcccccgccgtgtggtcctgggagtgcgatgcgtcttaggcgcgcgcgattcctcgaaacccggcgcagtcgcgacctctccggctgactggtccgggagtcccgggagctccagcagggccagcgttccccaacgggctgagccgctc

SEQ ID NO: 28515 - DNA, 939 bp, Homo sapiens; identical to SEQ ID NO: 11060
  chr12:48591606-48592545
  hyper

SEQ ID NO: 28516 - DNA, 97 bp, Homo sapiens; identical to SEQ ID NO: 6406
  chr12:49065604-49065701
  hypo

SEQ ID NO: 28517 - DNA, 231 bp, Homo sapiens
  chr12:52387815-52388046
  hypo
cggcgcagcccgcctgacggccctgcgcatcaagaagaccctctcccagctcagcgtgcaggaagacgtgaagatctaactgctccctctctccacacggagctcctggcagcgagaactacgcacagctgccgcgttgagcgtacgatggaggcctacctctcgtttctgcccagccctctgtggccaggagccctggcccgcaagagggacagagcccgggagagactc

SEQ ID NO: 28518 - DNA, 190 bp, Homo sapiens; identical to SEQ ID NO: 25037
  chr12:52388315-52388505
  hypo

SEQ ID NO: 28519 - DNA, 762 bp, Homo sapiens; identical to SEQ ID NO: 27576
  chr12:52626747-52627509
  hyper

SEQ ID NO: 28520 - DNA, 501 bp, Homo sapiens; identical to SEQ ID NO: 25039
  chr12:52652140-52652641
  hyper

SEQ ID NO: 28521 - DNA, 156 bp, Homo sapiens; identical to SEQ ID NO: 9042
  chr12:53272458-53272614
  binary

SEQ ID NO: 28522 - DNA, 952 bp, Homo sapiens; identical to SEQ ID NO: 25044
  chr12:54321265-54322217
  hyper

SEQ ID NO: 28523 - DNA, 773 bp, Homo sapiens
  chr12:54338802-54339575
  hyper
cgaggtgagcagctaccggcgcgggcgcaagaaacgcgtgccctacactaaggtgcagctgaaggagctagagaaggaatacgcggctagcaagttcatcaccaaagagaagcgccggcgcatctccgccaccacgaacctctctgagcgccaggtaaccatctggttccagaaccggcgggtcaaagagaagaaggtggtcagcaaatcgaaagcgcctcatctccactccacctgaccacccacccgctgcttgccccatctatttatgtctccgctttgtaccataaccgaacccacggaaagacgctgcgcgggtgcagaagagtatttaatgttaaggaaagagaagaaccgcgccgcccggaggcagagaggctccatggccgtgctgctgggccatccccaactccctatcccatccccagcctccacccccatccagatgggactcacgtggcttcaacagctttggaaatgggtcccgagtgggccgtgcgaggaaggctgtcgacctctactcctccttgcgctcaccttgccagaaagtctggtggcagcgcagagcccaatcattccaaccaaagcagggttggggaatcccgaatggccccaattcttgcctcatcctatgaccaggcttttagaggaccttccctaagggcgcagcttcggagcaggatctgtccagctcatactttccttcgctgtccctcccgcactccttaggcaagatttcccagtaaagattttctgtgcgtattttaaaagtc

SEQ ID NO: 28524 - DNA, 922 bp, Homo sapiens
  chr12:54348695-54349617
  hyper
cggtcgggccccgcggaaatgggcgagcataatctcctgaatcccgggtttgtggggccgctggtaaacatccacacgggagacaccttctacttccccaacttccgcgcgtccggggcgcagcttcccgggctgccttcgctgtcctacccacgccgcgacaacgtgtgctccctgtcctggccgtcggcggagccgtgcaatggctacccgcagccctacctcggcagcccagtgtctctcaaccctcccttcggccgcacgtgcgagctggcgcgcgtggaggacggcaagggttactaccgcgagccgtgcgccgagggtggcggcgggggcctgaagcgtgaggagcgcgggcgcgacccgggagccgggcccggggcagcgctgctcccgctggagccgtcggggccgcctgcgctcggcttcaagtacgactacgcggcgggcggcggcggtggcgacggcggcggcggcgcaggacctccgcacgacccgccctcctgccagtcgctggaatccgactccagttcgtccctgctcaacgagggcaacaagggcgccggcgcaggcgaccccggcagcttggtatcgccgttgaaccccggcggcgggctctcggccagcggtaaggaccccggccactcaagcggcggattcaaacccgacctcttaccagggcgggcagaacaggactgagctagggacgcccagggtgacagaatgtgtggcgaggaagagcttcttataaaatgaagtgcgggtggggggagcctataaacatgtaaacatccccacaaaagaaatggagagtgttcctttttcgtctgcctgcggctggaggcggcagggattccggagttgggggatcctgacggggactccccaggcctgggggtgaggaggtggggacagaaagccc

SEQ ID NO: 28525 - DNA, 929 bp, Homo sapiens; identical to SEQ ID NO: 26277
  chr12:54398724-54399653
  binary

SEQ ID NO: 28526 - DNA, 744 bp, Homo sapiens
  chr12:54811864-54812608
  binary
cgtctccccagcttccgaccccagccccagaagtcccggtctcagcacagctccagccgaccagctacaggaaaccagcttttctcttcctcccaagagccagaggaagagggaaaccgcccaccccccttcacgcgcgcacacacccctcccgacacatcccagcacccgcccttggctgagttcgcccccagccccagggccccagtgccagggtccccgcactcgcccccagttctcggatcccctcgcctgaacagagattgggggcggagggaggagtaggagacagaggagaaaggagagggagccgccgtcctctctcgggtctttccccggtctgagttgaggggggaggggaggatgaggctggcccccatttaaccttccgaccccctcagtctttgactttcctcctactacacgtagctcattcggcttctacccgttctctcgccgcacaatggcccctacggatcccgaggtctcctggagcccccaaaagcccttcccggcctctgcgccccctctgcgcccccacccgccccaggtcccagcagcccacagacttcagccagagaccctcagctctccattcacgcgctctcctctcccttggcccggagacccctgcccagacttctccagctccgtgtcctctccccaccggacacatgtctccccactgatctcaaacgccagggcccctcctcacccgccacggtgccctccctactccagcgc

SEQ ID NO: 28527 - DNA, 852 bp, Homo sapiens; identical to SEQ ID NO: 23052
  chr12:63025588-63026440
  hyper

SEQ ID NO: 28528 - DNA, 454 bp, Homo sapiens; identical to SEQ ID NO: 26287
  chr12:77719278-77719732
  hyper

SEQ ID NO: 28529 - DNA, 161 bp, Homo sapiens
  chr12:8975195-8975356
  hypo
cgcggagcgatctctgcccctgaccctggaaaaatctgtctcacccacaaagatgtgggctcagctccttctaggaatgttggccctatcaccagccattgcagaagaacttccgtgagtgcttggtgtcagaattggtttattagggcagcggcttcttc

SEQ ID NO: 28530 - DNA, 215 bp, Homo sapiens; identical to SEQ ID NO: 11070
  chr12:9108820-9109035
  hypo

SEQ ID NO: 28531 - DNA, 118 bp, Homo sapiens; identical to SEQ ID NO: 11071
  chr12:91502991-91503109
  hyper

SEQ ID NO: 28532 - DNA, 117 bp, Homo sapiens; identical to SEQ ID NO: 11072
  chr12:94145777-94145894
  hypo

SEQ ID NO: 28533 - DNA, 919 bp, Homo sapiens; identical to SEQ ID NO: 22787
  chr12:94543219-94544138
  binary

SEQ ID NO: 28534 - DNA, 865 bp, Homo sapiens
  chr13:100640909-100641774
  hyper
cgggcgggagccgcttttcctcgaaagggctcccagtccctggtccctcgcttcccaaggctttgtccaaacaagtcacggacccgacaaggtggtccattctctctctttggcctttcttttctgcccttcgaatccgaaggactggatggaggggaggggatatggcaatagtgtagaagtgtcaagatgtgaaaattgctcaactgagaacgcacgcgggggctcgcggcccaacagcctgcaccacactcaggagcctgggcctgggcctgggggtggggtgggggggacaggcgtcccccccaccccaaccccacccctatccctgcccggctgtctaaacggacctaaatgctaacctgctgttgccttgactccagagacacgaaactgaagctagccctcgcccctctctgggatcccgcgctgcgctgcgggtagctgcccgcagggaggcccaacctgccgcggctggagcacggtttctgctagccgccgccgtcaacttgaacttcagtgagcctaggccggcttccttcgcgctcacctccatccaccacctaagaagtcccctcagcgcgagcgtcgctttatccggaggcagctggagccccctcgggaggcccgtcattattattattaattatcgtgatccttactgcattattaatgcccaggatgataaccggcatcggtatcagctttccctggttcagtgatatcccacgaagttcggggcggggaggaagtcactccaggatcagaggccgcgtcggttctgcttggggcatgggcagagggaggctgctggggccaagccccggctggacgcgagggaagaaactcgtcccaggacccgcac

SEQ ID NO: 28535 - DNA, 303 bp, Homo sapiens
  chr13:111289028-111289331
  hypo
cggtggaggcctcgctcggtgttgccctgtatggttgagctgtggtttaaggtgaactctggagtgtgggctgcaggtgagggctccgtccctgggagctggtgggaggagctggaggctggcgccgccctgctcagagctgcctgcttgggctcgtctgaggcggttccgagctgcaggtgtctccaccaacctgctgtgctacacagcggggtctggggcagcctcaccactgcgtgtcttggtttcctcttctgtaaaacagaggctgcctccaacccttggaacaaacagggaagagcc

SEQ ID NO: 28536 - DNA, 922 bp, Homo sapiens; identical to SEQ ID NO: 26300
  chr13:112760441-112761363
  hyper

SEQ ID NO: 28537 - DNA, 288 bp, Homo sapiens; identical to SEQ ID NO: 7925
  chr13:113667314-113667602
  hypo

SEQ ID NO: 28538 - DNA, 484 bp, Homo sapiens; identical to SEQ ID NO: 23887
  chr13:113985425-113985909
  hypo

SEQ ID NO: 28539 - DNA, 197 bp, Homo sapiens
  chr13:114305732-114305929
  hypo
cgtgctgctgacacgctactcagatgcttctggaagccaaacaataagaaaaagccccattgtttcccttgctgggttttacccgccatggtggagctcgctgtggtgatggttcggtgtttacgtctggtttactgggccgacggctgacattcctggagagaaccaggtgggccgtgcccagcatgaaccagcac

SEQ ID NO: 28540 - DNA, 531 bp, Homo sapiens; identical to SEQ ID NO: 23469
  chr13:114497796-114498327
  hypo

SEQ ID NO: 28541 - DNA, 936 bp, Homo sapiens; identical to SEQ ID NO: 23895
  chr13:114748186-114749122
  hypo

SEQ ID NO: 28542 - DNA, 440 bp, Homo sapiens; identical to SEQ ID NO: 23470
  chr13:114807499-114807939
  hypo

SEQ ID NO: 28543 - DNA, 506 bp, Homo sapiens; identical to SEQ ID NO: 6408
  chr13:20979799-20980305
  hypo

SEQ ID NO: 28544 - DNA, 1493 bp, Homo sapiens
  chr13:25320293-25321786
  binary
cgccaccaccaccgcagccgcccgtcgcggtggtcaggggcgctccgcggagaccgagaccaggccccggcccgcagctccgcgcgttcccaggcgcagctcctgatgccaagttcacttggaccccggctgagattagagaggcctggcgaggtgtgggggtgcgcagggagaatgggctgtggtcgccatggtgcgtgttggtcttgtggagatggatgctcctccgggtcaatctctgccttctcggggtcgccctcagtgtcgctgctgaaaaggcctccgtcctcctggtccttgctgtgcgctccccacgtcaccgcgttctccttgaggggccggcgggcgttggcgaaggtggtggggactgtcgtgaggatcatcatgggcagggaagggcgcgcggcagtggcctcgagccctgggtcttctccttcctgaatttgcaaagccaggcgaaggccctcgtgctctcccagagagctgcgctccacccgcgggcctgcctgcgcgtggggagagcggggaggcggggacaggagacctgagcccctgggcgcccctaccacgtgtcccccgtcccaacactggacctcttcagattccttgccgagaggggcctcgtcccaaggctggatgcgccgcgcagcggtgaaagccgccctcgcagcccgcaggcgaccagtgggtgctgttggctttcgccccggggagggaacgggcttgggggcactggcggcggcggagcgcggcggggaagctgtgggggtcgtgcgatggttatggagagtgctccatccgccaggcctgggctctgggcgagctgaggagaccggagtttttccccaggagggagccgcgcaggccggcgacctcttcccaaggctctactgctggaccgcgcccgcggcgccgctcccgccccccttcagcgcactctgcgcctctcgctgggtatggccagctcgcagtgcgcgtttatgctgcggtaaacgcattgaaggaacgcacagcttatctaatagggttttgaaataattttcggtatgccagctggggtgtggtttgcccaattctgatcctgtttccagagaacacagctgcttagacaatctgttatcttcgcgtcctgtcttccttttgacgccagaacatcctagggatcaggggcctctcccatgccctggaaccatcctctcacggtgctgctcttcactggtgccaataacagagctcccgcaggcaggcctggatcagtggggactggggccctgaagtgagatggagcaagacagagcggcccttgggagaggggcatggggcggccctgtgctttagactcggcaccctatggcttgaggaggtgacactgtgtcgacgtgcgtttgaagggaggacggctgaaggtacatgcagtctcccggacgtcacaaactccgcggacgcgggtcacacccgcgcgcacgcgcagcaggggtcttagccacacaggc

SEQ ID NO: 28545 - DNA, 772 bp, Homo sapiens
  chr13:28491488-28492260
  hyper
cgggaaggtgctcgcctaatggctcggtatcgctgccgggcctgttgtgggcgaggcggcttggagggggcgcaggcgtcagcggggattcagagcggaaacgcatttcgcctgtaatggactcggcgattttacgataccaggagctagatccacggggaagtacaacacacgaccttactaagcggagggttccgcttgatgcgttttttatacggctgtacgtgataaaattccagataactttgtttcatctaataataataataacaataataaatggttgtttgacctttgctccctgggtcccttctataggtcgcaggcagcagaaaatgctaattgtgaaagtgagaacgcgcctccatggaatacccccggcgatcccctcctcctcccccacagccgcgggtacccgggtttttgccggcgaccgcaaccggcggatttgctttctgctgagagcctcttttctttctgcagggccgagcaaaaatattaaatggaagcaaatgaagcatcgaaatggagaccaatttacagaaatgtgcaattagttgagaagtgcaaagtaaacactccgggggtggcaggcgaggcagggagcaggggagggagagtggggcgcagactgagtccagagtgggtgtaggggtgcccagggaggaggggaagggggaggaaaaggagggggaggggaaaagtggccgatctttgtcctgagcggagcttgccgtccgctcataaccgcgtcgccaagtcaaccctcggc

SEQ ID NO: 28546 - DNA, 1793 bp, Homo sapiens; identical to SEQ ID NO: 23902
  chr13:28527202-28528995
  hyper

SEQ ID NO: 28547 - DNA, 1093 bp, Homo sapiens; identical to SEQ ID NO: 22791
  chr13:29292491-29293584
  binary

SEQ ID NO: 28548 - DNA, 199 bp, Homo sapiens; identical to SEQ ID NO: 11088
  chr13:30079657-30079856
  hypo

SEQ ID NO: 28549 - DNA, 247 bp, Homo sapiens; identical to SEQ ID NO: 26322
  chr13:79160914-79161161
  hyper

SEQ ID NO: 28550 - DNA, 960 bp, Homo sapiens; identical to SEQ ID NO: 26323
  chr13:79169684-79170644
  binary

SEQ ID NO: 28551 - DNA, 254 bp, Homo sapiens
  chr14:101250097-101250351
  hypo
cgacccatgaattagggtccattgacccggaggtcgaggcttccagagcgggccagccggcagccccaacgtgtgaggctgtgcacctgctggggagggtttttttgatggcgacggcgtgaggtgagcgggtttgctctgggcggtcgaggattagcgccgactgagagggtcaggtgcaccggggctttgttcagacctgtttgccttttgtcccccgcctgcagaaagcccaggctgcatgatgtcatttc

SEQ ID NO: 28552 - DNA, 421 bp, Homo sapiens; identical to SEQ ID NO: 23920
  chr14:103655241-103655662
  hyper

SEQ ID NO: 28553 - DNA, 795 bp, Homo sapiens; identical to SEQ ID NO: 23472
  chr14:104048314-104049109
  hypo

SEQ ID NO: 28554 - DNA, 725 bp, Homo sapiens; identical to SEQ ID NO: 23064
  chr14:21098618-21099343
  hyper

SEQ ID NO: 28555 - DNA, 686 bp, Homo sapiens; identical to SEQ ID NO: 5949
  chr14:21099793-21100479
  hyper

SEQ ID NO: 28556 - DNA, 528 bp, Homo sapiens; identical to SEQ ID NO: 23066
  chr14:21100641-21101169
  hyper

SEQ ID NO: 28557 - DNA, 612 bp, Homo sapiens
  chr14:23291730-23292342
  hyper
cgctccctgtccgctcctcgctcccgcacagctggattactgcggggaaatgaaaatgaccgcggatacccttagagactggtcctccaccccatgaacgctcagcttcctcttccctccctcccaaccctgcataagctggcggccagacaggagtctgggcgagcgccccaacccctgaccacaactgcctccggccccgagatgcttggctgaatctcggtagtgcccccagacgggaagccccttgttgggggggcgggggcgggaggcggggcgaggaatgtgcctcctcggagccggaggaggggtctcccgaaggccgtctcttccaccccgggttcccgactccccgccccctcggggtagctgttgcatcagcttccagattccaaaccaaagaaagtgggctccactaagctgggaaggcgtcgggcagcaaagccgccgccaggaggcagcgcttaatcaaaaatgtccgggccgagggggcccaggataccggagtccccggagcgtctttcatctgaagtcttagcagcagcgcggacctaacaaaaaagggagttgctgaattagttcaagaaaaggcaactggaaatgcttcatcac

SEQ ID NO: 28558 - DNA, 185 bp, Homo sapiens; identical to SEQ ID NO: 22796
  chr14:23355352-23355537
  binary

SEQ ID NO: 28559 - DNA, 290 bp, Homo sapiens; identical to SEQ ID NO: 23474
  chr14:23776969-23777259
  hypo

SEQ ID NO: 28560 - DNA, 270 bp, Homo sapiens; identical to SEQ ID NO: 11100
  chr14:25601990-25602260
  hyper

SEQ ID NO: 28561 - DNA, 819 bp, Homo sapiens
  chr14:29227666-29228485
  hyper
cgatatgatatgatcttaagggaccatctccaaaactgaaggagcagagaatgtgtaattcttttcccagtaaatccttccagttcctaggacaagactcaaacgtcccgctaggagctgcagctgcgaggtggagccaaaggctctgacaagtggcttgtgtatgacccaatatttatcaataacaacaacaaaatcaagtgaaaccaaggctgcggattttgaaatgcttctgcagccctggcgtggatatgcacgtgagcgaagtaaaagtcgctggagatgagttggctccacttgtccgccctggggagcaatcctggggcaaaatccagtgctaattgatcccaaccagccacattatcagctgtaaatgttcaaggggacaaagaatgagcattgtgtactaaagatactccaagcattttttcaagtaaatagggacgtgtaatcagtagcgtgtgtatgcatataaataggaaaagagaattatttttaattaattaggaaaataatgtttcatgtgtaattccagaattctctagcgtctcccactgtccgactgttttgtgattgggacttcctctaggaaaacctgcgggccctgttttgtgtttcgagcgggagagcagacactcagctcaaatagaggcctttctctcgtctttcggggtgtttattctatggccaaaaggtaagatggccaaggcagcgatctgagcgtgatgtctggccccgcggggggcccaggaggcccaagttgggacagctccggagctaccccggtgcccctcagctgggggagggcgcgcggcagcc

SEQ ID NO: 28562 - DNA, 987 bp, Homo sapiens
  chr14:29243307-29244294
  hyper
cgttctgggcttgactttgtccctgctgggaatatcccagttcctggctttggaaatctcaggcaaataattgattcttaatgcacacttaggagacgtcggtagtacgctcgagagcctctctgtcccagagtggctgagagcacgcgccagacacaggttggctcggcccgaagcgaatttgggactctcgtcgcggtgtcctattaattagcttttcccggcgcctcagggactccggggtgaagatggagaggtggcataatggcgggacttgaagtcgttgtggcagggacctggcagcgttgttttctcgggttttgaaccggtgtggagaagtaacttcagctgctgagttggggccgccctggctgcgcggtggcggaggaggagaggagaagcgctctcgggacattgcggcggcgatccccgcagagggtgaagccgggcgctgcgcagggagcagcaacatgagggcgctcttgcccaggacaagcagagctgtacgtttgggtagctcatattggctgatgccaagaaaagtgacttcagaaccttggctggcgcgcttccctaccttttccctttcttcttaatcttctgtgtgccaccacctccccccaaccttttttcccctcccaaagttgtttccttttgtttacccggtgcggtttcagatctcagcacttctcagctagtagataaaattatttgctctgtaatggacatctcttctcctctccacttgttaccccactcgcccttcgctttctaccccattttgcttctctctgcccaagcctgtggtccaaggtgcagggatctcacaggaaaacaggtagcctcggggtgggaattcccagagcactgaaggcgccggttgttggccagagggaggccgggactccggtgggcagagtaccccgcgagtgcggagattttcaggctgtaatcttcagtctgggaaaggcgatgggaaggaagggc

SEQ ID NO: 28563 - DNA, 616 bp, Homo sapiens
  chr14:29247112-29247728
  hyper
cgagttttcctgaaactacttatccttagcgtcagcgctgtaagaggtggagccgctcagtcccgcgggtggctgcagacagaaggtgggcgagtcctgggacttaaaaagttttgcagaaggttgaaaagaggagcagagggagagttttgagtttatttattttattttcctttttttttttttgtcttgtgccaagcccttgaagttaacgtagcgacgacgtggtccttgtaggaccaagcattcttggcattctgtcgagattgagattccagagcatcggatgaacgggacttatagctaaggcgtactcacccacccctcccttcgtctttttacgcacgcagcaactcgtcctcacgtgcataggggtagtggacagtgttgacttgaattgctgtccctcgttccaagcctttcctgtgaatgaacccgaaaacactcgacaggtcgtgaataatcgttttaatgagtgtgcaaagcgtgcgacggggtgcaccgagctgtcgggttaaacaaacaacttgtaccctgaccaaatccgattgttaaagtgcaaagtgatgtcagtaccatttccattgcctttcggaaatccacagatctgacacgc

SEQ ID NO: 28564 - DNA, 797 bp, Homo sapiens
  chr14:36993453-36994250
  hyper
cgcagtctcccacagctaggcacaggcttctaagccgggctgagctgggctcgcgagtgccatcgaggcaaccaggcgcagggagcggaaggcaggagtgtaactgggcgctggggggcgctgctccgcaaccccaagatccgaggaatgcctccgggggatgatttctctggaggggtctcgcagggccccctctgcgctgctttctcaggcaccagaaccgaaatcctcgggagggaccgcgggagcccggggcgtgcagacaggcggctttcacagacgcagcgggaggaaggatccctctactgctccctttcccgatttgaccgtctagggcctttgagaggactttccttttgggaaagcttttctcaattcgtggcctgtgggcaggctggggggtggggcgccaagtcatccgagcgcggcttctgcttctccctttccctcacaggcatgctctacggagggtatgggaggcgagggcgcgtctatgagggccagagtccgcgaagagagtccggcccttaggcctttggtgttgaagaatctgctcctctgtcgggtcaagccccactagaagttaacacctgtggtctccaaacttgcctattttcctgtcacgcagttcaagccaagattcaactcgtcttgaatttttgtatttagagcccctaccttctccaccgactccaggggcgccctctggcgggaaggggcctggggtaggagggaacctgagggagcgggttacaaagcagagaacagcgggagctcagcagctccctttgaattgc

SEQ ID NO: 28565 - DNA, 868 bp, Homo sapiens
  chr14:37123878-37124746
  hyper
cgcagggtgcgctgaaatctctttatcgttatcgttttttataaatgaaatgatttatttattcgctgtttgcagggaatgaaaggagttgatcctgactccaagatgcattccaaagaaagaaaacgcaactgtagcccggactccgcggaggaaggccaactgactccactacgtgcacttccgagccacttgggcccagctagctgtgttaattatgggttctaattttattgcaactcggcacctcctggtttgttcccactatagtggtcttaaaaagaaacacacacaggcataccccagaatgaatccccgggaaggcaaaggtagattttttcggtgcttgagttgatgctctgagagcgcgctgagagtctcgggcatgtcttggcactcttggaaacaaattgcagccaagagcacggttcttccggtcctctccttgctcctctgtgcgccgctcggccgcgggactcctggaacatgttgtgcaccgcccgagtggctgcggacctcacctcgacgccctggatagccggggccaggaggagacgagcaggcagtctcccgccctcacctagtcagctgcgacctccgcggcgtggactcttggccagcagtgaggaggacaaggttgcagatcctctttgctgcgggttctgggtccggccttgggcggcattctgtcttctaaagtgtggaggtgggtagaagagtgtccactttcagtgtagacacctgaggtatgggggcttctttgggggctccagcgtgagctgctcctgcagattagggaaatggagagaacaacaatggggacatggtggaattcagatttccccctgttaattaacaatatgatttc

SEQ ID NO: 28566 - DNA, 77 bp, Homo sapiens; identical to SEQ ID NO: 11102
  chr14:50511831-50511908
  hyper

SEQ ID NO: 28567 - DNA, 781 bp, Homo sapiens; identical to SEQ ID NO: 23071
  chr14:52534581-52535362
  hyper

SEQ ID NO: 28568 - DNA, 1344 bp, Homo sapiens
  chr14:57260878-57262222
  hyper
cgttaaaccagccgtctaaacgggccctggcactgggtatccgaccgctccacgcgccagctggtgaggcctggagttggaaccggaagccgtctccagccggcctcctaggccctaggtgcccgggtgggcacacttccgcgagggcccggggacagcgccggccaagtcttgcgggcaactgcacactcggttccgggaggcaggtactccaggtcgggagccctgaggccaagcctgtctcagttcccacgtcaagaggaagcctgggcttcggagcccaccctgcctggggccgcggtcccggagcgcggcgggaagaacgcccacgtcacctcccggtgttgttacacccacaatcaccacactctgacccccgcaaagaccacagaggagtaggaagagggctgccctcgtactccccaagccacccccgcctctgagcgcggaggcacgatgttctggggctcgagccttcgcatccaccgggccagcgctaaccaccggccgccgccctggaggggacccggcggccccgccacgtgcggctgcgagtttcagacccgcttccggggggcggcggccgtcggaggcctgggttggggggtcgtgagccggatgttccccgcagctggccagaaagctgcctctgagcctcttgagcaactccctgcctcctccggtagtctctctggactctccaagtgacttgctgggggcaccgggcgcggggagggcaggcccccggggtgacgcaggtgtgtactttacagccagagaaggcctagctttcagggacattggcttagtttgttgggtgagacgtgggggtggagaatgggagcactgtctctttgccaaattttccagagaaaccccgggactagctctgtccctggtgccccggctactgccagcgggtccttagcgctgtcgattgcgcgcaccggagcccgaagtcttccccaccgctggcaggagagccccgcgagctctcccggacgtgtcgggtcctaaaggggagagctgagcagccacttcagggattgcactccgaggtggccgaggcagggaggagcgctggccccgcgaaggaggcctcaaccttaggacaacccgggcgtcccgggcgaaggtctcgatctgccggagccactgcctttcaggcatcgctccattaaagccagggaggagagggtcattggccagcgacccgccctccttacgtccggaggtcaccccacgcctacaggcaggtttttctgtctcctttgcagaacactatgcgtttgttacaacgattaaatgaagaacacagaagtctctggctctgccgggcagaac

SEQ ID NO: 28569 - DNA, 976 bp, Homo sapiens
  chr14:57264250-57265226
  hyper
cgggttcgaacatgtggtgtgcgcgccagggctggccgcttccggttaagtggacgcggggacttgactgcgtcccctgccttgcaggtaactggaatgggttgcctggcaagttggccctgcccgggacgccgaagggaccgcttccccattccagagcctgcctctggccttcagggccgctgacaggtccgaaaagaaagagaaggcactcagttttaaaaaaaagagatctagaggactggggaaaaggggatgagccaaggcaaactgggaattgctcgggcttcccccgaaagcctcagctcagtgccgggggagaccccaacggagggccagactcccccaaatccagtggccgaagacctggatttcctgggaggatccccgggggcccgaggcaggcccagctgggccccgtctgctcgggacgcgggaggcctcagccgtggcgggagcccccgctgtggcggcctcgcccttcgaggccaggagaagcggccccctcctaagccgtcagcggctcatcctaccgggagacctggaaaaccagcagccgcgggccctgctgggcttgctttcgccgccccggccccttctccccggccagtggaccccgctcgccgtcccgtctgtcagtctcggttttagctccttcgggcgcagggcgctcgcctcccggccgggccaccccaccctccaatccccgaggccgacccgacccctgcactccgccaggccgcgaggtttcccagcgaccggcgccccggcccgcggccgacctggaggcctgactgcagggctcgggcggggccctctctcggctctggctggcggcccactcccgcgggcgtacaggcctcgccaccgggcctcggccttgccgcggcccacagcgccctgggaccggcgcccccgaggcctgagaactacgcccggggggcgcgggctgaggctcaagagaggtcctaggtgc

SEQ ID NO: 28570 - DNA, 981 bp, Homo sapiens
  chr14:57274432-57275413
  hyper
cggcctaggtatgcactctgcatagaaggcatgggcccttcaatctaactttcaaagctcttttcctctcgaagcagggtccagaacggggaaaagaaataacttttgaaaaatccacgcctcactatgactgctcacgaggtggcctctggagaactcatacctagaagctgaccgcggtcgcgcggcgagttccggcagccggtcggcgaccgcacctccgggcgcgagtgcctgggtcccgcgttcctgcccggcagccccgcagccccgcagccccgcagccccgcagccccgcaggcctggcgcccgaggtcccgctccactgcccgcgccccccgcgcagccttatatctaacggtcaattcgtgcaatctgtcgcttctccctcccccacgccttgttttttttttcttccaagaagcccatctaccagttgctgtgtcctcgctcaacaataattacctcgtccgagaattaattataataaatgttttcttgataaactaacgagataatccgaggggcacacgtcccttaattacaggccgccatgctcctctctgcttctcgtccgggctgattaattttctgcatgatggaaaggaaacaaaactacgcggactggcgactggcctgcggctgggaagacgacgaagaggaggaaagaaagaaaaaggagacgtgtgggcaccgcggaaaacggccggcgctggcctctctccggcgaactcgagtgaaagtttctggcctcggggaatcaaataactctgccacccgcgagggagggaggaagaaacgtgccaaaagggttggccttgactattaattatcgttgggagaaagccccggtgttagcgctgaggtctgggtgtctaccttactctggggggaggagttccctctcctactcccctctgttgctaataacttttggtgcctgtaaaaagtcccgagctgagcaggagaaatcctgacccc

SEQ ID NO: 28571 - DNA, 1384 bp, Homo sapiens
  chr14:57278285-57279669
  hyper
cgacccccagcccaacttttttgcctggcatagaaagcagggaccggacaggtttcaaacggatccgagtccctagaaaagcaaaaacagactgggcggagtgtggggtggggggtggctagtggaactggtgagtgtgtgtgaataagctgggtgggggtgggagcagaagacagctcttgcttcacaacacccagtgcaggaaaagaaaaataaaatctcttcctaaataccccaccccccgccacccacccaccaccaactaccatcaccaccacggccagtgggcccaaagaaacagctcgctgcctttaatttggggacctatgttaatgaagttggtaattaattcgtcgctttgttgtcggttcttatactgtatgtgtactcaaatgtggccgtccttgggatttacagcaattaacgaattacgggagtgcgcacgaggcagcaagctctcggcagccgggctccggctcgggctcggcctggggctggggactccgcggcagcggcccctgtcacaggtgtccctagagctttgggccctggcggcccctcgagcccccgaggggcccggagcccgcccagctccttcccggccctctgcagcagctccagtccggagacccgctggctgtcgcgttcccaggagtcaagagtttctaggggcccgggcgggggggagggtgagtaccgaccttttttctcaccccacccccactgtactgaaacacctggcggccgcccccgaagcctttaatggggatggtggtgaggagggggtaacaaatgccccgggcgttatgaccctcgtggcgctggctgtcggaggcactggttgggtgcgcttggtcagagtcatgatgctttcgatgaaggaaaggcaaatccacctcgatcacctgaagcagagtctccttcctacccctagaaaagacaacgtttcccccagtttgatcacaatgatgtttaaagcataaaagagccgaaaaagaaaaatggacgttgtgaatctggcagaggggaaggccggaggaaggccttggggacagtgggcatggggtgggatggagaatgatcagaacatgcgcttgtgagctaaaccaagtaaaccattttggactgggagatccatctgccgtagggtccagtgtccagggtaacctttcaagcccgatgtagaggtttgcgatgtcctcccagatggcgggggcagctgaatctccctaaaaatccccctgttctattcgacaggggcagatttatgcatggtggggcgtgagagggttttgcccttccagcggccggcagcagacagctcccgcttctcctttgccctctagtctaataacttcgcagaaatacagggccaataaactac

SEQ ID NO: 28572 - DNA, 1366 bp, Homo sapiens
  chr14:57283314-57284680
  hyper
cggtgcaaacgcccccggctccctcctttcccaattcacccacttcttaatttgagtttcttaatgtgcaagcgccagggccggctgtggtcaggcgggctattttctggcaagtgtggcgcggggctggacgcccctgccggcgggtcgccgggtctcgagctgcgccgccccgctggaggcgccggggctgcctggctctccgcgcaaacctcgcgcccttccgtttgcgcgcatggagccgggtgagggcggccgcggccaccgcgcgatggaggatttggaagctcagagccagctggtacattttgagaaatttagcaaaccagactgggctgcctcggaaactgggttctgttctgactcatttgcagaaaagttatggggaaaaacatcttgtaaaattaaggttatgtttggcgggtacagtcttgagcgcacatggtcatccggcgaatcagccaagttttccaaagcgccccctctccagctctcaggccaggggagcaaagcgtaggtgtgtgcgtgtgcgtgtgcgcgcgcgcgtgtctctgtgtctgcgtgtgtgctcgcaagcgcgtgtgggtttggggtggggggacatcctgacctttctacaccctagtgcgtcccaactccagactgggaggagacgtctgcggcctctggtcttttcccttcttggacgaggtgcggccagctgagacctcacaccggccacctcggacccagtgcgccgagctaggggagacggcgcgggactgggggacccctgggatcccgccctcgtagcggaaggagtggcagcccttggtgccgggcctggtccttgaggctgccggccctccggggcgccaggactcgaggacgcggtttgcccccgcagtcctaagatccccggggccgtgacagcttggggaaggggcaaactctgtttggtctccacgaagtgcttcgatgttcgcaaaagggtaggcccctcttgcttggggtcctacacccctcggaactggctctgcccctgcctcttccccagcacagtctcccagctaaggctcagacagccggggaaaggggcgcccccatcactattccccacaacccgccccagtgtgagccagggcgcggctgcaggctgacaggcgcaccgtgaccacgccgtcacttcccttcaccaaaggttagatgggaggcgtgcaccctctggggagttcgcaaagcttctcgctttgatcagccgcgcgcagtgccagggagagatattgctggggtctgagtccgtcggaagtgtctagaaaagaagagagaggagcaggtaatcagactttggcggctgccctggagacactttcacacatccagcctc

SEQ ID NO: 28573 - DNA, 523 bp, Homo sapiens; identical to SEQ ID NO: 26350
  chr14:60043257-60043780
  hyper

SEQ ID NO: 28574 - DNA, 544 bp, Homo sapiens; identical to SEQ ID NO: 22799
  chr14:60097114-60097658
  binary

SEQ ID NO: 28575 - DNA, 1271 bp, Homo sapiens
  chr14:60973254-60974525
  binary
cgtcccttccccttgtgaagctggtgaacaaataagtgattccaaggtgccctggcgcagtctatttcctttgggttaataaaattaaatcaagtcccttgcgatggcgaagatggatctcctgatagtagtccccaacctccaggcacttctcagtcccttcctgccaagccaccagacagtgctcctactctgccacacgcagcccgcacccttctggcggctcccgcgaggccaactcagactctcagttccagttgcccgcgagcctcagacacgcagaagctaaagcgccctcatctaattatttgcagaactattatccaagaaatgggccatgggataaatattcccatttcctggatggggcccctagactgtccacttgctcacaaagattaagggtaagaaaccagctctccccgaatgtgccgcttccaaactgtccagtaaaagggcgagagggagacgtgtggtctcctggggcatggacaacctctcccacctcagcagctaggcgctgggatcggggtcggctctcggctcggctcgcgggctgtaaggtctccgcggaccccaccgcctcttctgcgcgctaagggtgagcgccaagcaatttcgcgagcaatagccggcaaagtaaccaccccgagagggaaaataaacctctgcaaactggagcaagggggtgctttcctcccctggccagaagctccgggatcgcagccctcccgggtccggcttcatccctgcccggccaccgaggccctctttttctgcaccgcggattctcctccgcctgcgtgttcggggcccttgtatccgatgtttctttctaaaagttgtccttccggctgattcggaagtcgctccaagggaaagaaggtttatgctttgtcattatcttcatcgccctctttattttgcccctgccttgtcgtatttcaagaaaatgaactcttagaaaagaaagcctctccgttgaggcggttggcaatctcacagaaatgatgtaaatggtttcagggcttttttcttcccctctgctatttttttcgagtgaactgtgaagatctgtgaaaataatatcagggttttccgtcagaacgagctttgccctgcactcaggcgtggcgtgatctgacccgacacctccaaccatctgtgctatctatctgccttctgatttaccagatctgtacaagccgcatacaaattgtacttgatactaaagaaaagacagtcgggtccagtccagttcggctgtgaac

SEQ ID NO: 28576 - DNA, 986 bp, Homo sapiens; identical to SEQ ID NO: 26354
  chr14:60977289-60978275
  hyper

SEQ ID NO: 28577 - DNA, 876 bp, Homo sapiens; identical to SEQ ID NO: 23944
  chr14:61104155-61105031
  hyper

SEQ ID NO: 28578 - DNA, 478 bp, Homo sapiens
  chr14:61116736-61117214
  hyper
cgcgcatgcagcctctggaagagtggcttcgggttggcttcagctcgaggagtccaaccctatttcctcctccctccccccaccaactaccactgtcctccccccactgctgcacaccaccctccaaagggcacaagtactcccagtcggacagcgtttccctcgttcacaaaagacctccatgatttgagaccaggcagagagctgtttagagcatacttgctgagcacctagagactccgagcgttcatttgtgatttggtatcttaatgttctgcgattgaaaccagcaggttcctgaagcttctggactcaatttccccatctgtgcggttgtgttttgcagtgccacctctgctactgaggaatgccgagaggctttacttgctattagcaaaaatgctttgggaacctcgtacgaaaggcgctggatgtggtgtaaattaaataaaactgtgcccggctccaataaccgtcc

SEQ ID NO: 28579 - DNA, 997 bp, Homo sapiens
  chr14:61123686-61124683
  binary
cgcagccaagtatccgcgcgcggacgccggggaggcttcaccgcccggtgtgctggcggccccgcccgctggctcgcagagcggggtctcgcagagctgggcctcacccgtcgccccgccgcctgcaccagaaactccctccccgggctgtgcgggagctcttgggcgccgcgtctgcgccggggccgactccgcccaggcttgtagccagaggtcgcgctatctcgccgggctggcccggcgctctctggggttgttccctcgggcggtgcatggggcccacaggcgtcggggcttgagggaagaggggccggggcctgaagggcggggaccacaacgaggcgcggggaggtcagtggagcggagagccggcgcaggccggcggcggcgcggccggaggagaaagagggcgctgtcttcctggcaaaggagttttcgcctggccggcaggaaccgaaacaacaacaacaacaaaaaaaaaagaaagaaagaaaatctgctccgccgagtccccggagtgaagagcgcgcggcgggaagggtctggggtagcggagcggattctcggcccaaagcctggggaccgctcagcccaccttggcttcgccagcgccacgtagccccggacggcactcgcgaggagggagttttctttggcttctttagctgtttccataatcgccttcttttagggccatccctccctcactttttccctccaaaaactggaggcgttgggataaggacggcgacgcttcgctggcgaatgaggtgcctcaatttgcccgaggcgagcggggaaatcgggatctcctttcatgaagccgagttggcttctcggtttcgtggaatctgcggccggaagccgcgaccccagccagtcattcgcgttgaagcgccgcagcaagtggcaatgcttttggccgcgcattgcccaggaacagcaaagagatggaagaccctctcatttaccatcaccaactggtcggggagcacac

SEQ ID NO: 28580 - DNA, 834 bp, Homo sapiens; identical to SEQ ID NO: 26355
  chr14:62583679-62584513
  hyper

SEQ ID NO: 28581 - DNA, 852 bp, Homo sapiens
  chr14:85996094-85996946
  hyper
cgggggcggagagcagagaagtaaaggaataaaaccaacttcgctggcaacttcaataaatccggtaactggaggcaaaaaatagactccgagggctgggtctggtccggatgaaacgctagggctccttcccttccttgaatcttgggcgctggaagccagccacgggcgtcttgccacgcgagtgcccctagacagcaacacacccactggaaacgcacgtgaacaaagctctcgcccccgggagccgctgcctgcggtttcctagtcgatcccagcttctctagggagtgtcaggcgcacacagggttaagttagttccctccctggtaggagggagaggaggaggaggggaaaagcagcatactgtctcaggctgggtaccttgtagttagttgtacgttcgaaacctgtcgccgtcacttgcgcgtttggcattatccattgtcaccgcggaggaacgagcgctcgagatatcatcagtgcccgcaaatctccgcgccaaggcgctgagctactcctttccgaggtgcgcctctggtcctccgtccctggtgcccagcagcggcgaggcggcatctccgctcccgccgccgtgtccaccgagccctgggatcagggtggcagttctcaacgatgggcaggagggacctcggcggcgacccctaaaacaataccatgccccgggatccccgctgctgccgcgccagcgtcttccctttccacctccctgaccctgtcggattcggatgagcccattgcaaggagaagacgcagccgtcaggtaaaaggggctgcgttgccaggtgaagtttccagtaaccggccgagctgctgctacgctggcaccac

SEQ ID NO: 28582 - DNA, 246 bp, Homo sapiens; identical to SEQ ID NO: 23078
  chr14:89817855-89818101
  hyper

SEQ ID NO: 28583 - DNA, 111 bp, Homo sapiens; identical to SEQ ID NO: 6413
  chr14:89875711-89875822
  hypo

SEQ ID NO: 28584 - DNA, 822 bp, Homo sapiens; identical to SEQ ID NO: 23958
  chr14:93154446-93155268
  hypo

SEQ ID NO: 28585 - DNA, 171 bp, Homo sapiens
  chr14:94404099-94404270
  hypo
cgcgagcagagctgcacgttgcccacgtagtccaggaggacatcgatgatgggccccgcccagcggctcacctctggggcagatacgaactcacagaactgaaagagaacatgccgggaccaagaagtgagttcatcccacctgcaagagcctgcggccagggacggcagc

SEQ ID NO: 28586 - DNA, 146 bp, Homo sapiens; identical to SEQ ID NO: 23080
  chr14:94889871-94890017
  hyper

SEQ ID NO: 28587 - DNA, 1408 bp, Homo sapiens
  chr15:26107409-26108817
  hyper
cgaagactgaggcagggacttcaggccagggggccaggctggcttttcctgcctttcacttcaggtgggagcggctgtggatgaggatgtccagcggccgtcggtttctagccttgggatcattctggccccgacacggagtgacaggggatccccacgcgtccccgcatccagggcgcccctttagctgcggcggaggcacagagaggccttggcggcgctgtggcttcggtcggcaccgggtcccgcgcagccgggccctccaccctgagtggagctgccttctaagcacccagcccctgccaatcactgtgcccaacaccaagttcccggggcgccctgccctgcgccaccgcgcgctcgctcgcccgcccgcccaactcacctgctgaagaccaggcagcccaggtggttgatcttgtggtcggagcggtggcggctgtagtcctcccacaggtccctgaaggccgtgatggccaggatgaagagcaccggcgccagtgccaggccgggctggaaggcgttcaccgccggcacgaagttgagcagcgcgatgaagacaaagtacacgttggccgggcggtggaactgctcgaacaggttcttgggcaggaaggacagcagcgtgtacttggtagtcttgagccggttgtcggccaggtgctgggcacacccgcgccgccgtcgccgctcgcccttggccgcgccagccgcagggtcctcggcgcccgggggcggcagcaggttggagcgcaccgtgcgcgtcctgccctctcggcgcctccgccgtcccggaggcccgggctcctcggtccccgccggctcccgctccatggccgcgtgtcgccgcgcccggctcctccgccgctcacgcccgcccgcgccggcctcttaggttatcatcactcgcggcccgggcgcggcggtgcgagctccccgcctgcgggacgcacggagaccgcggtcagcgcgccgcctggccggcccagcgcgcccagcccgcgcccagccccgtccactcccgtccagccccgccgcccggccgcagtccccagggcgcaagctgggcgggtgccgcacagagcccccttgtcctcgccgcccgcccccggcccgggtcgtttccgccgcggtggccacggccccgccctcgttccgcgcccggactgggccacgccggatagcgggaaacaaaaaaagcccgagctggaaacttcagagaggtttagtttcgtttcccagaagcatcagttcggtcccaaaacgctgcaaacgcgcgctgcctgcagtaggagagaggaaaccgcgaagcgcgagaaaaggcgcccccgtccccaagcagcccgcgcgcccttccaggggccagacctgctccatcctggacggcgaaacgacctcgggagacccc

SEQ ID NO: 28588 - DNA, 145 bp, Homo sapiens; identical to SEQ ID NO: 5967
  chr15:29432142-29432287
  hyper

SEQ ID NO: 28589 - DNA, 831 bp, Homo sapiens; identical to SEQ ID NO: 23084
  chr15:29561185-29562016
  hyper

SEQ ID NO: 28590 - DNA, 507 bp, Homo sapiens; identical to SEQ ID NO: 5754
  chr15:31774606-31775113
  binary

SEQ ID NO: 28591 - DNA, 104 bp, Homo sapiens
  chr15:35310627-35310731
  hypo
cgtgagccactgcacccagcgtttaaagggaattctgatgtttgtttccatagacagtttttttcttagtaaggaatggatgtaggcacggtgcggtagctcac

SEQ ID NO: 28592 - DNA, 105 bp, Homo sapiens; identical to SEQ ID NO: 23477
  chr15:40532806-40532911
  hypo

SEQ ID NO: 28593 - DNA, 1430 bp, Homo sapiens
  chr15:41786420-41787850
  hyper
cggagcgggagagggactgcctcccggcagcgggctcttcgcacctgcagcagccgcgccgcctttccacctcgtcggtctcctccactggctcctcgtcgctgctcgaggactcggaggacgacctgctgagcgacagtgagagccggagccgcggcaacgtgcagctggaagcgggcgaggacgtgggtcaggtacgggccgcgggggcggggccagcgccgggcgcgggggctgcacgggggacctggctgggtgctcccggaggacccgctcctgtccatgctccctccagcggaaggtcctgttctcgcggtttaggaggaatctgggggtcagagggaggcgcctggccgacctctcgcctgggcaactttcacctcggctccgccggcgggtcgtggcgctggccctggggcgtctaagaagcggggcgaggagcaggcgacccgccgcggggactgggcgaagcgggggtagcggaccttgttggctgtgggttaggacaggagggatcggaggggctgagccttgccgggtgaaccctcggaaggagagaggcgaaggagagtttcccttaccccccgccccctctccggtgccgcggccgcacccccgccgttgccacggtttccctctcctgagtgggagtggagcggcgctccaggctctgctcgggagccgctgccgtctgctcccagcgcccgcacgaggcgtggacgcaggggagggaggggcgtgggcctgggagctctggctgggagcggaacgcagcccacccagtgcgcgccctgcctcccatcttcccggctcgccgctcctgagcgcggcagagaggggcggtaaactgaggctgcaagggggcaggatcactctgctagtctctgcctctgatagcctgggtgttctgggaccaggtctgaccctcggaaaacacagccctgggcactgttaagtcattcctgacgcccgccacttagggatgtgcggctcccgggacaccctccttgttcccctcgttttaaccaaggccaaataccttgaataactgtccgtggtcagcgcgaaggactttctttagatccacgtttcgcaagtgtccctgaggccgaggaagaggcgaggggcgcccccggcctcgggcgtctggggcctgcccataagtccgggtcggcgcggcggggcggggagagctgtggccgcgcgcctgctccgccgcacaatcggctgggacaaggcagggaagctgtggcgacctgcaggggttcacaagcccggaggccgatggggtttgtcagtgacaccagaggggaaaagcctcacagagcaggaacaccccccgccgccaggtgctgggtgcgccggctcggtcactagcctgccgcttccccttcttccccggtggtcagagcagccccggacccaggatc

SEQ ID NO: 28594 - DNA, 185 bp, Homo sapiens; identical to SEQ ID NO: 26383
  chr15:43467742-43467927
  hypo

SEQ ID NO: 28595 - DNA, 681 bp, Homo sapiens; identical to SEQ ID NO: 23085
  chr15:48469946-48470627
  hyper

SEQ ID NO: 28596 - DNA, 751 bp, Homo sapiens
  chr15:51385861-51386612
  hyper
cgccgggagctgtgggcacgtgaggagggcgagcgggtcctaggtgcgtagacccgtgggtggggggcggagcggaccggtggaggtgggcagagaccggcggcaagtcgacccacggctgtgggtggcttcctcctgttgctcagtatcagggagaggcgggggaggacattcattttttttcttccctaagtaagcatccacctattgctttaataactatcgattgtgaaaagccggcggggcctcttaaaggcgaagtcgggaggcgcgcgcccctgcgtctgtgttcggggaccagtccgcggggaccttctggaccttctccgccggctgcgcggcagcgatggaccctgtgcatgggctctcctagcagcctcgggaaccgcggccgcaagctgtggtttgacccctgccccaaccactcgcgaggccttttctgttcagagcccccagtcacgttcttggacccagtcacctgcgccgcagcgcagtcccggcgccccaggttcgaggacccggcccgcgctcggaaagttatttcaaaaggcagatgtgttgcaaccctctctgcagcaaactacagtacgcggattcccgaacccttccccgcccccacccagcccgggcgaccagagcccgccgcgggagactggcagcaaggagagccacccctaaatgcaccttccctccctcccgcgcgcccaagtgcaatggggttgggggaagccccaaagcaaactcacgacgc

SEQ ID NO: 28597 - DNA, 793 bp, Homo sapiens
  chr15:60295932-60296725
  hyper
cgacctaactctccggggactggggggcaagggtgtgttttcattattataacccatgcaaccaaccccgggtagtgctaagcgcaggaaaagggtcggcttcaggggaaagccgtgcctaaagttacctaacgatacaaaccggatacaacgcagaggaaacagaataccccagccaagcaatttccatgtcaaacatcatccgcgcggctgctccatctgtgaacgtgagtggtcgcctggctccctcttccgcggcggccgcttcctcataccttcacacggcgcacaccggccggcgcgtccagctgcctgcccagtggccgaggctcttccccctcgcccagtcttgagctggaagtgattcctattggccaaggtgtccatgtaaataggtgtgaaagaaaccagagctggccgggctctcccttctcgctcagtcccctccctctgcagcccccgctccccctcctcttcctcctcctcccaaggcgattgtcatatgatagctaagaagtggcacattaatgaagcgccgctacaggggtcttttctgctcctgtcaccgcttaaaactatcagatggttcgagggaggacatggaggcagccacctagctcagcggagacgcggagcccacagcagcgccctccggagccctaacacgtcgctgccaccatccgcgccgggactccgcagccgagctcggccgcccgcaggacgctccaggagcgtcgcggaccgggcggcacgggacgctgcggggctgagctcaagagcccaggttcgcgcc

SEQ ID NO: 28598 - DNA, 832 bp, Homo sapiens; identical to SEQ ID NO: 22805
  chr15:63795400-63796232
  binary

SEQ ID NO: 28599 - DNA, 384 bp, Homo sapiens; identical to SEQ ID NO: 23478
  chr15:72581447-72581831
  hypo

SEQ ID NO: 28600 - DNA, 966 bp, Homo sapiens; identical to SEQ ID NO: 23978
  chr15:79381742-79382708
  binary

SEQ ID NO: 28601 - DNA, 1470 bp, Homo sapiens
  chr15:79382738-79384208
  binary
cgaactccgcttgctcaggtagcctttgcgcgtgccgtccttgcgcgccagcagtcccagggacgcgacgtggccatcattcagccggatccccttctgcatggtgctcagaggccagcgagaccccacgcgcttacatcttctccgcgcagcagccccccgtccgtgcgcgctgcgcgctgcctctctctggcgctcgctcgctcgctccctctagctctcccctccccccaaatatctacactccaggatctggcgccgagccgcggcttcttgaatccagatataccattccccgctggaacctcttctccgctccgcagagccccagtacccggaagatgccgcccgaccctcctccggtgccgggcaaactgagggactggcgatctgcgcgctggcgaggggcaggcggagtcatgtgacgccgatccctcgaagagcccgtttcagcagcgcggacagggacacacgcacgcagccccgccgaggcgcagagccgcgcgcaggctgcaacttggtgcctcctccccctccccagacacacacacacgcacacgcacacgcacacactcaaaccctgccctccctcccctcatctccccttctctccctcggatgttaaaaagcaaatcagatcaattttcgtttaacccaatgaaaccccgaaggctcgccatcccgggagtttgcgtctttgcgccccaccgcggcgcactgtagacctggggttaagtgccagttgtcattttctcctccaaaggctcgccccccccccccactttatttctaatacgaggtggaaggaggaaggtgggtggcgaaatagagctgcaaaagcgtccagtcctagtctttgcatagtcagccgggtcacattgaattccagcatccggctgcactcccggcggcttccccagctacctgaggacagtacagggggtgagatggggtggtggttggtgaacgttggttactttattttatattattttattttgagagttgccataattaccggcgccaccccccgtgcaccctgaggtctggttggcgagccgctgctgggagttttctgcaaataccccccaaagcctgaaggcgggcttcaaacgcaggcgccggggaccatgggagccttcaaatagctgcgctggcgcaatgataccttaatgatagattttccgttcttatttttagctctcattcgcctacacagttacacggcatttatccgagaacgtcacagcgcccgcatgctgcaccgggagggcgcgcgggccgccgggcgagccgggagctggggcggggagcgcgcatcgctgtctgccgcagagggcagcgagctcgccccgacccggagcaagccgcgcctggcccgggcgctttgcagcggggatgggtgcccgcgcagccctgtgaaggaaagacaccatctttccgcacggaaactgcgtatacccctccccc

SEQ ID NO: 28602 - DNA, 114 bp, Homo sapiens; identical to SEQ ID NO: 11134
  chr15:83572357-83572471
  hypo

SEQ ID NO: 28603 - DNA, 876 bp, Homo sapiens; identical to SEQ ID NO: 27660
  chr15:89346018-89346894
  binary

SEQ ID NO: 28604 - DNA, 752 bp, Homo sapiens
  chr15:89913195-89913947
  hyper
cggttctcctcagagataatcatgggcagaaggttttctgaatccctttgtaccccacctccattttgaaaggccagtttccctttttttctgacaggaggctggtgaagggtgactagagtgtttcgggattcacgaggctatgggctgcatcccttgggccgtccctcccttcccaatgcacctgggagcctgtgtgctgatggtgacctcatttcggaggaaaccggagcagcacttcctgcccccttgccctgcactccctgccttcctccctcaccggccaacgggtgtgggcaaaccctgggccccgggcttcgatcttcccctcccaccacccctacccgtttgctgtgttgcaagaactagtccttcacttgccagggtggctttgcagcttcccagcagtgtctacacagttcagatgagtgttgttgttaaacaccactgtcccataccatctgggcaggtctgaaacccgagttgagggtctgatgaaggaggagtctgtgcgggagggcaacgcggcattttcccgctttctacgaaaatctgttgatgcaaacctcccgcttcagagaaagatcgcggcagcagggctgcggagggcgatgagcatgccagttctaatctccaggagcccatcccacaccttccttaaacggccctcggagagaggccagaggccagaggccaacccatccgatttcggcctcctggtacgaatgcctgcccctactagagcaatgttc

SEQ ID NO: 28605 - DNA, 335 bp, Homo sapiens
  chr15:89956224-89956559
  hyper
cgcccccgacctactgacccctcttcccccctgacatgaatagtgggactcacagcctccccagcctctccaactagtgcctgcaaagccacggctcctaatcagggtaatttaatatattttaagcccccggcggctttattttccctccttttcgagtttgttttaggcattcacagctctcaccccgtcattagacggccttatttgacggatggaaggagctgctatgagaccacagccctttgtgtcccccacataagctgggcttccccgtaattagaatggtattcccagccattgaggcttttcatgaggcagaacaaaaactcccc

SEQ ID NO: 28606 - DNA, 40 bp, Homo sapiens; identical to SEQ ID NO: 5978
  chr15:90016187-90016227
  hyper

SEQ ID NO: 28607 - DNA, 107 bp, Homo sapiens; identical to SEQ ID NO: 6415
  chr15:90378787-90378894
  hypo

SEQ ID NO: 28608 - DNA, 106 bp, Homo sapiens; identical to SEQ ID NO: 6938
  chr15:90501638-90501744
  hypo

SEQ ID NO: 28609 - DNA, 548 bp, Homo sapiens; identical to SEQ ID NO: 23480
  chr15:90755573-90756121
  hypo

SEQ ID NO: 28610 - DNA, 265 bp, Homo sapiens
  chr16:1154990-1155255
  hypo
cgtctccacgtagtcgcccacgaggtaagggtgccagcattgctcgtggtactgcaggttgttggtggcgatggagaagggcacggtcatggtgtccgaggcatgacacagctgcggctccggggccagcagcaggcgggtctcagcggcggtgctaccacctcccactcaggctccaacttccagccgcgcgtgtcctacggctgccgcccaccctgtgtgtgtggagtccctttgtgtgcactgtgccgcggcctcggtctcc

SEQ ID NO: 28611 - DNA, 196 bp, Homo sapiens
  chr16:1166568-1166764
  hypo
cggagggacgccaggtctgcgggcggcaggcagatagcctggccaggccctcacatgcccaccgccagcaccagcctggaaatggacctggaggggccgggctccacccggcacttagaccaaagagccctgaaaatagacgcagagaaaatcagccacggctcccaggccccagaggtcctcccgggagcaggac

SEQ ID NO: 28612 - DNA, 145 bp, Homo sapiens; identical to SEQ ID NO: 6420
  chr16:11770890-11771035
  hypo

SEQ ID NO: 28613 - DNA, 365 bp, Homo sapiens
  chr16:12210622-12210987
  hypo
cgtggaaacaggcttagtcaatacctgcttcaacgcggacgaaccgtggaaacaggcttagtcaatacgtgcttcaacgaggacgaaccatggaaacaggcttagtcaatacctgcttcaacgcggacgaaccgtggaaacaggcacggtcaatacgtgcttcaacgaggacgaaccatggaaacaggagtggtcaatacgtgcttcaatgcggatgaaccatggaaacaggcgtggtcaatacgtgcttcagtgcggacgaaccatggaaacaggcgtgttcaatacgtgcttcaatgcggacgaaccatggaaacaggcgtggtcaatacgtgcttcagtgcggacgaaccatggaaacaggc

SEQ ID NO: 28614 - DNA, 138 bp, Homo sapiens
  chr16:12211189-12211327
  binary
cgaaccgtggaaacaggcgtggtcaatacgtgcttcagtgcggacgaaccgtggaaacaggcgtggtcaatacgtgcttcaatgcggacgaaccgtggaaacaggcgtggtcaatacgtgcttcaacgcggacgaacc

SEQ ID NO: 28615 - DNA, 807 bp, Homo sapiens
  chr16:1397437-1398244
  hypo
cgggctgtgtccttgagcatgaggtggccccacgggcagtcaggtctccaagtgccagcgctgaccaccagcacccaggggcccctcctgatgcgcttccccctgcagaggctgaaggaggagctgcggctgcacaaatgttccacccgcgagtgcatcgagcagttctacctggacaagctcaaacaggtagggaggcgccagggacagggtgctgcctccgaggctcccagagcccagctgcgctcacccgcctttccgcagaggaccctggagcagaaccggtttggacgcctgagcgtccgttgccattacgaggcggctgagcagcggctggccgtggaggtgctgcacgccgcggacctgctccccctggacgccaacggtgagttgcagcggggacgggtcgggtggtggtgggatgggggcaggggggctcacgactgtgctcctgcaggcttaagtgacccctttgtgatcgtggagctgggcccaccgcatctctttccactggtccgcagccagaggacccaggtgaagacccggacgctgcaccctgtatacgacgaactcttctacttgtgagtgtcctaagccccagccccagccccaggctccaggctgccggagcgagactcccgactggcctctgtccgcagttccgtgcctgccgaggcgtgccgccgccgcgcggcctgtgtgttgttcaccgtcatggaccacgactggctgtccaccaacgacttcgctggggaggcggccctcggcctaggtggcgtcactggtgtcgcccggccccaggtgggc

SEQ ID NO: 28616 - DNA, 339 bp, Homo sapiens; identical to SEQ ID NO: 23484
  chr16:1424307-1424646
  hypo

SEQ ID NO: 28617 - DNA, 1163 bp, Homo sapiens; identical to SEQ ID NO: 23485
  chr16:1424928-1426091
  hypo

SEQ ID NO: 28618 - DNA, 765 bp, Homo sapiens; identical to SEQ ID NO: 25128
  chr16:1428128-1428893
  hypo

SEQ ID NO: 28619 - DNA, 365 bp, Homo sapiens
  chr16:1580458-1580823
  hypo
cgattgtgcacaccctctcccgaggcccaggtgtggggctggacagggctgggacctgcctctacctgccccgcgtggctcctttcctctcccttgtcctgaaaacaactggttccttccgtccacatccaattgcggtggaaaatcacaaacaagcacaggaatgtggcagctgacttgggtcccagacgggctcccctgtgctctgaacgccccgtctctcccacgcggaggccacccgtggggagcgggagagagcccgcccgtggggagcgggagagagcccgcaggccggccctggttttgctctggttcctggggcccatgtgtgaccgaggacccagccagcacaccgtcagatgccc

SEQ ID NO: 28620 - DNA, 357 bp, Homo sapiens; identical to SEQ ID NO: 26416
  chr16:1741741-1742098
  hypo

SEQ ID NO: 28621 - DNA, 1182 bp, Homo sapiens; identical to SEQ ID NO: 26418
  chr16:1813299-1814481
  hypo

SEQ ID NO: 28622 - DNA, 654 bp, Homo sapiens; identical to SEQ ID NO: 26421
  chr16:2028554-2029208
  hypo

SEQ ID NO: 28623 - DNA, 752 bp, Homo sapiens
  chr16:2040762-2041514
  hyper
cgtccctgggagggccctgctgctccttccctccggcaggggaggtggcagttgggtgccgagctctgggttttgtccaggtggcaacctctgggccagccgcacctcggcgcctgtcttggaggagggcggtgcccacggtggggcaggggctttggcctcccctgcggagtggctctgaccagaccgggaggcaggacgctgcgttttggtccgagcgcacgtcccgacttgtggcccactcttggggacaagtgcatgtcccggcttcccccttggctccactctcggagctggagcgggaaaggagcgaagggatgaggttgaggctggaggtcgtttcttggaaacacagggctgccccgtgcagcgctggttaaaatgactgcggtccccctcatgcctgtctcccggaactggtgggcaggaggcattgaggtttgacggaacctcagaggtcaacggtgtcatcttttcagcccaaacacttacaggtgatattaataatcagtcacgtgggggctgtcatccctcgggtacccaccacgtgcaggaagctgggtggacatgtctgtcccagcactgcatgagctgtgcccgtcaccctatttgcatgctagaaaacaggccagacagttcccaaccgcgcaggaagcaacagctccgctgcctccataccctccctcccgccccgctctgcctgctgcactctcacctccccttcgccgttccggctccagcctgggaatcgc

SEQ ID NO: 28624 - DNA, 228 bp, Homo sapiens; identical to SEQ ID NO: 6427
  chr16:2042997-2043225
  hypo

SEQ ID NO: 28625 - DNA, 1172 bp, Homo sapiens
  chr16:2128592-2129764
  hypo
cgctcgcctgcctgagggtgacggtggaaggccacatggggatcccagacctctgtgtgcttgccggaggcagcctgcgggcagaatgcaatctgggcctgtctgtgtggcctccgcctctctgcatgactacaccgtttcgccaggaggccgtaacctagtgctcccgtgggcttcggtgagggggatgtcggtctctagcctcctgagtctgctccgaccagtaggcctggtcttccccacccagcgtctccccgttctctgggacaatgtggtccacgtgattctcaagctgaggctcgctgggccgcccacgccctgttggggtctttccgagcgaggtcctcagccgtgcatgcgttgagctttggcccttggtgataggtggctcggcccgccctacctggcaccctgaccctggtcacggcctctccctccagcaggatacagacgtccctcaccagtgccagcttggggtctgcagatgagaactccgtggcccaggctgacgatagcctgaaaaacctccacctggagctcacggaaacctgtctggacatgatggctcgatacgtcttctccaacttcacggctgtcccgaagaggtccaggcggcactacagggctgggcgggcctgcgggagctccacgggcaagctgggtttcacgctccctgtcttctaggtctcctgtgggcgagttcctcctagcgggtggcaggaccaaaacctggctggttgggaacaagcttgtcactgtgacgacaagcgtgggaaccgggacccggtcgttactaggcctggactcgggggagctgcagtccggcccggagtcgaggtgactgcaccttcctttcctccgcgcctgccagcctcgacaccggctgtcccgagcccaggcccacgtggcaccctcgtaccagcctggggactaagtccaccctgtgcgtgggattctcttctcagctccagccccggggtgcatgtgagacagaccaaggaggcgccggccaagctggagtcccaggctgggcagcaggtgtcccgtggggcccgggatcgggtccgttccatgtcgggtgagccttggccccagccacctccacacaggcaccggggctccctcagttgctgctggtcccagtgttcaggaaggccccgagcccaggggcc

SEQ ID NO: 28626 - DNA, 590 bp, Homo sapiens; identical to SEQ ID NO: 23995
  chr16:21569179-21569769
  hypo

SEQ ID NO: 28627 - DNA, 735 bp, Homo sapiens; identical to SEQ ID NO: 23489
  chr16:2213255-2213990
  hypo

SEQ ID NO: 28628 - DNA, 1750 bp, Homo sapiens
  chr16:2229615-2231365
  hypo
cggcaccttcttggaggtgggtgtgggcgagccctggagcttgggcacaggctgcgtcaggacgggcttgggagagacaggcggcttggccggcttccgggcttcgccctcgggcgggggcaatgggggtaggtgcgccaggtcggtgggcgggggttcggcaggcgggggcggtggaggcagctccggaggcccagcctgctccgaggccggtcggcggcgcacggtgccagtgccattatggtacacggacagtggcggtggtggctcaggcccggcctcccgctccttggccttgggcctgcgcttgaccgtgtcagactcggtcaggatgaacttgacgttctcctgctggttctgcttggcccggatgcgcctcttgagtgtggcgctggcttccaccttggccaagggcgggccttcgacacccgcctcgcccttggagggaccccgaggccgctgccggccagtgccatcctccacaaaggggcctgggtctgccgactccccaggcccccggcgggcagtggccagaagtccggtgactggcccgctgagcgtgcggcgccggttcaccacctccccgccaggcccgatggcctctttgtgtttcactgaggccagcacggtggccacccggcccggctctgggctggcagggcggggagtggggtggccctcaggaggcctgcgggcagcccggcccccacccccaatggaggacagctccagcatggccgcgatgctcttcacactgccggcactacccgtgtccacgctgccggccaggtcactggcccgccggcactgtgcccggacccccagcaggccatcctcaggctcggcgtcaggcaccggctcatccgccaggttggcactagccagggccgagctggagcgcttgggtgggggcggcgggggccccttctttcggggccgcacggcaaaggactggctgcggttgacgttcttgtcggcacctgcgggcgccctcactgagtggctgcggcccacgcgccgctggaccgtggcataggggccggcagccgcaggcaccagcagctcgtcccgctccggctcgctgtcggacgccgcatagcgattcaggctgtgggcccgcttcttgggccgccccggctccgcgtcggcctcagggggcaggcacagtgtgggcacagccgtcggcacgggtgggggcgcaggccccggggcagccggccccacctcgccctccacgggctggggcagcacgtaggcaaagccgcggtgcgtcggtgactgaggcagggagcggggtgacatggggcgctctgtcggcggcagcagctgcggggtgggcttcaccttggccgtagctggggctggaccatgaggtcccccaagggcctggggagagcctggtcgggttttggtgggcgtctgggggggcgtgaagtggctagtgcctggtgggaggacctgccgtggcttgccaggcacggggggcacgctggccctcttgatgctgtggccgtggcggccgggccgggcctccctgggcggggtgccgggggcggggccctcatccaggaggtactcctggcttcgagacatggggctgctgggcccagggggcccatctcccagcagctcctgcgagctgctcatgtgccgtgcccgaccacccaggctggagtcctgccgcgtggtggccctcggggtgggtggcaggtggctggagggcttctcagtggtgggccccacctcagcc

SEQ ID NO: 28629 - DNA, 948 bp, Homo sapiens; identical to SEQ ID NO: 23492
  chr16:2280815-2281763
  hypo

SEQ ID NO: 28630 - DNA, 1768 bp, Homo sapiens; identical to SEQ ID NO: 22807
  chr16:23846783-23848551
  binary

SEQ ID NO: 28631 - DNA, 713 bp, Homo sapiens; identical to SEQ ID NO: 6438
  chr16:24837143-24837856
  hypo

SEQ ID NO: 28632 - DNA, 188 bp, Homo sapiens
  chr16:2974635-2974823
  hypo
cgctcctgccacgctgtgggtcacgcaacccccccaggctagtcaaggttcaggcaggtggagacaaagcccggttgctgaggggcctgtggactttaacgggcggagtggcggtgggtcagcatctaccatccaagagcctgaacgggcaagagtgggaacgggtcctcagccttccacaagccggc

SEQ ID NO: 28633 - DNA, 136 bp, Homo sapiens; identical to SEQ ID NO: 11172
  chr16:30169940-30170076
  hypo

SEQ ID NO: 28634 - DNA, 548 bp, Homo sapiens
  chr16:31446861-31447409
  hypo
cggtctcttaaagcgctgggattacaggtgtgagtcaccgcccgcagccgcacctgcctaaatcccttaatgtataagggaaaggagcgagaattcaggggaaaaaaaacaaacaaaatagcccccagcacttctgagaaagatctgccatacagaaaagccgtcctgagcgggtctgtgtggagggaggggactgcatctcagatccacagtccaccggcggctgcaacaattccacccagggctgcagcacgctggttcttcagtgtcgggccaggttggacctccggctggaggccttccacaccggaaacactggtagggctcctctccagtgtgggttcgagggcggtggaggagctcggcactgtcgctgaagcctggccctggcctcgccgagcggtccggccgctctgtgctgcgaggccttccgggctggctcagggtagcctggggcctgaaccgcctcccgcgagtcccgtcccgcgctcgcacagcttctgggccccatcgccccctcctgctgagctgccggctgggtggctggc

SEQ ID NO: 28635 - DNA, 495 bp, Homo sapiens; identical to SEQ ID NO: 23495
  chr16:31500256-31500751
  hypo

SEQ ID NO: 28636 - DNA, 2168 bp, Homo sapiens; identical to SEQ ID NO: 23095
  chr16:3220283-3222451
  hyper

SEQ ID NO: 28637 - DNA, 917 bp, Homo sapiens; identical to SEQ ID NO: 22809
  chr16:3232535-3233452
  binary

SEQ ID NO: 28638 - DNA, 937 bp, Homo sapiens; identical to SEQ ID NO: 22810
  chr16:3233501-3234438
  binary

SEQ ID NO: 28639 - DNA, 370 bp, Homo sapiens; identical to SEQ ID NO: 23096
  chr16:3237723-3238093
  hyper

SEQ ID NO: 28640 - DNA, 1770 bp, Homo sapiens; identical to SEQ ID NO: 23097
  chr16:3238154-3239924
  hyper

SEQ ID NO: 28641 - DNA, 665 bp, Homo sapiens
  chr16:3241328-3241993
  hyper
cgcagagcggtgagcaaagtcttgcaccagcggggatgtcggggtggaactgaacctgttgtaggggacccccagtgtgccctggtttctggggctgattcattacgtcacttagtttctactattctcatgccaccccgccaattactagacataaaacgttcccagggaagcccggctagctcagtcggtagagcatgggactcttaatctcagggtcgtgggttcgagccccacgttgggcgacttgttttcttccttgctaccttggagttctggaaacagccagcatttaatgaacactaccaggtgccacatcgcgctctgtgatggtatcccctcaatgattgaattttggtctccgcgcgctcccagcagcaaggattgtcagtgaaatgaccaaaggcagcaccgggacgggctggttgccagccaggggcagaggggcgggggcgggtgagaactgaggggccacaggatgggtgtgaggggtgcaggggcctctccccactttgtgcggtgcggagaggggccggggcgctggcccacccactgagtctgcaatcccagtctcctgtcactttgctttcgcaggcttgagctttatcgctccaagtactccacggctgccacaaagaaaagtaaagggcctgctgctgtggctc

SEQ ID NO: 28642 - DNA, 283 bp, Homo sapiens; identical to SEQ ID NO: 23496
  chr16:3772855-3773138
  hypo

SEQ ID NO: 28643 - DNA, 1717 bp, Homo sapiens; identical to SEQ ID NO: 26438
  chr16:410000-411717
  hypo

SEQ ID NO: 28644 - DNA, 366 bp, Homo sapiens; identical to SEQ ID NO: 23098
  chr16:4363872-4364238
  hyper

SEQ ID NO: 28645 - DNA, 903 bp, Homo sapiens; identical to SEQ ID NO: 26440
  chr16:4377508-4378411
  hyper

SEQ ID NO: 28646 - DNA, 72 bp, Homo sapiens; identical to SEQ ID NO: 11186
  chr16:440413-440485
  hypo

SEQ ID NO: 28647 - DNA, 978 bp, Homo sapiens
  chr16:49315519-49316497
  binary
cgcactccgggactagcgtcccctccgcgactagcgtcccctccgcgctgtgttcccggagcccctcccgggcctcaggggtgccgcggctgcccagccgcacttggatgcatagccgctgctgctcggtcccgctgctgccgccgcctcctgcccgcacccgccgctgccgccgccgccgccgctctgaattattgatgcagccggcgctgcagccggagcgggcggagagcgcgcgccgggcacaaaggcgcggacctcggcctggccccgcccccgccgcctcccggcccgcctccctccgaggccctgcccccgccccggccgaggccacgccccccagccaatcctgacgcgccgcgctccccaccgagccaatggcggcgctgtccgcgctcggccacctgaccccgggcgccgttgttattaggcgcggcgaggcgggtggcgcgcggcagcagggttgggctctcgccgtgagtcgacgaagggagcgcgggcgcgcgcccgcgtccgcgcactgagagtcgcctcggccgctcgctttctcgactcccgcctcgcgcctcgatcctgttccgcctccctcggccctcctgcccgcccccactcgtcggccctcaggtaggaggcggcgcgccccggggtcgggagtggaatcgctggaggctgcgagtcgcctgcccgcctgtgggcgcgcccgttgggaggggagcgccccccagcgggcgcgggcgcgagggcagccggcgcgctgggcgagcctggctcagggtcccggcggccggggtgcagggcgcgtgcgcgcgcggcggggcggggcctgcgcggctctggcgggcgcacgtggtgcccgggagctgctgggcgggcactcaccgcggggactcggtgcggagccggggcgccgagtgtctccgtgtccctctgccccagccggcggccgcgatggtggagcttggcctctcgctctctccc

SEQ ID NO: 28648 - DNA, 771 bp, Homo sapiens
  chr16:54966651-54967422
  hyper
cgccaacgcgcgccggcgcctcaagaaagagaataaaatgacgtggacgccgcggaaccgcagcgaggacgaggaagaggaggagaacattgacctggagaagaacgacgaggacgagccccagaagcccgaggacaagggcgaccccgagggccccgaagcaggttggtggacatgggaaagggcgtgttgggcgggagtaaaaaggaaaagagaggcctggagggggcgcgcacggggcctggaggttgggggcaggggtccctgcctttgcgggcgggaaccgggtcccgccgcgcggcctctgcgcccctgacagcctgggtttcgcccgcaggaggagctgagcagaaggcggcttcgggctgcgaacggcttcagggaccacccacccctgcaggcaaggagacggagggcagcctcagcgactcggattttaaggagccgccctcggagggccgcctcgacgcgctgcagggccccccccgcaccggcgggccctccccggctgggccagcggcggcgcggctggcggaggacccggcccctcactaccccgccggagcgccggcgcccggcccgcatccagccgcgggcgaggtgcctccgggtcccggcgggccctcggttatccattcgccgcctccgccgccgcctcctgcggtgctcgccaagcccaaactgtggtctttggcagagatcgccacatcgtcggacaaggtcaaggacgggggcggcgggaacgagggctctccatgcccaccgtgtccc

SEQ ID NO: 28649 - DNA, 916 bp, Homo sapiens
  chr16:55689978-55690894
  hyper
cggcggagcccagccccagcccgcgccctagagcctgccaaggcgccgccggtcgggggccggcagggcgcaaggcaccagggatcccctcgccgccggacacgtgagtgcgccctgagcgcgggacagggctaggtctgcctgggaggcccgggccgagacgcgccagcagagggctagcgagtttgtagtgcagtgacgttaagtgtccgagaaggctcctgtggctgttgaagtgtcgcggacctgagctggggagggggtcggcacgctgccctcagcctcggtgagttcaatcccagccatttggggcaggcgagagtgggtgaacgaggaaaagtgctgcagggtcttcagccgcccccagagggctgtcagaagtctccaactcttgagttccggcgtgccccaacctctgtttccaaatttttccagcggacgcgcgcccttttctgggaaccctgcgtccgctcagcgcgcgctcatcccagtgtctaaggcgctcccgggtggtcttgggagttgcaagtagggaggaacggccgggtaaccacctcttttccctttatccaagcagagcctcggcgtgcccccaggaccggtaaagttcctctcgccagccgcatccatgcttctggcgcggatgaacccgcaggtgcagcccgagaacaacggggcggacacgggtccagagcagccccttcgggcgcgcaaaactgcggagctgctggtggtgaaggagcgcaacggcgtccagtgcctgctggcgccccgcgacggcgacgcgcagccccgggagacctggggcaagaagatcgacttcctgctgtccgtagtcggcttcgcagtggacctggccaacgtgtggcgcttcccctacctctgctacaagaacggcggcggtgagcgtggggtc

SEQ ID NO: 28650 - DNA, 758 bp, Homo sapiens
  chr16:56659107-56659865
  hyper
cgatccgtgttccccgtgttgctatgtaaggaggtgcgggaccgaggaacctaggtgtggacagggacaggcaaggcgggggacgaagagaaatgaaagccacatcggtggcggatgttctgaacacaactcgctcgctaccgcacgttccccgctccgcactcagcggatcccgggacggcagcaggtgggctgcacacggactctgggacaagtcgagctgaaaaccgcggagctaggggtggggtggagacgcccgcgacgccaaggctggggtcccggaacacgctgggaggagggtggaaggcaacctcggggaaactgggaaaggcggcctggacttcgggaacaccgcgtacctgcgggggcacagccccacccgagcgaacgggctccaaaggggaggtcccgcggtgcccaccgcgcagagctcagggggtggtgcgcccggcccttctgcggcgcacagcccagcccaggaacgcgggcggtgcggactcagcgggccgggtgcaggcgcggagctgggcctctgcgcccggcccgacctccgtctataaatagagcagccagttgcagggctccattctgctttccaactgcctgactgcttgttcgtctcactggtgtgagctccagcatcccctttgctcgaaatggaccccaactgctcttgcgccactggtaagggaagctctgcgccctggaatccccatttcccagccctattacagagggtctctgggtttcaggaagtc

SEQ ID NO: 28651 - DNA, 299 bp, Homo sapiens
  chr16:58120772-58121071
  hypo
cgaaggttgctatgagagcaattggtagctaagagaaccgagacatgttcctgcccctttccacgttggcttctctgtgacacatcagccctagggaagcagggccagtgccaccccacatgcaggtggcaacactgaggctccagggggtcgattcaggccggtttctttccccgtttatacaccctgcttctctccagcatccacgactacaggtgatggccacgctactcccatgtcctcacatgcacctgggttacgtcagcggcagccatgcgtgcacatgcacactcacacac

SEQ ID NO: 28652 - DNA, 576 bp, Homo sapiens; identical to SEQ ID NO: 11190
  chr16:594129-594705
  hypo

SEQ ID NO: 28653 - DNA, 603 bp, Homo sapiens; identical to SEQ ID NO: 24017
  chr16:611800-612403
  hypo

SEQ ID NO: 28654 - DNA, 314 bp, Homo sapiens; identical to SEQ ID NO: 23500
  chr16:67313759-67314073
  hypo

SEQ ID NO: 28655 - DNA, 220 bp, Homo sapiens
  chr16:67433333-67433553
  hyper
cgctgcagtgcttggagcgagcgctcctgcagggagagggggcacagcgcgattggccggctcattccccgctctgcggcccggccggtcggggtggttgagtggggtctgtggagggaccaagcgccaggcctgagacagccccgagcgaggcgacgaggagcgcgcgcgccctctgcaggcgctgcggggtgggtcccctggaggaggcagcgctccc

SEQ ID NO: 28656 - DNA, 512 bp, Homo sapiens; identical to SEQ ID NO: 9206
  chr16:717202-717714
  hypo

SEQ ID NO: 28657 - DNA, 1204 bp, Homo sapiens; identical to SEQ ID NO: 23502
  chr16:734744-735948
  hypo

SEQ ID NO: 28658 - DNA, 794 bp, Homo sapiens; identical to SEQ ID NO: 23503
  chr16:75148493-75149287
  hypo

SEQ ID NO: 28659 - DNA, 862 bp, Homo sapiens; identical to SEQ ID NO: 24023
  chr16:77822069-77822931
  binary

SEQ ID NO: 28660 - DNA, 842 bp, Homo sapiens; identical to SEQ ID NO: 23504
  chr16:81563939-81564781
  hypo

SEQ ID NO: 28661 - DNA, 377 bp, Homo sapiens
  chr16:81626951-81627328
  hypo
cgagaggtggtgttgtgcctagcctggggggttggagggcggggggagtttctgctctgcagccctgtgatgcgcaggtgccatcgggtctctgaccccaggccatcaagagctgtgcgacctgcttgccatccatcatgtggagctggtcggtcaccccatgcaccaggccgactccaagccggagctttcctctccgctcttttcggagtaatccgtggatgatggaggagcttggcaagcatttcagcaaagctcttttttcttgttgaggcttgaaagtaatcgcctccgtgtattgagtgcccgccgaccacctggcgcgtctgggcattgagctcattggccgctggcacaaatggatcctcgcctcaccc

SEQ ID NO: 28662 - DNA, 505 bp, Homo sapiens
  chr16:81694554-81695059
  hypo
cgggattgctgagctggggctgtggctgcaggaagtaacctccctctgtgcgcataccagggattgggtttgcacagaaaggccaaaaacctgggccccaccgtcttgggtcacggtcccagacacaggcggagagggcatgcccggcacccattcttagggctacacccacgtctctgccagacaggtgacaaagagtcacaaggggaacatcttgcttttccttggaatcacttcccggctgtcttaggagacaggttgctgcagatttcctgggctcatgacgtcagagctgggttattattagccaaggttcctctgcgcagtggctggcccacggtggggtgcggctgtggggctttccctgaacacgggaggcagcacggtgctccaggttagcttagaggagctgtggagcagggcatccgctgccgggcacccggcgccagccttgcagtgggattcacataggacatgtccagggcacatctttgtggctcaggcc

SEQ ID NO: 28663 - DNA, 152 bp, Homo sapiens; identical to SEQ ID NO: 24025
  chr16:85033842-85033994
  hypo

SEQ ID NO: 28664 - DNA, 214 bp, Homo sapiens; identical to SEQ ID NO: 24026
  chr16:85083563-85083777
  hypo

SEQ ID NO: 28665 - DNA, 992 bp, Homo sapiens; identical to SEQ ID NO: 24027
  chr16:85673482-85674474
  hypo

SEQ ID NO: 28666 - DNA, 910 bp, Homo sapiens; identical to SEQ ID NO: 22812
  chr16:85932121-85933031
  binary

SEQ ID NO: 28667 - DNA, 178 bp, Homo sapiens
  chr16:88502165-88502343
  hypo
cgttgggtgtgtgcaaagagtctgggagcgagcctgcggaggacagcagcagggcccacagccgatcagaggaaggtgtctgggaggagaacacgccccccttgggccccctgggttttcccgagacttccagctctccggcggacagcaccaccagcagctgcctccagggcctccc

SEQ ID NO: 28668 - DNA, 443 bp, Homo sapiens; identical to SEQ ID NO: 24032
  chr16:88512432-88512875
  hypo

SEQ ID NO: 28669 - DNA, 236 bp, Homo sapiens; identical to SEQ ID NO: 26461
  chr16:88757481-88757717
  hypo

SEQ ID NO: 28670 - DNA, 975 bp, Homo sapiens; identical to SEQ ID NO: 24036
  chr16:88945383-88946358
  hypo

SEQ ID NO: 28671 - DNA, 741 bp, Homo sapiens
  chr16:88966221-88966962
  hypo
cgtggtccgtcctgagcgtttcctcccccggggctggggtatactgcaaatttaacacagcagcggtctccctctacctatgtgggctcggtgtggtcgcaagctgcctggtagagagacggcccgtggtttgtaccagaccggagggctcttccgaagagagggaagggtgatcccagcccggccacatcgccgtgtgacaaggacatgtgagaaaaagcccagccagcctctcactagaaaccgtggccagctccgcagagccaggacctgcacgctgggcccgccgtcccccaggacctgcaaaatcgtgagtgcggcgtcccgactctctgaggcagggccggccccgcgggtgcagggagtagccgttaggctgtttggctcctactgagtgccgggcacatttccagctgtacctgcctctgggcggcacacctgggggcaccccattgctgggccaccccattccccaaccaagtcgggaggctgactcggagccaacatcctacaaacagggccgcaaatctgctgcctgaccgcacagccagtgctctctccagatggaggggagatgatggccaaagccctcggcggagcaggcccccagcctcagcggcagagccagggagggagccaggcctggcctatagccacccggtgctctgaggacagtcgtgacgtaaagggactgaggaagcagctctttctggcccgtcagggacccggggcaagcaggac

SEQ ID NO: 28672 - DNA, 335 bp, Homo sapiens; identical to SEQ ID NO: 24039
  chr16:89072478-89072813
  hypo

SEQ ID NO: 28673 - DNA, 378 bp, Homo sapiens; identical to SEQ ID NO: 24040
  chr16:89254530-89254908
  hypo

SEQ ID NO: 28674 - DNA, 849 bp, Homo sapiens
  chr16:89900822-89901671
  hypo
cgcactcgcggttggccatcgtagaagcctggataagcatagcccgtgtgaatctgtgaacctgcccgcactcgcggttggccatcgtagaagtgtggataagcatagcccatgtgaatctgtgaacctgcccgcattcgcggttggccgtcgtagaaggccccataagcatagcccgtgtgaatctgtgaacctgcccgcactcgcggttggccgttgtagaagcctggataagcatagcccgtgtgaatctgtgaacctgcccgcactcgcggttggccgtcgtagaagcctggataagcatagcccgtgtgaatctgtgaacctgcccgcactcgcggttggccatcgtagaagtgtggataagcatagcccatgtgaatctgtgaacctgcccgcattcgcggttggccgtcgtagaaggccccataagcatagcccgtgtgaatctgtgaacctgcccgcactcgcagctggccgtcgtagaaggccccacaagcatagcccgtgtgaatctgtgaacctgcccgcactcgcggctggccgtcgtagaaggccccataagcatagcccgggtgaatctgtgaacctgcccgcactcgcggttggccgtcgtagaagcgtggataagcatagcccgtgtgaatctgtgaacctgcccgcactcgcagttggccgtcgtagaagcctagataagcatagcccgtgtgaatctgtgaacctgcccgcactcacggttggccgtcgtagaagcgtggataagcatagcccgtgtgaatctgtgaacctgcctgcgctcgcggttggccgtcttagaagcgtggataagcatagcccgtgtgatttttc

SEQ ID NO: 28675 - DNA, 179 bp, Homo sapiens; identical to SEQ ID NO: 6461
  chr16:89947451-89947630
  hypo

SEQ ID NO: 28676 - DNA, 239 bp, Homo sapiens; identical to SEQ ID NO: 11220
  chr17:12890262-12890501
  hypo

SEQ ID NO: 28677 - DNA, 299 bp, Homo sapiens; identical to SEQ ID NO: 6464
  chr17:1454071-1454370
  hypo

SEQ ID NO: 28678 - DNA, 405 bp, Homo sapiens; identical to SEQ ID NO: 24045
  chr17:16282222-16282627
  hypo

SEQ ID NO: 28679 - DNA, 808 bp, Homo sapiens
  chr17:16471991-16472799
  binary
cggaggtgatgcgacagccttgccttgcctcctgtcgcctccccttcccggccaagtccctctgcctcttactcctcttcagccgcagggtcgaggtcgagggcagcgggggagtcggggaccgtgcgacgcgcaacgctgggactgggcccacagcagcctccaccccgtctttgccctcccgcaagccacgagcacgggagcccgcgcgtggacgggctcgggctgtcactgatcgcgcggacactcgcgcgctgcgcccggacatcaatacctgtcgctgggacccggccgacgggcagccggagcggccctaaggccacaggcaacaatggcgacgctggcacaggcgcctgcgtggcgggctcagtcccgagcggcagcggatcctcgggctccgccacttcccttccccgcaaagcacagagtgtcccggccaggagctgcacgttccagcccggtcctgagaagcccggcccagaaaccccggcgcctctgcttagccgcgacctcgcctcggcgtcactgcgcatgtgcgccagaggaacgctgcgcgcccgcagagccaatcggagcccaagctgccgcctccccctcccgcgcctctggccctggacctgtctccatggcaacctcctccacccatcgctctgacttgcttgtcagcctgcgaggttccgaagggaacttcaaagtttccccgggcagacgcaggtctggtagacgtcttggaggccagggaggtgccagtagctggaggagcgccgggagttgaagccccgcgccaactacgcagagaaaactgggc

SEQ ID NO: 28680 - DNA, 430 bp, Homo sapiens; identical to SEQ ID NO: 11223
  chr17:17045715-17046145
  hypo

SEQ ID NO: 28681 - DNA, 771 bp, Homo sapiens
  chr17:17062274-17063045
  hypo
cggctctccacacacgagctgacctctctgctcgagaaggaggtaatagcctgggaccagatccccaccctgctcccagcagcctttccagagcatcagctgtgcccagctgtggcctgaggggttcatctagacagtcctacccgcgagggacttgcagacccctaggggagacagacgcatagatgagtcctcatagttgaggcagacctgagagctgtgggagcgtgccagtgcatgcagggcagggaaaggggccttccaggcacagaggaattcttccgatggtgggggcccctgccattgagaggcaagcggcgttgcagggcctagatggtttcctcgttctgactcccgatggcaggaggggcgcgagcagggcaaggcttttgcattacgcagccctggcttggacaggtcaaagctgtaggcagagaccagccccaggtgctcttacagtggcttggggacggccgatcagatctgaagccaggggcatccagcaggagatgacagctgggtcctaggtcatgaggatatgaagcagaagacagtggtgaggcagggtaggctgtggatgaaggctgccctgtgactgtcactcctccacgaggccttcagtgcacctaggtacatagatgaacaagctggcccccgaactataaaataagatgttctttcatggaaatgtatgcagaaatccagtctgcagaacttcagtggtagattgacatgtctgggcagggagtctcgtagctggggaggtgtagc

SEQ ID NO: 28682 - DNA, 246 bp, Homo sapiens; identical to SEQ ID NO: 11226
  chr17:18024621-18024867
  hypo

SEQ ID NO: 28683 - DNA, 245 bp, Homo sapiens; identical to SEQ ID NO: 11227
  chr17:1881128-1881373
  hyper

SEQ ID NO: 28684 - DNA, 735 bp, Homo sapiens
  chr17:1901335-1902070
  hyper
cgcctccgccccaggccgcgatcgatcccggcctctcccggcctcattaccgagggagagctgccggggctggcaggggagccagacggcggcggagggggcggggaggcctccttggctccctggcccggattaaatatttactatgttttgtttggcctttgggggaggggcggggagggctgtcgcattgatccggagctgcagggcgagggcggtgcccagacccggcgccccaaggcctcccgcaggccgacccgagccgagcgcgccctttgggcaccggccccgcccgggagggtcttctcgctctagagccgggggcccgcgctgagagatcggggttaccgcgcggggagccgcggccgcgctgggatccgttccctctcgcgggagccgccggccggggatctgcgcaccccacgcgccccgctcgggtcgggcctcccctccccgcggctgcccccgggccggccaccgctgcccagcgcgcaggtccctgccggatccccggcggctttcctgcccccactttacagacgtgaacgctgaggcggagggtgggggacgtggggccggctcgcctcctcctgggctcgccgggatgtggcctccgaggtcgccgcggcgctttcctgcccaagctggcgctgccggagcgcccgggccccgctcccctcacgggcctcgcagcacagacggggacaggggcggcctcgcgcgcacggggacccc

SEQ ID NO: 28685 - DNA, 115 bp, Homo sapiens; identical to SEQ ID NO: 6466
  chr17:2326357-2326472
  hypo

SEQ ID NO: 28686 - DNA, 125 bp, Homo sapiens; identical to SEQ ID NO: 11231
  chr17:25842444-25842569
  hypo

SEQ ID NO: 28687 - DNA, 250 bp, Homo sapiens
  chr17:27085337-27085587
  hypo
cgggggctcggttgccaggggctcggtgggccttgctcagcatggccaggctctgttctcggaagcaggcctgttggaaatccccacttaggtaatccactgtttgcatcaagctgttctggcttgccactggaccgcccccggtccctgctcggtagtgggccccgggagctgccgcacagtcgaggggtgcacctgtgggctgcccaccgtggaacggcatggcaaggtcctgagaccccgagctgtc

SEQ ID NO: 28688 - DNA, 312 bp, Homo sapiens; identical to SEQ ID NO: 23513
  chr17:27909050-27909362
  hypo

SEQ ID NO: 28689 - DNA, 847 bp, Homo sapiens; identical to SEQ ID NO: 25220
  chr17:27949429-27950276
  hyper

SEQ ID NO: 28690 - DNA, 2889 bp, Homo sapiens; identical to SEQ ID NO: 22813
  chr17:36102841-36105730
  binary

SEQ ID NO: 28691 - DNA, 900 bp, Homo sapiens
  chr17:36875885-36876785
  hypo
cgagggaggagggacggagagaccggcgtgggctggaacccctgggggatacgggagaagggccagaggagcctggagtggtcgggtcgactgaacccaggttccctctggccgcaggtcccccatcagcagcctccccgcactcttcgaccagacagcctctgcaccctgtgggggcggccagttagacccggcggccccagggacgactaacatggagcagcttctggagaagcagggcgacggggaggccggcgtcaacagtgaggaggggtggcgccggtcgggacgcctgccctagggccctaacagtcacctttctccccgaggtccccaagcttctttaaggttccgcccttaggccccgccccagccttgactctcggccaccccgggcctcacctcccatccctgccaggccacacgaccggccctggtccctcagcgccccacctttggccttcgtggcctccgggccccgaccttaccaaaccgcaacttccgcccttctctcctgacccgtgtggcctcgaccccagcctcaggctccgccccaggtcttcacacctgtggctccccaagtcccgcctctcttctcagagctcacctgtgtccctccttaggatggcgccgccttttcaagggctgagcactggctcccctccaggccccgcccccggtcccctggccccgcctccgccccctcgcccctccctcaggttcctcgctctctccgcagtcgtggagatgctgaaggcgctgcacgcgctgcagaaggagaaccagcggctgcaagagcagatcctgagcctgacggccaaaaaggagcggctgcagattctcaacgtgcagctctctgtgcccttccctgccctgcctgctgccctgcctgccgccaac

SEQ ID NO: 28692 - DNA, 727 bp, Homo sapiens; identical to SEQ ID NO: 23104
  chr17:37321167-37321894
  hyper

SEQ ID NO: 28693 - DNA, 135 bp, Homo sapiens
  chr17:41278562-41278697
  hypo
cgactttttccgtgtctccggacagctaatcgttttagtgacaggatgagagagcccttcgtgttctgagggaccgagtgggcgaaaagcgccggagagttggagagtctgtggttcagaatgcgaggtgacaac

SEQ ID NO: 28694 - DNA, 111 bp, Homo sapiens; identical to SEQ ID NO: 7015
  chr17:43121686-43121797
  hypo

SEQ ID NO: 28695 - DNA, 269 bp, Homo sapiens
  chr17:4436345-4436614
  hypo
cgctctacctgcaccgcgcccaagttgtgcagaagacagcagagacgtgcaacagcccgccctgtggggccaaggacaggtggggccccgcggggtgggcccagggctggtgagggacctcggacaggagagcccctcagccttagccctgagccgcctcaactcgtgcgccaccatcctctgtccccacagcctcatctttggggccatcacctgctttacgggatttctgggcgtggtcacgggggcaggagccacgcgctggtgcc

SEQ ID NO: 28696 - DNA, 1855 bp, Homo sapiens; identical to SEQ ID NO: 27717
  chr17:46620299-46622154
  hyper

SEQ ID NO: 28697 - DNA, 1577 bp, Homo sapiens
  chr17:46654966-46656543
  hyper
cgaaaaagtcgctggtgagaatggtgaagaggatggggaacctacttcaaaggcgcagggcccaccaggccataaaaatttatgggggatgtaattatgtggctctgaaaacaggcgaccgtaaatctccggcaatggcgagtttatagcggggacaattggcttccccagctcaacccccccccaacccatgcctccgaagtccctttggtgtaaagctccaggggtgggagggggaaggggtgcccacgcactcacccgtgctcacgtgaactttgcgcatccaggggtagacgacgggctctttgcacgcggagtgggacgggctggggtgcagggggttctgggcgcagggaggcggcggggggctgctgctgaccgcctcgcagcgctggccgggctccgggaggagggccccggcgggtggcggcgcaggagcccgaggggacagaccgggcggtggcgggggcggcgggggtggtggcggaggcggcgggggcccagggtcccggcaggccgcgtagcgctgcacggtgcacgccgcgcgccgcccgaagcccgcctccggctggaagctgctctctcgcctctggccgccggcgtagtacccgggcgagtggtcgctgggtaggtaatcgctctgtgaatattcctcgcatggagggaacttggggtcgacatagtttgagttgatcaaaaaagaactcatagccattaatttctgggaattgcccacaaaatatactaaaatttattccgacccctgactcgttttcctgtttccgaaagccctcctacttactgtcaagtgaacaaagttaggcgcccacgtgatcctccgagccaatggccgccccgcctgcgattcccggataaggaaatctgctcacccggaccccactccagccaaagaggtttatttccccttcttcccttccccctccccacccacccacccaacaccaggatttacatagggctcctgcggggcgaccccctccttgcctcgctctctccgggatcagagagagagcgagagagagagcgcgcgcaggttgcgactggagggcctgttggggcgctaggcagagcgcaaaccctagatcccttaagaagttggggctcccggtgtagccctcctgttctgcctcacctctgcccagcattctgtaccttccaaaggccccagtctcctcccctcggcgggagggagcgctagcaccctgcgtctctatggggagttaggttactggcgggttgggggctccgtctcgaaaggggaacccatacgggggccagagcacagagcttggggcttttctctgcagctggatggggaagggtaggggtgagagaggaggcgtccagagctagagggcgggtgcgcagagggacttgtcagagatgaatggaaccgcgggcggatcgataggaaattcatgcactaattcggggagacttcgccttccaaatctcatttagctgcacggttagctagactgtgtccgtcagtccgtctgtcccccttctcctatccactcctccctttaacccacacggcccaagcctggagaaac

SEQ ID NO: 28698 - DNA, 802 bp, Homo sapiens; identical to SEQ ID NO: 25245
  chr17:46659093-46659895
  binary

SEQ ID NO: 28699 - DNA, 1600 bp, Homo sapiens
  chr17:46687527-46689127
  binary
cggccttcctccgcaagacaaacggcctcgtctccagcccgtgccggcgctgctgataaatatttaaagctaaaaggccgagaggaagggtgggggcgggctgggggctcgcagcgccgtggtgccggcgaagagagatccgccgggaagcagagcgagcctgagagcaccgagcaaatatgggggcggggatggcctgctgggtcgcggcccagtgggtgcagccttccagggccgacctccggctgggagcactctggacgcggaaaggggcgcccagccgggaaggaggcgccttcagggtaatgtgccccggcccctggggctcaggacagctcggtgcgcggcgttacctgagcttcgcatccaggggtagatccggaagttactctcggccgccaagtccgagtccctctgctccttggcgcccgccgccttggcggagtcgccgggacacaccccggagaggttctgctcaaagggcgcgcagtgcatgttgaaggaactcggctcgagcccatagccggccgcgtagacgccggccgcgctctggcccgccatgccccccccgccggggtacaagccctgcatcgaggcggcgaaggaagcgcccgaacccgctccatagcccgggcgctgggggttggaagcaaacgcacaagaagtttgttctgggaaggctccggtagcgaaaaccgaacttgaggctggatatttagaaaataaagtattcgcataatacaatgaactcataatttggccggatgatttgtaggcagggacgttttagtgtcggttttacgagattccttgatatattacagaattagagtccagatttacaccaaaaaggaccccctttttcctctccggaccacgtgaccccgcccacgtgacgtcccctccgccaatggccgggccgtctccccacggctcccggtaatgtggaaaaaattgtgtggcgttggatttataaaatatgatcaataatgaatgggaaagccgagccctgtggattggggctgggggctcaagggccgctgccgactcccgcgggctggaggccgcttgcaggcgagatttggggaggaagagattgagtggaagggaaaataaataacctcggggcgatccgtgtcaccctccacccatcctcttcagcccgttaccgagcgagagacaaacgcagggattgaatgcacgcaactgggtgggtgggtgcttggggcaggtctgttctttattaaaccaggccaattctgcacggcaaggccttttggggaagttggtccggttctcccaagacgaggaatgaggcgagcctggctcacgactctgtctctcttggtgccccagatatgcgggcggagatggagcaagtcttcctaggtgctcctagggcacaggatccagcccacgggccttggacgctgccgtttctggtggcaaaaaaaaaaagaaagaaagaaagaaaaagaaaaaaaaaggtttgaaagtaaaagaaaaagggggttgggagggtggggagagaaaggaagggtggaggttggcccgggcgcgctgctctcccggttcccggaggcggatgcctcagtggagc

SEQ ID NO: 28700 - DNA, 1053 bp, Homo sapiens
  chr17:46690001-46691054
  binary
cgagctggggggttgcagaggggagagaggattgggaggggaaatgaggacgcagcgagagagagcgagagcgagagcgagcgagcgagagagagagagagaagggagacagaaagaattacggcgtgaataggcagtttcatgttgttgggagaacttagcagaaatcggtaccttggtcattacaaagaagcacgttcaaaggaaaaaaaagacaattgcacaaggaggctttttacacggggaggggaggggcatggggggctcagccgggcctttgccgctcgccctcacagggcgagggagcctttgcttaaatccttttctttccccccggcccccaagagaagggaaggagatccacggtagctcacacacagaagctattacgagatactaccactagcggggactggcgcggcgggggacgctgcggtgggaggcccggctcctggccccgctagcggggccagagctctctcgggcaggggcgcgcggcggcggcgcggccgggacccgcggacgtgcgggcggccgcggccctggcagtcccagctgaagcctacttcttgtcgcccttctgcgcgtcgccctcgtccgccgcctctggggcccgctccagcttctgtttctccagctcctcctgctcgcatttgctgctggggaacttgtctttgttgttctcttttttccacttcatcctccggttctggaaccagattttgacctgtctctctgtcagtcccagggcgtgcgatacctcgattcgccgcttacgagtcagatagggattaaataggaactccttctccagctccagggtctggtagcggctgtaggtctgtcggcctcgcctgcgtccggcggctgctgggaatgggggaaagggcgagacagaggggaggggagggtgggggagggggcagggacggagaaggttggaagattcgtgaacgagcctgggagaccattataataagggcaggggaccttctaccccgtgcgggggcggggggggcgcaagaaggccgcggtcggcggaggaggaggggc

SEQ ID NO: 28701 - DNA, 1374 bp, Homo sapiens
  chr17:46691218-46692592
  binary
cgggtggggacgaatggacccaccttgaaaagcccccagagcctctgccccagaagaaaagtttcttcagggtaattaaactataaagcaattgagaagtgcaaaagttgagcgcccccactcccaccaccctctcttcactaccccccataaaacagtaaaaggggaaaaaaaggaggagaagaagaagaaaagtaaggcaggatgaggggtttatagattcaggaaatgtttctaagcgacccccttcaagggaaagaaaaaagaaagaagaaagaaagataagaaagaaaggggaaaagcggcaggcgatcggaacggagccggcaagtcttccagaagctggaggaaatgcgccccggcctgccaggccttgggcccttccggccccctcctgcccttgtcggccccgaggcgagctcaccttgcgggcgcatccaggggaagagctgtgtgggcgacgggctctgctcggagccctcggcctcctcgcccaggccgctggcggcggcaagcttgcagtctgcgtactgcaccaggtctggatcctgcgcaccgaataggctctggcgttgcagcgggtcgtagccgtagaaattgccggggtccccgtggcacgccacggcgcacgggttctgctggtagggagccgtggacagcgacgacggcccgtggtagaactcctggatttgcgacgggtgctggaagctgccgccgctgctgggaccgtacaccacggtgggtcggccgcccaggtcctgggcgaagccgcagtcataataattggggcgcagggactccccggttttgtatttggagaacagtgagttgacgaaataagagctcattttattgaattttgaggcggcggcggcggcggaggctatagttgggggctgttggggagggggtggggagggggaaagggagggagagagagaaaaaaacgcggattcgccggctcctagtcaccctcgccaggaaaggagagggaaagagaggagggaaaaaaagaaaagaaagaaaaggcgaagaagatctcgaagccgacacactttttgtggtttccaggaatagaaaaggacagagaagcctccaaaagtctaagcttgcatggcagccgcggctcgctcgccctccccccaccccccaccccccaaacaaaaatataccaccacttaaagaggtcctcgctttacatttcgaagaagggatgccagttcataaacagttttcggtgatttacttccctgcaaatgagttgtttcatattttgcactgtcttttcatgatcatttgcatccattagagaccccgcatcctattggcttcttcgtactcctcccggacagaacgcagagcgagggtgagagc

SEQ ID NO: 28702 - DNA, 1190 bp, Homo sapiens; identical to SEQ ID NO: 24069
  chr17:46795376-46796566
  hyper

SEQ ID NO: 28703 - DNA, 1140 bp, Homo sapiens
  chr17:46800174-46801314
  hyper
cgggggcggtggagaccaccagcctggaacttcaagttcaatggcaaagtccctgaccctccccccaggctgggcgccagcattattctaggggcgattaaactcttttgctgccccctgtgcacctcccagttcgggggcagtttaggggaggagagaaggtaatggtggaattctttccctcactctcccccgaccacttcgtcccctccccctcatcccctctacacagaactaactggtagggagagaggaagaaaggctggcatcggttcctcattggatgttttaaatctgtctcaggcccaggccagtgcctggggggaggggcggggtgtcctgcttttgggctagaggcccggggccgctcccgagctttctcccctcttccctggagagcgactgttcgggagggtgagaatggtataaatttcaaaaacaacgaaaccttcttttgccccctccgcagcagtcgcctccgggctttattgcaagtttacggtaacgagttcatctatttaattcgcggttgcagctcggggatttctattagacaggacgggttggggccggggggcacagggtctcccctgaaggaaacccaattagagtgcagcacttagcaccttcaatataactttaatgaagggggggaggggagctgcagggaagagaagtttgctctaggttggggaaggaaagctggagctgctcccgagaactggggggcctggatgaggctttttcctgcttcgagggctttccagcttccggcccgggaactactatttggagtagggatcgcctgcagggaaggcggggcggattctcggctggcggcggcctcgcagggttcccggaagcgctagccagccggagtaaaacccgaaagatggagcctcaggttcgcgctctgcgttgcgggtgctggaaccgagattcaaaaagagcttccggaggtagtttctacgcattgcgccactactcccttattcggcttctggaggcctaataaaatccacttgctttggagttagaaattatttcgggcctggagcccgcgtagacgcgaccctgtgatcccatttcgtagcttgctgagagattcgctgcgggagtttggctctgagggaggggaac

SEQ ID NO: 28704 - DNA, 1436 bp, Homo sapiens; identical to SEQ ID NO: 26486
  chr17:46801836-46803272
  hyper

SEQ ID NO: 28705 - DNA, 292 bp, Homo sapiens
  chr17:46804122-46804414
  hyper
cgctcctcccacccaggcaaggagatctcttaaggggtagcgctgttcttcaccttggcgagaaccttcttctctttgacccggcggttctgaaaccagatggtaatctggcgctccgagaggctggtggctgccgagatcttgcgcctcttgtccttggtgatgaacttgttagccgcatactcccgctccagctcccgcaactgccccttgctgtacggaatgcgtttcttgcggccgcgacgaaaggcgcaggcgtcaggagggtgctgcccgctggagtctgcgcggc

SEQ ID NO: 28706 - DNA, 819 bp, Homo sapiens; identical to SEQ ID NO: 24071
  chr17:46810263-46811082
  hyper

SEQ ID NO: 28707 - DNA, 1406 bp, Homo sapiens; identical to SEQ ID NO: 25251
  chr17:46824276-46825682
  hyper

SEQ ID NO: 28708 - DNA, 231 bp, Homo sapiens; identical to SEQ ID NO: 25252
  chr17:46826849-46827080
  hyper

SEQ ID NO: 28709 - DNA, 397 bp, Homo sapiens; identical to SEQ ID NO: 25253
  chr17:46827345-46827742
  hyper

SEQ ID NO: 28710 - DNA, 543 bp, Homo sapiens; identical to SEQ ID NO: 23106
  chr17:49021800-49022343
  hyper

SEQ ID NO: 28711 - DNA, 104 bp, Homo sapiens; identical to SEQ ID NO: 24074
  chr17:49229457-49229561
  hypo

SEQ ID NO: 28712 - DNA, 892 bp, Homo sapiens
  chr17:50235175-50236067
  binary
cgacgggaaaacggggggaaggggggagcccgacacggcacacacacatacacactcgcacacacttccgagcgagtgcacactcgcactcccacccgacagccggccagggacagtcacccccaagatcaatatcgcagtttgaattgttccggcaaatctcccctcgggctcgacggatgtgcgccccagatgtgctgacacatgtccgatgcctcgctgccttggaggtctccccgctcgcgtgtctcttctcttcgcaccagcggcggaaaccgcactagcagcggcggcggcggcggcggcggcagcagccacctgaagccaccaacactgggctcttccagcaaaaacgagaccccgattcgtctggcgccccaagaagacatagacgatagccccccgccgggctgcgccgtgcaattccgggctcccgggagcgcgtagctcgctggctaagcccaggcagtccgcggcaagttgccctcgaagtccgcccccctcaccggggcatggtcggagggtggctgctgcgctccggggcagttcttctcctgcttccggggggcggggaaggagcagacacagcagacacacagagaaagagaggcagggattattgcccgaaaccgccagccgccggcagcctccgccgaccctccctgctccccaggtccgcgcgcagcctgcagcctctcagccgggttccggcagtgcgtccagggcgccgaggggaagggctgggccccggggactggggcgcggtgggggcacacagactctccaggtcgcgcgcgcccttcctgctcctctgctattttcctgaactccccagaacccccagttgcctggcttccatcgcccgcaactagcgccgctgtcgagattttcc

SEQ ID NO: 28713 - DNA, 213 bp, Homo sapiens; identical to SEQ ID NO: 6474
  chr17:5269074-5269287
  hypo

SEQ ID NO: 28714 - DNA, 560 bp, Homo sapiens
  chr17:53341227-53341787
  hyper
cgtcccactgaaaaacggttttctttcatttgtgcccattcgttcttgcagccccttccccagatcgaagactagggtcttagtaaggagaggtaaggagggaggggaagaacctgcctggccccccgcggagctctgcagggggcgtcgcggctgcacgccagcgcccgcaccaccccaggcgggaagggagttatcacacagggggtcgcacgcagatctcggggaccgtgggtgccacgaggtcaaactggcagagggagacgctgcagctgctgtaacagcaaggaaagccgaagcccccttaggggatactttacaaaattattttaatcaccgtgcaaacctaataacttgacccaagcgcaatcacctgtattcacccagagtaaatattcctaaaatcccgttcagtgtgtctgtgtctctcccgcctctttccgtttcaggcaaatgtctaccccccctctccccccaccgttaacacctctctgcagcgtgggaaacagtgcccagcagctcagtcctccgcttcccgctctgctttttgcatcccattc

SEQ ID NO: 28715 - DNA, 140 bp, Homo sapiens
  chr17:59467400-59467540
  hyper
cggcccgatcctaaggaagcccctgcttttcttgcgcctgccggtgctcttctcccgcccgcctggccctgctgtcagcgccccctagtgccgggccggccgcgcatgagggcggtgggacagatcgcccacaactcctc

SEQ ID NO: 28716 - DNA, 910 bp, Homo sapiens; identical to SEQ ID NO: 25260
  chr17:59531682-59532592
  hyper

SEQ ID NO: 28717 - DNA, 425 bp, Homo sapiens; identical to SEQ ID NO: 6477
  chr17:66440125-66440550
  hypo

SEQ ID NO: 28718 - DNA, 400 bp, Homo sapiens; identical to SEQ ID NO: 23521
  chr17:692558-692958
  hypo

SEQ ID NO: 28719 - DNA, 546 bp, Homo sapiens
  chr17:70657377-70657923
  hypo
cgccccctggagttgtgcagtgggacactcctgcttgagcgcagattgctgctcagcctggggtgtagttctggggttcgaggtgcacgctctcaggagaggtagtggagagagtcatgggtttctctgagaattggcaagcgaagggacggcaacctgcagccttgctctccaggctatattccctggccggttgattatgaaaggagaatggcatatccctgacaagccctgcttcaccccggctttcagatcctcccatgtgcgatgagcgtgtgtgttcttgtgtggcaggcccttacatactgttttgattgttatcatcttgccgtgaaaggcctgattgttcaggcctggagatgacatcaccggcttcccactagggcagcctgtcgaggtgtttgatgagcctgcaggtgggaaggggctgggtactccccgcagggctgcccggccctacctgctcagaggagctggcttagcacgcaagggatcttcccccaccctcttggtgcagttctcggaaacttcttggtgcaggctggc

SEQ ID NO: 28720 - DNA, 603 bp, Homo sapiens; identical to SEQ ID NO: 25268
  chr17:73073429-73074032
  binary

SEQ ID NO: 28721 - DNA, 783 bp, Homo sapiens
  chr17:7348518-7349301
  hyper
cgaaggggcagtgacggggccagcggtcgtggccaggcaccagggctgcacttattctctcctcccccaggcgtccgcggctcggaggcggagggtcgactccgggagaaacttttctctggctatgatagctccgtgcggccagcgcgggaggtgggagaccgtgtcagggtcagcgttggtctcatcctggcgcaactcatcagcctggtgagggcgcgcggggggtggaggtcaggccagccgaccggccgggggcgtggctttaggcaaggccggaccagggacaggctgggggcggggcctgggacgagaccaggctgagatggaccagcctttggtgaagattggatcgaaatcagaccaatggacaagctctggccgtgggtggtggacgggcctggagtagaactgggtagggtgaaggacggacctgtgatcggaccttaaagtggggctggggacgaggcaggggctgggggacggacctcgacgtagggccacatgagtcctgagtgcccagggtggggcggagcttggtgctcaggggtcaataaatggcagcgggtggaggttcggggctgggtggattatgagctgaaggcagggccggggacagagctaggcggagggctaggcaggggcgggtctggtaggttgataggctgggagtgtagacggcaggaagaggtgtttctgagatagaggcaggtcttaaactaacgccgcttctgggaggtggacttggacccgagaggatggggctcagaaaaagggggcggc

SEQ ID NO: 28722 - DNA, 386 bp, Homo sapiens; identical to SEQ ID NO: 11264
  chr17:74086716-74087102
  hypo

SEQ ID NO: 28723 - DNA, 73 bp, Homo sapiens; identical to SEQ ID NO: 6484
  chr17:7493149-7493222
  hypo

SEQ ID NO: 28724 - DNA, 1442 bp, Homo sapiens
  chr17:75369050-75370492
  binary
cgcccggggaaggggaggaatctcttcccctctgggcgcccgccctcctcgccatggcccggcctccacatccgcccacatctggccgcagcggggcgcccggggggaggggctgaggccgcgtctctcgccgtcccctgggcgcgggccaggcggggaggaggggggcgctccggtcgtgtgcccaggactgtcccccagcggccactcgggccccagccccccaggcctggccttgacaggcgggcggagcagccagtgcgagacagggaggccggtgcgggtgcgggaacctgatccgcccgggaggcgggggcggggcgggggcgcagcgcgcggggaggggccggcgcccgccttcctcccccattcattcagctgagccagggggcctaggggctcctccggcggctagctctgcactgcaggagcgcgggcgcggcgccccagccagcgcgcagggcccgggccccgccgggggcgcttcctcgccgctgccctccgcgcgacccgctgcccaccagccatcatgtcggaccccgcggtcaacgcgcagctggatgggatcatttcggacttcgaaggtgggtgctgggctggctgctgcggccgcggacgtgctggagaggaccctgcgggtgggcctggcgcgggacgggggtgcgctgaggggagacgggagtgcgctgaggggagacgggacccctaatccaggcgccctcccgctgagagcgccgcgcgcccccggccccgtgcccgcgccgcctacgtgggggaccctgttaggggcacccgcgtagaccctgcgcgccctcacaggaccctgtgctcgttctgcgcactgccgcctgggtttccttccttttattgttgtttgtgtttgccaagcgacagcgacctcctcgagggctcgcgaggctgcctcggaactctccaggacgcacagtttcactctgggaaatccatcggtcccctccctttggctctccccggcggctctcgggccccgcttggacccggcaacgggatagggaggtcgttcctcacctccgactgagtggacagccgcgtcctgctcgggtggacagccctcccctcccccacgccagtttcggggccgccaagttgtgcagcccgtgggccgggagcaccgaacggacacagcccaggtcgtggcagggtctagagtgggatgtcccatggcccccatccaggcctggggatatcctcatccgcctcccagaatcgggccgtgggggacagaaggggcctgcgtgcgggcagggagagtattttggctctctcctgtcttcggggtttacaaagtgtgttgggacttgcggggctgctctgtccaagcctgggtctggcgtccgcgtctctgagcctgtgagtgcgtgcgctttcctgcgtcctcttgactgccggtgctggggctctgc

SEQ ID NO: 28725 - DNA, 148 bp, Homo sapiens; identical to SEQ ID NO: 5760
  chr17:76034983-76035131
  hypo

SEQ ID NO: 28726 - DNA, 304 bp, Homo sapiens; identical to SEQ ID NO: 24089
  chr17:76137872-76138176
  hypo

SEQ ID NO: 28727 - DNA, 478 bp, Homo sapiens; identical to SEQ ID NO: 11267
  chr17:76215753-76216231
  hypo

SEQ ID NO: 28728 - DNA, 196 bp, Homo sapiens; identical to SEQ ID NO: 11268
  chr17:79060680-79060876
  hypo

SEQ ID NO: 28729 - DNA, 582 bp, Homo sapiens
  chr17:79099756-79100338
  hypo
cgtgcggcgtctggggctgacggggccacgtgtccttcgccacttcttccagcatgtccccccggggtccccaggggctgggcatcctggcccaagcaggacagaaccctccctccagggtccttcgaagcagggtctgtctccctcaagccccaaagcgagggcttagcagagtgtggggttggcgcggggctgcagggtgctggctgactgcctcggggacagagaacaggccagcttgacagtacgcatctcttcgtctaaacctgcaaagtgggtgtcaaaccattgtcttcccaatttttcaaaaacgtcataaaatccctctgcatagtggttgtctgatgctgcatgagatgaacctggccggtcctcgcaagccccctgaggcaggacccgccctatgcccttccttcaggggaggggcctggcctagggcttcccggccgctggcccgcgcccgccctcacctgtgcacgaaattgttgcgatgaaggtgcaggacgccacaggccacctcacaggccatgcgctgcagggtccgggggtcgggagccatggactccgccacccggcagctcc

SEQ ID NO: 28730 - DNA, 1194 bp, Homo sapiens; identical to SEQ ID NO: 11271
  chr17:79655135-79656329
  hypo

SEQ ID NO: 28731 - DNA, 426 bp, Homo sapiens
  chr17:79769253-79769679
  hypo
cgggcgctgactggctgtgcccacagcaagctgcactgcacccgcaatgccatccacgcgaatctgtttgcgtccttcgtgctgaaagccagctccgtgctggtcattgatgggctgctcaggacccgctacagccagaaaattggcgacgacctcagtgtcagcacctggctcagtgatggagtgagcccccctcggcggccccaggcaggtgggtgggtgggcagccaggcaggtggccacgtagccgcgctcacactgcacctgtaccaggcggtggctggctgccgtgtggccgcggtgttcatgcaatatggcatcgtggccaactactgctggctgctggtggagggcctgtacctgcacaacctgctgggcctggccaccctccccgagaggagcttcttcagcctctacctgggcatc

SEQ ID NO: 28732 - DNA, 313 bp, Homo sapiens; identical to SEQ ID NO: 24098
  chr17:79913147-79913460
  hypo

SEQ ID NO: 28733 - DNA, 553 bp, Homo sapiens; identical to SEQ ID NO: 26514
  chr17:80294440-80294993
  hypo

SEQ ID NO: 28734 - DNA, 210 bp, Homo sapiens
  chr17:80333059-80333269
  hyper
cgctggcgccgcggacggcgcgcatcgtcaactacctgaccacctgcctcacctacggcaacagctgcgccaaccccttcctctacacgctgctcaccaggaactaccgcgaccacctgcgcggccgcgtgcggggcccgggcagcgggggaggccgggggcccgttccctccctgcagccccgcgcccgcttccagcgctgttcgggcc

SEQ ID NO: 28735 - DNA, 365 bp, Homo sapiens; identical to SEQ ID NO: 11274
  chr17:80452529-80452894
  hyper

SEQ ID NO: 28736 - DNA, 748 bp, Homo sapiens; identical to SEQ ID NO: 24101
  chr17:8055144-8055892
  hyper

SEQ ID NO: 28737 - DNA, 910 bp, Homo sapiens
  chr17:80571137-80572047
  hypo
cgcccccgactacagtggtgggagcgggaggtggccaggggttcacacaggcatcaacgccaaacacagggtgggtatgggtcagggctgcgttccacagggcacaagccgcctgtccccgcaagacatcccagggccacaggggagggaggacagaccagaaacgcagccggagtcatccatgcccacgcacctgtacgatcagacaggaaagctgctgagtaggcaccgtctgaggcagtcactctggagtcccttcgcacccacgtccggggcacaggaggttcgtgggggaggcagcagcccggccttgtttcccatacactgcgcttcccatcagttccacttgaaaagcagctgcgctcccgagtccgccggcctagggacaccgtgtccttgccgctctacagtgatttttaaaaagcacatgcctggggagggccggtgccgccagggcctcacatgaggcacgtccgtgcaggccctcgccacgttcctggtgaacgggcctgtgacacagccccgccgtccgcatcagttctgaggctgttcacgtgcactgcgagaaaacccacccttcttgcatgcatttcccccagattcatgtttatcaactggtaattacgctcctactcccccacccagagtcagatctcaagtgttagacaagccagggtgacgccggctcacttgaagctgccacttcaacatgcagggacattgctgctgccagccaccctccacctccacaggccagcaggagcctcagacctcccagagccacacaggcctcctacagatgcatttcctccctccctcctccagaggtgcccttggggcacagggagagaggagggcaggccgccccgtcccgacacagggagagaggagggcaggccgtcccatcccc

SEQ ID NO: 28738 - DNA, 275 bp, Homo sapiens; identical to SEQ ID NO: 23530
  chr17:80747037-80747312
  hypo

SEQ ID NO: 28739 - DNA, 52 bp, Homo sapiens; identical to SEQ ID NO: 7047
  chr17:80794418-80794470
  hypo

SEQ ID NO: 28740 - DNA, 1173 bp, Homo sapiens; identical to SEQ ID NO: 23533
  chr17:80797632-80798805
  hypo

SEQ ID NO: 28741 - DNA, 177 bp, Homo sapiens; identical to SEQ ID NO: 11281
  chr17:80859381-80859558
  hypo

SEQ ID NO: 28742 - DNA, 178 bp, Homo sapiens; identical to SEQ ID NO: 11282
  chr17:80860241-80860419
  hypo

SEQ ID NO: 28743 - DNA, 870 bp, Homo sapiens; identical to SEQ ID NO: 22816
  chr17:8868587-8869457
  binary

SEQ ID NO: 28744 - DNA, 498 bp, Homo sapiens; identical to SEQ ID NO: 6494
  chr18:10725385-10725883
  hypo

SEQ ID NO: 28745 - DNA, 92 bp, Homo sapiens
  chr18:13036746-13036838
  hypo
cggcagcagccttgagggcagacattaggggactcccagtctttgtccggaccggggtttcctgggatggggggcaagcggtcctggggcac

SEQ ID NO: 28746 - DNA, 340 bp, Homo sapiens; identical to SEQ ID NO: 22817
  chr18:13823932-13824272
  binary

SEQ ID NO: 28747 - DNA, 109 bp, Homo sapiens
  chr18:14450341-14450450
  hyper
cggctcagcactacgttcacgcgcccgcgcccgcgcccgcgcccgtggccgcgcgggccccagctccacgcagcgctcacagaccgtgagcccgcagggcagtgtcacc

SEQ ID NO: 28748 - DNA, 76 bp, Homo sapiens
  chr18:14450710-14450786
  hyper
cggccgcggtcgggctgcgccagccgggccagcatggagcggaagagcccgactgctttctggtactcgctcgcgc

SEQ ID NO: 28749 - DNA, 49 bp, Homo sapiens; identical to SEQ ID NO: 11287
  chr18:14450819-14450868
  hyper

SEQ ID NO: 28750 - DNA, 982 bp, Homo sapiens; identical to SEQ ID NO: 23112
  chr18:18822154-18823136
  hyper

SEQ ID NO: 28751 - DNA, 1823 bp, Homo sapiens; identical to SEQ ID NO: 22821
  chr18:32556625-32558448
  binary

SEQ ID NO: 28752 - DNA, 1197 bp, Homo sapiens; identical to SEQ ID NO: 22822
  chr18:44335955-44337152
  binary

SEQ ID NO: 28753 - DNA, 701 bp, Homo sapiens; identical to SEQ ID NO: 23118
  chr18:44777611-44778312
  hyper

SEQ ID NO: 28754 - DNA, 800 bp, Homo sapiens; identical to SEQ ID NO: 23121
  chr18:47339411-47340211
  hyper

SEQ ID NO: 28755 - DNA, 1388 bp, Homo sapiens; identical to SEQ ID NO: 23122
  chr18:55104759-55106147
  hyper

SEQ ID NO: 28756 - DNA, 264 bp, Homo sapiens; identical to SEQ ID NO: 25303
  chr18:55850838-55851102
  hypo

SEQ ID NO: 28757 - DNA, 365 bp, Homo sapiens
  chr18:57069721-57070086
  hyper
cggttcggtgttgaagccaaatctcagtctgtgttgtgacactgccattgctgccgcctgcagtaccactgccgcatctgactcacattctagaaggaaggtaggtttgtcccaatgaatgcagcttggggcagctgccttgtggagaggtgactgaggccgctgtgctgaggctccctgggcgattcaactacaccatctgccgtgtcagcttggaactgcaggagacgctagaggggaagacggagaaaggaagggaaacaaagattgatatgaccatatggtctgcatattgagcttgctgtcttttacatttgtgacttagaggaacctgtatcaagaaaatgtcattattcttattccac

SEQ ID NO: 28758 - DNA, 202 bp, Homo sapiens
  chr18:57365422-57365624
  hyper
cgccgcgcacatcagagctggaaacgcccccccccatcaaatgagacacgtgggggcaaattaattacaggtgctgctacctgctagtgtatgcagccgcgttgataggtaacaagaaaacggaggaggggggccgtaaatcggctcccttgacggtgaccctaattgtaattcgtgtgtcagcaacttaacactttgttgc

SEQ ID NO: 28759 - DNA, 68 bp, Homo sapiens; identical to SEQ ID NO: 11301
  chr18:60430701-60430769
  hypo

SEQ ID NO: 28760 - DNA, 943 bp, Homo sapiens
  chr18:67068411-67069354
  binary
cggcggcggacggcggctctcgactccggagagcggatcgcggggcgcaggagcccgatcgcgctggccatggcctccaactttaacgacatagtcaagcagggctacgtgaaaatccgcagcaggaagcttggggtgagtggctcgctcggcttgctccttccccggcgctcgttcggcccggctggctgcctggggggggggcagggagaggtgacccgtgcgggtacagggcagagagggacccggcccttaggcggatggcccgcttgttgcttggccaggtgggggcccacacctgccggggggctccgcagacggacctggggactccaggagcgcctgagtccccatcctcgagtgcaccgggctgtcttcgaccgtgcggggaagtcagtagacgaaaggggttgtcagttccaacgaggaacgtgccttggaggaggtttctttgcggtgctatccacgatggtctgttctcaaaagtgtgcgcctttcgggtggaactgctgtgtgtggcgacgctcgcgtgtgtttagaatcaccattttctggtctccgcttcccaagctcaattcgaaattcccgtctgatgccctcccagcgccgcgcgtccctgccggctgtagtttagggcgccttcgccgtggccgagggcggctcccgcgccccgcaagtgctcccctacccggggacccgcgcccgcgtgcaggcaggtgtgtgccccgcgcccgcccgcggtcactgctccgtgacggcaaagttgatggagacctttccctattcttgagagatgcgctgcctggcttgggagggaaaccgtgtagaacccaagggttcaaaactattctagtgaccagacgaggcggtaggagggactcacgggaggcagcgggacaggaggggctgtcacctgggcgggagcagcctagacttgggacgc

SEQ ID NO: 28761 - DNA, 1989 bp, Homo sapiens
  chr18:70534260-70536249
  binary
cgcactgaaagaccgttctccggcaggttttgggatccggcgacggctgaccgcgcgccgcccccacgcccggttccacgatgctgcaatacagaaagtttacgtcggccccgacccgcgcgggactgcagggtccgccggagcgcggcgcagaggcttttcctgcgcgttcggccccgggaaaggggcgggagggctggctccgggagcgcacgggcgcggcggggagggtactcactgtgaagcacgctgcgcccatggatcatgtctgtgcgttacaccagaggctccgggctccactaattccatttagagacgggaagacttccagtggcggggggaggacagggtcgagaggtgttaaagacgcaaagcaagaaggaaataaaggggggccgagagggagaccgagaggaagggggagctccgagcccacgctgcagccagatccggatgagtccgtcctccgccccgggcgggctctcgctctcgctggccctcagcgccgcgcagccagcagcatccccaccgtgacgctcgcatcacacccgggcgccggccgccaccatccgcgccgccgccgtcaggaccctcctcccgggcatcgtcgccgccgcggggtcgggaggacgcggcgcgcgggaggcggcggtcgcagggcgagccccgggacgccccgagccggggccggggccggggagagggcgcagcgaggtgggggccagtccagaccgacggcagcgacggagcgggcggcggcggcggcgccggcggcggcggggtggctcagtccccagtctcagacgcgccgcgcagcaggtcggagcagcctccccgggaggatgtccagcggcagcgctcctcgctccagcccttggggatcttccgctgaggcattgaaggcaggaagaaggggtccgtcatcggctcgccgggctgcgcgccacctctgctatcttgcggaaagaggagcgggtgggtgggcgtctgggaggcgggctggagggcggtgcaggggagcggggcggccggggggggggccggggggcggggaagggagggaggagaaaggagccggaagagggcagagttaccaaatgggctccttagtcatggcttggggctccacgaccctcctggaagcccggagcctgggtgggatagcgaggctgcgcgcggccggcgccccggggctggtgcgcggcagaatggggccgcggcggcggcagcaaggacatcccagccgcgcggatctgggggaggggcggggagggggtgaggacccggctgggatccgcggctcggcccgccagggcgcagagagaggatgcagccgcaaatcccgagccggatcctcgtgccggacggaaggcgtggaagcgggaggggccttcgtgtgaaaatcccttgtggggtttggtgtttcactttttaaaggttagaccttgcgggctctctgcctcccaccccttcttttccatccgcgtaaaggaactgggcgccccctctccctccctccctggggcgcaggtttcgccgcggactccgcgctcagcttgggagacacggcaggggcgcgccccagggaaaggcggccgtaaaagtttcgcggttgagcactgggcctgatgtccagtccccccaccaaattactcctgcaaagacgcgggcttcttgcaattgagccccccacctcgaggtatttaaaaccaccccaaggcacacacggacccccgttcccccgcgccacttcctcctacaggctcgcgcggcgcgttaaagtctgggagacacgagttgcggggaaacagcaccggaagagcccgggcttgtaaaatgcgaatcaatgaatacgaaataagggcaaccgcgaggcagcgccgggaagggctggagcgcgcgggggtgcagggagtccctccctgggcgccgcaacggcacctcctccctttcccggctccgtcccgccctccctcggcctctgcggac

SEQ ID NO: 28762 - DNA, 283 bp, Homo sapiens; identical to SEQ ID NO: 23126
  chr18:75362799-75363082
  hyper

SEQ ID NO: 28763 - DNA, 1045 bp, Homo sapiens
  chr18:75998625-75999670
  hypo
cgtggtgtgtgtgtgtgtcgtgtgtcgtgtggcgtgtgccgtgcgtgtgcgcaccgtgggcgggaggcgagaggaagcgcagtgggagccgcgggcaggcggtcgcagaggggcctggggaggcgaagcagcccgggtgggggcgttcgctggaaacggggcccctctgaagggcgtgggcagccggtgcctgcagagcgtggagagctgcggccgcctcacctgacacaattgggcagcgatttctcaggtccaaagagcggaccccgtgggcactttcctgacggaggactcggctcctgggagctccggcaacatcagcgacagtggagcccggtctcaaaagaccgacccggcggcctgagaagaaggaaggaggccgaggcgccgcagggaccctggcacctgcccctgacgcaggagtggacgcgaagggtgggcctggggcggaggctcgggagcggcgcggaggtgggagttggcagctccaggccggcgcatgtggaggagaggagggggcccttccacgtgactccgaggttggagcccccctgactggggggcggacagcaggtgttcacagaaggcaggaagagctggaagctggggtgagccagctcatgcgggtttccgggggctgtgcaggtggaaccatctagatagctggggagtctcacacccagagcgttttagacccaaggtggccttcatggctcccacgaatcccttcacggtttagaagagatcagctcagcaacgacgaatgccttccctcagttgtgccaagggggcagcgccaggtctcctgggtcagaaccacgggacagccacgggcattcttaaggctgccagcctgtgggtgtcacctggttcagccactttcggaggaagtcggtgggggacaagacccacttttgcagatttagaaaaggaaggcagaagtgtctgggcacgcggggaaacgcaaagacctgctgaaccagttcatttctaatcaaaaggagcgctggtgtggggtatgaagggcacgtcttcatgccgtgtc

SEQ ID NO: 28764 - DNA, 231 bp, Homo sapiens
  chr18:77285885-77286116
  hypo
cgcagtgggaaaggagttaactggtctcgaattctggggcatccctgtctcgtgccacagatgccaagcacagcagggcacggagctcctgggggccgctgcactcagcagcacagtgggcgggaggccgctgagcaaccagcagcctagggcatttgggtggggacgtgcgacccccacacagaacagagccgtctttctctctgcgttgtgccgaggccccgcagcgcc

SEQ ID NO: 28765 - DNA, 203 bp, Homo sapiens; identical to SEQ ID NO: 11304
  chr18:77336028-77336231
  hypo

SEQ ID NO: 28766 - DNA, 190 bp, Homo sapiens; identical to SEQ ID NO: 11305
  chr18:77512029-77512219
  hypo

SEQ ID NO: 28767 - DNA, 824 bp, Homo sapiens
  chr18:77635961-77636785
  hypo
cgatgtccggcacgcagtccccaggcgggcacactgcccagcagcccagtggcaggagctcagagctgacttgcttcttgcccaggtctggggttggtgcagcgcccgcagctcacgggccacagcagcggaaggtctgcggcattttggaccttgctgttgccggggcagtgggtgttggcgccacatccaggacccatctcccgcctggtgccgctgccatcacagtgaagctggactgaaacccacagacaggtccagccctgccgggcaggcgtgatcaggctgacactgcggaaaagccccactaggcaggtatgattgagctggcgtctccgaagggccccagccaggcagggatgatcgggctggcgctgtggaaagttgcaagcacactgtgtgggcacttggtggggctgggctgggtgcagagcacctaatggagaggagtcacctgcggcgtggccactgctgtgggctgcagttcccgggaaacagcagtggaaaccagcggcccagggacaggacaggggctgcaggtgctgagccgttgttcgacccagttgaattctaactcgtgacttggaacgattctgtcccgggaaggatgccctcttctgcatccacaggcagtggtgccctctgcgagcagcttgctcacctgtgtctgtgacgctggtgccctgagggcagggccagccccctctctcggcacagctgggtgaatcatcaacgacacccttggcaccgtgagcacttgcacctgcagaccgcctggtctcgctcttgggcaccagccgtgccaggcccgggccaccaactcc

SEQ ID NO: 28768 - DNA, 400 bp, Homo sapiens
  chr18:77644520-77644920
  hypo
cgatgcagtggaggagcagggctgggtctgggcctgggcctgggcgtggcagctccccaggcccacggggcaggaattctagattctgggattcctttcatcgttgctttttgtgttttctacctagagcggagaaatgtttgtggtttccaaagagaccggacacgcccaaggcccacagacacgtggcttcgtgatggggagccacgggggcaggggtccgcccggctctgtgttcctcgggggggctcatcctggggcccaggaactcgggagcggtttacccacaggttcctgtgcgtgggagcaaacttgcttttcccattcacagaaacacagtagcgtgcgcgggtcggtgatgcagccaagacaccatccctgaaactgtgataatgagagc

SEQ ID NO: 28769 - DNA, 675 bp, Homo sapiens
  chr18:77808879-77809554
  hypo
cgtcggctcagtgcctcctagaaagtggagtgtgggcacgtttgcaggggatccaaccaggcgtctgctcagtgcctcctagaaagtggagtgtgggcacgtttgtaggggatcccaccaggcatcagctcagtgcctcctagaaagaggagtgtgggcacgtttcagagaaaactggcttaggcctccctgtttctggcgtggccttccctgggagcgagttagggacacggaagctcacccgcttctgaatgggtccactcctggggatttccgcggccttccctgggagcgggttagggacacggaagctcacccccttctgaatgggtccactcctggggatttccgcggccttccctgggagcgggttagggacatggaagctcaccctcttctgaatgggtccactcctggggatttccacggcctttcctgggagcaggttagggacatggaagctcacgcccttctgaatgggtccactcccggggatttccatggccttccctggatgatccactcctggggattttccgcagctctccagatgacgtgcacgcacactaaacacccagaagttagggaggcactgatccagtgaagtcctcagatcaaccttgtgagctttttacaagtacctgtcactgttaaactgctgatgaaatgtgaaac

SEQ ID NO: 28770 - DNA, 652 bp, Homo sapiens; identical to SEQ ID NO: 24125
  chr19:1003171-1003823
  hypo

SEQ ID NO: 28771 - DNA, 1173 bp, Homo sapiens; identical to SEQ ID NO: 25316
  chr19:1004547-1005720
  hypo

SEQ ID NO: 28772 - DNA, 413 bp, Homo sapiens
  chr19:10370250-10370663
  hypo
cggcctgaccggccccccgccccgcccccaccccgcccccaggcctaaatgtgcacagcatgctcaagcaccagacgctggtcctgacgctgcccaccgtcgccttcctggaggacaagctgctctggcaggactcacgttacagacccctctaccccttcagcctgccctacagcgacttcccccgacccctaccccacgctacccagggcccagcggccaccccgtaccactgttgatgtgaagcacctcttctgagccaggccgagcccctggccgacttgggagcctcaggcccacgcccacccttcgaggaaggtgtcacctggaccccttcattccacggaggaagctgaggccacagggagcggccatcgccattgggaaggggcgactccacggaaagcccagac

SEQ ID NO: 28773 - DNA, 479 bp, Homo sapiens; identical to SEQ ID NO: 11316
  chr19:10395600-10396079
  hypo

SEQ ID NO: 28774 - DNA, 457 bp, Homo sapiens
  chr19:10405940-10406397
  hyper
cgatcgttgtgggccggagcagggcatttgatcagtggctgggccggcgctaagccccacttcaccttctgtgcccttcagaccggccagtggtggccgaacttgctgcctcgccccctggaggcgtgcgcccaggaggaaacttcacgttgacctgccgcgcggaggcctggcctccagcccagatcagctggcgcgcgcccccgggggccctcaacatcggcctgtcgagcaacaacagcacactgagcgtggcaggcgccatgggaagccacggcggcgagtacgagtgcgcagccaccaacgcgcacgggcgccacgcgcggcgcatcacggtgcgcgtggccggtaagtggcagctggggagaggcggggcgaggtatctgagagggggcgtgacctgggtcttggggcggccggccccgcctgcctccctctcggtcccggtagactagac

SEQ ID NO: 28775 - DNA, 263 bp, Homo sapiens
  chr19:10406914-10407177
  hyper
cggggcatgaggactgacttcgtgcctgtgggagtgcggggggcggtgggagaagccccccggagcttggccaccctccgcgagggtctccaccccgcaggtccgtggctatgggtcgccgtgggcggcgcggcggggggcgcggcgctgctggccgcgggggccggcctggccttctacgtgcagtccaccgcctgcaagaagggcgagtacaacgtgcaggaggccgagagctcaggcgaggccgtgtgtctgaacggagc

SEQ ID NO: 28776 - DNA, 316 bp, Homo sapiens; identical to SEQ ID NO: 23541
  chr19:10665634-10665950
  hypo

SEQ ID NO: 28777 - DNA, 69 bp, Homo sapiens; identical to SEQ ID NO: 11319
  chr19:10817637-10817706
  hypo

SEQ ID NO: 28778 - DNA, 985 bp, Homo sapiens; identical to SEQ ID NO: 11320
  chr19:1108654-1109639
  hypo

SEQ ID NO: 28779 - DNA, 865 bp, Homo sapiens
  chr19:1170985-1171850
  hypo
cgaggacaggcacacaggcacgggcaacacacaaaatacagacacacataaccgactcatgaacatgggtacacacaggcacacacacaacacaaacacgggtgcacaggcacacacaacacacaaacacggatgcacagacacgcacacaatgtgcacccataaaacacacgcgtatgaaacacacgagcaacacacacatgcacaggagcacacagccacaggcacgcacattcacacacacacaacgcacccacatccgtacaacacacacacagaacgcgcacacgtccgtacgacgcacacacagaatgcacgtgcgtacgtacaatgcacacaaagaatacacacatccatacaacacacaggcacacaacacacatgtgcatgcacatggcgcaacatacagatacacaaagacacgtgtacacacacatgcagagtccccagggcagcgctggcgtcatggggggctgcctccacaccgcctccaggagtgtttacagctgtggattacatgataccgcccccttcccagagctgatcccaccccccagcatgggggccccctgggagggggcctctgggagccggactggttctgtcgacacagtcgcctctttgttcggggcagagctcactctggcggtgttggcgtttccgcatgggccctgccggaggggcatccgtgactccgctggagccgggttgggccaagcccaagctggtcacacccctcacacccctggggttgggggaggccttaggcagcaagtgggtggggggtctaggggtggctggcgcaacctctctccacctcggtttccccgccaggtgagagggcagtgactgcccatggtcacgc

SEQ ID NO: 28780 - DNA, 705 bp, Homo sapiens; identical to SEQ ID NO: 23128
  chr19:11805261-11805966
  hyper

SEQ ID NO: 28781 - DNA, 785 bp, Homo sapiens; identical to SEQ ID NO: 23129
  chr19:11909173-11909958
  hyper

SEQ ID NO: 28782 - DNA, 941 bp, Homo sapiens; identical to SEQ ID NO: 22825
  chr19:11959378-11960319
  binary

SEQ ID NO: 28783 - DNA, 935 bp, Homo sapiens; identical to SEQ ID NO: 26556
  chr19:11998456-11999391
  hyper

SEQ ID NO: 28784 - DNA, 617 bp, Homo sapiens; identical to SEQ ID NO: 23130
  chr19:12075748-12076365
  hyper

SEQ ID NO: 28785 - DNA, 776 bp, Homo sapiens; identical to SEQ ID NO: 26558
  chr19:12098300-12099076
  hyper

SEQ ID NO: 28786 - DNA, 988 bp, Homo sapiens; identical to SEQ ID NO: 23131
  chr19:12163025-12164013
  hyper

SEQ ID NO: 28787 - DNA, 689 bp, Homo sapiens; identical to SEQ ID NO: 26560
  chr19:12175460-12176149
  hyper

SEQ ID NO: 28788 - DNA, 644 bp, Homo sapiens; identical to SEQ ID NO: 23132
  chr19:12203028-12203672
  hyper

SEQ ID NO: 28789 - DNA, 655 bp, Homo sapiens; identical to SEQ ID NO: 23543
  chr19:1226490-1227145
  hypo

SEQ ID NO: 28790 - DNA, 905 bp, Homo sapiens; identical to SEQ ID NO: 27764
  chr19:12266891-12267796
  binary

SEQ ID NO: 28791 - DNA, 585 bp, Homo sapiens; identical to SEQ ID NO: 11335
  chr19:12444060-12444645
  hyper

SEQ ID NO: 28792 - DNA, 287 bp, Homo sapiens; identical to SEQ ID NO: 11336
  chr19:1288529-1288816
  hypo

SEQ ID NO: 28793 - DNA, 197 bp, Homo sapiens; identical to SEQ ID NO: 11337
  chr19:1297611-1297808
  hypo

SEQ ID NO: 28794 - DNA, 298 bp, Homo sapiens; identical to SEQ ID NO: 23544
  chr19:12977267-12977565
  hypo

SEQ ID NO: 28795 - DNA, 1403 bp, Homo sapiens
  chr19:13617096-13618499
  hyper
cgccgccgccgccgccgctgatgctgaggctgccggggctgggagcgcggcggctggagctacgactgcggagacgctccacggcccagcccatcgggcggcggcggctcggcgcctcgggtcgggggctcagaaggcggctgcccgggccgagccggggatagcagctcgggacatcttcctggctgaccccggagaaggaggggcgggaggagggtgcgggggcggggcgcgggggcccggggaggaggggggaggggagagagaagcgaggcaaaaaataaccgaggaaggaatccaggcaatccccagtccacccactccggaaaaaaaaaaaaagagacagttaaaaaaaaaaaatccacccaacgcacaccccctttaagacgcgaacggtttgcaaaggacgccccccccgggacgcagtggaagcttcaaattcctccgaggtccgggtcaggctggcatcttgcaaaaggagtgcgctcggcccattaaaaaaaaataaaaaataaaaaataaaaaaatatatatatatttaaaaataaagaaagacgaaacccaggtctgggtggggagggcaaaaaaaaaaaaaaaaaaaattaagtgcccttctgttttgctggagttcctagaccttaaaaatgctgaaagatctgtagctccaaaaataaaataaaataaaaacaaagaagatgaaagggaagggaaagaggagggaaggggagtaagacgctccagagggttcctaaggagtcttcacaccgcagggtccaggtttaaaaaaaaaaaaaaaaattttttttcttcctgaatcaccaacggctgcctcttctgctcccggaggaagtgtgagtgtgtatgtgcgcacagcgtttcgctcaatggtgcctcatcttggggttaaattgcagcagtgaaatcctgaaaattcccaacagggggaaaagagagagagagagaggtatgcgccctccgcttagccactcaatagctgcccctggatgcggcaatgcctctccaccctccaaatccctccacctcctccttctctaggttttgctaaaataagactggtgtggagggttgcgggtagaagaaggtaaagaggaaaaaaaaatgggcgcaaaggtctgaaccactggccagcaaacggaaaaggggagcaattgatgagtttaacagtagaaggacccacccagagtgtcgacacatgagggcccgcgaccaatcgtggaggctcgtggaggcgcgggggtaccgggctcagcggagtttgtgggggagagaggggagcgtcgcatggttgggaggcagggaggggggaattggggtgcttcctcctcccctgggaggaaagcctgttttccaccccgttccatttcggttgcagacagccggac

SEQ ID NO: 28796 - DNA, 881 bp, Homo sapiens
  chr19:1482000-1482881
  hypo
cgtggaggatgggggacaggaggtgcagtccctcggggagccgccgcggcaggtgtagcaggaggcatggcagctggagcagaccctcagcgcgggcgccgccgtgtgcccaggcccagcggtcaccagccttgtgtggttgaagaaccgcggggggcagtaggccaggcagagctgtcccaggatgtaggcggggccgtcacacgctgctcggggacacgcacgcaaaggcccgtcagcttgccacccgcagcctgttactcgccacccgcccgcctggggccacatgcacgctgcccacggtggccgccaccgcctcccagcagtgggccctgccccgccggcactcaccctggcacagcccctctgtgtcccgctgcacacacgcgctgctggtcacctgggggcctgtaggccgcgctgtcatgtcctcggccgtcccatagagcagcagcgtgtagcggtacaacgtccctggacaggggtcgcgggtgggcacaggaggaaaaggaggctctcggcagcctggtcctggtagtccccgggctccctccccttcagctcccacgcggggccctggactggttcacatctctcagggaattgcacacctactgtgcgcctgtcactggacaccgacatctcccgggtgactgcacacctactgtgcgcctgtcactgggcacctacatctcccgtgttaccgcacacctactgtgtgcctgtcattgcacaccatctcccgggtgactgcacgcctactgtgtgcatgttctcttggagaaggccactgggaaccccttttgcagtgcggtcaccaaggctagctccagagcccctggggggaggttggagagccaagccccgcccaccacagcccc

SEQ ID NO: 28797 - DNA, 474 bp, Homo sapiens
  chr19:15343944-15344418
  hyper
cggtaggccggggagggggcggtggggtggggtgggcaatgggcaatgagacggagggcggggccgggacctaatatggcgggtcaggagggtctggaagacgaagaagagggacaggcaatgccaggtctaggactaggagggaggcgcgggcggtattagcggctggaggaggcttcgggaggcccggccgacggccgccgcctggtgctacccacccaggggcgcgcgaccctcccttcggtctggctccaaagacctagcagcactgacttcacccagctgtggttccaacggcgggtccagcggcctcggcccggcgccgtcctcctgctggcccaacaggcccgccagcccgcccctgtacgtctgtgattggacggcggcggccactgatgttcaagcgacaggtcctggcccgggagccaatctgcaggtgttgaggcccaggctccgagagcgggccgaggaggc

SEQ ID NO: 28798 - DNA, 882 bp, Homo sapiens; identical to SEQ ID NO: 23547
  chr19:16232459-16233341
  hypo

SEQ ID NO: 28799 - DNA, 225 bp, Homo sapiens
  chr19:1672908-1673133
  hypo
cgaggcacacgtggtcctgtgtggttggtgtgtttctgaatgaacagtgttcacgtagattcaggtgtgccacacgtgatgtatacggggcatgcttatgcgtgttctcgcatgctcgtgtgcattctagcatgtgtgctcactcctatacacaggtttgcatgcgtgtgctggcatgtccgtgtgggtgcacacagaggctgtgacatgttcgctcgttgccac

SEQ ID NO: 28800 - DNA, 196 bp, Homo sapiens
  chr19:16766722-16766918
  hypo
cgacaggattagtcacgtgcagcacaacctgtatacagggctgatccagcacagactagaaacattaaatgcttggtctgtttccaggaagttttgagaggcgctgctcagcaagacccttcccctagcgaaggatcgtgaaaacaggacctcccaccatcaacagatgccaatcaaacgttactcattccaggcc

SEQ ID NO: 28801 - DNA, 359 bp, Homo sapiens; identical to SEQ ID NO: 26570
  chr19:1775063-1775422
  hyper

SEQ ID NO: 28802 - DNA, 189 bp, Homo sapiens
  chr19:18331006-18331195
  hypo
cgtccaggcagtgactcaacaaagctcacccaggaaggtccgggagatgtactcggacacctggttcccggagcggctggtttcggacaggtgggtcaactcccggttcaggatccgcttgaactggggcggagagaaggtgaagaccgtgatgatggggcaccgtgggccgaggcaggtgagctcagc

SEQ ID NO: 28803 - DNA, 617 bp, Homo sapiens; identical to SEQ ID NO: 24142
  chr19:1856948-1857565
  hyper

SEQ ID NO: 28804 - DNA, 237 bp, Homo sapiens; identical to SEQ ID NO: 25350
  chr19:18807947-18808184
  hypo

SEQ ID NO: 28805 - DNA, 165 bp, Homo sapiens; identical to SEQ ID NO: 6511
  chr19:18963604-18963769
  hypo

SEQ ID NO: 28806 - DNA, 593 bp, Homo sapiens; identical to SEQ ID NO: 23550
  chr19:18989674-18990267
  hypo

SEQ ID NO: 28807 - DNA, 714 bp, Homo sapiens; identical to SEQ ID NO: 11345
  chr19:19616896-19617610
  hypo

SEQ ID NO: 28808 - DNA, 150 bp, Homo sapiens; identical to SEQ ID NO: 11346
  chr19:19769454-19769604
  hypo

SEQ ID NO: 28809 - DNA, 306 bp, Homo sapiens; identical to SEQ ID NO: 6515
  chr19:1977026-1977332
  hypo

SEQ ID NO: 28810 - DNA, 1111 bp, Homo sapiens; identical to SEQ ID NO: 22826
  chr19:1978023-1979134
  binary

SEQ ID NO: 28811 - DNA, 776 bp, Homo sapiens; identical to SEQ ID NO: 22827
  chr19:19843315-19844091
  binary

SEQ ID NO: 28812 - DNA, 773 bp, Homo sapiens; identical to SEQ ID NO: 23135
  chr19:19976556-19977329
  hyper

SEQ ID NO: 28813 - DNA, 118 bp, Homo sapiens; identical to SEQ ID NO: 6029
  chr19:20011652-20011770
  hyper

SEQ ID NO: 28814 - DNA, 291 bp, Homo sapiens; identical to SEQ ID NO: 23137
  chr19:20011910-20012201
  hyper

SEQ ID NO: 28815 - DNA, 845 bp, Homo sapiens; identical to SEQ ID NO: 26585
  chr19:20149660-20150505
  hyper

SEQ ID NO: 28816 - DNA, 949 bp, Homo sapiens; identical to SEQ ID NO: 26586
  chr19:20162601-20163550
  binary

SEQ ID NO: 28817 - DNA, 76 bp, Homo sapiens; identical to SEQ ID NO: 9339
  chr19:21512126-21512202
  hyper

SEQ ID NO: 28818 - DNA, 120 bp, Homo sapiens; identical to SEQ ID NO: 9340
  chr19:21541712-21541832
  hyper

SEQ ID NO: 28819 - DNA, 173 bp, Homo sapiens; identical to SEQ ID NO: 9341
  chr19:21542078-21542251
  hyper

SEQ ID NO: 28820 - DNA, 309 bp, Homo sapiens; identical to SEQ ID NO: 9342
  chr19:21579832-21580141
  hyper

SEQ ID NO: 28821 - DNA, 114 bp, Homo sapiens; identical to SEQ ID NO: 26591
  chr19:21580223-21580337
  hyper

SEQ ID NO: 28822 - DNA, 159 bp, Homo sapiens; identical to SEQ ID NO: 9344
  chr19:21688303-21688462
  hyper

SEQ ID NO: 28823 - DNA, 179 bp, Homo sapiens; identical to SEQ ID NO: 26593
  chr19:21688738-21688917
  hyper

SEQ ID NO: 28824 - DNA, 293 bp, Homo sapiens; identical to SEQ ID NO: 23138
  chr19:22018435-22018728
  hyper

SEQ ID NO: 28825 - DNA, 272 bp, Homo sapiens; identical to SEQ ID NO: 23139
  chr19:22018891-22019163
  hyper

SEQ ID NO: 28826 - DNA, 630 bp, Homo sapiens; identical to SEQ ID NO: 26596
  chr19:22034394-22035024
  hyper

SEQ ID NO: 28827 - DNA, 89 bp, Homo sapiens; identical to SEQ ID NO: 6517
  chr19:2204172-2204261
  hypo

SEQ ID NO: 28828 - DNA, 95 bp, Homo sapiens; identical to SEQ ID NO: 6518
  chr19:2224728-2224823
  hypo

SEQ ID NO: 28829 - DNA, 267 bp, Homo sapiens; identical to SEQ ID NO: 26598
  chr19:2273763-2274030
  binary

SEQ ID NO: 28830 - DNA, 803 bp, Homo sapiens
  chr19:23257778-23258581
  binary
cgtgagccaccgccccccgacgcctcagctcatttgttaattagcagtaattgcccgggtcagtgacacctcctacttgagcctctttccctgtccataaaatgcactaatactggggtgggtgggattgggaggtgggtcctggagctccatccaatcagtggcactggtgtaggaaccgcccgatcaggcgcgcagttggagaggagggcgtggcttccggcatttggcggggtctttgtctctcgctcccgccagagcttgggatcggtcttcactgttccgcgtcctctacctgggaaccaccgacccccgcccggcgactttgtcacagactctgttgccctgtgatctgcaggtcctgggagacgcacagccaagatgccagggcaccctggaagctgtgaagtggtgcgtatgcggggttgggcatcccttgaggcgagagcgggctgtgaaacctgcaggaccggcctccccacagtccgctcccgggtccgccgacctcagtcctctctggcgcagctcggccccaggcgtctctggccgcaagatggcggctgggcccgcggccgggacccccagcgtctcgccgcgtccctgctgggcgccctgtctggacctccctgggcagctctgcgcccgcagccccgagtatttcccagagtgcttagggatgccaggcgggtcatcagggtagaatcccgactaggtgtgtgcgtgggaggagctgcgacccgtggggttcccaagctttcctgttattttttttttcttttctttttagacagtctcgctctgtc

SEQ ID NO: 28831 - DNA, 120 bp, Homo sapiens; identical to SEQ ID NO: 23142
  chr19:23577711-23577831
  hyper

SEQ ID NO: 28832 - DNA, 137 bp, Homo sapiens; identical to SEQ ID NO: 23143
  chr19:23577972-23578109
  hyper

SEQ ID NO: 28833 - DNA, 68 bp, Homo sapiens; identical to SEQ ID NO: 6037
  chr19:23578240-23578308
  hyper

SEQ ID NO: 28834 - DNA, 702 bp, Homo sapiens; identical to SEQ ID NO: 6038
  chr19:24216103-24216805
  hyper

SEQ ID NO: 28835 - DNA, 601 bp, Homo sapiens; identical to SEQ ID NO: 6039
  chr19:2461998-2462599
  hyper

SEQ ID NO: 28836 - DNA, 273 bp, Homo sapiens; identical to SEQ ID NO: 24149
  chr19:2524648-2524921
  hypo

SEQ ID NO: 28837 - DNA, 561 bp, Homo sapiens; identical to SEQ ID NO: 22828
  chr19:2702445-2703006
  binary

SEQ ID NO: 28838 - DNA, 990 bp, Homo sapiens
  chr19:30015920-30016910
  binary
cgggggaaggagataggagagacccaaggcgagccttaggactcgcccctatgactatgactacgcgctgcgtccgaaccacatgtccaccccgcatttgccttcggggaccagaccgcgctccctcagatggctggggagggagcagactccgggtgaaggctgggggaggtaccgggatgccgagtacgccagagcaggcgggggatgggttccggcttcctgccgcctcggcatctcgctttgcaccgggcaaagaaggggccacgaccggcgaagagcgcgtggagacacagggacccgcgatccaggggcaggaaccccgccccctcccggaaacctcccgggccctgagtcgtgcccggcgctccccaccccaccccacccccgccgcccctgccgtcactcacggccgctgcgggctggctagcgtgtgcgctctccgcgccgcaggcacctgctcgctgggcgctgtgcgctcacttctccctcgcgcactgcagactcccggcgctgccgccgccacccagcgtagtctccggctgggcacagcgttccgcccttctcgcggccccgggcgcccacccatccgtcatggcccaggcctgggccaaacagcggggcagctggttgcccaaactggggtaaggagttgagggctgggagctgcagagaggaccgagggacacacggggagcagggatgagcggccgtctcgagccgtgcagactgggaagaagccagggagagtttgggtgggaggactcccaacccaagcgggtgcggggcggggctgtactccaaccagaaagacggtggtccctccgagcgacccccgaggagagagggggagcgctctggggcgggggcggggcgggctgtggcaggagaggggagggcgggggcgatgcagcggtggaggcggcttggcgcccagccactgaccgccccctcccttcccctcccctccccctctccccgcctctctcc

SEQ ID NO: 28839 - DNA, 1319 bp, Homo sapiens
  chr19:30017414-30018733
  binary
cggagccgatccgagcccacgcggccgccgcctctccgctcccgggcccccgccgccaccgcgccccccgcgggagatggaacagcggaaccggctcggtgccctcggatacctgccgcctctgctgctgcatgccctgctgctcttcgtggccgacggtgagcgcgggaactttgctgccgctgtggactcgggggggtctttgctggggccgccaccgagaagaagaagaaagagaacgaaccgggaagcttcgcggtctccagcaatcccgctgtgcagcctgggcccggaggggtagggagaggcgagcggcgaagggtcgccgcagcagcagcgccgcgcccgagtcgttcccagtcccgccggggccccggctgcggaaaggatgcctgcggggagcgggagtaggcgcgccccagccaggctctggcggtgcggccaggggcgggggagaagcacgagtcgcccctgccgccccgccccatccggagggaagcagtaggcagccgatggccggtccctgcctcggccctgcagccgcttccccgaactttgctagcccctccggccgtgcgccagggagcagctgcggggtggggggcacaaggccagccagccagagaccgactgcctcgctttaggttgccccaggcccccgacctacagctggtcacgcctctctctctctccccacccccagctgcattcacagaagtccccaaagatgtgacagtacgggagggagacgacatcgaaatgccctgcgcgttccgggccagcggagccacctcgtattcgctggagattcagtggtggtacctcaaggagccaccccgggagctgctgcacgagctggcgctcagcgtgccgggcgcccggagcaaggtaacccgccgcccacgcggtaccggcgcgcgcccggctcgcgcccggggcggcgaaggctaacccagggagggaagcagcgggcttcactcgcgcagggcgccgccctgtggcgcagcccatcttccaccttcgcatcccaaagcatcttcaaagtcagcagtggttacccccaaacctgtcaattattttgacagcatcgctgttcccaccacctcccagaactccattcacgcccagcccctaaagagccacacctcagcctggtcgcttgctcgtgctcgctggctgcggccctctgatgggtgctgggtagtgaaggaagcccccttggtcccatcaggctctccccgccctctgccactttgaggaccccagggctcccacggctgcgttccagaggccaccagaaaaccgagtaccggaaagcc

SEQ ID NO: 28840 - DNA, 1378 bp, Homo sapiens; identical to SEQ ID NO: 26612
  chr19:30019101-30020479
  binary

SEQ ID NO: 28841 - DNA, 653 bp, Homo sapiens; identical to SEQ ID NO: 26614
  chr19:30713408-30714061
  hyper

SEQ ID NO: 28842 - DNA, 3424 bp, Homo sapiens
  chr19:30716607-30720031
  binary
cggggcgcggcgcggtgcggggggcgcggcgcgggggggcggcggcgggtgggggggcagcttcggcgtccgggaggtggcaaagtgagtttggactcttggcgcggcccccccgtcccctccccctccccatctcggcgaggcctgccgcccggttccttctcgccccatcgcgattaaaaaatacggtctaattaaatatccgtggctgtgacgttggcgagagaagctgtcagcgggtggggggtggggggaaagaagaggaaaaccgagccggcggctgcggccgggcatcgtatggcgctagagaacttcggcggcgagcgggacctgcgcctgggccgccgcctccccgcccgcggtcccgggaccgttactttgaaaaggagtcccgaggcctggcgcccggcgcgcgatcgggaccccgcgtccagctccggggacccggccggcgccccccacccgcgagcggcccgcgagccactctcaggccccgggaaactttcaagagggtctggggggtggggggagtaaaaaggggagggggtaggctggggccgcggaaacttctgctcaagtgactttccccattttctcctctgcctgggacgggggttcgccttgcgctctttctctggtccgcgctcactgcggggttccggcccctccgcccgtggagagagggtaatttgcaaccttttttttttttcaattaaagttagctgatgcttacaatgtgtcaaacttgcgggcgccgagagccgctgagatctgccattttgtgattgcatcggcctcctgtgccccgggagcctggccaggctgaggccggagagttggtttcagggctgaggtgccagggtccgaacccgcgaccccaggaaaggccgtggcgcctgcaagcgcaggcggcgcccgcagcacctgccccagccgggcctcggcctgggggcccagccgggggccaaagaggaaataaataaataaataagtaacaggttatggagggaaaagagccggccagtcccaggctggagaaatgaggccaatcagagcgaggaagtgcgggcgtgggggctctggaaggcagaggagaggcagggcttgcgcggcgtctgggaagagtgcaatctggggggacgcctcccgtccccccagcgcagatgcatgactggggtaggaatgatctttgctgataagcctttttctgtttgcttcaagacattatttttcgaagatgaattgaggaaaacagtcgtaggcgagactcggggtgtattttaggcaaaaaaaaaaaagttagggttgggggagagctttcctttgatgagtaggaaagtgtccagatctcgacgcgcccatctgttgcagttttgcaaataatttaaaatatagatatctccatatagacggatgtatgtgaagtggaggaaggtcgaaacgcggggaagttagggaaaaagaaagaaaaagggctgggcagagagagacctgtgttgctcactcttcactctgcggagtgaactccggcagggctttctttggggacaggtggaaagttaagtcccccccttttcacttctgtattgtgagtggttcctactgtgtgcctgttggagaacatgtccaccgttcccgagttaggtggaggattggaatgttggggggcggggagcgttggagttgaggacgcagtggccaggggctgggggccgagaaagagcagggcggggtctcagccccgcgtgcgggtggcagcggcggccgggttttgtttgccagatattgttatgtctaacgggtgcctcgccggagacgtgatttgtcagccgccttcgttttcactttagcagaaaatacggcagctgcgaggtgtcccggcctgcggggctcgggcacccggtgcgtcctgggggctgggtcgtgtgcgcgggtgggagccggcggccggcggggccggggcgaggggcgagcgggaggggcggagtgagcgagcgcgcggtacggccctccggttcctcctgcgccttctcccggcagccgccgccgccgccgccgccgctgtgcaatttagcagaaatccgacaggggccgcgtttgctgagcgcatccggcggccgggcagcccgagcgggccgccgggcctggtcggccggtgtagaggcgcggagggggccggcggaggggaccggcggggatgggcgcgggaagcacgcctgaccagagcacgcgccgttccccaaccctggtgtccccggcgagttgggcagccccgcgcgccctgaccttgacgccccagtctccagccagggcttaggtgaacttggggtggggtgtgcgtgcgtgcgtgtgtatgtgcgtgcgtgtgtgtgtgtggaaggggtggtgagactgggaacgcgctgttttctttcccagtttgatactagcaactggatttttactttaagaccggctttgctctctgctggggttgggagggggggcgatcttttcccatcactcacatctttgttcattgttcactgagtggaaggcaggcgacttaaagagacgaaagagaggaaaaaggggtgagagacggagagaggaaaaagaggggggcggccagaagagggaaggagaggcgtggggacagggcccccgcccccgccggggtcgggtttgatggtgaaatagtaaacccacgcacggagggtcgccaggaaagtggacattaccgctttaattaacttcgagatgctccggcggcgggacctggcgtagccgtgacgcgcccccataaatctgcccggcccggggctgctccgagaactcgtacagtagcggcgtcagatccatcccgcgcctcccagtccggagtccatttgcataattggattttttttttttgcctccttctttctccctgaaacttgtttgaaaacccaagtgaaaaccgcgacgatctgcacactcaaaagcaagtgccaagtaagtgccctgcggtggcctcggcgcgccccggggtgagcgcgcaaagccgggagcgaggtgccgcgagctgcgcgccgccccgggccggcctcgcgtgtgggcggctgggcggctgggcggcgggaggacggcctccgcgggctccgggactgcccggctggctgctcgcacaactttttttttttcccccgtctgctgacttttcgggccaggtgaagtgtttgggccacgcgtgtacctgtggcgagactcgggaggcgatcttggggggcgcgcggtcgcagttgggcatcttgcctgggtcgggggcgggcagtcggtcccagtggccgccgctgagggcagagctgcgagcgagcggggccggctgctggtcgcgccgcgccgtaaatgcaagcctgtagccaaatgcttcccccattattctaaggtttgtgtctgcgtgtgc

SEQ ID NO: 28843 - DNA, 199 bp, Homo sapiens; identical to SEQ ID NO: 24150
  chr19:3219527-3219726
  hypo

SEQ ID NO: 28844 - DNA, 267 bp, Homo sapiens; identical to SEQ ID NO: 7100
  chr19:32845502-32845769
  hypo

SEQ ID NO: 28845 - DNA, 1016 bp, Homo sapiens; identical to SEQ ID NO: 9365
  chr19:3490855-3491871
  hypo

SEQ ID NO: 28846 - DNA, 52 bp, Homo sapiens; identical to SEQ ID NO: 9366
  chr19:34963061-34963113
  hypo

SEQ ID NO: 28847 - DNA, 74 bp, Homo sapiens; identical to SEQ ID NO: 11379
  chr19:35613702-35613776
  hypo

SEQ ID NO: 28848 - DNA, 522 bp, Homo sapiens; identical to SEQ ID NO: 24157
  chr19:35615970-35616492
  hypo

SEQ ID NO: 28849 - DNA, 147 bp, Homo sapiens; identical to SEQ ID NO: 26620
  chr19:3571360-3571507
  hypo

SEQ ID NO: 28850 - DNA, 740 bp, Homo sapiens
  chr19:3577759-3578499
  hypo
cgcccgccgctctagccccgcgtccccaccctgtccccgtcctcgccatcctcctgccccggcttaccttagcccaccctgcgccgctcctgcgctggcggtgtccggacctctgagcgcccgcgcgacccgccctgagtcaccccctaccgctgcccctggagcccccgccccgcgactccccggcaccctcgcctgaccttcccgcctgtcccccaggcacgggcgaaacgcccacgctgggcactctggacttctacatggcccggcttcacggagccatcgagcgcgaccccgcccagcacgagaagctcatcgtccgcatcaaggaaatcctggcccaggtcgccaggtgtgtgccgggcgaggcggggcggggccggggttcaaggcccggatgtgcccgccctggggttccccaggtccgcgagggctgctgggtgggactccgcagcttactagagatcacctcccggaggggcctacctgcggtcgcccctgatgcaccagtgctaggatggccatggagaaccccgggccggcgggacccactcgggggcaccagaacttccctaaagcttctcagggtggatcccagcgcccgggttagataggttcaacgcctgtcccccaaccctggcatctgttggagcagctgatgggccatggtctctggggttccccagggccggggtgggggccagagatgatgagggcctcatcccgggccctcctctctc

SEQ ID NO: 28851 - DNA, 226 bp, Homo sapiens; identical to SEQ ID NO: 25361
  chr19:36222366-36222592
  hypo

SEQ ID NO: 28852 - DNA, 856 bp, Homo sapiens; identical to SEQ ID NO: 22832
  chr19:36909065-36909921
  binary

SEQ ID NO: 28853 - DNA, 1065 bp, Homo sapiens; identical to SEQ ID NO: 27784
  chr19:37095634-37096699
  hyper

SEQ ID NO: 28854 - DNA, 799 bp, Homo sapiens; identical to SEQ ID NO: 23153
  chr19:37463952-37464751
  hyper

SEQ ID NO: 28855 - DNA, 719 bp, Homo sapiens; identical to SEQ ID NO: 23155
  chr19:37957873-37958592
  hyper

SEQ ID NO: 28856 - DNA, 740 bp, Homo sapiens; identical to SEQ ID NO: 22835
  chr19:38182720-38183460
  binary

SEQ ID NO: 28857 - DNA, 202 bp, Homo sapiens
  chr19:38905516-38905718
  hypo
cgctgcagggtggatgctgcccttggagggccaccagctcctgcagccgcaggtagaggttgttcagcttgggtaggtgcaggcggccgtcaggcaacctgtcgggctgtgcctcatgcagggacaccaggtccttgaggtgcacgcccagtacaggcagccggaaacccgcgcagccagcccaggtgcggcggtagcgggc

SEQ ID NO: 28858 - DNA, 116 bp, Homo sapiens
  chr19:39026990-39027106
  hypo
cgtgccccaaatgtcacgccctggttgctgttctcttattaatgtccctaatccgggttaatcgcgtctcctctttgccgtgttgtgacgtgtctaacctttctacccggatcctc

SEQ ID NO: 28859 - DNA, 86 bp, Homo sapiens; identical to SEQ ID NO: 7107
  chr19:39289891-39289977
  hypo

SEQ ID NO: 28860 - DNA, 116 bp, Homo sapiens; identical to SEQ ID NO: 23558
  chr19:39329516-39329632
  hypo

SEQ ID NO: 28861 - DNA, 746 bp, Homo sapiens; identical to SEQ ID NO: 27793
  chr19:407139-407885
  hypo

SEQ ID NO: 28862 - DNA, 829 bp, Homo sapiens
  chr19:418231-419060
  hypo
cgtcctctccggcagtgcccacccctcctctgggaaggaggcctggacacccagcacgccgcaggggtccacaaagaccaggtgacgcccaccacagccgaccgcagtgtcacggtcatggctgcacgctgccaccctcgggcacatatccacccacgggcagtgacgcgtgtccacacacaacctgcacacaaaggctcacggcggccaaaaggcggaagcagccccagcgtccatcagcggatgaacacacaaaacgtggtcccctcacacagcgggacattatccagccgagaacaggagccaggctctggcccgggccacggcgcaatgcccctggaggacgtcacgctcagtgagagacgccagacacagaaggacacacagcgtggaatcccattgctatgaaatgtccaggacaggcccatccacagagacaggaggcggatgtgtggggttggagctggggaggggacagggagtgacggctggtggggacagggcttctttcggggctgacagaatgttctggaattcgacagagatggttgcacggctcggatgctgaacacccctgagtcgtgccctctagagggaaaggcacggcacgtgaaccgggtctcaattttcaaatcagaaaagaatctggcaaaggaggcaaggccagcgacccacggcggcagccacacacctggctcagggctcccgtgagaccacgccacgcaggtgcagctcactctcggcggccacgatgggctgcccgttctgcaggtggtggtcgatcaggtggctgatgctctcaaacagcacgtccttcgtccgtacctgc

SEQ ID NO: 28863 - DNA, 441 bp, Homo sapiens; identical to SEQ ID NO: 22838
  chr19:42028298-42028739
  binary

SEQ ID NO: 28864 - DNA, 112 bp, Homo sapiens
  chr19:4290473-4290585
  hypo
cgcgcggacccgtgagaaccaggtggtgctgggccaacacagcgggcccttccccagcgtgcccgagctcgtcctccactacagttcacgcccactgccggtgcagggtgcc

SEQ ID NO: 28865 - DNA, 501 bp, Homo sapiens; identical to SEQ ID NO: 23159
  chr19:44711530-44712031
  hyper

SEQ ID NO: 28866 - DNA, 247 bp, Homo sapiens; identical to SEQ ID NO: 23160
  chr19:46929939-46930186
  hyper

SEQ ID NO: 28867 - DNA, 277 bp, Homo sapiens; identical to SEQ ID NO: 24176
  chr19:47116867-47117144
  hypo

SEQ ID NO: 28868 - DNA, 168 bp, Homo sapiens; identical to SEQ ID NO: 6522
  chr19:47482472-47482640
  hypo

SEQ ID NO: 28869 - DNA, 461 bp, Homo sapiens
  chr19:4795062-4795523
  hypo
cgataaatccactagctaagacgtcgagtgccaagaccagccttccagccgaggtttggacaaagtctcaggttcccgtgactcagggtaaggtgctggggctgccagaggacctgccccagcaagatttttgtcaagagcgagactccatcagcccaggcagacgggagcaggttcttggccagcgtagacagcagcaaacagcagcagggaagccattctcactgcatcctccctgcagtagccacggccaggcccttaggaggagcagtgaccgggggtgtccagaaatatcctgtccctggatggaaactaggtctcgtttggatttttttttttttttgccgtgttaggaaattatttattaatttacaagacaggttttaactcagccgaggtgggaaatggtgtccctgtccctcccaaagcacagagcacagaaatgaggccgtttacatggc

SEQ ID NO: 28870 - DNA, 246 bp, Homo sapiens; identical to SEQ ID NO: 24181
  chr19:485134-485380
  hypo

SEQ ID NO: 28871 - DNA, 513 bp, Homo sapiens; identical to SEQ ID NO: 23561
  chr19:49971410-49971923
  hypo

SEQ ID NO: 28872 - DNA, 88 bp, Homo sapiens
  chr19:50292239-50292327
  hypo
cgcctccagctgcagcacacgagggttcccagcactttaggaggccgtagcaacaggcgtcagtcgggcgagtatctgcctggatgac

SEQ ID NO: 28873 - DNA, 712 bp, Homo sapiens; identical to SEQ ID NO: 22840
  chr19:50553779-50554491
  binary

SEQ ID NO: 28874 - DNA, 77 bp, Homo sapiens; identical to SEQ ID NO: 11402
  chr19:51111319-51111396
  binary

SEQ ID NO: 28875 - DNA, 898 bp, Homo sapiens
  chr19:51161615-51162513
  hyper
cggggcgacagtggagtgacagcttgggggggcggggccaggagggactagataagagcgagattggtgcagagccactgaggggcggggccaagagtgagcgcggttggaggtaaggtccggtgagatcagagagaaggagggatctcgagtgagtaggggcccgagtttgagtgacccagtagtgaccgggatagaggtctgagcctggaaaggcagctgtgagggggtggaagagactgagcacatagtaggtgtggggccaggggtgatagggtggggacaggcctggagtgcctagggtagagcgcagcctgcagtcgccagtggagggtcgggcctttgggcggtttgagatggagcctcgacagacagtgattaggacgcagaaccaggctaagagagcgtaaggagcctagagcgacccaggcgagagggcagggctggaggggagtttagggacggagcgatggtccgctggaccagggcctgtaaacgactccagggaccaggcagggactcttcgacgatcaaagccagggctgaaacgacctgcgagttccttttccgtccccaccccccttacaggtggctcatcgcggtcacggacttccagacgcgctcgcgcttgctgcgctccgggctcagtccccgcgggcttgcgcaccagatcgtgcgccacgacgacctcctgctgggcgactaccgcctgcacctgcgccgctccctggtccggcggcgcatgctcgaggccctgggggcggagccgaacgaggaggcctgacgcccgggcgggccccggcagcgcttgcgcaccgccccgcgggctggggccacccacccggagccccggaggacagggggcgttgccttcccaggaaggaggcggggccggctc

SEQ ID NO: 28876 - DNA, 244 bp, Homo sapiens; identical to SEQ ID NO: 26663
  chr19:51925116-51925360
  hyper

SEQ ID NO: 28877 - DNA, 810 bp, Homo sapiens; identical to SEQ ID NO: 22841
  chr19:52531282-52532092
  binary

SEQ ID NO: 28878 - DNA, 675 bp, Homo sapiens; identical to SEQ ID NO: 23162
  chr19:52839404-52840079
  hyper

SEQ ID NO: 28879 - DNA, 325 bp, Homo sapiens
  chr19:530225-530550
  hypo
cgtgagccaccgtgcccggcctgtatgttgatgcagctgtgtgtacccagggcatagcaacaatgccactggcacagtccgagggcagggccacccgtcacgggcacgactcaggggaggctgggctgccccgtcctcaccacggccagttctcccgaccaagcttcacagcaaggagcatgtgggtgtctgggcagccactgagccaggtcagaagtcaggtggggtcacagtgatgcccggaatcagctggggtcaagactcaggtgggctgggcgcggtggctcatgcctataatcccagcatttgggaggccgacgcagac

SEQ ID NO: 28880 - DNA, 897 bp, Homo sapiens; identical to SEQ ID NO: 23163
  chr19:53073241-53074138
  hyper

SEQ ID NO: 28881 - DNA, 892 bp, Homo sapiens; identical to SEQ ID NO: 23165
  chr19:53140914-53141806
  hyper

SEQ ID NO: 28882 - DNA, 833 bp, Homo sapiens; identical to SEQ ID NO: 22842
  chr19:53237625-53238458
  binary

SEQ ID NO: 28883 - DNA, 694 bp, Homo sapiens; identical to SEQ ID NO: 22843
  chr19:53445359-53446053
  binary

SEQ ID NO: 28884 - DNA, 721 bp, Homo sapiens; identical to SEQ ID NO: 26670
  chr19:53465713-53466434
  hyper

SEQ ID NO: 28885 - DNA, 385 bp, Homo sapiens
  chr19:53496055-53496440
  hyper
cgagcagcagggcccggcacgaggagggagttagggggcgacggctccttaagacaagggtggggtctgcaggatcccaggaccaggcagaggatgcggcctcctcgggacgggggaggcggcgctgcgctccagggaccgacgagggtgagggtgggaggcgcccagggtgggaatccacctctcgggtgaggactttaaaaagcacggggtggagggagtcagaaaatagttacaaacaggaaaactacgagatacgaagtgtatacgttgccctatagcagaaagaccggggacgggtctagcctcagggcgactttaaacccaaaaggaagcgacttctggactctcaccgggacgtcaaattttgctctggggattagcc

SEQ ID NO: 28886 - DNA, 755 bp, Homo sapiens
  chr19:53496620-53497375
  hyper
cgaaggaagaatggtagaaatttccaggtatgtggggaccccacgtcccctgggacagaagtcccagggacctgcggagcgcagacataacacaacacagagcaaaactcaccgctgcggtgactttcactccacgcgatccgcttcccggtttacgctaaactgggcgctcgggacagaagccaggtctcggcgggacatggcagggggtgggcggggcctgggcgaggtgggggcggggcgcgaggcggagagaccttcccctatagaaccggcagggggcggggcgcgaggcggagagaccttcccctatagaaccggcagggggcggggcgcgaggcggagagaccttcccctatagaaccggcagagggcggggcgggatctgtgagtctctcagcctcggcgtgtttttgggttttggagacgagacctgccaggaaagctgaggcatgattcaaaagccctggaactgtctggaaggggaatgcaaaccagaatgtgaaatgcaaagccctgcctgggcggaacgtattatttcatgctgacgaccacagaacagaatagaaatcctctccctttctattctccactcactcaagagggagagtccaccctgtgtcagcttcagagacttccctagagccaccgcctgggatgcgggatggagtgctcaggccagggaggagtgaggtcaccacctgctggttaaacacagcagagatgcgggcgcacaagggggcgtgggagggcgc

SEQ ID NO: 28887 - DNA, 742 bp, Homo sapiens
  chr19:53635487-53636229
  hyper
cgatccctttggcccacacattcacaggacggtttggggtaagacgcctgcatcctggaggagcgcattttccacggggtggaggagggcaggcaagaacatcgggtgtcacaggacaggccctgagcacctccccagcgcgggctcaggggaggcctggggagcagcggggcccggcacgaggaggagggaggtggggcgcgacagcgccttcagacaggggtggggtctgcaggatcccaggaccaggcagaggacgcaaggctccccgggactgcggctgcagctgcggcgctgcgctccaggggccgacgagggcaaggctgggaggcacccaggacgggaatacacctcttgggtgaagactttaaaaagcccggggatgggggagggggtcaggaaaaggttttaagcgggaggaagaagcaaaaggccggggacggggagcagcctcaaagcgacttcaacccaaagggaagcgactccggacccacactgcgaggcctgtattcacctggggtggagtgtacggggattttaagggccgtatcgaccctggacatcggctgtggaaatgggaaacagggagcgcaggtttaatctacacagagggtcactcacgctcgacgccgtcaccttcacccaacgcgatccgtttccgggcctgtaggaaactgcgcatgcgcggagagaagagcccgggcagcctgaaggaatggctggagtgggcggggtctgcgcc

SEQ ID NO: 28888 - DNA, 716 bp, Homo sapiens; identical to SEQ ID NO: 26672
  chr19:53696029-53696745
  binary

SEQ ID NO: 28889 - DNA, 605 bp, Homo sapiens; identical to SEQ ID NO: 26673
  chr19:53700110-53700715
  hyper

SEQ ID NO: 28890 - DNA, 424 bp, Homo sapiens; identical to SEQ ID NO: 26676
  chr19:54409948-54410372
  hyper

SEQ ID NO: 28891 - DNA, 793 bp, Homo sapiens; identical to SEQ ID NO: 26677
  chr19:54411124-54411917
  binary

SEQ ID NO: 28892 - DNA, 581 bp, Homo sapiens; identical to SEQ ID NO: 26678
  chr19:54412564-54413145
  binary

SEQ ID NO: 28893 - DNA, 229 bp, Homo sapiens
  chr19:54413369-54413598
  binary
cgagaatgtggagaagggacgaggtcccagctgagagtcagaggggcgaaagggggaagctgagatcggctacctgggatggaggcagccagggtggccagggtgatggtgcccgtttccgagcccacagggctgcgaggggaccaggcagctcgcggtcaaacccctgagccgccaggcgggggatgggaggaaaagctggccagagcgttccctgactccggatctc

SEQ ID NO: 28894 - DNA, 441 bp, Homo sapiens
  chr19:54465279-54465720
  hyper
cggagggggctcgcggaggttactcccacggaagtggtgctactcgggcttcttaagttgtggagacgctcagggaaaagttgggctgacagggaagggttctagcgggtggagaggtggggcttgcaggggaagagtggggagagctggtgggcgccgcatggtgatggggcgggggtcgctaaggaaggaagaacgcgacgggggctcctggggaggaggcggcggcgtggggcttggcatcatggcggggggtggcttcccatgcgatgaggatcgtggagccccctggggcggaggcggcgcgggctaggggcgagggctgtgagtgtgagcggtggtggggactcctccgagtggggttagtgggatggtgggacgactttcttgggcagaagacaggagtggagagagatttcatcttatttattaattattagc

SEQ ID NO: 28895 - DNA, 951 bp, Homo sapiens
  chr19:54485370-54486321
  hyper
cgccaacgcgggcgagccgggcccgaagcgggacgaggagaagaaaaaccactactcgtacggctggtccttctacttcggcgggctgtcgttcatcctggccgaggtgataggcgtgctggccgtcaacatctacatcgagcgcagccgcgaggcgcactgccagtctcgctcggacctgctcaaggccggcgggggcgcgggcggcagtggcgggagcggcccctcggccatcctccgtctgcccagttaccgcttccgctaccgccgccgctcccgctctagctcccgctccagcgagccgtcgccgtcgcgggacgcgtctcccggcggccccgggggcccgggctttgcctccacggacatctccatgtacacgctcagccgcgacccctccaagggcagcgtggccgcggggctggcgggggccggcggcggcggcggcggcgccgtgggggcgttcggcggcgcggccgggggcgccgggggcggcggcggaggcggcggcggggcgggtgccgagcgggaccgcgggggggcgtccggcttcctcacgctgcacaacgccttccccaaggaggcgggcggcggcgtcacggtcacggtcaccgggccgcccgccccgcccgcgcccgcgccacccgcgccctctgcgcccgcccccgggaccctggccaaggaggccgccgcctccaacaccaacacgctcaacaggaaaaccacgcctgtgtaggggcgcggcgggggagccgaggggcgtgtccggggcgcgtgcgcgggcgcgcgtgcatcgaggctgccggggtcgggggcgcccccgctttcccccgtgagcgcgctggagactgctgggcccgccccacgcccaccctccccgcccccctccccctccgaagcagggaccccgagggagggggcaggggagggagggggccgctgtgagggagcgtc

SEQ ID NO: 28896 - DNA, 546 bp, Homo sapiens; identical to SEQ ID NO: 11424
  chr19:55677520-55678066
  hyper

SEQ ID NO: 28897 - DNA, 1134 bp, Homo sapiens; identical to SEQ ID NO: 26679
  chr19:55690206-55691340
  hyper

SEQ ID NO: 28898 - DNA, 765 bp, Homo sapiens
  chr19:5587454-5588219
  hypo
cgttttcatcgtaacatgggttcagtaacggtcccgcagcctttagagcgcttgggttttttttccaggtgagaaaaatcatcatcgcacattgtattccaggtaactcaagagcgttatttgcataaattgcaaagagctgctttttgctttgttttcataacatccaacccagccagctgatcaaacatgcaaaaaagggagaggaagtgaggagcaggagtgaaccaccgtcctccacggacgacacaccttaccccgccactccaccgcggcttgccatgtgccccggccccgagggcccagacaggcccctctcgccacctagaagagaagaagggtctgcaaacactccgttcctggggaagcccctggacacatgtgggggccacagccaccctcgtccctggagccagccccgtaccttgccacctggcgtgctcccggctagccgcgcctgcgtccatggcaccctgccaggcgcgtgcctggtgctcctctagccgctggttgtgctctccccagtcacggccacccctttgccaaaagaaaaagacatgcagccatctaatgagcctccagggttgtgtcggcagcaggcgcacccaccctgacctcagctgcatggtgggtcatgccacacaacaagggctgcatgtcaagtgggcaaatcaagggaagggacatttccccaaagacagatgtgctagtaagcacgtgagaaggtgctcaacgccacccagaaatgccaatccgagccacacc

SEQ ID NO: 28899 - DNA, 134 bp, Homo sapiens; identical to SEQ ID NO: 6067
  chr19:56112791-56112925
  binary

SEQ ID NO: 28900 - DNA, 171 bp, Homo sapiens; identical to SEQ ID NO: 6525
  chr19:56807013-56807184
  hypo

SEQ ID NO: 28901 - DNA, 828 bp, Homo sapiens; identical to SEQ ID NO: 22847
  chr19:56904526-56905354
  binary

SEQ ID NO: 28902 - DNA, 806 bp, Homo sapiens; identical to SEQ ID NO: 22848
  chr19:56915147-56915953
  binary

SEQ ID NO: 28903 - DNA, 378 bp, Homo sapiens; identical to SEQ ID NO: 26687
  chr19:57276614-57276992
  hyper

SEQ ID NO: 28904 - DNA, 339 bp, Homo sapiens
  chr19:57610688-57611027
  hyper
cgcaggaacgcggcctagctgcttcagccacgttctcgcggcgccacctggtggccatggaccgccatcgccgctggacgtcagggccgccaggcccagcgagatgtcacctcctctgaggagccttccaggatcgcacccggcacgcgctccacgcctcgttgtctgttcttcggagcaccgaccatgatcacaaatcagctcgctcgctgtgtttcctgccgggtcgctaccgccatgatccgcacgtagtggtcaaggctgaggttgtatgaatgtggacgttataaccctggctccctctccctccctatgctgggctcccctcgatccccaggc

SEQ ID NO: 28905 - DNA, 1102 bp, Homo sapiens
  chr19:5789249-5790351
  hypo
cgtcctcatccgtcaggggcccgcaggtccgcacggggctgctgggaggggtgctagtgcccggccctgcggggacctgctgggcaccacagttttcctgcctgggagcgccctcggctgccgtgccctcggggacagcggcagcgggtgtggggccctggctgaaccggcgcagggcctgctcagctcgctcgaagcggacctcgcgcttccgcagctgctgctgcagggctttgtccaggccgttgcggatggacgggggctgggtcccgcgggccgccaactcctcctgcaccaggttctgtccctcgggcctcaggtgggccccagcgaagcggcaggtcacgccgtaggggcaccggccgaaggtctcgaagagcacgcagcgggggcccaggtcggccggcttggtctccaggtagcgccccacgtcgtgcagaaagcggcagcgatcaccgaagaaacacttagcagccgactcctgcgaggaaacagggaagcagtgagggaggacagggagaccccggggcagcccagcagccagggttcaaactctagatcacccctcctggctcttgtgtccctgagcaagtcaggcacctcaccgtgcctctgcatctccatttatacaatgagaacaatgacaagccctacaatgtatcccgaggagaatgaagacggaatggcatcagagcaagctcactgctcgttgctgaaggcccaggagctttctaacaattacccgctgccaggaaacacaccctgctcctgcctgccccggcaggaatgctcacgtggccgcacttgcctggattagggagggacacagcctgttcttgtcgtagttcgtgggcttcacatggggccggcccttgttttgtccccgggccctcttctgagtctgtagctgctccccgggctctgctgcctcctccgtctgcccgtccgccgtctgtccatcctccagtcggatccgcttagcctcaggctcagccagctcattgccagcagggtctcctacctcggtttcccggcaagtcttctcctgccctttggcttccaggaattggtgaaactgctccttggtggtgaggtatctgcc

SEQ ID NO: 28906 - DNA, 124 bp, Homo sapiens; identical to SEQ ID NO: 11432
  chr19:5797848-5797972
  hypo

SEQ ID NO: 28907 - DNA, 465 bp, Homo sapiens; identical to SEQ ID NO: 23174
  chr19:58011085-58011550
  hyper

SEQ ID NO: 28908 - DNA, 706 bp, Homo sapiens; identical to SEQ ID NO: 22850
  chr19:58038572-58039278
  binary

SEQ ID NO: 28909 - DNA, 790 bp, Homo sapiens; identical to SEQ ID NO: 22851
  chr19:58125385-58126175
  binary

SEQ ID NO: 28910 - DNA, 797 bp, Homo sapiens; identical to SEQ ID NO: 23176
  chr19:58144201-58144998
  hyper

SEQ ID NO: 28911 - DNA, 846 bp, Homo sapiens; identical to SEQ ID NO: 24194
  chr19:58219927-58220773
  hyper

SEQ ID NO: 28912 - DNA, 881 bp, Homo sapiens; identical to SEQ ID NO: 22852
  chr19:58238341-58239222
  binary

SEQ ID NO: 28913 - DNA, 627 bp, Homo sapiens; identical to SEQ ID NO: 6077
  chr19:58258088-58258715
  hyper

SEQ ID NO: 28914 - DNA, 574 bp, Homo sapiens
  chr19:58446258-58446832
  hyper
cgcctcacacgttgttccctacaggcgcctgtggaccccaggttccatcctcccgggtctgtcctccaggccatagcccgcgccggtccctgtgcctgtcgctctccccaccgcatcccacaggtgtcagaaacaaggacctctcccgcgaacgcctcagtgtcccgacgccgggtccgggctgcagacctgtgaacagtcgccgctctctcgctgcttcaggattcgggttaggatgaggtgacctgagggcagggaaggcacaattacctgagccgggagcctcagcgcggccgccgccatcccgagtacgcggggaaagcactgccgggagcggcgggcgccgttacggggcctaagatctgcctctgtgcagcaagaaggactcttcaccttctgggttcagacaccgcggttcggacccatagctccagcgcctctcacctcacaaaccgcagaaacacacccaacattaaccaaaatggtcgctaccagagaacgctgagaatcccgccactacgttacgtgcgcacacagaaacgcctttattctgagcccttactggttctgttgc

SEQ ID NO: 28915 - DNA, 788 bp, Homo sapiens; identical to SEQ ID NO: 11438
  chr19:58830548-58831336
  hypo

SEQ ID NO: 28916 - DNA, 125 bp, Homo sapiens; identical to SEQ ID NO: 6526
  chr19:6425753-6425878
  hypo

SEQ ID NO: 28917 - DNA, 739 bp, Homo sapiens; identical to SEQ ID NO: 11440
  chr19:736036-736775
  hypo

SEQ ID NO: 28918 - DNA, 337 bp, Homo sapiens; identical to SEQ ID NO: 7146
  chr19:7972050-7972387
  hypo

SEQ ID NO: 28919 - DNA, 348 bp, Homo sapiens; identical to SEQ ID NO: 11442
  chr19:804907-805255
  hypo

SEQ ID NO: 28920 - DNA, 437 bp, Homo sapiens; identical to SEQ ID NO: 24203
  chr19:814406-814843
  binary

SEQ ID NO: 28921 - DNA, 77 bp, Homo sapiens; identical to SEQ ID NO: 11444
  chr19:8546631-8546708
  hypo

SEQ ID NO: 28922 - DNA, 252 bp, Homo sapiens; identical to SEQ ID NO: 6527
  chr19:8554998-8555250
  hypo

SEQ ID NO: 28923 - DNA, 798 bp, Homo sapiens
  chr19:8576026-8576824
  hypo
cgggcgcctagttcagtttctcccgggtctgtctgcccctagagttgggggcacccaacttggcttctccgcgtcccctactatcatccccagattcactgttggggagaagcccgctccgaggtgaacggtgaaaggggcgcaaggtttatacgggaacgccggcgcagatgaaggcgcaggtgccagtcatttttaaggcaaaaatcctgtatttcgggacggtggcatttgtgccccctgggaaggggatgagcactgctgcctcctggtatccaccagaccccgcagggcgcaggaaagaaagcccctccacccctccctggtggtcacctgcacgcacctgagggcgcgtcggagccgccctggggtcttcgggggctgctgccagcacctgcggtaaaggggcgggtcaagttcagagtcagggcgagcccagccagccctcctggaggcccccgaccccacactcaccttggctctttttccagacggcggcgctggaagccggcggcccgggtgcagcggccaggaaggggcgcaggcgcggggggcttaggccaaagggcgcagggttcaagtagggcaggaacggtccggtgggggcaggggcgggggtcgtgaagggttccagcagcgggaacggcaggcccggcgctgatgcggggtcaacctccggggggcgctccggcgcgggcggctctcggtccagggccgggggtggcggcggggctgggctctgcgcatgctccgcgcaaacatgcaggtgcttgaagagcgagcggtgcgtgcggaagc

SEQ ID NO: 28924 - DNA, 125 bp, Homo sapiens; identical to SEQ ID NO: 24211
  chr2:10151899-10152024
  binary

SEQ ID NO: 28925 - DNA, 166 bp, Homo sapiens; identical to SEQ ID NO: 7161
  chr2:10152421-10152587
  binary

SEQ ID NO: 28926 - DNA, 530 bp, Homo sapiens; identical to SEQ ID NO: 24213
  chr2:10152958-10153488
  hypo

SEQ ID NO: 28927 - DNA, 645 bp, Homo sapiens; identical to SEQ ID NO: 24214
  chr2:10153562-10154207
  hypo

SEQ ID NO: 28928 - DNA, 751 bp, Homo sapiens
  chr2:105458972-105459723
  binary
cgaaagagggagatgcccgtgtagagaaccgaggaggggggctggggtagaataatcagctctaaggttgcagatttagatctcaaggctgaaaaggataagcttccaccagagcatcctgtagcgcctcctgtcctgccctgccctgccctgcgcgcgcaccgcactcacacgtacacccggtcctcgcacgcgcacacacgcacactgttccccgccgctctaccctctagactgcaagggaaacggctcctctggggcgcgctcaccggaggtgaggcgacccagcccggcccaggccagcctggtacccagcgctggtcgctgcccctgtggggaggcagcgcggccttcggggctccagagcgcgcgggcccggaacgaggcgcgcggccgctggcacatgcggggactgcccagcgcggactggagaaggggagcgaaggggtggggagggggtgacgccggctgcccaccccgctccgcgcctccctctgtggccctctctcccttcttcccctcccaccctgccgctcccagccgcgtatggaactcgcgtttggaaaaggcacggagcaggcgggcagctgtgcgtgtgcgcgccggtggcctcggacgcagccagcgcgaggacctcggcgcggcggtagcgccccggcgggccctccaagtgccggcctgcagggggcgccggcgcgctcgcgccccgcgggttctccaccgccccgccttcgcccaccgaggaagggtc

SEQ ID NO: 28929 - DNA, 1981 bp, Homo sapiens
  chr2:105469232-105471213
  binary
cgcttctctcgcctaccgggtgcactccccctcccatcccccttaactctttcagctgggttagagctgagaaagcatttgtcgccgccagccccatccaccacgcaaatccatctgagacagaaaggaaagaaaaaaaagcaccaccatgcctaagaatagagagcgagcaaacccccccaccgctaatcacacacacacacacacacacacacacacacacacacgaggaagcggtggagcagagaagggcgcggctagccgatcccggttctttcgcccggctcctgctgccacagggaattcctaaagccattggggtcgaatacacttacgatgaatctatgggggaaggtcggactgattgcttttcaaatacatcgcacggctccgctgaccggcaccctccaaactcacaagggcacgcacgctacttgcacgaatcccagaggagggaggagggaggaagggagggagagcgaaggagggagagagggggtggaggagccagggagcggcggcagcgagcggtccgtctcgcacgcgcgggcaccgcgctggtcctgggctgcaggtttcccagatgatggcatccgagaacttaaacaaagggggctgccgccggcgcgcaacggctgcggaaagttgcggtggcggatttccaaggagcgtggccacgaccagagctcttggcgatgcgagcccccgcttcccacccccgccgatcagagaagggggccggctggtgaagggaagaggaaactttgaaaccactggggacacatctgtctataggtattagcttgaatggtacatccgtgccgcgcgctttacaaatctctggcggggcgggggtaagggggtgagcaacccgacgcgtactaggtggggtgggcaggttgctatttttcatgtttcccccttcgttttccttctgattctcttcccccctctcgtccctccctcccttttatctcccctttcttccccccgcccagacctattgcgaacgcccagagccgccgagggaacgccaacgtctgggccggacactaagagttaagatgtggcggagggggcggcgggggaggggcggggaggggaaagtggtgagggggagggaggctggaggacgacagatttccagcttctacgacgctctgcctaaattaaaaagcaaccaatcggaacggccggaaggggggcctcgcgtcctgagccagtcattccgagcctgccaatcacccagcgggtagccaatcagcgggggccctggtgctcgacttccttgtatttgggaaagtgtggtggtgggtgcgcgctcgcggcggagggtaaacattcgacagtccccgctctgagagggagggacagagagcgaactgtcagatcggagcgagagcgggcgcccgagagagggagagagagagagggagggagaggaaaagtgagagagggaaagagagcgcgaacgagggcgcagagcgagctcctgctgcaactctgctccagcacggccagcgccagcgcccgccgtcggtgcactctacgagccgtgcagcgtgcccactggagttgttgtgtatcaaggatcgatcccctatatgcacacacacacctccacctccaccaatgcactcttcttcctcctccttctccagacaactgctgggaaaaaaataaaacaccaaccccaaccgtcagcaacaaggtaacagagcgattcgacatcattttttttcctgttcaattttttccttgttatatttgtttcctaatttctgcccaaaaggaaagatgtcgcatcagactgtgactgttgcgaggagaatgaaaaaggactcttgtttcagaggcaaccaagagctccggcaatagcaacttcagagaaatgcaccatcgcaagaagttttcctaggacagaacaaaacttgaaacgagaggaccagagggggagagcaggagccagcctcccctctcc

SEQ ID NO: 28930 - DNA, 991 bp, Homo sapiens
  chr2:105472225-105473216
  hyper
cggcggccatatgctgagccacgcgcaccagtgggtcacagccctgccccacgccgccgccgccgccgccgctgccgccgccgccgccgtggaggcgagctcgccgtggtcgggcagcgccgtgggcatggctggcagcccccagcagccaccgcagccgccgccgccaccgccgcagggccccgacgtgaagggcggcgccgggcgcgacgacctgcacgcgggcacagcgctgcaccaccgcgggccgccgcacctcggacccccgccgccgcccccacaccagggccaccctgggggctggggggcggccgccgctgccgcagccgcagccgccgccgccgccgccgccgcgcacctcccgtccatggccgggggccagcagccgccgccgcagagtctgctctactcgcagcccggaggcttcacggtgaacggcatgctgagcgcgccaccggggcccggcggcggcggcggcggcgcgggcggtggagcccagagcttggtgcacccggggctggtgcgcggggacacgccagagctggccgagcaccaccaccaccaccaccaccacgcgcatcctcacccgccgcacccgcaccacgcgcagggacccccgcaccacggcggcggcggcggcggcgcggggcctggactcaacagccacgacccgcactcggacgaggacacgccgacgtcggacgacctggagcagttcgccaagcagttcaagcagcggcgcatcaagctgggcttcacgcaggccgacgtggggttggcgctgggcacactctacggcaacgtgttctcgcagaccaccatctgccgcttcgaggccctgcagctgagcttcaagaacatgtgcaagctcaagccgctgctgaacaagtggctggaggaggcggactcaagcaccggcagccccacaagcatcgacaagatcgcggcgcagggccgcaagcgcaagaagcggacctctatcgaggtgagc

SEQ ID NO: 28931 - DNA, 1851 bp, Homo sapiens; identical to SEQ ID NO: 23180
  chr2:105488296-105490147
  hyper

SEQ ID NO: 28932 - DNA, 900 bp, Homo sapiens
  chr2:114034594-114035494
  hyper
cgctcgtggttccaggacgcggaccgtaaagaggtgccagggagctctgctcggtcccagggctccccaaccccgccgcgccggggaatggctgcgaggtctctcccctgaggaccttgaagggaccccgcgccttctgggggcagccggacgattctggcccaggtctctgaggggaatgggggccgggagggagcattcgtctgcagctctagagagaacccgagtgagaaatcttccggcgccccagggggttcccgctcccctcctagttgggccatggccctgggactggagactgcgccgcagagcccgggcccccgcagtgcgcttggctaaatagagatctcagcctcgctgcgcgcccgatccgaccctccttattataacaaatgtcccgtttgcagagcgggacatcatattcgcggagaattcattctgaaatattgatttcctctcacttcgccggcccaaatcgatagcgatgcgccctggccccataaatcgccttctctgcggccggccgggctccatccatcactgcgggccgcgctgcgcctccaccgctgtccgcactcgctgcgcgccgggacggctgcgcccaccagccctgaccctggagctccttcccagcaaagaccctgcccagccctggccgggaagggggaaaacaggcatcgcggcctgggagctcgagtgtgtttgaaggccctgcttccgggcgcaggtggggagggggttttgactccgcgagcggcttagtcctcaccagccggacgccccgcgcgcggcgcccggcctgcccggtgctgggccaggaggagtcggagagcacctgagtgcgctgccggctcccgggcccgggaccaccggctccattgccgttggcttgagagatgc

SEQ ID NO: 28933 - DNA, 1446 bp, Homo sapiens; identical to SEQ ID NO: 23182
  chr2:118981062-118982508
  hyper

SEQ ID NO: 28934 - DNA, 533 bp, Homo sapiens; identical to SEQ ID NO: 23567
  chr2:120005222-120005755
  hypo

SEQ ID NO: 28935 - DNA, 590 bp, Homo sapiens; identical to SEQ ID NO: 23568
  chr2:120979888-120980478
  hypo

SEQ ID NO: 28936 - DNA, 572 bp, Homo sapiens; identical to SEQ ID NO: 23183
  chr2:127782995-127783567
  hyper

SEQ ID NO: 28937 - DNA, 935 bp, Homo sapiens
  chr2:131721036-131721971
  hyper
cggtgaaaaagtgggcgcccaccagccctcctcaccaccgcggctgcgacgagcctgggcgtcgcctcctaaggatggccctgtcctaacacacgcgtgcggacacaggtggcggcggcgcggccctgcggcaccgaggacgacccggagccccgcgcccgcgcccgccgccgcagccgctccaggcctgcgtgcgcgcgtgcgtgagcgcgtgccgaccgggcccgcgacccgcactggggtcgccgttgaggctcagcgcccgccgggcggccggtagtgggcagcgagctgacgcgctgcgctctgccgggagggcgcctggcctcgctccgagccgcgcgcgccccgcgcctgccaagggtcccagctgccgcggccacagagcccgagcggggggtcggctgagagcctccttaacggagccccatgatgtcagccggcccgcacgcccctcgccctccgactgcgaccccggcccgggctcgcgcgccccgtcccccggcagccccgcggccgccgcaccgccgcccccggcccagccttccccgagcctgtggctggagctcgggcccgcctgcgtgcgggcgcagcaatgccccagcgagtcaagcgggcagacgagtggcgatctcggcactagcagcagcagcagcgccgggctgtccccgggctccgactcggacagcagcggcgtggtgtgtggcggccgcggaggcaacgggggcatgcgcggcgccgtgtcccgctcctggagcctggagagcctgcgctcggccaccgccggtaaggacgccgccatccccgcgccgcacgcgccctccgcgcccgggtctgtgctcttgggaccccccgcccccctcctgcctttccttctcctccctcactttctgcctgtcgtttccatctcctggtcccttccttcccattgcttc

SEQ ID NO: 28938 - DNA, 829 bp, Homo sapiens; identical to SEQ ID NO: 26739
  chr2:131792026-131792855
  hyper

SEQ ID NO: 28939 - DNA, 793 bp, Homo sapiens
  chr2:145273332-145274125
  binary
cgcacacacacgcgtacacacacacaaaacctagagagagagagagagagagagaaaagcatcatttgtctctaatcaaaattctctcgtctttgtgttttgctccttccagcacctcacactgcgcccccagccgccccctccccgcgccgcgcagctctggggcaggccgggggcgcgcacaattgtcttctctagaggaaagttgctccaagtgggcccgggcggtccccgcgaggcgcgggctggggctgcggaggccgggaggccgggtgggcgctgcgtcccagcgcctgcctcgggagcgtctacgcggccccgcgccgggtgatcgggctgagagcgaggggagcgagaagtttcctttccgagtctgggctggcgctcgttcgcttgtttgttttcgggggttggtttctttctttttaaactcagttatcctccgtcagctcccccacccccccccggcaccctcgctagtccccagccctctcccctcccccaggcgccttccgcgctcttgccaatcacttttctcttttattcccacgattttgtttggggtaatacctagggggtctctctctcactctcttcctctctctctgtttctctctgtccccccgcgtcccttctctggctgtctccaaaacggacctaccaaactctcacccccccctttaatatcccacctctgatctgcgtgtgcccctcgaacccccatctcctttctccttcctccttcctgactcagcctggataacgggctcctccagaccatgtagaaactgcc

SEQ ID NO: 28940 - DNA, 946 bp, Homo sapiens
  chr2:157176852-157177798
  hyper
cgggggggtgtagaacagctgaggaagacgcagggagcagctggggaggaaagggagggacaccgaggaaacaaagttcacccaagtgaatgcgtcctaattgctccaaggctctctccgcaaagtctacgactgcaagccgcaaagtcaaactacgtctccaaaacgcagtgggcagagcaggagggcttgtgtctccattttcgccgcagggcggatcgcggacacaagtcctctccagtaattccgaagcctcgaaataagactatgctgggaggaggggttggggggtgactaataagaaggcgtgggggtgggggtggggagtacgcggcaagaaccctgctttctggaattctcccgccactgtctgcagggcccagagcgcacttcgcggctagggaacaaaattgccgctctcttcgagcgcccccagcgtggggtggggccctgctttcccgcgtcaggaccgccccaccaggcgccctccgacggaagctggacttttcctaaggaaaggcaaagtcaaagtcggaggaaagatctttcttgcggccccagctgtcgctcctaatggtctcggggaacatactaaaggaaaatgactttaaatcacagtcttgccatcctaaatagttatgtgcaatattttggtttctagcaaaatttaaaagtaaaatggggatttccatatgttcattttattattaaaaacgaattactaaaaagtgatgacctgtttggaattcatatcttgctttacgagcagtcagccagtatcgactgaacacaataaatgcaggggtgcgaaacgtgattgctcgggttcgagttctgtcggatgcaccgatctaagcagaacctttcccgaagacttggaattgggtgcgcttttttttttaagttgtggctgagccctatggggaagaagggttaactgggcgtc

SEQ ID NO: 28941 - DNA, 914 bp, Homo sapiens
  chr2:16081659-16082573
  binary
cggtagctgggtcggagagcctggggcttcccctgagcagccggccccacaccgctgcgagtgcggttgtctgcgtgctcgtgagagctagaattctgcagccaggaacagccccctcccccaggcagtgccttgtgtgaatgaaatggcagtttccaaagttgcggagcctcgccaccaccccctgcatctgcatgccccctcccaccccctgtcgtagacagcttgtacacaaaaggagggcgggagggagggagcgagaggcacaacttcctccaccttcgggagcagtgggcagagtggggggcttggagggaagattggggaacctggttagagggggcgcccattgcctatcccctcggtctgccccgtttgcccaccctctccggtgtgtctgtcggttgcagtgttggaggtcggcgccggcccccgccttccgcgccccccacgggaaggaagcacccccggtattaaaacgaacggggcggaaagaagccctcagtcgccggccgggaggcgagccgatgccgagctgctccacgtccaccatgccgggcatgatctgcaagaacccagacctcgagtttgactcgctacagccctgcttctacccggacgaagatgacttctacttcggcggccccgactcgacccccccgggggaggacatctggaagaagtttgagctgctgcccacgcccccgctgtcgcccagccgtggcttcgcggagcacagctccgagcccccgagctgggtcacggagatgctgcttgagaacgagctgtggggcagcccggccgaggaggacgcgttcggcctggggggactgggtggcctcacccccaacccggtcatcctccaggactgcatgtggagcggcttctccgcccgcgagaagctggagcgcgcc

SEQ ID NO: 28942 - DNA, 854 bp, Homo sapiens; identical to SEQ ID NO: 26747
  chr2:162930102-162930956
  binary

SEQ ID NO: 28943 - DNA, 687 bp, Homo sapiens
  chr2:171669861-171670548
  hyper
cgacttaagcagaatgaaaggttaagtaacgcttcccccagttctcgtctcgggagacagacgtttaaccggtgagcactgccattttttttttcctttctggtcataaattagacacttaaaatagattttaaggagccagctgaaacgaaccaataccatggctctaaattacgtttcctggaggctaaaaattctaattgcgtcaaaaaaaattgacgtgtcctgtctactcaccttgactgaccacgttttaggcgtgaagatctccccgcagcccgtttgggcgctccttcaacgcctcacgctcctcctactcacccgtttttccctttgcagaaaaggcttggccccaaatccggttggaatatctttaaacaatcccccacccacccacgacggggaaaggaataaagggcattgtgggcggagggtcgtgttcccaagtcccagcggtggttgacctaaggaaacgttatcctcggcagacagggtggagtagccggggctgcaagctcgcaaatccctaatgccggagagagactggaggggtcgcatatcgccccctccttcttctgcctttgagcgccgcgttcccatttcttcaaagcgcttcaaatacaatcgaaacagctgggcggacaccactcccttccgggccacccctcatcaccggttcgagtcccc

SEQ ID NO: 28944 - DNA, 835 bp, Homo sapiens
  chr2:171671321-171672156
  hyper
cgagattatttcattggctaaaacgttaggggtgttttgaactctggggtcaaaggaggaagtggttggaaatgtctcaatctcgtgccacaggtgaagtaaacgaatcttcctttccagggaatcacgggttttgggaaaaggttgaggcgagcgggcgtctatgctggacaatgaagaacgaggggcaccgggagatgtgttgcctcctccttcctgtctcctgccccgtgcgtcttgaatgatttagcactggcacctggctccctgattggtgcgagcgtctcgtttagggaaggctctaggagggccggtggatggaattccgagcttcacctggttgtatgccgcccacttcaagcagcgcagagcagctgccggttgagtggtttggggggacgtttcctacgtggagcagacacccccagcctgtccagccccaagcctcagtgcccggggctgcagtcaccgcgcgccccgccgtttaggatgttttttgtgtccttaaaaagtgccggggatttcatcgtcaggtggagacaaggcgacaaaacagtagtttctttagtaccaaaggcaacgcgattatttcaaaccccacagcgagatccctcttgctgatcaggccatgtctgcccagggcggacccttcgatctcccttatggaactctcggtaatttataatatttttgtgtgtgtttccattgtgttgtggtgaaaggcgataaggcattcaaagaaaacggacgggcctccgctgaaccagtgaggccccagacgtgcgcataaataacccctgcgtgctgcaccacctggggagagggggaggaccac

SEQ ID NO: 28945 - DNA, 370 bp, Homo sapiens
  chr2:171678004-171678374
  hyper
cggtctgactgaagagcagccatgcgagcccgatcatctagtcaaatactatttttcacccaattaattcttgaactcttccacgaccccatttcatgccagtttattttaagctgccactaggctggagacccgccaagaaattatgagacgtttcggtcccagatgcctgtgttccctttctgggctgctgtggtcgccctttgagtctgcggggcccggccagtgggtgttgggcagctcgatcggagcctggccctttgcgtgtgggtcagccttcacccaactccgaccccacctccggagctgccgggcgggggtcgcttacgggcccggaggggcgccgggtgccccgcctctcagagacacc

SEQ ID NO: 28946 - DNA, 820 bp, Homo sapiens; identical to SEQ ID NO: 23189
  chr2:173099596-173100416
  hyper

SEQ ID NO: 28947 - DNA, 844 bp, Homo sapiens; identical to SEQ ID NO: 26756
  chr2:175193104-175193948
  hyper

SEQ ID NO: 28948 - DNA, 1394 bp, Homo sapiens
  chr2:175204500-175205894
  hyper
cgcaattcgaaaaaaatgttaatttagaaaataaagtacatatttacagaataaaaatatttctaaaagatttcccacacaagaggaaatacaagcgaagtcagcaccaacatattttttttttccatttttgattactgtccgccttgggaatttgagcgaagattttgatttttaggaaagaaaaaataaattcttgttattaacaatcagcaaaatgttttctcggaaactgttctgaaacaccaagtcgcaaagtagcgataaaacagaacgaaggtccccagcagggagtttgcagcgtgacattcaatggcttcttccttctccttcttgagctccccgcggccaggctgccccgctcttcttactcgagtttttcttcactttggccattttctctccccgatcaagctgttcataaccgggagccccccactccctaagcgcctctggtcgggggatggtcttccggagagccggctggcagggacgcgttttccggaggggcttcgggccggggcactggaggcccagagggtgcctggcgcgtttgggggccgcgggctggcggcgcggagtagagggtgtggtgggtctccccaggaacgcgggcgcccgggcgtcgggcccagggagctttgtttctcgttgataataaaggcagatcaaagggcccggtcgtgcaggtcccgctggccgcgcggctccctccgcaggccagtgatcaaggcctgtgtgcgctgcctctgccccgcgggtcagcggacgtccatcacccaggctcccgggagcggcgggcggcggccccggaccgagcgtccagccgggagacagcagtccgcggaacctgagcccagaggcagcggggccccggggccccggccgaagccaacaggcgaaaacagggcctaggccccctgcccggcctcccccaagccctaggcgcccctgggggcgcggggaaccttgacctgagcgggtggcgaccggccggccggtgatgaccaaattggagacagcgcgcgtgggaggcgagatcccgccagttacaacacgagttcggtccccaattgcggtggggcctcgcctccccagggccacctcggggccccagaggcctgtgcctttccggctcaggggccagaaggagctggaggcggtggtcaggggcccaagctcagaggcgggtagcggcctggaggtcggtgggggcgggggacgcggcctgggggcccagagtctcgcccgggcccggtaagggcagtgcgatttcgagtcccccggtttccctggcatttcctgtcccatagcttccagcgcaacagaggaacgaaaagcaagttttcctcggccctgcgcccacccagccacgatccgcaccatcctccagc

SEQ ID NO: 28949 - DNA, 1125 bp, Homo sapiens
  chr2:175207996-175209121
  hyper
cgctggagtgtatagaaatatgtatgaggtaaatacatacagacatgcctcccccatatattgttgatgtaaatatagactgtgtgtttgcatctccagttaaggaaagggtttcagaatgtccgtggggacacgtccctccagggccggctgtcgaggacccggaaaaccacagcccctaagagttccagattttccaagacccttatactctcttcctgtagaatttcatactgggggttttgcattgttttgcaggcatgtaaccatttctgggtgattcatttatctataaaggaaatgcaaagtggcagggtgtctgccccagtccgcattctgcttgcagattgctgacgaaagttgatatcttcatgtttgtcccaggagcttcataaagcgccctcttcacctgtggagcccgagcgaccagaaaaattcgctcgctttcctaactgctgaaggcgagtccggcccgcgcgggggactgcgcccgaggcccggcaagcttaggcggggactagcagggccctcggcgggcgggcccccagcgaaaaggcctgagaattgcttctggggggtggcttgggccaacgggggcgagggagccgcgcagagggcaggccccgacccttccccgccgcaccttgtgggtcgggtgttgggcggcctcctggcgcgggaggcgcatctgctaggaagggtgtgcgctccccccttctcggcctccccatttcggtttggggtgttttcgcaaggttgccagacggtgcatccagaaggaaaccaccagagcacgcaggggggcgtcgcctcaggatgggaaggggcgacctcagccaggattcatcccatcaccctactccacccccattccggcttcctttaggtttagggcgacgtcctcctgggaagccctgctctgtcaacccaggagccctcggacctccacttctgtccaccccctcgcgaagcccttcaagcccaagggactggagaaaggcggctccggggcagctcgggccggagggtgcgtttcttttcattccaggcagctctccgcgttcgtcccgcacatcttcgtcattactgctacattctgggcattctgggggtgataagtgtggc

SEQ ID NO: 28950 - DNA, 2499 bp, Homo sapiens
  chr2:176944127-176946626
  binary
cggctttgtccttcccggggaaggcggccacatccctacccgccttgctcctgaacgtagtaaacaatctcacaaacaaccaccgctgcccacgctctccatccgtcctcccggccttatcagacctccgttctcccgcactcttcgggcagggtccctaataagctcaggctgaaagaacgtttgccacctcccccaccctcgttgaaagaaaaggaagaaaaacagcagcagcgagaaacctccggggcgactcctcccccgcccccaagcaccagcgcacagcatccccctctgtctttgttgtggttctccgttgcttcgggccacgccgttcagccaagcaacccggacctgagagtgcacagccaggactagcttagggggcgaggggttggtctttgggaaaccaagcgctcaggacagaggtggaaagtgggtcccgggagccagaaaagagagagaagggcagacggctgggtggcaaatacaaaaatagaaataatttagggggatgcccgccaggcttttgcgcctgctccttctcccccaattcggagcaggttcccttcggcctcccgcgccccggggcgccccctggcggcagcggcagcagcgggcaacgcgcggagggctcagggggcgcacaggggactcccgggcacactcagagaggcgggcgcggccccctggcggtggcgacgtagttatctggtgagcggagcctcgtccctctggtccggcgggctcacggccgtcttactaagcaccgcggccgagtagggcaggaagccgctctcggaacgcggcgccgccgcgctgcagccgaagtccgagcctcccccggccccggcgcccccgccgccgccgccaccaccaccaccgccgccgccaccgccaccccgggaacccagggctgcggcagctgctgccgcggctgccgccgccgactgactgctgtggcaactgaggcacgagcagggtgcagagccgccgctggggggcgcgccggccgccgccgccgaggaggccgcagccgctgcggctgccgcggctgccgcggcagaggccgcgctgttgagccccgcggcggccgcgggagcctggtagagaccagggtggcggaagctacacagcagctccggccgagagtaggggtgcgagagggcgcggaaggtgtccagtggccggatggaagtagcgaagggcgacgaagccgcggccgccgcgcctgaggctgcagccgcggccgccgccgccgtgacgcccacgtgcgggtagtagtgcagcggcacgtgcgagtggaaggggtagggcaggcttccggtggcggccgcgtgcgtcatcatgtaggtgtagaagctggggtcggctgggtgcggccaggacatggccaggcgctgccgcttgtccttcatgcgccggttctggaaccacacctgcggggagagacgcgccgcagcctgggttagggagcgccccgtgttcccagctcctgtcccaggacctctgccccttccggacctctgaatggcttggtctacttctctccgaccaagcccaaccccgagtaccctgtggtctcccagctgggaaagtgtggacggcagtgtgtggaccgccgtgggcacaccgtcctcaacgaagagggtcctctcccccgcgtccggctgctgctgctcctcaggcttttattcccttacttcttgctgcacttttttgtcccaatccaacctttcctctccctcccgccacccaccagtgccggtctcgctgagcacccgtctctcaatcccaggatttgtacggggattctgggcagcctttgaagagaggctgccgctcagcttttctgagaggtcgccgcgcgaagtcttgagccctccgaactgcaaggacctgcccctaggggcacgggtccgattttgatattgaagggatgattttgttggaatcgtttgccttaaatgagtgggtagagcaatgtctccataaacggggaaggggacgtttccacccctcccaacactatctaataaagacatcattcgtcacaactctaaattaaagaaagcccgatcaaaccagagggagacttccacactcctcccctaccccgtggagattttttcttttttctgcagtgtcgaacgctccatgaagggctcaccaaatcgcctaacctcccggctatctctcccagacgtataataaaattaataacctaaagttatatataaataaggacaatttcgttgcatttttccccgcaggaggttgcccttttttcgttgcccaagaggaaaatgttcaggaaactactgtctcaaaccaatcgattttaaagatacagtatccttttctccgtgtaacgatttatgcggaaaataaatctccaagctcaagagcaaatgaaaagtttcacctctggttcctgcttgaggaacaaagaccaactgggcttgccgcctaggggaaagtggggccgtgggtatgggc

SEQ ID NO: 28951 - DNA, 966 bp, Homo sapiens
  chr2:176964403-176965369
  hyper
cggtgctgaaatgaccggctttgaagaacctgcaggcaaagtttcgtccaatcgtctgagcctgtcctcttattcccggttgtaactaaatactgttgcgagcgcagccgaagccctttgttggagatgtgtgagcgcagtctctacagagcgggctatgtgggctcgcttctgaatctgcagtcgccagactctttctacttctccaacctgaggccgaatggcggccagttggccgcgcttccccctatctcctacccgcgcggcgcgctgccctgggccgccacgcccgcctcctgcgcccccgcgcagcctgcgggcgccactgccttcggcggcttctcgcagccctacctggctggctccgggcctctcggcctgcagcccccaacagccaaagacggacccgaagagcaggctaagttctatgcgcccgaagcggccgctgggccagaggagcgcggtcgtacccggccgtccttcgcccccgagtctagcctggctcctgcagtggctgctctcaaagcggccaagtatgactacgctggtgtgggtcgtgccacgccgggctccacgaccctgctccagggggctccctgcgcccctggcttcaaggacgacaccaagggcccgctcaacttgaacatgacagtgcaggcggcgggcgttgcctcttgcctgcgaccttcactgcccgacggtaaacggtgcccatgctccccgggccggtttgggccgggatgggaggtggggttcaagggagagtgtaaggggaggtgaaccgcctgggggcgggcaatagacagagtacgggctgggttgacgtgggttggggctgtgttgcaggcctgccgtggggggcggccccggggagggcccgcaagaagcggaaaccctacacgaagcagcagattgcggagttggagaacgaattcctcgtcaacgaattcatcaacaggcagaaac

SEQ ID NO: 28952 - DNA, 381 bp, Homo sapiens; identical to SEQ ID NO: 23190
  chr2:176975945-176976326
  hyper

SEQ ID NO: 28953 - DNA, 1938 bp, Homo sapiens
  chr2:176986474-176988412
  hyper
cgaaccgcgcgaagcggccctgcccggggagactcgctgaggcagggctgaggcggcgggcgggagcaagctgctctagcatttgggttctgccctgtggcgtgttctcttccagggcctttccagcatcatcggagaagacgaagcaccctggccgccactgtccgtgctgcgccaactcgcccggccgcccgcccttccgagggcaggcagaagcccctctgtgtcctccaccgccgcgccccggctcgcccctcgggccgcggcgtgtgcccagcctcacgtcggggtgtgtgtggccgcgcgggcgtgtgtgagtgtggcagggggagggggccctccgatctgctccatccgtccgttttattagggacacattaatctataatcaaatacacctcataaaatttttattgaaaggcataatatcattacagaggtcttccacctgttttaaacaacacgacaagctgtgagcaagcgtgtgtgtggggatgtgtggggaggggtgggtgtgagtagggagagaggcgaggggagaacagctcccctcgggcgctaggggccgccccgagggcccgcctgcctcgggcgacaccggcctggcgcccccgcggccgctccgtgtgccctggactcgccgcccgcggctcggaagctggagagtcagcgacggggcccgactgcgggaccgagggctgcaagaagaagcgaacaaatagtccccagcgcctcctctggatgcggtcgcgtctgtggtcctggcagccgctgggcgggccaggccaggtcgggccgggccgagccgggcacatggacctgggcctgcgggctctaattgcggcgcttatgttgatgattttttttttaatcacagcagcccccagtttagcggactgatttactcccggtattggtaaatatgatcacgtgggccgcgcgaccaatggtggaggctgcagcctgcgaactagtcggtggctcgggcgccggcggggagctgctcggcggcggacagtgtaatgttgggtgggagtgcgggacgcctcaaaatgtcttccagtggcaccctcagcaactactacgtggactcgcttataggccatgagggcgacgaggtgttcgcggcgcgcttcgggccgccggggccaggcgcgcagggccggcctgcaggtgtggctgatggcccggccgccaccgccgccgagttcgcctcgtgtagttttgcccccagatcggccgtgttctctgcctcgtggtccgcggtgccctcccagcccccggcagcggcggcgatgagcggcctctaccacccgtacgttcccccgccgcccctggccgcctctgcctccgagcccggccgctacgtgcgctcctggatggagccgctgcccggcttcccgggcggtgcgggcggtggcggtggtggtggaggcggcggtccgggccgcggtcccagccctggccccagcggcccagccaacgggcgccactacgggattaagcctgaaacccgagcggccccggcccccgccacggccgcctccaccacctcctcctcctccacttccttatcctcctcctccaaacggactgagtgctccgtggcccgggagtcccaggggagcagcggccccgagttctcgtgcaactcgttcctgcaggagaaggcggcagcggcgacggggggaaccgggcctggggcagggatcggggccgcgactgggacgggcggctcgtcggagccctcagcttgcagcgaccacccgatcccaggctgttcgctgaaggaggaggagaagcagcattcgcagccgcagcagcagcaacttgacccaagtaagtgcaaaagaaattgccccctgatttattgctgaaacctgtaaggctcgaatgtgcaaaactgatagttttactaacctataaaaacgtctagac

SEQ ID NO: 28954 - DNA, 1485 bp, Homo sapiens
  chr2:176993479-176994964
  hyper
cgtaactttgaggcctgcgcgctctctcggcagtaatttcacaggcttggcggaggaagtaggatcgttagcataagatgggccgcctgcagctgcctggaaccggcgcgatctgaacgccggctgggaggctcctggggggaacttgcggtcgtctgccctccgcactcctccgggaaccgcagccggccctggttcgctgcgcgccggggctgagacccgggagccgcgtcctgcccgaggaaatgtcaccctccccagcgcgagccctttttcccgcctcagaacgtttctgtccgctcttctatttactctctcagcaagcctaatgccccctcctgcattcttcagcctccccctgcgcccagggctgacgtctatcaagggtgaaatgatggaaactatattcatgggcatgatttccattaaatatcaattaacctgagagcctcggccaggcttgcggtgcgtcaagggtaaatgtacatctcatttccacagggcccgctcggctggaaaagaaaggctttgatttgctttgataacgccaggatctggggccacactcgcggcttttaattaaaccacttcgatatgccccaactcaaatgcacggtccggtccgtcaacacctcttgtccacgttccctgggctgcacccgcgtgtccagagctgcaaaagccacgggcaacctctgcttttgcagccaggggctcggggaggcagtcatttgctccgcagcctcctgggagtggcctccttggctcccccaagtctaaggctccgccgcggcccctccctgccggctgcgatccgcattcccgcggccccggggcacacggagcccttggcagtgcgtctttatgggccccctttaaggccggcggaggcatctcgggccgggcgcggcgctccgtccgtcggccgtagcgactgaactgcgcgcggatccctccgcggggctcctcgtccccgtcacgctgactttccgtgcagtgctgtggtgcgaaaatgcctcgccggtgcgcaccgggtcggcagcctcggcggcgggggcgagattggcgggaggggggcgcggggggggcgcggtaagaggtggcggcgggcagagggtgttttttttcttttccctccagagccggggtttgtaaaccgaggccagagtgtccccgtgggccgagcgcacttttttcttgtccgggtgcgctcagtcactggtgcctgagaggaaacagtggaggcagcggggcaggtcgcctggggcgtcggcgattatattgcggccgagccggggcgcgccgggaaaggccgggagggcggcggcgcgcgggggctgggcgaggccccgcgacccgcgagggaggcggcgcgaagccgaggcggcgggcgcaagagccgggcatgagcgcccagtagctgagcgcccgcggctgcctggcctcagaagcgacgcgcgagcgcgggcgggcggcagcagcgac

SEQ ID NO: 28955 - DNA, 953 bp, Homo sapiens; identical to SEQ ID NO: 25441
  chr2:177001081-177002034
  hyper

SEQ ID NO: 28956 - DNA, 722 bp, Homo sapiens
  chr2:177004997-177005719
  hyper
cggcctgaccattcccggatcttgttatgccagcacagcacattcgagggctctggggggcagcagctcggcgaagagcagtcaaataaataaataaataaacaaataaatgaacggacatataagggcttttcccgcctgggttcgcttaaataatgggggacaagcgcctctgggccacgagcttgttgtttgtcctgggatggggggtaggggatgagaggtggcctcaggtccctcttgctccttccagccgccccaggggacactgtagaaccagcctctggtgcggggagacctccgcctgccggaggaagtcccagcctcaggtttccggggctggtggtctccctgctctgctgtctggcgcctcgtccaggaggaggcgctgtaggacaagcgtctcgccggctgcggcgggccggggagggcgggagcggagggatcggtacccgctcctcccttcccgcgcactctacctccgcgcgccaagtgtgtggggcctcgaacaagggtcgacggtgctgcgccccgtcccccaaggggttcctttccccagactggcagtggaagcagctccgaggcctgggagcctagggccgttccgggttggcgggccacctcgctttctccgcgctcccggagggggcgcgatttcctcgtgctgcgcttgtaggagcagcaacttgaatcctgtgtggggcaagctgggcccaatccgc

SEQ ID NO: 28957 - DNA, 1776 bp, Homo sapiens; identical to SEQ ID NO: 22868
  chr2:182321353-182323129
  binary

SEQ ID NO: 28958 - DNA, 376 bp, Homo sapiens; identical to SEQ ID NO: 23192
  chr2:182818959-182819335
  hyper

SEQ ID NO: 28959 - DNA, 182 bp, Homo sapiens; identical to SEQ ID NO: 23193
  chr2:188418970-188419152
  hyper

SEQ ID NO: 28960 - DNA, 859 bp, Homo sapiens
  chr2:200329083-200329942
  hyper
cgggttggggtttattttcaataaattcagctgttcacatacacccccaccaccatttccacgcgcgcgcgcgcacacacacacacacacacacagagggacttgtcaactattgagacagcgacccagaaaggtgtaaattcacctggtgcccacccaattgcaaagctcccagacccacacaaaacactagcgagccctggaggtctgagacgccccgcgcccgactcacggcgcgaacaccagcgctccggccgggtcgcaggggccggtgcccagcgggccggggtctggcgagccaggcagcgggccggctgagctcctgcgccccgcggtcgcgtggcctactcgcctactcccttattattggctgggacctgttcctttccaaagtgtgatgcccggtgtcctaccctaggccacgcggagctctctcccggcgtgtcgggccctgcgcccctgcccagtggctcacctcggctcgctgcgcccgccttcgccccaagtgcccaggacggagcgaggggctgtgggtcggcgcagggacgctggctgctcacctccaggagccgacagaaggtgccttcggcgtcacgcgtccaaccctggggctgatttaaataactaataagctcagagaaattttacgaggggaacttttccttttagtatcaataaagcctagtaattgggtttgttggttacctaagctcgagttcgactttctcagtctctctctctctctctctttctcattcagaggcaacgttttcaaaaaccggcaattgcgtgtgcgtttggggtgtgcaagtgtgagtgtagatgtgtgaaagttatttgtttcagcagtccttgtctc

SEQ ID NO: 28961 - DNA, 119 bp, Homo sapiens
  chr2:206830607-206830726
  hypo
cggggccttgcaagtctcggcagatttccctgaccttgcgtgccaaggcagaaggtgagatggcaaacagatgcgcgcttccactgagagcgtgcatgtgtgtgcgtgtatgtgagtgc

SEQ ID NO: 28962 - DNA, 1020 bp, Homo sapiens; identical to SEQ ID NO: 25448
  chr2:219735657-219736677
  binary

SEQ ID NO: 28963 - DNA, 543 bp, Homo sapiens; identical to SEQ ID NO: 23570
  chr2:220150664-220151207
  hypo

SEQ ID NO: 28964 - DNA, 230 bp, Homo sapiens
  chr2:222435635-222435865
  hyper
cggatggacggacggatagatagatggatgccggaaaggagaagaatgagagacggatgtgagactagatgcacgcaggccagagcaccagcatacgctggaacagagcacgagcatacactcgaacacacgcgcacacactcaggacatctgcgcacagacatacaatcctccgcgtccgcttccacgcaggcattcgcgcacctacatacacgcagttgcacgcgcgc

SEQ ID NO: 28965 - DNA, 941 bp, Homo sapiens
  chr2:223162580-223163521
  hyper
cgggggcgatgagcatctctgctggggcgccctaacctggaaaaccattgaaaacggctcaggcttgcaagacttcctgcctccccgggattcccagaatcttcaagtggacggaaaggcgattcctaaacaagttatagaaacttctagatgctatttgagatacatagaattctaatttatttaattattctaaaaattccaatcacaatggcgcggcgttagccaccacaactttgcagggcaaaaaaaaaaaaatacttcctgaactaacatatgtttcacaagtgtgggcgcagccgggacaatttcgagacaacttcgagacaatttcgaatggacaaattgcggagaagttgcttctgccgctcagaagccggttcacctccttctccaccgcggcatttccaaaacaacagggacaagtctccccggctcgccgcaggcctgaccgcccagctccgccaggatttgcagagagcagcgcgctccatttgcagaaaggaaatcgagtaggtcctcgcccccgactggtgcttcttggggtgtggggtgcccagggaatgggcttcctggaagcaccaaaggagcctgcggagcctggggatggggtgaggcagccggtcccaggccctgggatccaggcggcgcgctgaggccctcccttaccttccagcgggaacccgctacgcgggtagttctgccccgggcccggccgcatcatcctgggcacagcgccggccagcgtggtcatcctgggggcagcttcgctcggaaattatatccaggtgaaggcgaaacggaaaggcgagtgcggcgcggatgaccctcgggaactatccggagcgtggagagcccctccccaaaacggctggagagagagggagggacgcggggaggggggctgtcggttcctagtccagaggccggagctggaaccc

SEQ ID NO: 28966 - DNA, 257 bp, Homo sapiens; identical to SEQ ID NO: 24249
  chr2:233198455-233198712
  hypo

SEQ ID NO: 28967 - DNA, 785 bp, Homo sapiens; identical to SEQ ID NO: 23196
  chr2:234474820-234475605
  hyper

SEQ ID NO: 28968 - DNA, 820 bp, Homo sapiens
  chr2:239757293-239758113
  hyper
cgtgtggcgcatggagggcgcgtggtccatgtccgcctcccactagcgccgcgccacccacctccggaccggcgcgccagggtaggtgctgcgcgcgcgacgggcgccctccgctgcggggggcgggcggcaggggcgcaggggcattggggcctgctcgtgtctcctcggcgaggccccgcgggccgcgggggcttggatgccgtgcgcttttcctcttagcaaggaaggcgggcgggcgggacgctcacagtcccagggacacccctgagtgcagacttccacgcgagggtgtcagttgggaaccggcggaccggtgactcccccggcgggttctgaagatacttagacagatggtcgcagttttcattctcggtggtgtgtgggtgtccgtggttggcggtggaaggagcgagcatcagaaaaacctcctggggccggctggggactgggatatgaggaccagctgccctttgcgtccgccgcagcgcaggccgcccgcgaagctgcccgagccgggtgttgccgggcgaatggcttcgctttcttcctgggcaagggtagagcgcgtccgtcgggcggacactcagatctacccagctgctcgcgcctggggtccccggccgtcggcgccctggcctgcccagtgggcgtagaggtgcgggcctgcggctccagggtttgcctggggaggacgggaggaaactgccctgcgcttcggggccagagcagccacagggccgggtgtgcccgagaagggccctgggccgagagcgcagagcctggagcgctgaggcaggcgggtccgacgcagccgcgc

SEQ ID NO: 28969 - DNA, 252 bp, Homo sapiens
  chr2:239957248-239957500
  hypo
cgccaggcgcgcccaccccctagcctagcagccccgctctcctgcgggctcccccgtgggccaagtctcctaaactgggccagcctggagtcaggtgcgtgcagccctgccactctacctccttgcagcgaggcctggagggcgttccacgcgtgggcaccgcggccttcggaggcctccagagtcggcctcagtgggcgcgtcctccctcctgctggaggggactggacaccgttaatgacagcgaaaatc

SEQ ID NO: 28970 - DNA, 902 bp, Homo sapiens; identical to SEQ ID NO: 11476
  chr2:239969842-239970744
  hypo

SEQ ID NO: 28971 - DNA, 131 bp, Homo sapiens; identical to SEQ ID NO: 6539
  chr2:242277184-242277315
  hypo

SEQ ID NO: 28972 - DNA, 175 bp, Homo sapiens
  chr2:242554503-242554678
  hypo
cgcgaaaagaaagaagccagacaaaaacgtatatattctatgattccaattagatgaaattcgagaccaggcagaaaggatggagggtggggaatctgaacggtgacggggaggggcttggaggggagtgcaaaggagaacctggaccgctggacgtgggtgtggctgcacaagc

SEQ ID NO: 28973 - DNA, 691 bp, Homo sapiens; identical to SEQ ID NO: 25464
  chr2:242617764-242618455
  hypo

SEQ ID NO: 28974 - DNA, 210 bp, Homo sapiens
  chr2:242815156-242815366
  hypo
cgcaagggcggtggccacgttgcctacggcccccagggcaatggctgcttctcccaaggctattaccagaagaggcagctgaggtccaggttccacaaggcccgctgtgggtgccgccgggaggaagacgagcgccctggccgtgcctgccgtaggccgcacgccgagccctacgaggacttctggatctgggtgtccatgaccgtgtgc

SEQ ID NO: 28975 - DNA, 732 bp, Homo sapiens; identical to SEQ ID NO: 25468
  chr2:26407466-26408198
  hyper

SEQ ID NO: 28976 - DNA, 50 bp, Homo sapiens; identical to SEQ ID NO: 11483
  chr2:27165764-27165814
  hyper

SEQ ID NO: 28977 - DNA, 97 bp, Homo sapiens; identical to SEQ ID NO: 11484
  chr2:272137-272234
  hypo

SEQ ID NO: 28978 - DNA, 314 bp, Homo sapiens; identical to SEQ ID NO: 9517
  chr2:3582036-3582350
  hypo

SEQ ID NO: 28979 - DNA, 810 bp, Homo sapiens
  chr2:37899247-37900057
  binary
cggtgacccgcagggaagcgaggccacctgagtgcgccgccccggccaggccgcagctccccaggtccctctcagcccgggctccggtgggcgcggagggggagggtcgcgttctgtcagtttctagctcgctcccctcagagctgcagccaaaacccggagagtggaataagcgccctgaagatgccggagctcccggctgagcaactggacacgcgacgaacagcagacgctacaggttctcctacccagagggaggcgtttcttctccctcagggtctttcaaaaggatttgcctaaagctggggcaagccggtggcggctgccccagacgcgcgacgaggcgcaagtggcgcagctgccggcccgagagagtaaaattcaggccgcggtggcacctgcgcccgccggtcacccggccaccgccagcgccgccgcccggcgcgcccctcccctccgccggggccggagcgtgaaccgggttaatgaatgctaattttcttaatcggcctccgtctcttcctcctccgcgagtcgtcggcctggggaaggagtaggcgacaggaaagggcggtgttttccggctgggaggtcccagcccgcatggtcagccaggggagggggctgggacccctgggagtcggacgctgggggcctggcctctgccctgagactctcgggttggatggaaatcctggcacaacgcggagaacctcccggataccttggctttgccgagagatatcagcttcaggtcatcaccgcggtgccctgggtctgtctgaaaccttagagggtgcgccttaagcc

SEQ ID NO: 28980 - DNA, 226 bp, Homo sapiens; identical to SEQ ID NO: 9518
  chr2:39186687-39186913
  hypo

SEQ ID NO: 28981 - DNA, 943 bp, Homo sapiens
  chr2:45161933-45162876
  hyper
cggctgctgaggcgctcttctgccggctattgtacggctggcgcgggctccccctggccacatcccgggcctctcacacaagaagaatagttctgtttccgccgtaaacccccacacaaaggctgcccggccaccgggtcccctgtcccccttcccggggacttcggcttttgaggtgctgctgcgcgttctttctccctccccctctcagggcgccagggcccagaccaaggagctaagagtgatcgggacttgggggtaccgggtggaactccttgggggccgcccgccaggcttcctgggctgcaactcggagcccagagacccccaggggaagggcgcctcttcccccaccaccaccccagccgtcgcctgcgggaggagcacggggaacccggcccagccaaagggggaagagggaggggaaaaggaagaaggtcggggaggggctgaccatataaccagaattctttaaacggacttacccggccacctgttgagaatccatgtggggtcggctggctccggagttgcgcaaggtggacacacaaaaccaaaagccggagttgggaaaagaaaattctttctctgaccatgccagacgcggccggtcaggctcgcagctccgcgctaggatcgggcggctgtacaaccaagatcgactttgccctgtcccccaacgcccccctcatcccacggctccacggctgggaggctccggactcagagctcgcggactcggcgctcagggtcagcaccagcagctcggcttaagccggggcaggctctctaagccctgctcagaagtcaagagcagcagtgctgcctctcctcgccgcctttcatgccgcggccgctccttattcttgtgtctcggcctctcccggccccctcggacaaaacccccagagcccggccactctcttcccgctaaatccccttc

SEQ ID NO: 28982 - DNA, 967 bp, Homo sapiens
  chr2:45181466-45182433
  hyper
cgggggcagtgaggctgtagacaggaaggcccctaggaaactattccaataggcaggactgagctaagacgccagaatgggttaaaggcatttccaaggaggaatggtgaggacttgatgaccagctgcagaccttataggctgccctccgaccttcagcttcctgtgcgctcacaattcacgtgctcacacgtgctccttagaggggtctgtcggtggacgccgcgaaccaatcaaacccttgcactttgttccaaaacccattccctaccagaatgggagtcctgtagggccaggtctcctcccatacccacccatttcggcctttgttctactgcacaataacagctggcactggggtgcgggaggacggtgaaagctcgagtcccaggctccaaatcctccaggagtaactggggtgacccgaggagagcagcgcactgggtgagtggaagcgtggcccgtgagaagggtaccgagggtcagaagtgtcgcaagggacccaggacgcgcgcgcctccgaacccctgagtcttcgcaggctctgcgaaacttcagtgcgcgcagcctcctgcacaccgttttcgcgcgacctccttgcctcggtctccaggggtcaagccaacccagcgcgggaatgttccatttgcccttttgggacattcagagaggcttttccgggctgccgcggcgcttccacgcagaggaggcgtcggcttccaggcagcttggcgatcttgttattggacacgcgagagtttagagacccagagaaatggagtgagtcaaagtcaaactcaagtttctcggcccctagtcctgcgattcttccattgcacattgcacccctgggcctttcacatctgctcctagcgagcttggagtgtaggtgcgaccagggcgcatctgtgccagtgcgtgtctgcgtgcgtggcctttgggtgactccacgcccgcaactgtctcc

SEQ ID NO: 28983 - DNA, 975 bp, Homo sapiens
  chr2:47798249-47799224
  binary
cgactgcggtgcgggctaccactccgccggggaacctcgtcttgctcctccctgcgcttcgcctctggaatctctcccttatctcatgccgcggtgaaactttgctcaagttggtggtgctctgaggtctccagggctggaggccgcgcgacgcgaatcgccgacactggattctcgggcgttagtccgaagtttaagttcccttcgttcactcctttgccctggatcgaaccgcagccccaggacgcagcgggttccactggaaacggggaatcggggagaggcggtcgctgggctccgggcgacctgggaacgagggcgtttgctccccctcccgaccgagcgggcggccggcgtcagcaccgcggacagcgcatcggtgccgcagccgcgggcgggcgccgctagggctgccaggggtccgaggcgcgggcaaggctgctcaccccgctgtgctgtgcaccccaaaccttccctgttttcctttctacctcccgtgtgcacccccctacccgccacccgaggcaggtgcggtcgctgaagcaggctgctgacagggcggggacgctgcggaatagagacgggggaggagtcaagcgcgggtagggggccaaggtgccacagggagaaagagcccaggcccggcggactgccgggctcctcgcgccaccccagctcaccgacccctctagcccggggcggggaataacaccctgggtgcggtagagagtagaggaatagaggaggtgtaggggaagctcactggcagctcccctgaggccggcgcggggaacggtgtgctatggaacgcccctgggaaatggtcgcccccctacgccccaccgcggcaggaaaagacgacggatgccccgcgcggctgcgggtgctcctctgctggacacaagccggctttgccggggccacaaaagttctggcgtggaacaccctcagtacaggcggaaaatcatcctcttc

SEQ ID NO: 28984 - DNA, 564 bp, Homo sapiens; identical to SEQ ID NO: 26796
  chr2:60706396-60706960
  hypo

SEQ ID NO: 28985 - DNA, 1067 bp, Homo sapiens; identical to SEQ ID NO: 22877
  chr2:60783811-60784878
  binary

SEQ ID NO: 28986 - DNA, 421 bp, Homo sapiens
  chr2:60796211-60796632
  hyper
cgaacgtctccttctccagatcacccactagagtacacagatgcctcctctgccccacactctctttctttcctcctcttctctctgtatcaggggctgggtggtaaagaggctgactgagggggagtcacgtgggcagcccgtgggcagcggcggcagcagctcaaaagaaattgactgactggccgcttgggcgcatttcaatatatggaaatgaccagaggcttctgcaataaatcagcactcaacactttgtcatttttctagttctgcttcattttcctattttcctcttctcctcacagaagcctcatttcttgcattttgccttgccgcgtctcttcccacttccaacctacaccctctccaaatcttgccccatcctctccatcgctcccaaccaccgcgcgcccccaccccc

SEQ ID NO: 28987 - DNA, 605 bp, Homo sapiens; identical to SEQ ID NO: 23199
  chr2:60796723-60797328
  hyper

SEQ ID NO: 28988 - DNA, 128 bp, Homo sapiens; identical to SEQ ID NO: 11493
  chr2:61074853-61074981
  hypo

SEQ ID NO: 28989 - DNA, 670 bp, Homo sapiens; identical to SEQ ID NO: 24273
  chr2:63280967-63281637
  hyper

SEQ ID NO: 28990 - DNA, 946 bp, Homo sapiens
  chr2:63285490-63286436
  hyper
cgggtggcttcaccgcggctggggaatccgagccattccttccacgtgctaagatgtccctctaagccctcagctcctgccagaagtagccaaattacctttcttcgtactgtaaacttcctttaaaacatacaaactcataacctggaaaagtcgacaaggacgcctttcactttggcaggggaagaagacgactggcttgcatctgggggtcaggaaggacagttccatctccctctgagggaagacggggttgaggggtaatcctcccccagaaaatgcagagcctggaactgtccagactctggcctgaaacctcctgggtgtaaggccatgaatctgctcgacttgctcacgggcgggaaggaaacaaggaaacaacgaaaagtttcctgcgaagtgaccaacatcccctattttttaaaaattccgtgtgagacctgagaacacactgtgaagcggggttcggagaacgacccctcccgcgttccgcgcccagcggggtcgcagggctgcgagcccggctgtagcaaagctttctcggccgcgtcctccctccggattcggtaggccaggctcgggcgcgcccttcccacaccaacaaaccatctttcccgactcagcagaggcccacaggggcgcagccgctgtccctccgcccttggcccagcggcgccgccctggtacgccaggcctgaaggcagggccggcccgcgccacgcagggtctcccttaggcggcgccttagggtgaaatgcggggccaagcctgacctgccggggtgccccgtggcatctctggtgcggaccccgcacgtgccggggagaactggcaggcggccagggcgaggaggcttccagcttgcgccgcactggcctgggcacccgggctgcagggccttttgggccctcccctcagtgaccctgcctgtagcggccccagggcc

SEQ ID NO: 28991 - DNA, 92 bp, Homo sapiens; identical to SEQ ID NO: 9525
  chr2:64538788-64538880
  hypo

SEQ ID NO: 28992 - DNA, 711 bp, Homo sapiens
  chr2:64836206-64836917
  binary
cgtccgcctggacactcgggagtgaaggcgtgacaggcctcagccggccgtccctcctcgcgcctctgccccgggggacgcacgaggaccagaaagccgagggggcgcagggcctgctctggccgccgggcccgggatgccaggatgcggggggccggggctgccggtgctcttgggggcagggggaagctccgctccctctacagaggacaaccgccccgccgccccggcagcctccgaggcgccctctccgcgcttcactctcggccgctcccccggagccacgcgagccggtcgtggcggctggacccgagcctgggagcctgcaggcggccgcgccgcgctgcgctgccgaaccgcccggagccgcaggtccgccgcccgcccgctcgggggcgccccagcttccggcctccggcggcttccgcgtcgcgctcccaaggcccggcggccgcgccaggtcccctcggcgccccccgtcccctctgccgggcgctcgcccccgcctccaccctgggatctgagcccgggccgtctccccgcggcgccgcgcctgacggtcactctctctgacctcctgggcccagtcctggggccaagagccgcatccccggggaccttggtagaaaaatatgcggctcctgtagccacccaagatcttctggatgagaacccctgcaccagcagactgggtgtcgtggacctccaagc

SEQ ID NO: 28993 - DNA, 99 bp, Homo sapiens; identical to SEQ ID NO: 6540
  chr2:65251127-65251226
  hypo

SEQ ID NO: 28994 - DNA, 1013 bp, Homo sapiens
  chr2:66808540-66809553
  hyper
cgatgcaggtctgtttgttttctttccccgccgccccactgtcccttttctcgtctccccgcgcacctccccagacgccctgccggggtggctccgcggatgaggcggtcatttgctgtccgctttgcggggacgggtcactttccgcgctggcgtgaaagcaaatgtggagctgcttttggaaggcgccggccggacgtcggctaggctccttctccccgcgggctgggggccctggggctctgcaaggctctggctccgaacagattgcgcctcccgcctggctgccagtaggaactggggtgggagccgcgtaactaacagttgcgcgcaggaggcgagccccaggtgtgagcgcagaggctctctccccagcccgcgggtctgggaacctttcaggacgcctccctccccaactcctacccatgcgtctgctccctaggccgagcccccctcgtgaggttttaatgaccgcggacgcaggggagcccgcacttgagcgaggaccgacttctctggcgggtccacgctgctcgcgcttgcgtccgcgggtagcgcgctgtgcccgggtcagggggcgagctgcgagaagtaggaggggtcaagacccccagaaatccctccatgggcacacacacaatcaagaatagggttgagggtcttgagaggtagaactaccctaggcagggcttctccaactcggcctttggaccccgcgcgcgcccaagggcgtgcccaccgcggaagcacagatcatcttcccgggactgggtctcctggaccctgcgttgctccctttttcctagcggccccgtagctggctgccgcatgtagggcgatcttcattaacttggacgcccaacgtgattgaaatagagaggaggaaaaaacacatttgatctgggccgaccctttgtcttgaagcagattaggcagcctagaaataggaggaaaaacagaaagtctaggcaggaaaacttattgtgttcacaacatataaaaatgatccgagc

SEQ ID NO: 28995 - DNA, 123 bp, Homo sapiens; identical to SEQ ID NO: 7218
  chr2:69928507-69928630
  hypo

SEQ ID NO: 28996 - DNA, 620 bp, Homo sapiens; identical to SEQ ID NO: 24277
  chr2:70351179-70351799
  binary

SEQ ID NO: 28997 - DNA, 970 bp, Homo sapiens
  chr2:74740324-74741294
  binary
cgttggtgcccacccgccaccgccaccgcaggatggtagaagcgcccccctctctgagcccagtctcaccggctcagaggcgccagggcccccccgggggccggggcgggccggggaaggtaatgtaattccggcccagctaacccgattaccgcggcctgcaccgggcagggcggcggcgggggcgggtctaaggctcaggggcccgcccgcgggggtcccatccccgggaaggacgcagagttcacgcactcccggctcctggattcatggccagaggtcacaaggtcaccaagcggcttaggtctttccccacctcccttctctgacagctccaggccattttttgagtttgggtggggtaaaatgtttatgggaaacaaggcggccaggatccaaccaaggcctcagtgaggtcccacgtgtcccccgtggcgagatttcgccctcccgccgttgaggaggaagagtgtgagaacagacttcctaggcacagaatggaggggcagagtcctgcattgaggactccctgcacttggggtccgggggtaagtgccagccccaagaacccgccggcctgatttggcccgggttgagccatggtccgttttacacggattttggaaaatcgaaattctaggaaacacaggacaccaattaccggtgcgcatgaacagggctggggggacctacaggagaggccagaaggcgcaccacgatcgccagcccaaagcggccgttccccgcccttagcccctgccgtccccttcccacacctgttctcttcctgggcctgcagctcaccgggcgccgttccccagccgcttcttacgcagccgggaaaccacaacgagatttggtcttcgagagcatttaggcggggaccacaacgaatccgggagttggccagaaggatccatcgagaggcgaagagtgggggctgggggaggaggcacctgcggaggaagcc

SEQ ID NO: 28998 - DNA, 788 bp, Homo sapiens; identical to SEQ ID NO: 22878
  chr2:74781700-74782488
  binary

SEQ ID NO: 28999 - DNA, 736 bp, Homo sapiens
  chr2:79739586-79740322
  hyper
cgcggcagtcactacctttgcagcactctggccctgccctcctcctgccacgtgtcggacccctgctgggctggccctcctttcctactctgcgacacccctatcccccccgcccctatcctgcccgctcccgcacccggtccctctccccgggcctcgcgactccggcgattcagctccgggtccccgcccgcagggtaacgcggttgtcatggacacggcacctgcgccctacggcggtgccccttcgccgccgtcccctccccccacctgcggcgccgagcctgccgcgcctccagagctccgccctaccccgccccgccctttcgggcgctccccaggccgcgcgcgcccgcggccccccacccagccacccctcgatgcccggtgcctttccaggcgccgcggagccacggggaccgcgggggcgcgcgagcgagcaagcggccgcgcatgcgcactggctgcctcccctagcggcgatccgggccgctgccgctcgcgcttgggcaggacgcggggcgggcggggggaggggggagcggcttcgcttccagccccgagtgaggcggagacccaggcgggcgggcagagcaggcggcaccgcacctcggccagaggcggctgcagcagctgctgcccttgtccctgccgccgcctctccagtcccttctgtgattaccactccagctgctgggaacgggcgagaaagaggaggaggcgagaaactcccacc

SEQ ID NO: 29000 - DNA, 960 bp, Homo sapiens
  chr2:80530603-80531563
  hyper
cggcgcagtttctgaaaggcgtccccctgcacggagcagatgtgattgtgatccagatagagccacgtgagctgcattaaccccgtgaactggccggcgcgcagctccgagaggctgttgtagcgcagggacaagcccagcaggccggacaggttgtggggcgcctcggtgaggttgagcgcctcgcagtacagcagccgcccctcgcaccggcacagctgcgggcacccgctgggggcggcgggcagcatctgaaagcaggcccccagcagacacaagaccacccccgagggcctcctcagcagccagtatagacagagaccgagcagcaggaaatccattagcgagaatctttccagagagactggagaatgtccattggaagcgctcggtcagaaatctacatcatattttattccgagggaggggaagcgggggagggggagaaaagggcaaaaaatcaaataaatacatagaaataaagaaggacccccctccccaaaaaccacacgttcacctctaagcatgcagaaagctgggcagcatagaaagttcacagccacggaaagatcaaagagatggtgatttggtccatgttagatgctgcagcaaagaaaagggaggaaaaaaaaaatcttcgggaaagaatttaattaaaaagtgtcttacccacccttttccagagagtgacaacctccattcagctgctccctttgtgtgcaggctaattatatgcagggcgagagaagacccctctgtgtttccgaggcagccccggtccgcggccggcggatctggcaggcgcacaatgtctcactttgctgctcggctcggggctgcaagggcggccggcaaggcggggaggcgacttctaggacccgcaagtttcccaactacgtgccggagcccgagcttcgccttcctgccgccttcctttccctctgcagttcggactgtgac

SEQ ID NO: 29001 - DNA, 839 bp, Homo sapiens
  chr2:85360795-85361634
  binary
cgcggccccaccatgccccagctcggcggcgggggcggcggcggcggcggcggcagcgggggaggcggcggctccagcgccggggcggccggcggaggggacgacctcggggcgaacgacgagctgatccccttccaggacgaggggggcgaggagcaggagccgagcagcgatagcgcctcggcgcagcgggacctagacgaggtcaagtcgtccctggtcaacgagtcggagaaccagagcagcagctcggactcggaggtaaggaagcaccgcggccacccccgggggatcccggccctgcgtccgctcacccgctcttgcctttgtgtctcctccgcaggcggagaggcgcccgcagcccgtccgggacactttccagaagccgcgggactatttcgccgaaggtatgtgcccgctgggacagccccccactctcgattcccgctgcgctccgctgctcagcccgggcggcccaccgtcccccttgcttgggtggacgcacccttgccctccgcctttattggcggcagcccccgtggggcgcgcgtggggggcgctggggtccccagctcccgcctcgagccccctgccgcggcgctgtcagtcccgggggcctgggcctcacctcgccttggtcttgttcgcagtgagaaggcctcaggacagcgcgttctttaaaggacccccgtaccctgggtaccccttcctgatgatcccggacctgagcagcccgtacctctccaacggacccctgtctcccggaggagcgcgcaccgtgagtgcccgtcgggcgcgccggggagggtgggaggccgcggcccgcaggatgcgccccc

SEQ ID NO: 29002 - DNA, 142 bp, Homo sapiens
  chr2:8833988-8834130
  hypo
cggggggtttctgtctcctgacggggccctgactggtaccccaggctccatgagagcaccgtggacaacaggagcagccgaacacgcagaatctgcgggaaggggaatcgggcagtgggtgcggcccgtgcaaaggcccggc

SEQ ID NO: 29003 - DNA, 200 bp, Homo sapiens
  chr2:88650247-88650447
  hyper
cgcctcccccgccgccttcccgggccgtttgtccgaaggcattatgcaaaataaagccgccttgtttcccgcgcctggtaaccccgggcttcccggaggctttcttggtgagagggaggatcccagagcggcgacccggctgaatcaccgcgagccgcgagccttcttcctgccacttgttctggcccacctgagaattc

SEQ ID NO: 29004 - DNA, 46 bp, Homo sapiens; identical to SEQ ID NO: 6541
  chr2:8868792-8868838
  hypo

SEQ ID NO: 29005 - DNA, 978 bp, Homo sapiens
  chr2:88751675-88752653
  binary
cgggccccgcgggcgcggcgggcgaggcgggcgcggcgggcgcgggctgcgcgaagggccgctgagagcagccgaagtgccggcggcaggcggtggctgcagaaagggcccggccgcggccccggggggcggcggcggcggcggagcgcccaggtacgcggcggcggctgcggcggcggcggagggcgggcctcccacgccgggcccgttgagccacaggtaggggttggcggcggcggccggcggcgcggcgtagtcggccagcccgtaaggcgccctggctgccgggggggcgcccggggcggcggcggtggcggcgggcgggggcaggccgggctgcgaatacactccgaagttgtcgccgcagtagagggccatgtcggcggccgtgggcggctgcggcgcggccgcggcgaggggcgagcggggctggtctcgccgctcgggcgagagcatccctttgggggccaaccctgcggctccgccttcacccgcgctgggcgcccggtgctccgggccggggtcgggcgggtgctagcggagcgcctgctagccggcctcttataaccgagcccggcgcggctcctcctgggccggcccggagcggggcggtggccgcgggcctgggctctccacgcccccgccacgccccacctgcccgcgcgcccaaacccggagcccgcccgccccgcccctaccgcccctctgcccgggcccgggagcgtctgggaggccggcgcctccaggtttcgggcaaaaagcagcaccccattcctagcccacgtttcttaacatcataataagtaaagccacgaatattaaagagaagataacccgaacagtacgaatgatttctaaaaagttaacttggggtggccgctcgggccacctgcctagtcatccttttggcttttctacctctttcctcctaaccttttgtgatcgagtcgcggaattcacgtccagtctcaaccgatc

SEQ ID NO: 29006 - DNA, 148 bp, Homo sapiens; identical to SEQ ID NO: 11506
  chr20:20343543-20343691
  hyper

SEQ ID NO: 29007 - DNA, 762 bp, Homo sapiens; identical to SEQ ID NO: 23576
  chr20:20376606-20377368
  hypo

SEQ ID NO: 29008 - DNA, 802 bp, Homo sapiens
  chr20:21085683-21086485
  hyper
cggccactgcacctggagcccgaagcaccggacaccaggcgcgccgttctggcgctctgcagggcctctctgggtgaaggaaagcgggcagcctgggttcagcccaccgggtcccctttcgaatgccatttcccagctgaaaatccagccagcacagcctggacgccgagccctctggagccctggtcaggacgctttaattttcaccctcccgctctgggtctgaacaacccccccgtcccccgccccccaccccaaggtgttgtttcctagggtcttctggggacatccctacctgtcgagggcctgccctcctcgggctaaaagttcagcccttcgacagagccatggaataagaggcgactctccctgtgtcccgcaagtggtttctcgaggtacccctctgaggctgcagcccccggagcagacctggctctgcatagcagcaaaagcaaccgcctacctgggccggggcaggactgtgccgcggcggcagggacagtgtgagcgccgccggccccctcacccggcgagggccctgcgctcacacttcttccaggggaaggagtggccacgcctgagcccccctaaacgacctcttcaggagaaaagagtgccggccaggagtccctccagtaacctcagtttagatcgggttttcgcgcctcccctaggaatccggctggaaaccccggagactctgcgcctagagttttgcgggcgtctctctgcctccccgcagcttccggctctcgcaggcttcatccactccctcttcccccggacctgcctgaaccccgcc

SEQ ID NO: 29009 - DNA, 635 bp, Homo sapiens; identical to SEQ ID NO: 24296
  chr20:21372082-21372717
  hyper

SEQ ID NO: 29010 - DNA, 972 bp, Homo sapiens; identical to SEQ ID NO: 23206
  chr20:22557951-22558923
  hyper

SEQ ID NO: 29011 - DNA, 903 bp, Homo sapiens
  chr20:22563363-22564266
  binary
cgagatgtacgagtagggcggctttgcgtgcgtgtagctgcgcctgtaggtcttggggtcgcgggcgcggctcaggcccgcctgcccgtacatggggctcatggagttcatgttggcgtagggggccaggccgcccatggccccggccgcctgccccccgagcgggctcaggctgggactcaagtgcggccccatgcccgccacgccggccgccccggccgagccgcccatgcccgccatggcgcccgcgccgggggacatccccgccagggacgggctcatgccagcgcccacgtacgacgacatgttcatggagcccgcgctcatgttgcccgagccgctgcccatggcggccgccgacatgctcatgtacgtgttcatgccgttcatccccaggccggcgttcatgttgctcacggaggagtagccctgcggacagagccccgggagggaggcgacagcgttagcaccgcggctggagggtgcccagacctcccacccaccgcccaggcctccgcgtccggggaggcctccggggagccctttcgtccccgatggcccagtctccggactccgagtctgtttcattcagggagagtcatgatcgatcgcccttgggaaggtggcgagcggattgctgcttgggcatgtggcccgttcctagcccttctccacctcgcccagattctagaacaggggtcccatggagtactcccaagccagcaccccaaatacattcccctaccccagagtctccccaaactctcccaccagcatactgagctggcgccgaggcccgaagtccccggacgccacctccggtcgcagcaagcaacctgcgggacaacgcgcggggcgcctcgggctgcctccagcgaagactgtcccgggccccctctgtcc

SEQ ID NO: 29012 - DNA, 488 bp, Homo sapiens; identical to SEQ ID NO: 23207
  chr20:22567354-22567842
  hyper

SEQ ID NO: 29013 - DNA, 160 bp, Homo sapiens; identical to SEQ ID NO: 25508
  chr20:2668754-2668914
  hyper

SEQ ID NO: 29014 - DNA, 549 bp, Homo sapiens; identical to SEQ ID NO: 22881
  chr20:2820455-2821004
  binary

SEQ ID NO: 29015 - DNA, 313 bp, Homo sapiens; identical to SEQ ID NO: 23210
  chr20:291046-291359
  hyper

SEQ ID NO: 29016 - DNA, 833 bp, Homo sapiens; identical to SEQ ID NO: 22882
  chr20:30639044-30639877
  binary

SEQ ID NO: 29017 - DNA, 615 bp, Homo sapiens; identical to SEQ ID NO: 24300
  chr20:33879796-33880411
  hypo

SEQ ID NO: 29018 - DNA, 33 bp, Homo sapiens; identical to SEQ ID NO: 11523
  chr20:36793833-36793866
  hyper

SEQ ID NO: 29019 - DNA, 962 bp, Homo sapiens
  chr20:37434609-37435571
  binary
cgggtaccgagagcgctaggtccgggagtcgggctggaatgggggcgttctccccggcctcgcaattccttgacgaggccaggggagggggcgcattggcaggttgttggctgcggccgtcgtagaccgatcttggggcggggaggtggggtcctcggtctgttctggactcatggggccgccgtctgccgggggtgcaatgccgggcggcgggagccacagcggacaccaaacaacccccccccgcgcactctcccggccgggcatggtggtgccgccccctcgcgtggcggggcttggtcctggcgggcagcggcagggcgcagagagcgctcctgcccgggcgggaaagatccccaaggcaggcgcctccacctgcagacccgccccgcctcaggatccggctgacagcaccagccagcccggggagaccccgcgagtggtagttccccgggaggggcgcgcccggcctctcccagggccccgtgcgccggcggctgggtcccccgcgccaggagcgctcccctctgggcgactccggctcatcgattccggcccagaggagcgcccccgggcgccgaggatgggcggagacgtgcagccgcccctgagaggtcgcccagaggggtctccccaaggtcacccggagtgcccaggctgagctgcccagaccgccccgggtggagagccgggaggcaggcgctcgctgccctcctccttcccccatgtagactcccttcctccgctcccccaccccggcccggcctccagcttcactggagatgctgatgatgcagctcccagcccttggaggataattgagcctgggagagctttgaatctggccctcctgagaccccagggctgcgccgctgccgcgcgccaggcctgggtcccggtgctcccgggcacctcaggagcggagggagagggatgtggcttcatcagcgcttctaggaacc

SEQ ID NO: 29020 - DNA, 328 bp, Homo sapiens; identical to SEQ ID NO: 27922
  chr20:399954-400282
  hypo

SEQ ID NO: 29021 - DNA, 249 bp, Homo sapiens
  chr20:40020340-40020589
  hypo
cggggcagagagagagagcgcgcctcaatggctttcaatagttcaagtgcattcacaccaggcgcattcctgcgcttgagattcctagcatcagccaggagcggcttagtgggagaaagagctgcgacggtgatgatagtgacattccaaagttttgtggcaacatgaaggaggaggtgtgtctgcgcttgcacagtgactgcagcccttgggcagatgtggagaatgtgtgaggctaaaggctcccac

SEQ ID NO: 29022 - DNA, 313 bp, Homo sapiens; identical to SEQ ID NO: 24305
  chr20:42088459-42088772
  hypo

SEQ ID NO: 29023 - DNA, 957 bp, Homo sapiens; identical to SEQ ID NO: 26833
  chr20:42543097-42544054
  hyper

SEQ ID NO: 29024 - DNA, 55 bp, Homo sapiens; identical to SEQ ID NO: 7245
  chr20:42833281-42833336
  hypo

SEQ ID NO: 29025 - DNA, 262 bp, Homo sapiens
  chr20:43729515-43729777
  hyper
cgggaccgtcccggagccacgtccctccccaaaggaggccccttacctgtggtggcacctcccgggcgcctcgcgtgtctgtcccaaagccaccgaggctgggagccgctggctatactcggtctcgcctctgccccgccggccccgccgagcctcctgctgcaggcggccccgctgccctctccttccttcttccttgcctagtcccccgcggctgaaggccgcatcgatcgctgccggaggagggagtgaggccgctggc

SEQ ID NO: 29026 - DNA, 588 bp, Homo sapiens
  chr20:44879699-44880287
  hyper
cgtgcccgtgtactcctctaccacgaagaactggttccacacccagccgcgtttgacgcggccggctcccagcgcgccgtcctgccgagctccgggcgccgacggcgagggtgtgcccgctgcccacaggcgccccagcagcgtcggcggcggcggcagcagcagcagcagcagtagcgcgggggacagcgcgactcccgcccggagccccctaccttcgggcctcggcctcatccttggcctgcgcggggctggggcccaggagcatggacgagaggcaccagggcgccgctgcttggtcgcacaacgatgcggcgccgtgtcacatggtggcctcagcgcggccgccgggatgtcgcccccgacggggcacccggacgggcccgcggccctgaacgccgcccagccgcgggggtacccggctggagggggagggggcgcggccgcatccggggcatggacagcccccggggtgcccgcccgcgcccccgtcgccgcgtcgcgtgcggatcaccaggcagcacctggacagctccagagtcggggaagcgccatggttcctgcgcagaaaggatgcgggttggggcc

SEQ ID NO: 29027 - DNA, 180 bp, Homo sapiens; identical to SEQ ID NO: 11530
  chr20:45825086-45825266
  hyper

SEQ ID NO: 29028 - DNA, 224 bp, Homo sapiens; identical to SEQ ID NO: 24313
  chr20:47905365-47905589
  hypo

SEQ ID NO: 29029 - DNA, 174 bp, Homo sapiens; identical to SEQ ID NO: 7251
  chr20:52374073-52374247
  hypo

SEQ ID NO: 29030 - DNA, 977 bp, Homo sapiens
  chr20:55199913-55200890
  hyper
cgtaccgcttgtcatatacatatgtaaagataatttaaaaccctagggtatacccttttcaaatgcagagtttatagtttccaaggggaggagggcaggggaggagtaaccaggacctttcctgccagtcttccaatcgcgatagctcgttttggctgtgaatttccccccttcccctccccctcccgttaattaaataaacgctggaagcgtgtgtttaccgcacacgactcggccctcggggaactctttttctacgtctctcctactcttaaactcctcaactcacagagggttggagagctggcaccatgagcttccagttcctacgggtgagaaaagaggtgtctgtgtggagggcaggtgcgaccccgggggctagcagagaggagaggctgcgggaggactcgctgcgaagggcgaggggtggcgctgggtgggacgggcgcctggggccgtgcagggtggctcctgggtgctgcccgggctgcctgtcgcccagtactggcgcaggaagacgggtccgcgcagcgtctggcaacagtggcctgctccacgcctggaggcgaccaagttctgagttaaaggcgccgggcttagccgggaagtgtatggcgacccagaacacggagcggagaaggcctcaggggacacgaggctaccgccttagtcctcgggcctgcgctccgagcggttagggtgcgtacggatgggctccgggatgttagtggagaggtgacaggagtctaccatcccacggccaagcgtgtgaggcctccggcgggcgggggtcccccccggggcagggcagggggagagtcaggcatgtctctaacgggctccctagtagaaccgctaggaaagtggccttcaaccctaggcacctttgtggctttcaggtagttgggcgactaaaaattcacttttgcctgctgtgaaatgggacaggtggttgtcaggttagagactgtgcccac

SEQ ID NO: 29031 - DNA, 1480 bp, Homo sapiens; identical to SEQ ID NO: 25533
  chr20:55201892-55203372
  hyper

SEQ ID NO: 29032 - DNA, 381 bp, Homo sapiens; identical to SEQ ID NO: 26847
  chr20:56772009-56772390
  hypo

SEQ ID NO: 29033 - DNA, 280 bp, Homo sapiens; identical to SEQ ID NO: 23579
  chr20:57268860-57269140
  hypo

SEQ ID NO: 29034 - DNA, 596 bp, Homo sapiens; identical to SEQ ID NO: 26855
  chr20:58507727-58508323
  hypo

SEQ ID NO: 29035 - DNA, 474 bp, Homo sapiens; identical to SEQ ID NO: 22885
  chr20:58514041-58514515
  binary

SEQ ID NO: 29036 - DNA, 409 bp, Homo sapiens; identical to SEQ ID NO: 6550
  chr20:60725146-60725555
  hypo

SEQ ID NO: 29037 - DNA, 680 bp, Homo sapiens
  chr20:60953036-60953716
  hypo
cgcagtggccggcccgggggtgcaaccccatcccctctctggggtccctttgcagggcagccttaggatccattcactgtggccccagggcccagggcgacctgtgaccctgcggagccacctgcaggagtcccagcagatgagggcctctggctgcccctcaggggcttgttgggtcccacaagaacttccagggcctcggagctccagccgggccacagagctgggaaccttgagtggctgggaaccctgaggagctgggagagccaggctgagcaagacaagcctgggcgactcacctggggcaggaatgtggattccatcactccgcagaggctttcaagcaaaacacagcctcgtctctgggcctgtttctgccgtgcgggcacgtccagcccgacgctctcagaagcagctgggatgggctcggggaggtgggggtggagcaggagtcccagccgccttcctctggggcccatcccaggctcccggctgggcgccagcagggctccagaaatgagggggcctcacaccgttgcctctggacgtgccgtgcccgaaatcccgccattcccactgggcatgccgggccctcgaatcctccatgactccagggaagcgactccgtcccgcttggcctcagtcactgctctgtcaatgggatgataactgcccttccc

SEQ ID NO: 29038 - DNA, 871 bp, Homo sapiens; identical to SEQ ID NO: 24326
  chr20:61287746-61288617
  hypo

SEQ ID NO: 29039 - DNA, 166 bp, Homo sapiens; identical to SEQ ID NO: 11542
  chr20:61591490-61591656
  hypo

SEQ ID NO: 29040 - DNA, 133 bp, Homo sapiens
  chr20:61974565-61974698
  hypo
cggcacacgtggtgacggtgcgttttattcattgaagtctgtgcacacactgggagcacattccagggcttggcagacattgcctgcagaagccgggcggccgcacctgggctcggcgggccacacggtcggc

SEQ ID NO: 29041 - DNA, 387 bp, Homo sapiens; identical to SEQ ID NO: 24330
  chr20:62046195-62046582
  hypo

SEQ ID NO: 29042 - DNA, 850 bp, Homo sapiens; identical to SEQ ID NO: 26863
  chr20:708554-709404
  binary

SEQ ID NO: 29043 - DNA, 1736 bp, Homo sapiens
  chr20:8112248-8113984
  hyper
cgccacacatcctacacactcaaggagaggagcgggagagggcaccctctttcttcctcggaaaataaaacctttgctttctttaggatgggctttctgtctcgaaagcacaacgtaaccgtttgcccgggtttcaagatcagcgcgctgcaaactctcaggcgcggccaggtttcctcaaagagcctctcaactgcgctcttctctgctgataaatgataattctcttcaaaaagctggtttgtggctggcgctggagagctccagctagagccaaaagccaggggttgcctctttggttcctcccgatgggccccttttcccagccagttgggatccaaagacgctccggagctcgagcccaaattcccaagaaaaccccaaagagcgtaaggctcctggggacccctagcacctctgcaaccagggcacggggcatgctcagagcgaatgcgggaggcaggcgttggctgcaatggggctcgggagccaggaggtgccgctgcgtccccgcttcctggcgcctgacccagcgtgcaaagttgggctgggagccgcggggggaaggaaggacccagcgagcgagggtggcggggaaggggggcgggggggaggaggagggaggagggaaaagagcggttagggggggcgccgggcgtgtgtcactcgctctctccctctgtgtatagaggatgtgctgaatggtgcgctttgaggcggcggcggcggaggagcagaatccgccgcgactggcagcctcggctgaccggctcggcttctcttcgccttccgaggctcctcatccaccgcgggctccagacctcgcgtcccgcccggggcatggccgggcgctgcgcccccgcgcgctctgcctgctgagcggcgccggagggaggtgcggaggccgggaggccggggaggccggcggggagcagagtcgagcgcctccggagcagagaaaggagcccgcgccccgcgccccgcgccccgcgcacggtccccagtccctgccgcgctcgcccgggccgcccggagcccagatgagcccagatggccggggctcaacccggagtgcacgccttgcaactcaagcccgtgtgcgtgtccgacagcctcaagaagggcaccaaattcgtcaagtgggatgatgtaagtattggggcggcccgagtcggggcgctggctcgggcaccgggcagggcgggcgtcgtgggggtggggcaaggggcgcgttatgcaatgggcgcactgggagcgggcaggggcagcctcgggcgcacaggttggcatctgccaaagcggatgtccaagggcagaagctttgcgcgcgctcctgtttcatcgggcttcagtagttgccatcctttctgggtctggcaggcgccccctgagggtcttacatcttttgggccagtggagagggaggggcaagctttgcctggtgacaggtcctgagagttcggaaagtagggagtgtgaagttgggaccaactggaaagcgcctggtgtgaacaaatcgcgtccctctccgcctgcggacgcaccccctattacctcttttgcccgatttcaagaaggaaggacctgaagttcaaaacactttagtgattgcgaaccctcttggcgcttttgtgggagccaaggcggcggaggacacaacggtccagccaacaggtggtcgttgatgccaaacttcagcgcctggctccggagtgagggtccctgaaaagggctgc

SEQ ID NO: 29044 - DNA, 1412 bp, Homo sapiens
  chr20:9048369-9049781
  binary
cggaccggctcaggcggctgagcatgcctagtgcagctgcgagcatggccccagtccccaatgcgcaggtgccacgtctccgggttttggtggccgccggccgggagaaggaggaggcggagtggggaggagggagccctccggagttcgggagcagcacgttgtgagggtccacacaagggtgatgccagaccgaacaccattagggcctgggtgtgagtgtgactcggaggcacctgggggccgttgtagggccgggaaaagccaggaactggctggagcagcaccccagcatcccagggaccaaagtctgggggatttgcatgtctgaggttgcacttgtgggaagactttttggaaccacttaatctctgtggctctgtgtaagacccgcgaaataaaaagaggcagtagtactctttggaagattgttttagggattaaatgaataaaaagcgtttagaacactgcaggacgcattgtaggcgctgtatgggtttatgaaaccgaatataaacaaataagcacgtcccccacccagccaacggctttgggggccccgttctggccagtcctgagcccctccacacggcccacggcgggctgcgggtctcccatccgaggagggtgccgcttttctgcccccgctccctgggttctgcgcccagcgccatcccgtgcgcccccgacccttgggcatggggcacatgccgcggggagccgccagggagaccccagaggagcgcgccgcgggccggcttccccggatgccccacccacctcctcttggcgctgcccaccacctgcctcggctgctcggcccccggctcgcgaggctgcgcccccgacccagtcggcgcccactcctcgccctgcgggctcgcggcaactgggcggccggcccggcccctgcccacccccagcccagcccggcgcgccgcactgggcatgctccgtagcctgggcaggttggggctgcgaggcgacagctcgggctctggagccgggaggcgagaacgaggagggaggctcgggggcaggggaggaggaagcggctggccgctgaggggcggcggggcccggagcgggggacgcgcagggcccggcggtgggcgggcgggtcggcgctgccccgtgggctcgctggggagccacggcggagacccccgccctcaactgaggtaaggaccgcgcggcgcggagacggggaggcggggaggccagggagggggtgcggaggcaggcgggagggcgggactggggtgcgccgggagggggcttggcggcggctctttatggcgaggagggggtggtggcgccgcgccgggagcagtaagtgagctgcaccgccaacaagatctctcacacacagacacacacacgcacacgcacacacgggcgcgcacacacac

SEQ ID NO: 29045 - DNA, 1356 bp, Homo sapiens
  chr21:34398005-34399361
  hyper
cggccacgggcgcccattggttgtgcgcagggaggaggcgtgtgcccggcctggcgagtttcattgagcggaattagcccggatgacatcagcttcccagccccccggcgggcccagctcattggcgaggcagcccctccaggacacgcacattgttccccgcccccgcccccgccaccgctgccgccgtcgccgctgccaccgggctataaaaaccggccgagcccctaaaggtgcggatgcttattatagatcgacgcgacaccagcgcccggtgccaggttctcccctgaggcttttcggagcgagctcctcaaatcgcatccagagtaagtgtccccgccccacagcagccgcagcctagatcccagggacagactctcctcaactcggctgtgacccagaatgctccgatacagggggtctggatccctactctgcgggccatttctccagagcgactttgctcttctgtcctccccacactcaccgctgcatctccctcaccaaaagcgagaagtcggagcgacaacagctctttctgcccaagccccagtcagctggtgagctccccgtggtctccagatgcagcacatggactctgggccccgcgccggctctgggtgcatgtgcgtgtgcgtgtgtttgctgcgtggtgtcgatggagataaggtggatccgtttgaggaaccaaatcattagttctctatctagatctccattctccccaaagaaaggccctcacttcccactcgtttattccagcccgggggctcagttttcccacacctaactgaaagcccgaagcctctagaatgccacccgcaccccgagggtcaccaacgctccctgaaataacctgttgcatgagagcagaggggagatagagagagcttaattataggtacccgcgtgcagctaaaaggagggccagagatagtagcgagggggacgaggagccacgggccacctgtgccgggaccccgcgctgtggtactgcggtgcaggcgggagcagcttttctgtctctcactgactcactctctctctctctccctctctctctctctcattctctctcttttctcctcctctcctggaagttttcgggtccgagggaaggaggaccctgcgaaagctgcgacgactatcttcccctggggccatggactcggacgccagcctggtgtccagccgcccgtcgtcgccagagcccgatgacctttttctgccggcccggagtaagggcagcagcggcagcgccttcactgggggcaccgtgtcctcgtccaccccgagtgactgcccgccggagctgagcgccgagctgcgcggcgctatgggctctgcgggcgc

SEQ ID NO: 29046 - DNA, 954 bp, Homo sapiens; identical to SEQ ID NO: 26866
  chr21:34443630-34444584
  binary

SEQ ID NO: 29047 - DNA, 990 bp, Homo sapiens
  chr21:38119724-38120714
  hyper
cgtgtattacttaacaggcattccacctgtttccctgctttgtaacgcggctcctggaacatttcaggtcgcgtcctgagattggacagcacggcctagactaaggcgggggagggcgacagcgaccccgcgggtgcagcgcgtgggcggccgaggggtggtggctgcgcccggggcttgggggtggggtggctgcggccgcgccccttgctgccctctaacgtgtcgcctgtccccgcagcgcccgccgccgccgtgcgcaggttcggcgaggacaccgcgcccccgagcttcccgagctgcggccactaccgcgaggagcccgcgctgggcccggccaaagccgcccgccaggccgcccgggacggggcgcggctggcgctggcccgcgcggcacccgagtgctgcgcgcccccgacccccgaggccccgggcgcgccggcgcagctgcccttcgtgctgctcaactaccaccgcgtgctggcccggcgcggaccgctggggggcgccgcacccgccgcctccggcctggcctgcgctcccggcggccccgaggcggcgaccggcgcgctgcggctccggcacccgagccccgccgccacctccccgcccggcgcgcccctgccgcactacctgggcgcctcggtcatcatcaccaacgggaggtgacccgctggccgcccgcgccaggagcctggacccggcctcccggggctgcggcgccaccgagcccggcaaatgcgcacgacctacattaatttatgcagagacagctgtttgaattggaccccgccgccgacttgcggatttccaccgcggaggccccgcgcgccggtgccgagggccgaggagcgcccgggtccgggcaggtgaccgcccgcctctgtcctgcgagggccggtgcgacccagttgctgggggcttggtttcctcaccttgaaatcgggcttcacgcgtcttgccttgtccccaacgttccacaacagtccc

SEQ ID NO: 29048 - DNA, 198 bp, Homo sapiens
  chr21:39047626-39047824
  hyper
cggggatttttccgcgagtggctgcattggctttaagaaactgcgccgggctgggcagccgacgcaccgctaggtggcgcacgcgctcgctgcgtctttcagggctgcaggtacggtgcgggtttctggtgcgctgaccgcgctggggatgagcaccactgtcatcgcggggaccctcgggctgcgcctctgcccctc

SEQ ID NO: 29049 - DNA, 320 bp, Homo sapiens; identical to SEQ ID NO: 7274
  chr21:44840079-44840399
  hypo

SEQ ID NO: 29050 - DNA, 932 bp, Homo sapiens; identical to SEQ ID NO: 11554
  chr21:45175388-45176320
  hypo

SEQ ID NO: 29051 - DNA, 255 bp, Homo sapiens; identical to SEQ ID NO: 24348
  chr21:46036558-46036813
  hypo

SEQ ID NO: 29052 - DNA, 978 bp, Homo sapiens
  chr21:46126021-46126999
  hyper
cgaggcctagtgcgagcacaggtccccccagacccttcccagtgcccaccaaccggcggcctaggccaggtagaactggcagcgcctcccctgctgcaacaccaggctctggtagaaacttcagaaaacatgcaccggcaaaaccaaggaagggtggctgcgtcccgggttcttccgcgcagctgtgtgtacacgcatgcacacacccacacgcacacacccacgtgcacacccccatgcacacgcacccacttgcacgcccatgcacgcacacacgcgcgtgcacccatgcgcacgcacccatgcacacacacgcgcgcacacacccacgtgcgcacccacatgtacacacccacgtgcacacacccacgcgtacacacccacgcgcacacaccgctgtccccagccgtgcagaacgatcctccctgagtccccggctccgacccacacgcagcactcgctaaacgcttcccacgcagtcgttttgctgggttgcgcttcacccacttctcagagggggcggccgaggcagaggtgtcggggatcgagcagctccgggcctcaggggtcgccccgccaccgttttcctttcccagatgctgggacgggggcagggaggggctccccaggctgaacccgactaggtcaccctagaagcgaggcgagcttctcttctgtttttcttcggcgcccctgagcccctgacagtgcccaagctgcccatgggattggattcgccagagcctcctacgcagaccccacccagggccaaagccaaccccaagccccaccaccttggtggtgtgggatgaaaagtgagccatcgagagatggggtccccccacccccaacccctccaaggacaaaggcgggctgggaagcacccgctttcacgtccgcccctgcccggctttcctagcggaattggcgccggcatcagttgggggttgtgggatcagtgaggaatcccgtggggtc

SEQ ID NO: 29053 - DNA, 303 bp, Homo sapiens; identical to SEQ ID NO: 24356
  chr21:46812995-46813298
  hypo

SEQ ID NO: 29054 - DNA, 750 bp, Homo sapiens; identical to SEQ ID NO: 23584
  chr21:46912072-46912822
  hypo

SEQ ID NO: 29055 - DNA, 132 bp, Homo sapiens; identical to SEQ ID NO: 11558
  chr21:46958789-46958921
  hypo

SEQ ID NO: 29056 - DNA, 387 bp, Homo sapiens; identical to SEQ ID NO: 11559
  chr21:47285233-47285620
  hypo

SEQ ID NO: 29057 - DNA, 323 bp, Homo sapiens; identical to SEQ ID NO: 24365
  chr21:47425511-47425834
  hypo

SEQ ID NO: 29058 - DNA, 100 bp, Homo sapiens; identical to SEQ ID NO: 11560
  chr21:47797837-47797937
  hypo

SEQ ID NO: 29059 - DNA, 731 bp, Homo sapiens; identical to SEQ ID NO: 6556
  chr21:47832850-47833581
  hypo

SEQ ID NO: 29060 - DNA, 293 bp, Homo sapiens
  chr22:18328049-18328342
  hypo
cgaaacttgggaaggaaaacatccaagaggcgtctgtttgacgtgggtaacgtggggaacgcatactgtctggcaagaattctactaggaccacgggaaacaaagcagattaaaacactctctactctaaaagagcttcagtagcacctgggagagggccctgcaggaatcctttcggtacgacgtgtcaagtaccatgagccacgtatgcactcatgggagaacatagagagagtgagtcagcacacctggcagagtcaagaaaggtgttctggaggcatatggagttagcc

SEQ ID NO: 29061 - DNA, 612 bp, Homo sapiens
  chr22:19771495-19772107
  hypo
cgaggagaggcaggcctgggggaccgtgcagcagctgtgcccacctaggaccacagggctggtggggctggcagcttggtagagggcaggtgcacagcaaagttttcaccggtgccggcttgttgtcttccacgctgggatttcacatgaagttctagctaattgagtataagcatttctaaagaacccccggagggttgtttttctttgtgcaaacactccttttgtgcagagggtgttctgtggcttcttggcagagacacaggtgggaaacacctgattgaacatcattgcctggggagtggagacacgcacagcacgtcaacatggagcgcccagcagcggcggcgggtcctgggctgtgctccggagcccttcccgggatcatctcccggcatcggctgacccctcggtgtctacgtgccaagcccaatctgcctgcagggacacccactgccagaggcggaggcaggttctcctggtcccagacccagggccgtctgttggcctgcaggtaacacgcagggaggaaggaaaaggctctaggcacagctgcttgtctaagagggaccctgttggcggcgcaacgctgggtgagtgctgcccgcccgc

SEQ ID NO: 29062 - DNA, 397 bp, Homo sapiens
  chr22:19839604-19840001
  hypo
cgttcgcacacacacggtgtccccacagcagggccgctcaatccagggatccacaaggggggtgtatgccaccccaggagacgccttgtccatctgctgccatggatgtgcgttggcataattggcggctgcccagatgggaatgcgagggccctgctgacggcaccggccacgaggcatgctgggagcacaggggagaagagaggagagccagcactggtgggtggtgggggtgtggacagatgtggcttgcacgacacaacaggacagggatggctgaacagggcgtggcagacccgcactggtccaggcaagtgctgaggatcagggagctgacagctgcagcctcaggagagctgagaagagctgagagactgtcagtcgcaggccatcatcc

SEQ ID NO: 29063 - DNA, 353 bp, Homo sapiens; identical to SEQ ID NO: 11566
  chr22:19899693-19900046
  hypo

SEQ ID NO: 29064 - DNA, 151 bp, Homo sapiens; identical to SEQ ID NO: 25577
  chr22:21153882-21154033
  hypo

SEQ ID NO: 29065 - DNA, 301 bp, Homo sapiens; identical to SEQ ID NO: 26876
  chr22:21982786-21983087
  hypo

SEQ ID NO: 29066 - DNA, 192 bp, Homo sapiens; identical to SEQ ID NO: 6559
  chr22:22324565-22324757
  hypo

SEQ ID NO: 29067 - DNA, 821 bp, Homo sapiens; identical to SEQ ID NO: 22889
  chr22:22862472-22863293
  binary

SEQ ID NO: 29068 - DNA, 1044 bp, Homo sapiens; identical to SEQ ID NO: 23589
  chr22:29445607-29446651
  hypo

SEQ ID NO: 29069 - DNA, 212 bp, Homo sapiens; identical to SEQ ID NO: 23215
  chr22:29550509-29550721
  hyper

SEQ ID NO: 29070 - DNA, 86 bp, Homo sapiens; identical to SEQ ID NO: 6560
  chr22:29587127-29587213
  hypo

SEQ ID NO: 29071 - DNA, 616 bp, Homo sapiens
  chr22:32571858-32572474
  binary
cgacttggggagggcggacggcaggaaacgcgggaggcgaaggcgaggctgctcagcggcggctcgggatgcctccagcaacggggactagccctgcgcgcccggggagggggaggcgctggcgctgtgacggccgcggggagggccaccttcccagcacacgcacacatacgcccccggccctcagccgctccggctgccgctgcccgccgacagctgacctccaggcaccgcagcgcccgggaacagccatctgggaaccgcgaccgcgcactgacacacgcagtggccgccgccgccgccgctccgccaagcgctgcctgtagcacctgcacggtggtttggaggggaaggtctgggcaggcgaacgttccacgagggcgtcccagaggcatctgcagcctccgctctcctgttctgctctggcgcccaccagcccctgaccgagtccagagggtcaccgaagacgccccccagtgctcgaacgcccgttggtgccaggctgcccggccctgagggccttgcctgaggacacccctttcctcccctccggaaggggcgaccgccctttgccaaccccaggcaaagctggggccccaaccttatgtgcgctacc

SEQ ID NO: 29072 - DNA, 218 bp, Homo sapiens
  chr22:36684211-36684429
  hypo
cgccctgggccgagccctggcaccttcatatgtagttggctcagtcgggtgccgcccaccctcacctgggccccgcccacccttacctgcagcttccgcagctgtttgatggcttcgtcccggttcttgttggccgagtcgatgtgcgcctccaggtccttcaggtccatctccagcttcttccgggcggccactgccatcgagcgctgcttcctctc

SEQ ID NO: 29073 - DNA, 850 bp, Homo sapiens; identical to SEQ ID NO: 22891
  chr22:36901811-36902661
  binary

SEQ ID NO: 29074 - DNA, 112 bp, Homo sapiens; identical to SEQ ID NO: 6562
  chr22:36907702-36907814
  hypo

SEQ ID NO: 29075 - DNA, 188 bp, Homo sapiens
  chr22:38516841-38517029
  hypo
cgtagggcctggagccccggaacacctcatccttcatgcgaaagtacatgccgcgcatgtaggccatggacttacctaggaacaaaggggtcagaggcggggagatgcagcggccacacgcagggctcccgtagaacagcctgcagagcgcctgaacgcaggaggtggcaggaggaagcgggtttacc

SEQ ID NO: 29076 - DNA, 122 bp, Homo sapiens
  chr22:38874156-38874278
  hypo
cgaggaaataactccaaataggagtacaaataggagtgctctaggccagtgtggtcctgctccggcagtatcagcgtcacttgggaaacttgttagaaatacaaacttttaaggctgggctc

SEQ ID NO: 29077 - DNA, 153 bp, Homo sapiens; identical to SEQ ID NO: 25594
  chr22:39756871-39757024
  hypo

SEQ ID NO: 29078 - DNA, 553 bp, Homo sapiens; identical to SEQ ID NO: 24382
  chr22:41634408-41634961
  hypo

SEQ ID NO: 29079 - DNA, 143 bp, Homo sapiens; identical to SEQ ID NO: 9615
  chr22:41669366-41669509
  hypo

SEQ ID NO: 29080 - DNA, 528 bp, Homo sapiens; identical to SEQ ID NO: 23593
  chr22:42095795-42096323
  hypo

SEQ ID NO: 29081 - DNA, 450 bp, Homo sapiens; identical to SEQ ID NO: 23217
  chr22:42353588-42354038
  hyper

SEQ ID NO: 29082 - DNA, 281 bp, Homo sapiens; identical to SEQ ID NO: 23595
  chr22:42667137-42667418
  hypo

SEQ ID NO: 29083 - DNA, 794 bp, Homo sapiens; identical to SEQ ID NO: 23218
  chr22:42679388-42680182
  hyper

SEQ ID NO: 29084 - DNA, 112 bp, Homo sapiens; identical to SEQ ID NO: 25600
  chr22:42995235-42995347
  hypo

SEQ ID NO: 29085 - DNA, 122 bp, Homo sapiens; identical to SEQ ID NO: 26901
  chr22:42995599-42995721
  hypo

SEQ ID NO: 29086 - DNA, 193 bp, Homo sapiens; identical to SEQ ID NO: 24385
  chr22:43434424-43434617
  hypo

SEQ ID NO: 29087 - DNA, 733 bp, Homo sapiens; identical to SEQ ID NO: 23597
  chr22:45593240-45593973
  hypo

SEQ ID NO: 29088 - DNA, 553 bp, Homo sapiens; identical to SEQ ID NO: 25607
  chr22:45603889-45604442
  hypo

SEQ ID NO: 29089 - DNA, 567 bp, Homo sapiens; identical to SEQ ID NO: 6572
  chr22:45808579-45809146
  hypo

SEQ ID NO: 29090 - DNA, 971 bp, Homo sapiens; identical to SEQ ID NO: 27979
  chr22:46262409-46263380
  hyper

SEQ ID NO: 29091 - DNA, 127 bp, Homo sapiens; identical to SEQ ID NO: 11590
  chr22:46339131-46339258
  hypo

SEQ ID NO: 29092 - DNA, 359 bp, Homo sapiens; identical to SEQ ID NO: 6573
  chr22:46979972-46980331
  hypo

SEQ ID NO: 29093 - DNA, 832 bp, Homo sapiens; identical to SEQ ID NO: 23600
  chr22:47022417-47023249
  hypo

SEQ ID NO: 29094 - DNA, 263 bp, Homo sapiens; identical to SEQ ID NO: 9636
  chr22:47054031-47054294
  hypo

SEQ ID NO: 29095 - DNA, 350 bp, Homo sapiens; identical to SEQ ID NO: 9638
  chr22:47436589-47436939
  hypo

SEQ ID NO: 29096 - DNA, 425 bp, Homo sapiens; identical to SEQ ID NO: 22892
  chr22:50170525-50170950
  binary

SEQ ID NO: 29097 - DNA, 210 bp, Homo sapiens; identical to SEQ ID NO: 23602
  chr22:50177139-50177349
  hypo

SEQ ID NO: 29098 - DNA, 385 bp, Homo sapiens
  chr22:50316625-50317010
  hypo
cgccatcctcatggggcgcctgccccggttggcactgagtgtctaaggacagggcctggccatcgcctcatcccctcccctgccgcgtggggcctccgaggatggcatttgagatgattcctcctcaggggctgccctcctccctgcccttccccagccggccctggccacgggctgtgtcaggccatgatcggtccttccccgctccctggccgggctgtcctgggccgctcacagctgtgccgctctgttccagatgtggacgagtgtgcggccgagccgcctccctgcagcgctgcgcagttctgtaagaacgccaacggctcctacacgtgcgaaggtgggccaggcgggcgggtctgcactccggggcctgccgggtttc

SEQ ID NO: 29099 - DNA, 256 bp, Homo sapiens; identical to SEQ ID NO: 25615
  chr22:50466785-50467041
  hypo

SEQ ID NO: 29100 - DNA, 828 bp, Homo sapiens; identical to SEQ ID NO: 24389
  chr22:50899033-50899861
  hypo

SEQ ID NO: 29101 - DNA, 1005 bp, Homo sapiens; identical to SEQ ID NO: 23604
  chr22:50942715-50943720
  hypo

SEQ ID NO: 29102 - DNA, 209 bp, Homo sapiens
  chr22:50954823-50955032
  hypo
cgagtgcagactgggccttggattccccctgtctttgtgttgtttcttgcagctggatcagatctgcatttcttttgacgaaggcaagaccacaatgaacttcattgaggcagcgttgttgatccagggctctgcctgcgtctacagtaagaaggtgggccctgcttgacgctggtcttggcattttggtggccagtgggaccacagtc

SEQ ID NO: 29103 - DNA, 610 bp, Homo sapiens; identical to SEQ ID NO: 23221
  chr3:116163681-116164291
  hyper

SEQ ID NO: 29104 - DNA, 152 bp, Homo sapiens
  chr3:117715494-117715646
  hyper
cggatacctagcctcctaaacttaatgccaattccctcctgaaagaggaggaatgcagtgatatcagcaccggggacacggggatagcgaacaccaccgcggctcttggagtttacagaggagcaaccccagctccgtcgccaccacctcgc

SEQ ID NO: 29105 - DNA, 871 bp, Homo sapiens; identical to SEQ ID NO: 23222
  chr3:117715822-117716693
  hyper

SEQ ID NO: 29106 - DNA, 882 bp, Homo sapiens
  chr3:120627130-120628012
  binary
cggccccctcagcttcccgggctggcaggcggctagaggcgtctgaggaaggtgcctaagtcctgggtcagatagtcatccctctgggacgccgccgccgctgccgccgtccagctgtggctccctcgcacctgtgtgtgtctgtgtgagtgtgtgtgtgtgtttgagagagagagagacagagagagacagagacagagagcgagcgcaccagcgcgcgaatgcccgtgtgagggtgtttgtgtgtgttctggctgggagcgcgaatgcctcggcgtgaggtgtttgtgtgttcgcgcgcccgcgggcgggcgagagccccgcgcctcagcgctgggcctgggggagggacagcgggagcggcggctctgcgcgcccagcaggctgaggcgggactcgggccgcagccgtcgccgccaccgcttcacgtcccccgagagcggctgccgtgcagcggggagagcggacggcgggcgggcgaacaggcgggagagcgcggcggcggctgcgggcagaggtggagggaggggagcaggagatggggagaggggggaaagaggacgcggggagggagatgagggggaggtgagggggaggcggagggacaagtggaaacagacggtgtcgccgttctcctcctccccccctccccggcagctgttgctgtgggtcactcgcagatgttttggggtccgggctgctgggggatggggactagaaaaagtacccccctccccgcctttcatagtgacaaaaaaggaagcgttgaagctgatgggggaagagcccggaaggtggtggcagagtaaataccggctcccccaacgtcgtttttctgaaaataaaatactctgagccgaacgtttcgaagaaggaaagtcc

SEQ ID NO: 29107 - DNA, 338 bp, Homo sapiens
  chr3:122296462-122296800
  binary
cgaggcacaagcctgttgggtggggcgcaactgcagtcccagcgagctgaggatggctgcgccaggcccccttcctgccgctgctctgagtccaggggctccgacccccagagaacttatgcacggagttgcaggtgttacttccagagccggacgagatcgggaggcggggagcgtgctgccggccgggaaccgtggggcgcggaaggcctcccggcgctcttcctcccggagtatggtgaggagcgcgggggacgggtgcgggaaggggacagcagggctgagcctggggcccgcaagacccagcagcccgagcgggcgcagagaccccacgccac

SEQ ID NO: 29108 - DNA, 185 bp, Homo sapiens; identical to SEQ ID NO: 7332
  chr3:128737561-128737746
  hypo

SEQ ID NO: 29109 - DNA, 412 bp, Homo sapiens; identical to SEQ ID NO: 22895
  chr3:130064466-130064878
  binary

SEQ ID NO: 29110 - DNA, 454 bp, Homo sapiens; identical to SEQ ID NO: 23225
  chr3:136751341-136751795
  hyper

SEQ ID NO: 29111 - DNA, 1808 bp, Homo sapiens
  chr3:137479525-137481333
  hyper
cggagggtggggcggagccttgtggcaaggcaggtgggtgcaggcctctggggccccagactgccgcgtctggctctaccaggctgtgtctcgggccccgtgcctgcagctgcaaggcggggaaagacctatcgggaagatccacctcggcctgggcagaaggaaactttactgagagtcttctctgagtttggaattatgcggaaattgaacccaagatgaataacacgcagccacagccccagagaagctcgaagtctagtgggctgcaccgactgcgacagggacccaaaagaggctggggaacagggattgaaatggaagtgtgagagtgagagcatagaaggggtcctagcccagcccaggaaacagaaaagtctccccatagacagtgagaggcttgtactgatacctgaggtacgcgcaggagctgcgtgaaaggagaggcccagagccagaaaagaggaaggcgcatcctggacgctctgcgccctggagggagacgaaaggcccggagagaagcagattaggtcggtgcccttagaggcctcttccttcacttccgggaaacagcggcggttccctgacaaaatccctgttgctcgggggttcggacgccttgctaaggctggcacgcagcggaccttgagtagctgcgctgtgtactgaacgtgtgcacagcttctccaggcaaatgtgcaagcggaaagacctcatccaagcgttatctccagccctggaggagaatgaactggtagcctggggccaaacttcaggccgtggacaaagcaggaggagtatttaggcaacctctgtcctaatgcttgttctggttgtgaccgaagttgctgactctcctcaggggtcacgtctccaggacgtgctacccggtggtttagacccgtcagggaggcacagcgtgaagggacagcgcagcgcagtagaggcacctgctggagacagcaccaggccagaccccaggatcacgggaactcctgctcccgccacagctctaaagagtgttgaataaaccggtggtcaccggtactgcgtaaggggtgtgcgtggctttgcagttcgcctaggagacaagctgatgcacggcctggaaggtgcagccctcatccctgcgttccctccccgcgcggagttcctgtctcaaggccaagacgcgcagcgctgatgctggccccttcctaggtcagtgcagctggaccaggcaatcggggtctccgaaacgtcggggggtcagctggcgccctgcccaccatcgaacgcccttcgtatcactccgctcctcattgcgaattggactgcgcattggctgcgacccaaggctgaacacaagaagcttggagaggagctcgggcgtttgaggagaaggaaatatgaggaattgcaggaaggcgctcgcctgcccgaactgcctccgggcaactggaaaggattgtcctggaaactgagaggagagaaaggacgtaggaccttgtgccagatccccttgctgagtaatttccaagagcttggtttgcattaacccagaactttgggtgtgcgtttggtgtcccctggggggttctagagtgagagattggcgggtcccctccgaacgctggatctcgctgcagatatcagtatttctctcattccttcccaaagccgtcgggatcgcccagtagaattagaattgggtgattcctgaatctcctatccctggctggctctgaatatagcgcaccgctggtcagacctgagtaggggttgccagcgacgctcggaaaccctttccagactgggctgaaaagtgc

SEQ ID NO: 29112 - DNA, 531 bp, Homo sapiens; identical to SEQ ID NO: 26938
  chr3:137485076-137485607
  hyper

SEQ ID NO: 29113 - DNA, 1402 bp, Homo sapiens
  chr3:137489762-137491164
  hyper
cgcccgagctcaggctctcctaggtgcttcagggccgggctgcactcgagccccgaggaggccctgctagcgctagcgcggcggtgataaccgagggaggtgggtgagaggtgcggctgtcgaggcaaacgcagagcacccgcccagtcctccaagggccgagagccgggagtcccgaacgccgcttaagcagctccttgcttcccgcagcccgtccacatccctgcgggatttctggacgccccgcccggggacctagggaggagggagagaggagggagggagtgggcagcctgggcgcacgccaccggtccccgtacgcccggcaccccccgtggcgcggcgagtcaatgggatttgcacactcgaggtgtaacagcattactgcattaattaccatttccatttcacgtccagattgtttacttatctgcgggaaacatatgtcgggagaagttcacattccggattctgctccgctgcccaaggtgcaattccggggaggcggcgaggggggaggggagggcttcagattttttattacaccctctagccttatctgccgctgtaaattatgaggatcctccattgagcggcatatggagattatatacttttttgaatatcgtttcccaaagcctgcagattttcactttgaaatgaaacaatcctccgctggttcccccggggacaggcgtctcctgcgttcccccgcgcggcctgggggacccttctcgcagagcaggcgcgcaccccaatgccgtggccggcgcccagtggagacttctttcacagggtctagaataatcttccgcggaacacccatccatatgcagtgtttgagaactaaggcagctcccttgctctgttttcctgcgcctagcccccggacttttgtgccgtttgcagctctttttcatttcgaatacccgcatagacgcgagcccacttctgccctcttcctacgctgggcggctccaaacccgccgcgagggctgaggtgttcacacctgcccacggcagcctgcctcgccctcaagcgcctcaaagcttcctaagcgcttacattggtcttgggacagccgactttggcttctttgtttgtttgagggaccgcggaagtggcggggaatgtgcccccgcttgagaccgcttattgtgagccctcaacggaaatcctgcacggaaggcaaccgcctccccgctcgcggtaagcaggatccacccgagtagcggggaccgaatcccatctttcttatctctcgaagactcctttcaggctgagatcagagagggagggaaaaagaagagagaatcattgttcttctttttttaatttaatataccaagccaccagctcaggtcatttatatgcttaatttagtgataaaagtcaataagc

SEQ ID NO: 29114 - DNA, 977 bp, Homo sapiens
  chr3:138658129-138659106
  hyper
cgaattccccttcactcctcgtccatagagattaaagtttcctgggatcctgccctttttttttctttgactgcctagaaatacttgttctcccttgtacatagaggaaaatgcggggaaaggttttttaaaactcggtttcatactattattattactaaggacaaccgggcaggctgaggtcccaacgtggatgatccgagttggcctcgcgccggggctctgcagccactgccctgtgcgctcagcacctctgggggcgatcagggcccctgcgcttccgcccgccgcccggcagtcgagagcaccctgtgcccagactggccgactcattctcccccgaattttgtttagagctggcaagggggacttagctcgcgccccaagacctgggcttgcagcgccgccaacaggcccggggacacgaggcgctccaggccggggtcttcccggctgctggcccctctcgctccccacccgctggcggcgcctcggtcgcccgcaattgacccaacccgcttcctgcgtttgcccctcaggtttcccgtttctccacaaaggcctaggggagcctcgcccacaggctgaccctgcaacctctggcccggtggctaccttctgcttttctgaaaaagaaaaggaaaaaaaaaaaaaaaaagaaaaaatcaaccagtcgagggaggcgcgtgaggactggaggcgccagccggacagcctatgagtaggtccctgggtcggtgccgcttcgcgggtcagcacggcctttctcagagaaaacctcctaaacgtgtgaagaccgctttgggggaagcgagagggaggttggaggagccccgggcggggtctcagcgcccaccagctgtgccttcagggcttgggtgttcgctgcaacggcaaccgcgtgagcctcactcccacggccaaggggctagggcagggtggatgcaatcgcgtgcgcctggccccggaaggtgctc

SEQ ID NO: 29115 - DNA, 650 bp, Homo sapiens
  chr3:141516080-141516730
  hyper
cgcccaggaagtggcggcagaaagcgagccctgagaagccaggggcaggagcggcctccgcgcgacactgcggcgctcctgattctgcggcctggggccgagcatgcggggcgggcggagcctcgagctaagtcccctggggtcccagggccgcattcctccgaggtctgcaaaggccactgcttaaaggcgcagaggagcagctgggaacgagaacaaagcggccaggcccccctcggaggaaggaaggagagagccccaggaaacagctgatagcgctaagctcagcttgtttttttcctctgctcaacagttctcctgccacggcaaacaaaacatgtacattctgattccctcttctgtttggattgtgctgtcgactggatctggtttgtgatgagctgggggaagaggcatccgcgggcgatttctggctcggcgtgccagtgtgcttttgctgggccgcgccgggatcgcggagcttcctctccggctcctttctccccgtctgcgtcgctaatccagcctggcccggccaccccaagggaagacacggccgtttcttttgatagtggaattggaggttgccaagttttcagatttaatgggaggtggagggttgctcgtgtccttgaccttgaaggacctgc

SEQ ID NO: 29116 - DNA, 147 bp, Homo sapiens; identical to SEQ ID NO: 9663
  chr3:141622422-141622569
  hypo

SEQ ID NO: 29117 - DNA, 356 bp, Homo sapiens
  chr3:141656829-141657185
  hypo
cggtgcgggcccagcaggcaggtgacagccgcccttgcgggagtcatccttaaccaagcagtttcagaaatgtttcttgagaaactgtttccggaagtcccggagcctgtgttgcccattgacaagccttgtcggtctcagaagacagactccgggggtctacatccagagacccggctgaggactgaagcccggggtttccaagcggctgccttctccgtcctgcagcagggtgcgagtcaaccgccctggctaagggagcaaggaacccccgccatgctgtgtcccctccccccattccccgaatgcccgtctgttcaaagagggtgagaggaggggggaataccaactgctcc

SEQ ID NO: 29118 - DNA, 744 bp, Homo sapiens; identical to SEQ ID NO: 24407
  chr3:142895557-142896301
  hypo

SEQ ID NO: 29119 - DNA, 1286 bp, Homo sapiens
  chr3:147109425-147110711
  hyper
cggggaagctcacatctgctcgatttaaagttgctgtttcagactaacttctctgccgctaccccgcccagccgttcatcccccccacccacccccatcctggcccaaattgtttcctaaagtaggttttgcgcaaacgccaaagcgatgaaataatttaaggatgcgcagccgatgcacattgtgtgtgcataaagtggattcgtgctgcagggagaggtattctgagcaatgattcacttcagaagagatttttacaggaatggagccccctccctctttccttctaccccctgagggcaaacatttagcagcattcttcaaatcttgcctaaaccttccgggatccctccagatacgctcgccagtaataatatttcattacgctgctccagaggcttcctggagaccgtgctgtgggcagctggccctcccagtccgcactgacttgcgatgtcgaccggtctgcccagaccacccccacctggctgtcgggcctctcggtcctaagacgaggggttggcgcggtagggtccgcacaggccaaatgggatccgaggtgtctaccgcaaccacgcccttgagcgctgcggcttcgggaagaaaacagctgctgctgtcaggccaggcctggctccgcagcccggagggccaccaggcggctggcataggccggggaggggctgggatcggtggctgcgatgccctgtagagccgagggaaggcgcgagtgcacgttagagtgacaatattggccggaccgagccccaatcggggagctcacggccagctgaattcgctgacgtgtaggagaggaaaggaccccgagaacccggaagcctagattcctgccggagctgcaagtgctgcggaaatgggggaagaaggtttctgggcgctttaaacaaatggctgcctcccagcgctctgagttaagggaccggctacctagcgtctagctgaggaggaagacgcgcagctggagaactgttgcctttgtagttgcttctcccgccgcatccaggaaaaacaggcgctttggggctggttagaacaaacaaagccccaattcccgagccctgttgaggctcggacagagaggtttgcgcacaacctgcgcttctgcgcaatcagcggctcctgagcccgggtctccggcaccacctggtcgctggattcccaccctacaggagcacagctagtacactgaacagtctggaaggtgttggcacctgccatttcgcgggacactggcaccattttataaaacagtgatagaaagatgc

SEQ ID NO: 29120 - DNA, 269 bp, Homo sapiens; identical to SEQ ID NO: 6141
  chr3:150481645-150481914
  hyper

SEQ ID NO: 29121 - DNA, 1056 bp, Homo sapiens; identical to SEQ ID NO: 23233
  chr3:154797121-154798177
  hyper

SEQ ID NO: 29122 - DNA, 838 bp, Homo sapiens; identical to SEQ ID NO: 24412
  chr3:157812151-157812989
  hyper

SEQ ID NO: 29123 - DNA, 1599 bp, Homo sapiens
  chr3:157820473-157822072
  hyper
cgggcctccgacaggcccagtcgctggctcagttcctctcgcatgaaggcgtcgggatagtgggtctcgtcaaaaagcctctccagctcattgagttgttccagggtgaaattggtccgacttcgcctctgcttgattttggtctggccttcgtcctccatccctttcgcatcctctttgcgatctttcagctccggggacactggagggggcaccccagcggggccacacgtgcatccacacgaacacacacacacacgcacacacacacggacgaaaacagcacagcaaatcctgttaccagatttgtcgcaaaaaagaatagagaatccttccccctcgtggaatcctggtccggcttctcaacccacccggaggaagaatatcccggagaagcgcaaaggtcaagtctgagcggccgcctggggcaaggtgggcagtcatccaccacctccttcacaaacgtacctcgactcaccgcctcactattcaccccccagtcaccggccttccccagcaaacaccaaatggtttccactcactttcgcactcacttgctccgcagcactcacagaaatcaaaggcgcagcgccaggcctctcacagagcaaagtctggacataagggcgcggcaaggccacccactggcctctcacaccggccattcccagaaggctggctcgttctcaggccagctctcaccaccgctggctctctgcctaccgcaaacttgctggtctaatttaggaacaattgggccgaaaggtatcagcgagagcaacagaccccggtgttgtgccgcacagggagccgcatccgcagacgcccctcgctgcccctgggctcgggccaaaccctgcataaggtcccctggacagccaggtaatctccgtcccgcctgcccgaccggggtcgcacgagcacaggcgcccacgccatgttggctgcccaaagggctcgccgcccaagccgggccagaaggcaggaggcggaaaaccagcctccggtggcgggcgaaagcaaccgctctttctgttctctcttcgccctccctcgtggaaacgcagactcgaccctaaacgcttaacccacagagatcaacaggttcaagcggaatattcgcgatcctcggtttctattggttgctcaaagccttttcatgcaaccagcagctcggatgtttaataaaatatgaatttttctgctctgggtttgcacacatccgttgccactttcctgtccttctcctccctttaaaaacaggagctcttctagtgtgagcatatacagccaccatatatatatccccctggaacctttatcctctgcgcccgaatcagagactccgggttttaagaagtcaaagctgagtttagatagtcgaggctgtttgcagttcttcccagcgcaggatccaggccagcatgggtgttaaaaatcatttccggaagagccggtctgcagagaaattaatacttgccctgagcttggaaatcaacaatcccaggaactgcgcccgccgggggttcagacctgaacctcgccgtcaggcgcgctggcgaacctgtagttcgggcctgtagttgtggactcatggcc

SEQ ID NO: 29124 - DNA, 1115 bp, Homo sapiens; identical to SEQ ID NO: 23237
  chr3:157824433-157825548
  hyper

SEQ ID NO: 29125 - DNA, 225 bp, Homo sapiens; identical to SEQ ID NO: 26957
  chr3:168960241-168960466
  hyper

SEQ ID NO: 29126 - DNA, 1376 bp, Homo sapiens; identical to SEQ ID NO: 26958
  chr3:169378540-169379916
  hyper

SEQ ID NO: 29127 - DNA, 820 bp, Homo sapiens; identical to SEQ ID NO: 24414
  chr3:169539913-169540733
  hypo

SEQ ID NO: 29128 - DNA, 168 bp, Homo sapiens
  chr3:176897083-176897251
  hypo
cgactattgttacctgatgcaaaacatgaatatgctggggaaaatcacgtatgaaccagagcaatctccttgttgtactgacataattctcgtatttaccaattacatatgagcctattccggatacagacacacgctggagcacaaccaagtattcttttaacttac

SEQ ID NO: 29129 - DNA, 1266 bp, Homo sapiens; identical to SEQ ID NO: 22898
  chr3:179754092-179755358
  binary

SEQ ID NO: 29130 - DNA, 924 bp, Homo sapiens; identical to SEQ ID NO: 22899
  chr3:180397104-180398028
  binary

SEQ ID NO: 29131 - DNA, 596 bp, Homo sapiens; identical to SEQ ID NO: 23240
  chr3:181419943-181420539
  hyper

SEQ ID NO: 29132 - DNA, 2009 bp, Homo sapiens
  chr3:181421152-181423161
  hyper
cggaaatcggcttaatttttcataaaagaatggctttttaaaatattgaatactatggctatgcaaggtttatgatacctttatgtttattcttcccacctcccaaaattagcgaattcgagataacatttcaaggggaattgctatttagtgcgatgagagatgacttctccatctggttccagaattagatctcggcttaggttttttagtaagtaggttcagatgcaatggaaggagagaagaatcaagccttttgataaaatctctaccccgaattctatggaaaagacaggcaagcgggattccagccacagcacccccaccttttgctctaccaaaaggcttgtccccattacagaaataatatagtcggtgctagttttgtgaacccgcgccaaccgataaggtaagaaacggtgcgctgacagccgaggtccgaaggctgctcagtggttcccgcagcccgtggggtagggaggccaaagccagcaaaatgttggaggcgacgccagaaagagagtatatgcctgctattcggaagtgatgtcgaacgtgcaatagcagagtcctggagatttccaccccgttccgcacccagggatcccagcctgtggggtagcaggttgttgggtgaaggcaggagggagaagccgcacctggctgagggcgggtgggcgtgccgggagcgagtgcccaactttctagggcccatggagaaagcataacccctagttgaggaaagagagctaaacaagtgggtggcccaggcctgggaatgccacccagctctcccgacgcagtgttatttctgtggtcccagggggccccagcacctgcccgaatcccactccccaaggccgccagcaggaaggcagcccctccatctttgagggctgaggagggggcagcgagtgacttgattccttagtagcagggaaaaccgcagcggctggcaacgggccgcgtttctccgcggcggcaaagcgccctttaggggcggggcgggcatttttggtctcctgtcccagcgtccaggcctgagcccgcgcgggttggctgggcgccctgctttgtaagtaaccaatcttgctggattctgaggactatccaggcggatgggcccacttagcttaggcccactgagaccctgccaactcctcagacccttttccccttcatccctcacacctttcatgatgaacccaggaaagaacccgaactctgaaaaacagtacatgtggtttgaagtttgatagttatttgggtgtgagggacatgactctattaataaagactaagattcaaggctgagctctcatttattaaatttgctctttcactctgttttcaaactctggagatctttcagtttcgttgctccaaccctgacacagacaaaggcgccagggagaaagcccaggcgggcttgaagcagttgaggtatagactgatactcatctctccatcactcagacgggcagataagcactgccagactgggggtcctaatccagggcccagcggctacgtgggttgctgcggggtgttgaaaccacaagtacaacttgacaccattgagcccacggtgcttgtcaataatctgtgaattaggtgcagagattgtcactgtagatcataacagtttctgaaggactcattacagcctatcgtgtcaatgatcttcaaattaaggaggggaggtggggcgagacgaaaaaggagtggggagagccagcaaaaagggaagaagggtgggagggaagataaaagtcagagccccagctccgaaggagcctttaaagattatcaggccagcgatctgagaattccattgggatgggtttggaaacccaactccatctgagccaggactggaagaggggcgctgggggcaagcagaagtgggcccctgggaaggccgacttctcaggcatttcttttgaggccggaatagcttttgggagagggttctagatgtcaatgggaggccttgaggatgccagccc

SEQ ID NO: 29133 - DNA, 2318 bp, Homo sapiens
  chr3:181440800-181443118
  hyper
cgttttacatttgttgaagcccaggccttggtgcctcaagttttaaatggaattactcaaggggggcacactactagacaaactattctagccaattccttcatccccgacccagtccctactcctctctgcccccgcccacttcgccacttcttagtcccggatctgaacattttagctgaaagagggaggggtgaggaaagggccaggacagttccctcagtgccaccactgcgggcaaggacagttccctcagtgccaccactgcgcctggagagatccccgcggccctgccgctggctgattctcccctgtgccttgacttgctgaaacatctctctggggaaaattactccctacttgcttacatgtgtgtattaaaaaacacatgtagccatacacatgtttcatcacggcaacaaaaaatatcaacattctagccccaggagcaaaacgtatcaatcattcgcctaaatattgttcagtagatgggggcgggaataggtagacctcctaggagagcggtcacaagtcccctctcctccgcatggacaccaggaatgcggggtctggcggtgctgggcgcagggcgagaagatttgatgtgcagggtaagtaaaggacaagttatttaaaacctcaacacaggaaaagatggtaagagtgctgtgtagccctttgcttgcttgtgactacgagtcgctaggtggcccgcgtttagagtatgcctacggcgcctactaacgtctagacctaggagaggcgtctcccgcccctcgacccacagccagccgccacttgatagctaacgcgtcttccggccggtacacacccacaattaatctttcttattaaagcctccattctgtacccatggggcgactcaaacctatttagatttccgtggttggctgcacaaatttaagtgggcaacgagttataaacctaataacagaggacgagagagggtgatttgagtagagaagacgcaagattcactagggtcgtgaagatgctgcgggccttgcccaccacggcatctacctcggggtgcacgccaggctctgagaaaggtagtgaacctcacaatcacactcaccacacacaacatgcgtacacacacttgcactcctaccccctttgctcacaggtacacttgtgtggaaattgcctcttccgtagttcttataaactcctcccagacaggcagaattctcagagcatcggaaccagggaacttgcagggaaccagggaaggtttgcactgtttgggattaattgagaataattaacactggagccgttaatcaccactttgctgctctctccctcctttcgggtctgcggcgtctgcctttttcgctcccgctgccggcgcgggtgtactggtgaaagtgaagacgtcgcggtagctgtcacccagttcggctgtacttttttaaacgctcgcatattgtttgattactaattcgagttaatatgatctttatggcaacataacagtggataattggcctttttttctgaacaacaatgtaaatcacaatcgctttattatttaataacgtcaaacgcttcgttggattggccccgaccgagaagaccttttctttctagacagtgttgtggaggaagaacaatgaagatctaattgtggagatttcataagttggctcccgtaaatgaacagcttagatatggaagttccagcagatgtgggtactattcgcctctacaagctctaccccccacccccatatacgcagtccaaacactctattggagggttttttttttttttttttttttgtggtggtggtggtcctcagatcctagcaaccacctaaagtttccagtagtaattagagcttttatcgggcttgctcttcagccctttatattgccgatttagcgttaaggcattaagtccacacaccaaattagcgcgactcccaaatagccacaaccacttattctccccttccctcattttggtggttggacaccaagagcatgggcctgggacttttttttttttttttttttttggttttactttgttttgatttgatttttaaaacctattcgctaccgcactgtcttggaatatacttgtttcaggcagagttttgcaagggacctgagccattattttgcaaacgcctggaagagcacatgaaactcagagaactacaatgcagacgacaacgcctagaaggaatgggtccccgctgctcgaatgaaagattaattacatttgccccaaaagccccaattctaacggtctctatcgcggcttttgccgtcactgaaggacc

SEQ ID NO: 29134 - DNA, 909 bp, Homo sapiens; identical to SEQ ID NO: 24418
  chr3:181444664-181445573
  hyper

SEQ ID NO: 29135 - DNA, 809 bp, Homo sapiens; identical to SEQ ID NO: 5819
  chr3:183165024-183165833
  binary

SEQ ID NO: 29136 - DNA, 140 bp, Homo sapiens; identical to SEQ ID NO: 9688
  chr3:183419820-183419960
  hypo

SEQ ID NO: 29137 - DNA, 801 bp, Homo sapiens; identical to SEQ ID NO: 26975
  chr3:184321783-184322584
  binary

SEQ ID NO: 29138 - DNA, 280 bp, Homo sapiens; identical to SEQ ID NO: 25649
  chr3:184784962-184785242
  hypo

SEQ ID NO: 29139 - DNA, 393 bp, Homo sapiens; identical to SEQ ID NO: 11631
  chr3:185360808-185361201
  hypo

SEQ ID NO: 29140 - DNA, 139 bp, Homo sapiens
  chr3:185643252-185643391
  hypo
cgattcccaacatgacgcctgcgagtagacatgggagaatggctgtggctgtgccgtctacgataatctcgactgtaagacctgctacgtgatcgtctatgggagcgggagcgagaccgtgaccgggtataatgccttc

SEQ ID NO: 29141 - DNA, 1571 bp, Homo sapiens; identical to SEQ ID NO: 22901
  chr3:186078710-186080281
  binary

SEQ ID NO: 29142 - DNA, 334 bp, Homo sapiens; identical to SEQ ID NO: 6585
  chr3:187443068-187443402
  hypo

SEQ ID NO: 29143 - DNA, 1913 bp, Homo sapiens
  chr3:187456250-187458163
  binary
cgtaaggatttccgaatccgatttccccgaaaccgtagagacacagcttggactcggcaaaggccggggccccgacccctgcgcgcgcactggcactctccaaagttgcctcgccttcctgtggccctcccgggaattataacccccgggtgccatgtcctaattggtctcggtagcaggctccggggtgcgctttcgggggctaggggacagcgaaagactcagccacaaaggccgcagtctggtcctaaaactagccagtggcgtcacactgcgccgctcatcccttctgcggcaagcggaagggtcagagtcggtctgcaaagaacgagcctttggcctcaaaatcctacattgaggctttctcaccccttcgcccggtgggataaaggtgaaagagacggttgggatttaataaggggtagggatgagaatctgggaagttaaaatgaagtaagtgcatttattggaaattaggagtcccgtggttccgggagctcaaaccgaatggtgtttttaccgctgcctaacgctagagagagccctccatcaaggtttgaaaccgtcaacccctttctcgcccctcccctccttcccattgacctagtttggccagagcctcccgatttggagaatgccttccgcccttcccccctcctctccagccagagaggctacagaggctgttggattattggtaatctaataactccaataacccgctgaaaaatccaaagggaaatctgaaagtgtaaagcactgtttagggacaaggacaaggaattttaataaggctgcaactgccgtagtgaaccccgcatcaggggccctgccgtggggctcccggtctcagcagtgtttcagccaactagctgcacggctgcagacaccaccgtggtccggcggcagggggtgaggtcaaatcgcggagctgtttttattcttgggggaaaacactcttcgccctcttggctggggaacgggagggtgcaggagacgacagtaaataaaagcgaatttgataacgcgatggcctcgacagccgctttggataaccgaggtgttcggggacattgtgtcctgactttcatttctatcacgtttcctgccaacagtgctcttgcaagcctgcaagcttctaggaaatgcaataaaacagagggatgtgttttatcatcaagatctgaagaggagttgcagaagggacgttccccatacgctcagcgcgagacagccttccagaagggcccgaagacaatgccagcaaatcgcgtcccggagcagagatccctcggccgtcctggctggactgggctcagcctttgcaaaaaggctggcgggggaggggagaagcatgatctcctcaagcaaacaatgcctttaaaaatccgatctggaaagaagtcagccaaggtccttattcacgttaatgaagatggaaggcactaactgtccttggaaagcgatgagtcaaacttgaccgcgcttcaaactcgttcccagattcgtttccagtccgaacagaggcgcgtttctccgacgcggcctccgacggctcccgcagtgggaggggccgaactcgatccccgccgacccgggcgggggcgacggcgctgtctccccctgcagagcgcgcctgctgccgctaggggccgccagcatgcggacgcgcgtttgccatcttaagtcacgagctcggagaaagaaaactttacggaggaactgttgtggcacaaattctggcctatccacatgacccccaccccctcacacacacacacccggtttctcgccaggctactatgcagaggatgttaggaaggggaagagagcgatttcagaatcgaggctcgccctgcaagtctttggtccaggccttaacccccctcttaacacgcaaacccccgagctcc

SEQ ID NO: 29144 - DNA, 184 bp, Homo sapiens
  chr3:190529619-190529803
  hyper
cgggatggtttcttgcggcggcttttgctagagttgcctaataccacccagtcagggaaaaggtacactgggcaaggagggctaaccctgtgcttccactggaaacaagcctaaatctttgtacacgtccgctattgattcctaattatcaccaggagatggcgctgtgcattagtaaacatcc

SEQ ID NO: 29145 - DNA, 175 bp, Homo sapiens; identical to SEQ ID NO: 24426
  chr3:193922622-193922797
  hypo

SEQ ID NO: 29146 - DNA, 485 bp, Homo sapiens; identical to SEQ ID NO: 22904
  chr3:194208086-194208571
  binary

SEQ ID NO: 29147 - DNA, 85 bp, Homo sapiens
  chr3:194374282-194374367
  hypo
cgacggagatggaaaggtgaacacagggaggagacaacgaaagcctttcagttcagtgccgtgacagacaaccatcgagggtggc

SEQ ID NO: 29148 - DNA, 891 bp, Homo sapiens; identical to SEQ ID NO: 28003
  chr3:194407289-194408180
  hyper

SEQ ID NO: 29149 - DNA, 63 bp, Homo sapiens; identical to SEQ ID NO: 9698
  chr3:195093160-195093223
  hypo

SEQ ID NO: 29150 - DNA, 97 bp, Homo sapiens; identical to SEQ ID NO: 11643
  chr3:195172966-195173063
  hypo

SEQ ID NO: 29151 - DNA, 264 bp, Homo sapiens
  chr3:195586992-195587256
  hypo
cgcgccaggatcacgagagccgcctctaacccacccccaaaacaacaaaaggatgcgctctggccttgccaacttcagtgcctgggacaagccggctcgtgcccgccgcctcggctgcagggccctccacctgcagcgctttcgtccctacctggcgttcaccgttctcacccatcacatcagcacaacgtgaccttgtggggagccacctcctctgctcccaagacacctggtgcgtaacgattacagagcacccgtcctgcc

SEQ ID NO: 29152 - DNA, 685 bp, Homo sapiens
  chr3:195603862-195604547
  hypo
cggctttccagctcgtggaggtggacacggtcatgaggctggacttcgggctggaggccctgccaggtacttccaggggacccccccacccttaatcttcctatttccagaatgctccccggagcgccacgcttgcaatcccatccctggcccctcagctccaaacctgcagactgtttgcctcctgtccccaggcctctctttctagaaccttctgcattcttccccagcataacacccctaaccacaggccctgcagtctcagtatgtcattcctattcccagaccctgggcccaagggtgagggagccgggcctgggaaggctcggggtgtcggggccacagcggtgcaggtcacactccacacagccccccaggtctcctccacccacccccaagaggcacaggattgcaccgaaggccgcagactccaaaagctgcagtgcaggtggaagaggctccctgggaagcagccctagccccatccttgcctggcctgagtcaggagctgcgagcacaggggatttcctccacttcactcttcttcctggtcctcaatactgcccctgcctcaaaggtacctgaaacctgccctgccccagccagttgctcagacaccctggggatcagccagcacaaggcagggccagcagtggtggggcctcagggcaggcgctagaactgc

SEQ ID NO: 29153 - DNA, 188 bp, Homo sapiens; identical to SEQ ID NO: 26983
  chr3:195648737-195648925
  hypo

SEQ ID NO: 29154 - DNA, 106 bp, Homo sapiens; identical to SEQ ID NO: 11646
  chr3:196263362-196263468
  hypo

SEQ ID NO: 29155 - DNA, 764 bp, Homo sapiens
  chr3:196387095-196387859
  hypo
cgagatcgagggcggcgctttcgacggcctggctgagctgaggcacctcaacctggccttcaacaacctcccctgcatcgtggacttcgggctcacgcggctgcgggtcctcaacgtcagctacaacgtcctggagtggttcctcgcgaccgggggagaggctgccttcgagctggagacgctggacctgtctcacaaccagctgctgttcttcccgctgctgccccagtacagcaagttgcggaccctcctgctgcgcgacaacaacatgggcttctaccgggacctgtacaacacctcgtcgccgagggagatggtggcccagttcctcctcgtggacggcaacgtgaccaacatcaccaccgtcagcctctgggaagaattctcctccagcgacctcgcagatctccgcttcctggacatgagccagaaccagttccagtacctgccagacggcttcctgaggaaaatgccttccctctcccacctgaacctccaccagaattgcctgatgacgcttcacattcgggagcacgagccccccggagcgctcaccgagctggacctgagccacaaccagctgtcggagctgcacctggctccggggctggccagctgcctgggcagcctgcgcttgttcaacctgagctccaaccagctcctgggcgtcccccctggcctcttcgccaatgctaggaacatcactacacttgacatgagccacaatcagatctcactttgtcccctgccagctgcctcggacc

SEQ ID NO: 29156 - DNA, 299 bp, Homo sapiens; identical to SEQ ID NO: 23610
  chr3:196728433-196728732
  hypo

SEQ ID NO: 29157 - DNA, 95 bp, Homo sapiens; identical to SEQ ID NO: 26989
  chr3:197330132-197330227
  hypo

SEQ ID NO: 29158 - DNA, 307 bp, Homo sapiens; identical to SEQ ID NO: 11650
  chr3:197582093-197582400
  hypo

SEQ ID NO: 29159 - DNA, 1095 bp, Homo sapiens; identical to SEQ ID NO: 22906
  chr3:32433054-32434149
  binary

SEQ ID NO: 29160 - DNA, 983 bp, Homo sapiens; identical to SEQ ID NO: 23246
  chr3:35680722-35681705
  hyper

SEQ ID NO: 29161 - DNA, 50 bp, Homo sapiens; identical to SEQ ID NO: 6154
  chr3:39250115-39250165
  hyper

SEQ ID NO: 29162 - DNA, 328 bp, Homo sapiens; identical to SEQ ID NO: 23611
  chr3:49755498-49755826
  hypo

SEQ ID NO: 29163 - DNA, 59 bp, Homo sapiens; identical to SEQ ID NO: 7371
  chr3:5165842-5165901
  hypo

SEQ ID NO: 29164 - DNA, 232 bp, Homo sapiens; identical to SEQ ID NO: 11659
  chr3:52440854-52441086
  hypo

SEQ ID NO: 29165 - DNA, 786 bp, Homo sapiens
  chr3:62860764-62861550
  hyper
cgctggaggcagccggggatcagctctcccgggtgggcgcttctccccaggtcagggagcgagagcgctgctgctcagcctcggccgccgcgactgatcctctgcccggcggtcgcgagctgggctcagacccagaagcgcgaagggaggaggggaagggagaggtgcgtccgtggactcgaggtgggcaagggggagaatcaattgcgagccccgagcccgcagccggatgccatctgcggctgctgaaggaggcgcctccagaaaagatgccgagtgttgcaagctgtcgatgcagccaagagccgaagaggcatcttgccgattggggagggagcggcgcttacgtgtttattggcttaactctcccgtgtccgcggcgtaaagggctgctgcagagggctggaggggggagagcgcggagcgtcctcagagcctcagtacttctgaccccaataccttgccaccctcctcccctgccggcttcgtggataatttttttgttgatatctggctctcattgcctcaaccccttttcccctcccgcggacaaaaagttcttgggggagggagaaatccagaaaccagccgagcgggctgtttggagacgctaaatcgagaggtcttacttaggaggaggaagtccgtgagatcttatacgggaaagaaagggtccatctcctttccccaggcttctttacacctggggcgtggggggcgtgggggctgggcagcgtgtttgtcccacctgtgtaaactctgattccagcaacttattccgcatgc

SEQ ID NO: 29166 - DNA, 207 bp, Homo sapiens; identical to SEQ ID NO: 7379
  chr4:10090148-10090355
  binary

SEQ ID NO: 29167 - DNA, 733 bp, Homo sapiens; identical to SEQ ID NO: 24451
  chr4:10462790-10463523
  hyper

SEQ ID NO: 29168 - DNA, 728 bp, Homo sapiens; identical to SEQ ID NO: 23253
  chr4:107956429-107957157
  hyper

SEQ ID NO: 29169 - DNA, 218 bp, Homo sapiens
  chr4:107958408-107958626
  hyper
cgggtctctccaggtccaattcccttcggccgaaggtcgaaggctgctccgggaacgactgggacgcgctggcgcttgggggcgccagtggcagccgttcagcgagccacggaattgctgcaggagacaagcgctgagttcggtgatgtctggtggccaagtgcgagactttccaagcaaagcaagggattgttcgaaagttattgcatttctgcttc

SEQ ID NO: 29170 - DNA, 1315 bp, Homo sapiens
  chr4:111543378-111544693
  binary
cgggaatgtctgcagggcggcgcggcgccttacctgcggcctccgggctggaggtgtcggagatggtgtgcacctccagcctgtgcttggaggagtccagcgaccggggctgaccgggagccagaaccgaagccatggctaacggctggggatggtgacaggaagatgaggagacggccgacagcttggtccccgctgctcggtgctccaagtgaagcgggcctttcatgcagttcatggacgagggagcgcgacgctctactagtccttggctactgccccgccgagcccccgtagccgccgctgcccgctccgggtcgcgctctaggcgcggagtttccccgctgcggggagagccaggggacgcaacccccgccgagttctcaagccaagctgcccccgtctcctccggaaggctcaagcgaaaaagtccggagacggaaagtcagcgggcaaacgaagacatgggatgtgggcagaagggcaccactcagagcgtctttagggagcaggcttccaagctccaaagcgaaacaagagtgggcaaagacccccttcttctctccctccctcccccaagaacccctccaataaggaaagctaacgccgaccgcgctctgcccgccccccccccacgcggcagccctgacagagaagtgtcaagagtgacagggacaggtaggtgatattagatcccctgcggcggcagcagccgctgcagccacgacgcggccctctgagcgcaccctccgcaacgcgcacacgcacacccctcgggcggtcgaacaggagccgggccttgccgcagctcagctccaggcacccaggcgagcgacggaccagatctgcggctccgcgcttccctgttggcctaacatcttaaaaccagaggcgggcttcctggtgccgagacgtcactccgccgcggccctccccagccctctccgcctccgcctcctcccagacccttctccgggtgcgactgacgtggctccgcaccaatcaggacgccccgagccgcggtggagggactgtcctgcctgcacctatcagcagtgcggggccgggctactgcctcgccgtgcgcactgggtctacacaggcaagctcccgggaattcagctcctgcccagcccaaggcgatccggcttttagtacgaacccaaaggtgaagagatgaggctaggagtcgaaggcttgggagaagagagtggaatggtcaagaagagaaaggtacaaggatcaacaagacacccactctttgtgtctcactacatccatttccaatcccccaccccatataaaaaggagacac

SEQ ID NO: 29171 - DNA, 926 bp, Homo sapiens
  chr4:111557943-111558869
  hyper
cgggagagagctgctgtctccgcgtcccactgcttcccggggcgatttccagcgagccgagcctccggctgcacggcaagcgcccgaaagccgggcctgagaggactgcagggctcctgagggtgccaagttccgaaggagtccacgggtgcactggggcctccgaaatctagccgccactggcagtttctttctgctcctctccagctttctcgctcggtctcgcactctctctcctctccctccctctcatccctctctcttccctctgctcctactccgtgtggggagtgacgtgacgtcagcagagattccaccaaactccactgcacagtggcgcgcgggcggccggccgagcccggctgcgcggctggcgatccaggagcgagcacagcgcccgggcgagcgccggggggagcgagcaggggcgacgagaaacgaggcaggggagggaagcagatgccagcgggccgaagagtcgggagccggagccgggagagcgaaaggagaggggacctggcggggcacttaggagccaaccgaggagcaggagcacggactcccactgtggaaaggaggaccagaagggaggatgggatggaagagaagaaaaagcaatctgcgccaacccggcagccctaataaatcaaagggggagcgccagggcagcggggagacagaaacgtacttttggggagcaaatcaggacgggctgggaggaagcgacagggaaagtggcccaagagacggaacaaaggacaatgttcatggggttgtttgggacgaggcgtgtggagtgtgggtgtgagcgtgcgtgtgtgaccttctttcaggcctgcagagttgaggaaagaggtcacagcaaagagggactgcggagggaggaaagtgagagaccggtagagggcgggagtggaggtgggcgc

SEQ ID NO: 29172 - DNA, 831 bp, Homo sapiens; identical to SEQ ID NO: 23256
  chr4:113441878-113442709
  hyper

SEQ ID NO: 29173 - DNA, 442 bp, Homo sapiens; identical to SEQ ID NO: 23257
  chr4:113443992-113444434
  hyper

SEQ ID NO: 29174 - DNA, 464 bp, Homo sapiens; identical to SEQ ID NO: 6590
  chr4:1225310-1225774
  hypo

SEQ ID NO: 29175 - DNA, 978 bp, Homo sapiens; identical to SEQ ID NO: 24456
  chr4:122871204-122872182
  binary

SEQ ID NO: 29176 - DNA, 755 bp, Homo sapiens; identical to SEQ ID NO: 22910
  chr4:1331690-1332445
  binary

SEQ ID NO: 29177 - DNA, 885 bp, Homo sapiens
  chr4:143766811-143767696
  hyper
cgggaccaccaacatcagtcaccctcactccccaccactgcctctattccttaaggacttcttcccaggccggcggcggcggcggcggcggcggcggcagcttgcgatcatcaggattggaagtgagagcgagtgcccgggccaacctcagcgtctctcagggacagcgcaggtgggcgcagccttggaaggtcagcgaggccagagctcagagttccacgggggcccggagagtgtgcgtgtgtgagtgagaatgcgaaaacgcgcgcgcgccgggcagaggggcgctcggcgagagggtaggcgcggtgacaggggtaccccagcagccgaggagagacagcccaccccaccctttaagctaaagagctggaggggtgatggaggctgcaagacggagaaacttgatgcaaaacagacaggctcccccctccaagacgtgccgccacgctctcagacacgctccctcgcctcccggattacccaccatcaaccaccccaccctgcaaaattcccccaccgagccctaggatcccaggcgggtaattacctctcccggaggcggagtggggggcggcagcagcagcagacacttttagcctgactttcctgcgttcgcttgcgagcgtgtgagcgtgtgcgcgcccaggaggagctgtaacctgctatttatagaccgaagcctcagtacccggggctgagaacccggaggaaactagcaggcggcggcgacggcgcagggcgccggccgcggcttcgcgaggctccagcagctcccccagcctctggcttcggccgcgctccctgctcgctcctcgcctaccagccccgcgcgcgccccagagaagttgtcaccagcgcggctggctctccggctgctcacac

SEQ ID NO: 29178 - DNA, 921 bp, Homo sapiens
  chr4:144621392-144622313
  hyper
cgtagcgcagctgcagcagcacccgggcgcgtccggggctgtgggagccgaagtgagtgtactggacttggcggggcccgaaggtgcaggggaagcggcgcggggagagcgcgcccttgagccgcggcagggcgtccagtaccgtgacttcgcaccggtcccccggctgcactccaatcaccagatcccggagcgggtcgagccaaagggaacgacccaggggcacccggagtccagggttggcaatcagcacgctggggccgtcggggcgagtgccgtcaagcgcaccccgggcgggcaggtaaagcgccgggtcgggctcggtcccaagtgaggatgcccgtccctgcagcgcggggcgactcaagagcaggcaggcgagcgccacaaggagctgccggggcgtcccagtcgggtgccgagaagcccccgccatggccacggatggctcctggcgttgggattcccggggtggggtgccctgtgcaaagagggatctgctgagcggcaggtgcaggcagtggaagcagtagctgctgtccagtcggtagccgacttgcggatccagcaagagccagcggctgcgcttcggctgctgcaggtaacggcagcgggggaaggggctctgcccacttcctgctcagccccggtcgcaagtctctctctgctggcttctggggaccccagatacgcgcccagcgcggcgagacttagcgagggtgcagcgctgtcccctccgctcctgggcgcttcacccagcctaccttacacaccttctcgccgggagccgtggccgccgcactgctgcccgcgctgccagactccgaccagctgtctggatactctcttccccaggtgccacaaagggattgtccctcagggttgggagagagacggtgactgtactcgggtcagtcctgc

SEQ ID NO: 29179 - DNA, 1461 bp, Homo sapiens; identical to SEQ ID NO: 28033
  chr4:147559686-147561147
  binary

SEQ ID NO: 29180 - DNA, 932 bp, Homo sapiens
  chr4:147561175-147562107
  hyper
cgtgcacgtcggccgcctcttcttcatcggtgcccatctcgcacccttccgcgttggcgggcacgcaccaccaccaccaccatcaccaccaccaccaccaccaaccgcaccaggcgctggagggcgagctgctggagcacctgagtcccgggctggccctgggcgctatggcgggccccgacggcgctgtggtgtccacgccggctcacgcgccgcacatggccaccatgaaccccatgcaccaagcagcgctcagcatggcccacgcgcacgggctgccgtcgcacatgggctgcatgagcgacgtggacgccgacccgcgggacctggaggcattcgccgagcgcttcaagcagcgacgcatcaagctgggggtgacccaggcagatgtgggctccgcgctggccaacctcaagatccccggcgtgggctcgcttagccagagcaccatctgcaggttcgagtccctcacactgtcccacaataatatgatcgcgctcaaacccatcctgcaggcatggctcgaggaggccgagaagtcccaccgcgagaagctcaccaagcctgaactcttcaatggcgcggagaagaagcgcaagcgcacgtccatcgctgcgccagagaagcgctcgctcgaagcctactttgccattcagcctcggccctcctctgaaaagatcgccgccatcgcggagaagctggacctgaagaaaaacgtggtgcgcgtctggttctgcaaccagaggcagaaacagaaaagaatgaaatattccgccggcatttagaagactcttggcctctccagagacgcccctttcctcgtccgctcttttctctcctctcttctgcctcttttcacttttggcgactagaaacaattccagtaaatgtgaatctcgacaaatcgaggactgaagagggagcgaacgagc

SEQ ID NO: 29181 - DNA, 567 bp, Homo sapiens
  chr4:155254035-155254602
  binary
cgcctgtgtttgcagcatttgtgtcatcggtgagagagactcactgacttccacttgatagaccaaatgttcgaaagtccaggatgggctgtgttcgcgtttctcgataacgactgtcagcaccagcagggctgcctgaggatgcacgccttggtcctcggccctgagagtcagcgtgagctcccgctgctcgcccgcgcccaggctgccgttgaggaacagcacccccagggctctgtcgatggcaaagacgcctggctgcgggctggcgatggagtaccggatgagtccgttccgcccactgtctctgtcttccgcacgtgcgaggtacaaggctgtgccagggggcgtggtctgggatattctaatctcatccgaggtcctgaggaacgctgggtggttgtcattgacatccatgactgttatgttgacctcggtgctgctgcaggctggggcgctgccgagctgcgcctgcaccgtgagcacaaccacgggctgcgtctcgtgatccaggggcttccgggtgcgaatagtgcccagccgcgggtgaatggagaactttccgcc

SEQ ID NO: 29182 - DNA, 888 bp, Homo sapiens; identical to SEQ ID NO: 25680
  chr4:174430248-174431136
  hyper

SEQ ID NO: 29183 - DNA, 746 bp, Homo sapiens
  chr4:174443425-174444171
  hyper
cgccgattacacccaactcggctgggatggctccgagccgtctgccctgacgtcagcgaggctccggccccgccgcggcaagataggcgagcgcggccgggcgcgggtgcggcactaatcactcccagatgtccctaatagcggagataaagacggacagagcggccgggaataaatttgtaatcagggctctaccatctgatcatcaaagcggcccaaatgccgggagaatttgaagggaatgcgtgtgaggggggtcgcttgggggaagaggtgagggtgcacttcgcgatgggaactggcttcggtagggtagagcagggagaacagggcgagagatctgtaagttcggtgcacgtaagtcggatactcggtgctctttaacctccattagccctcagaccgaagccgtttagcggttccaggctgattggagctgcgcagttgctgtgcgggaagcacgcgttgcgcagcggctgggtggtaaggcggcgcgatgagaactgtccggcccccggaaacgtgggattggtttcctctcccggagttctcccctcccccttctttctaaacatttaaaaaacacgtagtccgtctcccccaacccccattcccggtagacttaatcccaacagcaattcattgcaccgcggagcttcctcagggagggggctgttggagcctccaaccagggtcctgggccccagtctgagaatgactcctgggtttttctctccaagcgatcc

SEQ ID NO: 29184 - DNA, 971 bp, Homo sapiens; identical to SEQ ID NO: 27035
  chr4:175749838-175750809
  hyper

SEQ ID NO: 29185 - DNA, 1090 bp, Homo sapiens; identical to SEQ ID NO: 23267
  chr4:176922585-176923675
  hyper

SEQ ID NO: 29186 - DNA, 615 bp, Homo sapiens; identical to SEQ ID NO: 23268
  chr4:176986744-176987359
  hyper

SEQ ID NO: 29187 - DNA, 222 bp, Homo sapiens; identical to SEQ ID NO: 23614
  chr4:1791229-1791451
  hypo

SEQ ID NO: 29188 - DNA, 167 bp, Homo sapiens; identical to SEQ ID NO: 25684
  chr4:184667623-184667790
  hypo

SEQ ID NO: 29189 - DNA, 324 bp, Homo sapiens; identical to SEQ ID NO: 23272
  chr4:185089657-185089981
  hyper

SEQ ID NO: 29190 - DNA, 390 bp, Homo sapiens; identical to SEQ ID NO: 11676
  chr4:1986329-1986719
  hypo

SEQ ID NO: 29191 - DNA, 711 bp, Homo sapiens
  chr4:2065596-2066307
  hypo
cgtttccgaggcaagggcatcgccaaggcgctgggccggaaggtgctggagttcgccgtggtgcacaactactccgcggtggtgctgggcacgacggccgtcaaggtggccgcccacaagctctacgagtcgctgggcttcagacacatgggcgccagtgaccactacgtgctgccgggcatgaccctctcgctggctgagcgcctcttcttccaggtccgctaccaccgctaccgcctgcagctgcgcgaggagtgaccgccgccgctcgcccgcccgcccccccggccgccctgtccgcctttgcccgcctgcccgccgcccggcgcggcctgctttcagacgctcaattggcgtttgtgttgggtttccccttttcaacatcctgcggttgtctggctggttccggggggtgcggggctgttgttcttcggcgacactttggtgggggtgggttgtttgtcgccatagcccctcgcccttccccacctgcctgggcggcttgccacctgaagagtggcatcttggaccaccgcggctgtccatgacgctgccctgcccgccgccactggggaaggcccagccttgctcaccaagcacagaacctctgcagcagatcccggggccaggctccggccccgcctgcggccccagcgccactgcctgtggaggccccagctggccacggcgctgctttgctccgcgcatgcc

SEQ ID NO: 29192 - DNA, 232 bp, Homo sapiens
  chr4:26030420-26030652
  hyper
cgtgcggatgcagaggaggggcagcgtcggggcggcggagtccgacctcgggggattcaccctgagggttacaggcaaggccgctccaggcacgcagcacctgccgggcgccacccaggagggggcagcagcgccattcgcaaagccggcccgctccgctccgctctcaggctcagggctgcggagacaggaatcgcagcttcccctggaaggggcgtcccaggggacctcc

SEQ ID NO: 29193 - DNA, 50 bp, Homo sapiens; identical to SEQ ID NO: 6595
  chr4:2622600-2622650
  hypo

SEQ ID NO: 29194 - DNA, 812 bp, Homo sapiens; identical to SEQ ID NO: 25691
  chr4:30723837-30724649
  hyper

SEQ ID NO: 29195 - DNA, 148 bp, Homo sapiens; identical to SEQ ID NO: 11680
  chr4:3439566-3439714
  hypo

SEQ ID NO: 29196 - DNA, 1337 bp, Homo sapiens; identical to SEQ ID NO: 24474
  chr4:3445901-3447238
  hypo

SEQ ID NO: 29197 - DNA, 938 bp, Homo sapiens
  chr4:41752247-41753185
  hyper
cgttcagtgtttgccaaactaagtggtttaattcgatgctagtgccggggagtggatgggctcccgctctcccctgccaccgtgttttattgcgcactaaactgccgcggacgcagtaatggattaaacggggacagcggtcccccagccttgtgcttctttgcagggtgagtttcaggctcgtttcaggtggttgcaaatcctcggggcgtgaggaagcgctaaagtcgggagtgcagggagccggacctaccgaggatcctggtgatagttttatggggagggctgatagttttattgcagttgtatgttgtacaatgcgtatttgataaagaagggcccttggtgaccagtgtgcacttttttgtgcacgggggtgaaatgaaaataaatgtatacaaggttttactgcggcgggaaacaaattgcaacgctctaaatggtttttctttatggtcaccagacaagaggagaaaagggatgcaaacatctgtcttcagtcccctaaacctaaaggccagcaaagacggatgcgaatccaagtgctattacagcggagatttgtctttatttatcccgctctcatgaatatgaatttgcatttgggccgggaggtggctgtatccctttggactccacacatggaatttcccccacgctcatccccctccccaaccacttaagggaggtgggggataggttgtcaagcacaaggctgagatcgtccaagtttcttcgttccctcggatttcgggttgggggatgtgcttgctggttttctgaacgcaactctgccgccgaggcctgcactcaggagatgtggatgtagggagcacaggccggggtgtccaccgccagcccgctcctctgctgtagggtttaagcgcgtttccctgcagaagagagtgaccaggggtggtcaggaggtgatgaatttc

SEQ ID NO: 29198 - DNA, 415 bp, Homo sapiens
  chr4:41875378-41875793
  hyper
cgcaacaaaaccgggttcctcttgaaccaacaaaccttttttgtaaccggctgaatggctgtatctacggagccagtaggttgcggaaaggcgttcgcagggtggaggagcgggtagttggggaaccgggcgcgcctgatggggcgcaggaaggaaaaactgatcgacgcaatggcccccgccaccggccatttggggctttcaaacgccctaacgaggagtccgagcggccactgaaagcctccctgttcctgggcagggcagccagagtgccctcccctctcccttcccagcctcccggcggcgccaccattaacccggagccagacccaggcggaggccccggcgccgaggcccgcggaagcaagagacagccctgatagtcttctaaacccggtccagtttcgaggacgac

SEQ ID NO: 29199 - DNA, 926 bp, Homo sapiens
  chr4:42152717-42153643
  binary
cgcaaccagcccatctcgctccctgcaggcaggcagtgggctgctttgccgggcagcgcccgcagactcgagataaaggagaggagtcgcggaccccagagtgggtgcctcccacgaggcgtttctgtaaggctcgggccgagatgctcgggaggggcaggaccccgcggcgcggcagcgtgccacggacggggacgaggggatggcggggacgacgacgtgggcggtgggagcagagtgcctgcgactcccggggcaggaaggaggggcgggatggttccccgcgcccgaaatccacggcgtggcggacgcggaggagccccgagtctcacaaccaaggggtgggaaggaaaagggacagagcgagacagagcgcccccgagaaacacaggcgcacaaaaaaagacagaaggaaaaacggaactgagagccagccagcatggactgcgacagcgtgagagtgcatcaaagaggtggcgaagaaagcactagaaggcaaaggagaagtggagagaagaagaaacaaatggaggaagaaggagaaagggaaaaagcagacggaaaaagtgaagtagtacgagggcgtcccagcggggcggcccgagaagctccagcttcttcccgagcggccgccgctatcccccgggggggcgtctggccccactccggaccacgcccgagcgatcctggtcgccgactgccacagccgtgcttcccggcgcgggatccaagccgcggagccacctgttaggcgcgcgccgtcggaagcccaggcgcggcggcgctggagaatcctctcgaagtttccgggtgcgcggggaggccccaggtgcgccccgacatcccgacacggcccagcacgggtaagtgtcggcggccccccgcttctccttcctgggtcccctcccgctgcccccggccgtggc

SEQ ID NO: 29200 - DNA, 1441 bp, Homo sapiens
  chr4:42153659-42155100
  binary
cggagagttggtacctgcgctgagctccaggctggcgctgtcgctacccgtgccgccggtgccggcggccgccgccgcgcctgggccatacctgacgacagcggcgaacgaagacgacgaggaggcggcgggggacgcgggcggcggctgcgccggagtcctcaagtggccctgggatgtggcgggcgtgcaggacggcgacgacgacgaagcggcggcggcggcccggccgggcccgggggggtaggagctctgcgcctggaactgctgcggcggcggctcgctgctgctgatggagacggcggcgtgcggcgcgaagggcggcgggggcggcgggggcgcccgcacgtgcggcagctccaccagggtgggtcgctcgtagcgcttggccagcgccggtctcttgctggggaacgtcttgaggacgctgtaggggctgcgctgcttgtagattttggggacgctgggcccctcctctgccggctgcatctcttcctccatccggcgcctcggggccggtccctcggagcacgtcccctccccgccgggcgccgggctccgagggtgcctccgccgcctgcccgccgggtctgccctggtgcgcgcgtgtgggagggtgtgtgtctgtgccgtggccgccgccgccgccgcctgtcgctgaggctggcatcgccgagcccccgcgcggggggctgccgcccgagctcctgattgacaggctgcctcgccaatgcctggagggagaaaggaggtaaagagcaagtgtttagggtaatatctgctaatgataatgggggcggggcggggcctggcgccgcagccgcccgcggggtctgcctggcggctccgcgcctccgacggggagcgggggaagggggaaagcgaggacctggaggacgcccgggaactggtgaagaaggtggggatccgggatctggctacggcgagactttagagacccagatgtggactcgaggcttctgcggctgcgggcggggtccggcttccgaaacgagctcgtggcgccccctgcatgaccccaaactctcggggttgcacagaggaggggctagtcgttggggcggggtcgtcagagtacgtgtgtattacagcaagttcttctaccaatcgggaattgctctccgatccttctgaaaagaacctcttgaagatcttggcccgggtggtcgcgcggtgtttacggggctttggggtcctgctttccccgagcatcgcggcctctgagctcatgcggaacataaaagctcgcaaggcgtagaactttttcacgttttcatttgtttcccgtaggggccccgagaacgtgcatgacaccatgatttcccccccattataaagatgagaaaaccgaggctctgagaggttgaagggaattgcccaaagtcagacactcgggagtgtgcggctgtgttgcactgac

SEQ ID NO: 29201 - DNA, 2263 bp, Homo sapiens
  chr4:42398819-42401082
  binary
cgggcgtgaacggagaagtcgtgctctttgaggttttgcgagctggccttggctggcagaggtgaccggcaatccttcagccggcggaaaaagtgcgagtgtgtgtgtgtgtgtgcttgtgaaaatgtgccgttcctcccagaaaaagtggaaacgtaggtggaaagctcagcacatgttggcgacacctaaaaaccatgttctcggtcctgaacctttagaagcggtatcccaggaacgagtctgagtctgtgcaacagggcacagatgattcgacaaacttcaatgactgcaccgcattcatgcattatatccattgaaaagtaaatccagcgtctccactcgcgcgcccacgtgcgtggataaacgcgggaattcggcagccctcaacgtcactctgcagagatttccgggctgtgagagagttggggtgtgcggcgggggaggggagggtctgatatcttcaggttgagagtcaagtcctgggggagcggcatgggcgggggtggccggggggaggcggaggatggagcgcgaaccagaaagcgcagaggaccctcggcccgcgccgcacccgctgtgattagctccagaggcgcgatccgggagggcggactctttcttaaccctcattgtctcctcctccctcttcctttttaaaagacgccttgcgggcagagctgtcagcaaccccgcggccgtttgtacttggccgcggcggagctgactcctgctcctgtgacagataggggctggggctgagcggccgcctgtctggggtactcgcacgtggggaacaaattcttttcctccggctcctctcgggacccggcgatcgccacaggttgggactctgtgcggcgctggagttggcagccccgggcgctatggctcccttgaggagtggggagggaggtggccggggggttggcgcgcccctcgcgcggggagcgctatgagccgggcgaagggcggcagcgacagccccagcaactgcctctgccggcgcctcccgcaggccctcgccaactcgccccgcgcaccatgctgactcccggcctgcggaactcgtagtgcagcccctgtcgcctccccggcccctgctatcccacgcaggactggcttcggccgccggggccagcagcttgcgacgtgtccctggggaggcggaatcgctgtgcgccctgagcccgggctcagcccttcgctttccagctgcgtcctgctcccggccgcccagggagcccagtggcgatgagggcactgctggcgctttgccttctccttggctggctgcgctggggcccggcgggcgcccagcagtccggagagtactgccacggctgggtggacgtgcagggcaactaccacgagggcttccagtgcccagaggacttcgacacgctggacgctaccatctgctgcggctcctgcgcgctccgctactgttgcgccgcggccgacgccaggctggagcagggcggctgcaccaacgaccgccgcgaactggagcacccaggcatcactgcgcgtaagtgcggggccctcggggacatatccccgcccgcctaacggcggcggctgcatgtgtgcgcgggaggatgcacagacccaggcaggtctatgcgccttcctgggtctgtgcgccagggggacgcggccgggtgggggaatcaagggatgagtgggtggtcgcgtttcagatcatggtcctctattcatttgcagtcccgcttcccgccacttgcggtctctgcgggtcggcccgcagggaaagtttgccagggacagtgaggagcgcggggcttgtgcctggtagccggggggaagacagctggagctcccgggagaagggtagtgcgggtaaagccagggtagacttgggttttggtggaggggccgagggtgtcccattgctcgcccttgtcacttcgggagcttcgggaagtgccgaatgcagggaatcgcgactcttgtcgcgcgctcatttgcagcccttcagggctaagaaaccccagtcactttttttttctgtcttaatgatagcgtttctaagccacggccccgttctgcagacttcctttcaattctctgcatcgaattaccctctccggcccaccccctattgtcacgcctttcagaaatgcccaggtcttcgaggtggagatttagaaacaagggtcgaaggggcttccccgccccctattctcacttcggaaaacacgggtcaaatttccgctgacttcagagcggaataaatcac

SEQ ID NO: 29202 - DNA, 98 bp, Homo sapiens
  chr4:44448981-44449079
  hyper
cgctctcatgcccccgccccctcgaggggctctgggggcacctttatcgcttctcccctgccctctagaaaaccacccgtaactggaggctcccgcgc

SEQ ID NO: 29203 - DNA, 1355 bp, Homo sapiens
  chr4:44449386-44450741
  hyper
cggaaatatccgaatcggtgaaatgtaaatcgtgtctactgcataagggaatcgtgcagggagagccgctctctataaggagttaaccagcgcctgccccggacacccccgcggggcctccagcggggctcaaactggcggcggctcagcagggggcgaggggtgctgggaaacgccggggctgcgaacttacggaagaaaatgtactcggtgtagctgctccagatcttgtcgtcgcggtactggttgacgaaggcggcggtgcccgaggagttacacgccaccatgtggaagccggcctcggacaggcgatcaaaggcctgctccaagtaggtgaacttgaggtagaagcgggacgtgtacttctccggctgccggtcggggtcgcggctctcgttgagcgtgtccccgaagacctccttggccagcgcgatgcgcccgcacaccatgatgcgcgccacacgccggaatttggcgtcggcctggttgtcgcgcacggtggtgtaggagccccggtagcccagcgtgaggaagcccgagcgcttgtcctgcgcgccgccgccgccgccaccaccgtgcgctcccgggcccgagggcacggcggccgccgccccgcgcagcagcagcgcgtcgctgctaccctgcgagacgttgtcctccaggtcgctctggcagccctcgtcgttgagagagttctgcttggtgaccttgggcgacagcagcttgaccaagtcggtgagctggaaatactcggcctcgcgcagcagccgctccttctcggggaagtgctccggcagcgcgagttgcttgtcccgcagataatccagcacgtacctgaaaaggaagccgtcccggtcgatgaagaagcgcgcccggctgtccctgggcagctcgccccggcgccgggcgccgccacggggactagagggcgagaacatgctggccaaagtactgtccgggacgctgagcagcgtcgagtgcttggtcacataaacctggccgcctacgttcagctccactacttcagggaagggcgagggtgcgcagggccccggggcggcggcggccgacgcgccgggcgagctggacgaggaaaccatctcgctaatgggcaggatggtgctgccgccgctgcccgtgtccttcagagccatagtccccccgccgccggcccagtgacccgagagagctgcactttctcgttcccggagcccgcgccccagccctccgcgtgctcctggcgctctgcgccctcggactgggcggcgcgttcctccgaccggggcggccccgctcagggttcggggcagcggcggcgtcggcggcgcccgagctccatcggaggagagacgcgc

SEQ ID NO: 29204 - DNA, 1055 bp, Homo sapiens
  chr4:47033907-47034962
  hyper
cggtccctacttcttccccttagcaccaatgaacccagcaacatgtcatacgtgaaagagacagtggacagattgctcaaaggatatgacattcgcttgcggccggacttcggaggtaacgcttcatcttttttcaacctgtaacccatccttagttctccttttctgtcaaagataaatgtcaaaaaaaaaaaaagaaaaggcatgtcattttcgtaagcgtgcactataccctgggcacacacacacacacacacacacacacacacaccccgggtccccagtctcaggtggatgaatcctcaggcggaggcgaccttctcccgggccgacacaccctctgcatagtcactgcatcacgcgtgtgcccacacctgttttcccaggcagtcccctgaaaggggtggtggggggagcagggagggagcccgttaagaatggagtaagggctgggaagcccccagaccctccccagcctgctgtcactgagagaatctgttcctaatgtggcccacctccccggcagggccccccgtcgacgttgggatgcggatcgatgtcgccagcatagacatggtctccgaagtgaatatggtgagtggcctcccgaggggcccggcggttcggcttacgcagatgggaaatggacaggtccctttgccctctgcgtttcattggcggtcacctcgcccctggcccctgaggtcccactccgcacccgctccccgctccggcacacacacccggtcgcccctggtttgtaatttcgacacacacgggctactgcggtgttccaggggaaacgtgctcggcactattttgggaaggacgagtgactgttgcgccgtggatctgctggggcggagtctgagcgttactttagctgggtttccctgcgtgtttggatgaggagggcaccatctgctggcagccgggcggcctgcactagggtccccggaccggtggtcggcagccatcacctccccaggcgcggtgctggcaatccccatggccctcgcagtccgcgagcccggatgcaccaaggccctgccacc

SEQ ID NO: 29205 - DNA, 860 bp, Homo sapiens
  chr4:4854859-4855719
  hyper
cgactgagcggtagggaggggaagagagaccgagccacgcgcctcgagaagcagtgcagagagcggaagagacagaggctgcgagacctacccacagagaccaagagagacgctcggaggggagaccgccttaggcgcagagattcagaggcagacagacaggcagacagaaggatacaggaaaggaatgtcgccgaaaggcagggacaaacctgagtcccagaaaaataagagacaactcccacacaccaggctgtccgcgggccgccttgtcacagaaaggcagctccccagccccgcagagtcccgacagctgcccccgcgaaggtggggcgaggggcggcttttccgggggaaactctctccctggacgcccctcctttccagcctcagctctggcctttctcggcatccccagcttgccttcagtttcactccatatctgggtctctcagaggcctcgggaggtcttccgttctctctgtcgccgtgtccacggaaggagcctccccaaccctctgtggctccgcgcctcttgggccggagcatctctgtcttccggagtctcttgatcattgctcctgcccgtcctcgcccatttcaaagacgaccaacagaggcttagaaaaattggccctccaccctcggctggttacctggctcgtagccctgggtctgttttcttctcagagagacctgagatcctcgacatttcctaaattcatggaaaacctcgacagtgttcaggactcccaaagaaggtggtgggcgggagggggaggagcataagagaaaagtagtgagtacgggcccaaagacccatttcgtggattgggggagggacggggaggctgttccac

SEQ ID NO: 29206 - DNA, 856 bp, Homo sapiens
  chr4:5052378-5053234
  binary
cggagagctgggcccgcaggactgcaaggcagggggacctgcctgtccctcagggagcgtcctgggaacccgcgctcgccccacacgtcttggggcgcatctgccgcaccccttacttaggcacccgcaactgtggcgcgtatctcccgatccaggctcccgccgcaggagcccagggaccctcatgctagcctcgcccctaaatcggacgccgatgccgcccaattttgggggaatcccgagactcatgcccagccattcccagggagaatggtttggggcaaactatggctgtctggggcctcagtttccccatgtacaatgaaggggtcagattagtatctaatcttaaggggtcagaaagtaaacagatactttcattcattaaacactgagaaaaaccttaagaggaacagcgtcggttggagagccagcagacactccactgcccatcccaatatgaatgggcaaatacaggctagcggggagtcctgggactcccttcgcagccggggccgactaaccacagacctaagagcccctctacctctagacctccgtctactgcgctctaaaatatgaacgatgctttcttactgctgggttgtcggaggcggatgtgggatggtgctaacaaagcgcgtagccgaggcctggccatagtgggtgctgacaaaccgcttactgcctgcagggaccgagctcccggccgagggaggagggccgagcagggattcagattcttccgggccgatccctttctcagctccttccgccctgccgccgcccactgcgtgctgccttcgtccgtcccctcctcccccgctccttcccctccttcccctgctcccgcgcc

SEQ ID NO: 29207 - DNA, 1386 bp, Homo sapiens
  chr4:512569-513955
  hypo
cggcccattgtctacaccgtcggggatcctttttcctaaaacaaaatggggtatgtgttctgacactgaaatacgttttagaacccacagccaggcccgtgcagtccctcggtggcgtccagtctgttggaggctttgtgcccacccggctctctcagtgtagtgggaccggctttttctcacctctggacttttgcacatgctgttcccatcagcttgatgctcttcctgcagttttttgcctggcgaattcctgggtaccgtttacatttcagcgtaaacatcagaccttcctggtccagcgcccactcccaatccaaaatcagttcctccccattaccaaaaatccctcattgataccctctacttttccttcctgggaaacttgtaattacagctgtaatgcagtcacagtttgtaattacgcttgtgtgcgtgcgtgcgtgtctgtgagccctactggatccaagccccagcaggcaaggattgcacctgcttgctcgccatgctgtgtctcccctggcacagcgcctggcacagtgcctggcacgtcgtccacgctccatggatatttgtttcgatgcatgcacaggtgcacccccatagctttgtgactctctgataggcggtggggtgtggacacaggcgtccccccatccagggtggtaggtgtagcaatgaaggatgccagccctggaaccagactgcctgagtttcatttgcagcttttacccactggcactgtggcccaggtgcgtgactcaccctctgtgtctcagttgcctcctctggataacagttctgatgctcatccctgcctcatagggtcattagggaggtgaaacgagcgagccgcctagtgttgctggctactggcacttagtgcagagcacctggtgccggcagcagtggggtgggcctgcaggcgtgtgggttcatgcttagggacttggtgcctgcagcagtggggtgggcctgcaggcgtgtgggttcacgctcagggacctggtgccggcagcagtggggtgggcctgcaggcgtgtgggttcatgcttagggacttggtgcctgcagcagtggggtgggcctgcaggcgtgtgggttcacgctcagggacctggtgccggcagcagtggggtgggcctgcaggcgtgtgggttcatgcttagggacttggtgcctgcagcagtcgggtgtgcttgcaggcgtgtgggttcacgctcagggacctggtgccggcagcagtggggcgggcctgcaggcgtatgagttcatgctcagggacttgtgccacagcaccctggacctcagtggcttgagcgcctgtggcagctctttcactgctgtgatagcaggcctggggcatgcagagccacagggtggggc

SEQ ID NO: 29208 - DNA, 923 bp, Homo sapiens; identical to SEQ ID NO: 23276
  chr4:6201800-6202723
  hyper

SEQ ID NO: 29209 - DNA, 149 bp, Homo sapiens; identical to SEQ ID NO: 11693
  chr4:7004195-7004344
  hypo

SEQ ID NO: 29210 - DNA, 108 bp, Homo sapiens; identical to SEQ ID NO: 11694
  chr4:71857989-71858097
  hypo

SEQ ID NO: 29211 - DNA, 477 bp, Homo sapiens; identical to SEQ ID NO: 23278
  chr4:87281183-87281660
  hyper

SEQ ID NO: 29212 - DNA, 987 bp, Homo sapiens; identical to SEQ ID NO: 23617
  chr4:955328-956315
  hypo

SEQ ID NO: 29213 - DNA, 315 bp, Homo sapiens; identical to SEQ ID NO: 11696
  chr4:968846-969161
  hypo

SEQ ID NO: 29214 - DNA, 1830 bp, Homo sapiens; identical to SEQ ID NO: 23281
  chr5:100236036-100237866
  hyper

SEQ ID NO: 29215 - DNA, 1887 bp, Homo sapiens; identical to SEQ ID NO: 22915
  chr5:100238197-100240084
  binary

SEQ ID NO: 29216 - DNA, 1059 bp, Homo sapiens; identical to SEQ ID NO: 27062
  chr5:101631442-101632501
  hyper

SEQ ID NO: 29217 - DNA, 520 bp, Homo sapiens; identical to SEQ ID NO: 27064
  chr5:1039295-1039815
  hypo

SEQ ID NO: 29218 - DNA, 1351 bp, Homo sapiens; identical to SEQ ID NO: 23619
  chr5:1073469-1074820
  hypo

SEQ ID NO: 29219 - DNA, 1862 bp, Homo sapiens
  chr5:113696433-113698295
  hyper
cgaactccaacaaaactccagcactgtccgtgggcagcgactattcagcccaagctatcattcttaatttccctgccaggctgcgactaccggggtgaatcagcccgcgccaggcccctttcccacccgccgctgcagttaggacttggcaaagatgctcgatatttgcgtatttgtgaccggtctttgctttgtgtctgcgctgcaggtgaggaggaggaagagaagcagaagagcagctggaggccggcggtggctgagcagcccccacacctttgagcgagccgcctgcctctccaccggcaaggaagccctgggacctccggattcgggctgccggagggcctgagcgccagagcccaggacccggcggccgggggcgccatcccctcatgttctggagaaggcgcaaatgtgagctggcggtagcggggaaagccctccgcccccgccaggggggacccgggaagcccggccggctctgtcggcagactgcggggatcccctcctccggccccgcccccacccacccccggccggggtgccgaggcggttaaccctacccgcgccgcagcgcacttgggctagagcgccgcgcacccaatccagattccagagcctgccggctgggaaagatccggtctcggggtcggctatgatcccgcagcggccaaggcagggctcaggccccgggattctccccacacgctgctgcactggcgcagccggtcgccaaactttttctccccaaagccagtgcccccgcagttacttggcgggcagccggcagcccactctcggcgggatgatctgggagaagcgggcgtgggacgagggggctgctgttttgcagccctgcgaggcgtgcagtcggagaagtggtcggggttccacaccgtccctgagcctgcccccggccaaggtggcccgacgtgctgcagtggctggcgcaggtgatccgggcagcgcgtccggcactagtcaagggggcagcggcacgggagggaggggcgcctttctcttttctcctccccctgcagcccagctgcactgcgtgggggctctccatctccacgcaatcagcaggcggaatccctgccctggagcgccctggctctggactgcacccccctagggtttgtcctgcagattcccctccccatctttctctgccacacacgcttccctaagccgcgcgcgccgcaaactcagtctcggtccccgcaggtgatgtcatgcccattgttttggtgcgcccaaccaatcggactcgccgcctggattctaccggagccggcatgggcccttcctcgcaccagcagcaggagtccccgctcccgaccataacgcattgcgcagggtgcaccaccgcttggtctccctgcagctttaacagccctgacatggaaaccccattgcagttccagcgcggcttcttcccagagcagccgccgccgccgccgcgctcctcacacctgcattgccagcagcagcaacagagccaggacaagccgtgcccgcccttcgcgcccctcccgcaccctcaccaccacccgcacctcgcgcaccagcagccggccagcggcggcagcagcccatgcctccggtgcaacagctgcgcctcctccggtgccccggcggcgggggcgggagataacctgtccctgctgctccgcacctcctcgcccggcggcgccttccggacccgcacctcctcgccgctgtcgggctcgtcctgctgctgctgctgctgctcgtcgcgccggggcagccagctcaatgtgagcgagctgacgccgtccagccatgccagtgcgctccggcagcagtacgcgcagcagtccgcgcagcagtcggcgtcc

SEQ ID NO: 29220 - DNA, 1420 bp, Homo sapiens; identical to SEQ ID NO: 24489
  chr5:114514898-114516318
  hyper

SEQ ID NO: 29221 - DNA, 997 bp, Homo sapiens; identical to SEQ ID NO: 27068
  chr5:115151516-115152513
  hyper

SEQ ID NO: 29222 - DNA, 995 bp, Homo sapiens
  chr5:115297640-115298635
  hyper
cgctgcctgggccgcatgcctcctgggcttatttaggaagcgaagttagcgccacacatttggctccagaaatttgttctgacggcgcggccgacgccctgcagggtcatttctgaacgcattcccaaatatcctggtcctcaagcccttaccaccccctagcacacgaagccccagctggcggtggagcaggtgtgttgctggtagctcatcgctggcttggagatagaggtgcttggtacctgtcccctttccgacaacacctgaaaccgtatcggggcacacccctcatccaaatatccacgtttaaggtgtccggattcgtttggcttgaccaccccctccccgcgccaaccctggaggcatcttccgtggggtctgtctcttcgaacccaaaggggtacgcgtctgggtgagccaggtccgcctcttccctggcgctggccgggggcgggggtgggtaggctgggacctgtgtctgattagctgggagggggaagccatggtcccaaccgctgtctgctgagctccagtccgtccaggctcttccaggaggaagaggcacgatacaagagaggaggggcaggggtcgcagcactgaacaccctggccggggttttgacagctgccacagtctctgagctccagcctcgcgcctgaacccggtccctgccatggggcccccttccagctcaggcttctatgtgagccgcgcagtggccctgctgctggctgggctggtagccgccctcctgctggcgctggccgtactcgccgccttgtacggccactgcgagcgcgtcccaccgtcggagctgcctggactcagggacttggaagccgagtcttcccctcccctcaggcagaagccgacgccaaccccgaaacccagcagtgcacgcgagctagcggtgacgaccaccccgagcaactggcgacccccggggccctgggaccagctacgcctgccgccctggctcgtgccgctgcactac

SEQ ID NO: 29223 - DNA, 303 bp, Homo sapiens; identical to SEQ ID NO: 23287
  chr5:115910923-115911226
  hyper

SEQ ID NO: 29224 - DNA, 228 bp, Homo sapiens; identical to SEQ ID NO: 23288
  chr5:115911467-115911695
  hyper

SEQ ID NO: 29225 - DNA, 266 bp, Homo sapiens; identical to SEQ ID NO: 23289
  chr5:115911850-115912116
  hyper

SEQ ID NO: 29226 - DNA, 1683 bp, Homo sapiens; identical to SEQ ID NO: 27070
  chr5:11903295-11904978
  hyper

SEQ ID NO: 29227 - DNA, 1550 bp, Homo sapiens; identical to SEQ ID NO: 23292
  chr5:124082318-124083868
  hyper

SEQ ID NO: 29228 - DNA, 204 bp, Homo sapiens; identical to SEQ ID NO: 22916
  chr5:124084158-124084362
  binary

SEQ ID NO: 29229 - DNA, 381 bp, Homo sapiens; identical to SEQ ID NO: 22917
  chr5:124084660-124085041
  binary

SEQ ID NO: 29230 - DNA, 740 bp, Homo sapiens; identical to SEQ ID NO: 23293
  chr5:125930492-125931232
  hyper

SEQ ID NO: 29231 - DNA, 979 bp, Homo sapiens
  chr5:128795471-128796450
  hyper
cgtgtcttcccatctccctactcattccctcccgcgccgctgcgggtgagagccttcagcggtgcgtcctaaggagcgtgaggagtgtgcggagcttggcacaccaagttgctgagactgtgacaccagcctccgcccgttccgcgcgggtgcaggcggcgagcctcggctcggacaccacagctctcctgcccgcgccgggcagtcctctgcctgtccagaggcagcactcccggctctcggctggctgtgggtctgtcttgtggggctccagcactagcctgctcggcctcggaaactcctgcagcgtccagaacacagaaaatagactcatctcctaattcgccagggagctcgagggctgcggggccgcggggctgcctcccccgctcctcccccaacccgaccccaccccacccccgccagggcttcggcggcctcccggagtcacacagcctacccccccaccccaacaccccctcccccggcagacaaagggcctgggcaaattcgccgcccggcctcctagcgctccggggaggccgctgcgccccggagtggatcgcgctggaggcgtgcgccgggcgagaagccgcggccgcgggagcgcagtatggggaagaaccgcgagatgcgcctgactcacatctgctgctgctgcctcctttaccagctggggttcctgtcgaatgggatcgtttcaggtaagttcttccgtgactttctcgcttcctttccagccatcccagcggagaccgcgaacgtacgggtcggcagggctggtgcaaccggtgcgtggagagcagggctcagtgggtagcaataaaaatgagcttgaggtgcaggttaaggggtcaagttcggaaatgaagcacacttctgccggcctcgttttaaccgtatgtggaatagtttccttctaattagagcaataatatttgcaaaggtacgtttacagcacctggaggaaaattagaac

SEQ ID NO: 29232 - DNA, 826 bp, Homo sapiens; identical to SEQ ID NO: 28058
  chr5:1294889-1295715
  binary

SEQ ID NO: 29233 - DNA, 259 bp, Homo sapiens; identical to SEQ ID NO: 11721
  chr5:1331488-1331747
  hypo

SEQ ID NO: 29234 - DNA, 114 bp, Homo sapiens
  chr5:133820023-133820137
  hypo
cgcgcccggcccgtgttttgttttgttttgttttgttttttactgtgatggccagaaccgttagtataatgttaaataaaagtggtagtaatgatgccaggcgcggtggctcac

SEQ ID NO: 29235 - DNA, 392 bp, Homo sapiens
  chr5:134827217-134827609
  hyper
cgagcttctttcttctccaaccccacccccacccgcagctctggagaccatttctccaggctgggggacgcaacctgcctcccgagaggcgcgtccctgtcgcctcaggcaggtgcaggccgggcgggcgcgtggggcggggcaggggcgttatctcctgaccgaagagggccgcacatctgtttatctctgaagcggcgctggattggatttctcgatgtttatctccctcagaggaacagcgcgctggggctgcggagagcgcagctgcgggccgggcagtgattgacaggtcgggaacagggcctcccgcccctcctccgtctgggtggggggcgcttggctgcccactgcgcaccccatcctagagcgctgcaggtgagcatgccggc

SEQ ID NO: 29236 - DNA, 541 bp, Homo sapiens; identical to SEQ ID NO: 24493
  chr5:134880146-134880687
  hyper

SEQ ID NO: 29237 - DNA, 823 bp, Homo sapiens; identical to SEQ ID NO: 27077
  chr5:136834322-136835145
  binary

SEQ ID NO: 29238 - DNA, 1344 bp, Homo sapiens
  chr5:140305412-140306756
  hyper
cgggtcgtcaagtctttgagtttctagttattgctattgactggtttataacctcctctttcacccagatcgtcaagggccgtttgcaaagcactcccaagtagagcctcttggagaaggagaaactgctatcacgcaaaaaaaaagccttgagctcgctggctccgctgcctcgaaaagccagagtccggaggcagtttgatgcggacactattccccaaccttcttcccctccttgtcgtctctattgccctcttggcagctcctgggatacaagagggtgcaggacagacttcaacccgcagcaggatccagcgcggaaagctctgcagcaggatccagcgcggaaagccccccgcagcacttctttcggggggctcctgtttccttaagcctagaaggtgtggtcgctcacgttcaccgtcccgcctctcgccgcctccgctcggcagctccacgctgagtcccgccctctccgccggagaggtgcgccggggtcagagcgccgggacccgacgcgcggctcccaaagggcggcaggaagagcccagctgggctcagccacagttatcagcaatctgcgggcagaggatgtggaggttaagatctgggcagcctcagggcgttgtcctagaaaacaccgtttaaggagagaagtgttagtgtctcggggcgtctcccaggctccgccctgcgcccgcagccagcgtggtggtcgagaccccagcccgctgctactggagacagcacctctcgcgcccgggcgggcggcctcgtctctgcacccctaggcggcgctgcgctcctcaacacccggccggctccgctttcccagacggctgcccagcctccagcctagcaagcccggctcccagctggccagccccggcaatgccggcgttcgggaggcgcaacgtcggcggtcgctgagtatccagcccgcagcagtgacggccggcaggagcgtgctcttccccgcggctcgtgctctccaggagtccggagcatggtcctgggtcaccgttggtgtagcgtgttggtggaacgtggacgcctagagggaggatggtgggctgtggggtggcagttttatgtttgtgggtttcctgcggcgctgcagcgggacagctcgagtactcagtgccggaggagacggagcggggcgtagccgtaggcaatctctccgcggacttgaggctgccagcggccgctatgtcctcgcggaactttcgcttcctttccagccaccgcgagctctacttcggggtggatctacccagcggcaatttggtggtcagagagccggcggaccgcgaacagctgtgcagggccaaagctgcctgc

SEQ ID NO: 29239 - DNA, 324 bp, Homo sapiens; identical to SEQ ID NO: 11724
  chr5:140419818-140420142
  hyper

SEQ ID NO: 29240 - DNA, 65 bp, Homo sapiens; identical to SEQ ID NO: 6601
  chr5:141355864-141355929
  hypo

SEQ ID NO: 29241 - DNA, 399 bp, Homo sapiens; identical to SEQ ID NO: 24497
  chr5:141931151-141931550
  hyper

SEQ ID NO: 29242 - DNA, 453 bp, Homo sapiens; identical to SEQ ID NO: 11727
  chr5:14328256-14328709
  hypo

SEQ ID NO: 29243 - DNA, 210 bp, Homo sapiens; identical to SEQ ID NO: 24499
  chr5:149810718-149810928
  hypo

SEQ ID NO: 29244 - DNA, 750 bp, Homo sapiens; identical to SEQ ID NO: 22920
  chr5:158527374-158528124
  binary

SEQ ID NO: 29245 - DNA, 131 bp, Homo sapiens; identical to SEQ ID NO: 11728
  chr5:1641261-1641392
  hypo

SEQ ID NO: 29246 - DNA, 795 bp, Homo sapiens; identical to SEQ ID NO: 22921
  chr5:169063996-169064791
  binary

SEQ ID NO: 29247 - DNA, 918 bp, Homo sapiens
  chr5:170739045-170739963
  hyper
cggggcaccctgcgtttaggctgggtccactcttcttcttttccgttccttttatttaagtctttttatttaataaaaaagttagctatttcacttaacgccgcttttatttcgttttcgttccaataatgctcggcgacccccggccctgcgccccacccctgcggcggtagaagccgagcggcggcgcgcagggcgcgtccacttccgcaacgttcgtctgcattcgcctcggctgcaaccccggcccgggcccccgaggaggatgcgcggtgcaggtcagttggtgccggccacccgcagcctgggtgcgcacgggatggggactggacatgggaaaggtgctccaggcccgaaggccgcgggccagcgccggggcgggctggggagtgaaaggctgggcctgggcagatgcctaggccgtccccaggtcaaatccacctggggggtgggaggcagggtggcctcgaacttcttagagctcaagtcggaactcggagccccacttcaccccgcaactcgctttccgccctctttttcccgcggagcctcagagaggacctggctctggccagtctgcgcgcgctgtgggcaggctttgcgcgcagagccgctgcaaatcctcggtctccaaacgcctggggagcaaatgcagcgcacaaccctaggggccctctccttgtcgggtttgcgtgggaccccaggtggagcgtgacgtcatgtgacgtcaccgcagcccccgcggtgtcactgggctggagtgggcggggcgcccggaactcagaactctaagcgctggtgtggtagcgtcgtggccggggtccacccagctccaccgtggctcaagagctggaagtttcagaattgcgaggtttggagcggctgaccccttccagtcacatctaacacacaaagccc

SEQ ID NO: 29248 - DNA, 584 bp, Homo sapiens
  chr5:170740470-170741054
  hyper
cggggccgcgtcccagagcacccctcccactccacgagcacccccacccgcctcatcccactgcctccctcggagccggagccgtgcgccaccctgcaggttcccgtgctccgagccttcgttctatgcgggctgcgggactgtattcacctgcagggctggaggaaggggagggcgcctgagaaacaccttgaacccccagcgctcccgccgtcacctccacctccaagcccagctagcctgggatctgcgcctttcaggacataaagacacccagggagggactagggtgactcagaacttcgggtctcttccgtgagtgttttcctgaaatgcttttattttctccaataaaaagcctgatgaacgccgtcatcgggttgggaaaggttggcccttcggctgaggactagagggacccttgactttgctggcggagaagcgctttcctcagagacgggtgtcgcggtccagctcccttccgttccgttttattctgttgctccataataaggcctagcggggttttttttcttaattgtttttatttcaacgcgcttttggggaacagatggtcaggtggc

SEQ ID NO: 29249 - DNA, 936 bp, Homo sapiens
  chr5:170743178-170744114
  hyper
cgtgcagcggtggcggccccgcgctctcgcccctaaagcaagcgctctttgtactgggtggaggagctttgagtagtgagggtggagatgcagcttcggggtggcgcagccaccctgacactaggcccggggtcgcagtgggacagaagagtctgccgctctgacttgggctctgagttccaagggcgcccggcacttctagcctcccaggcttgcgcgctggcgcctttgccatccgtgccgaagtggggagacctagccgcgaccaccacgagcgcagcggtgacacccagaggtcccaccgggcccctgggcagggtaaccttagcctgtccgcttcggcagctttgcgaagagtggcgcgcagctagggctgaggctcttgcggacctgcggtcgaagcaggcggctgagccagttcgatcgccaaggcctgggctgccgacagtggtgcgcgctctgttccgccgcggccgggccaggcgctctggaatagcgatggggggacacggcctccaactttctgcagagaccatcgggcagctccgggcctaagcagcgacctcaccgaaggttcctgggaacctttgccaaaatcccagcctctgcctcggtccagctaaaccgtgtgtaaacaagtgcaccaaggccgcagagcggctggtgtggtgcaggcgcctgcgttctggagtagtgaaggttcctccacagggaaggcggttttccttccgtgaaattcgaaattcagccccccagttccaagcgcctgctccgttaatagcatctactctcagcgacgcccagacccaggctgtgcactgtcttggctcagacactggcaaagtcctcgagaaattgccttggtgatcggtgccttccctcgggccacccagccgccggtggcacggagtcttccgcgcagttgtgcggaccctc

SEQ ID NO: 29250 - DNA, 158 bp, Homo sapiens
  chr5:170744390-170744548
  hyper
cggtagtagagacagtcgcacagtcatctgggaaacttggcctggctccatctgcctagacttatcagtgtcctggtattaccctgaggttagtggccatcacaccagttgaaacgaatgtcgttgctctgtcagacccgctgccaattaatgagttc

SEQ ID NO: 29251 - DNA, 539 bp, Homo sapiens
  chr5:173738806-173739345
  hyper
cgctgcactggacgctgggaagactttcaccgcagagcgggggctgctggaggggcgggtgggctgcggcccggcggcggcggatgcctgtctctgccgaagccgaaggaaggctgcgtgggcagatcttccagctaggcccagagggacggccgacattcaacccgccagtcaaaggagggaagggctggcggcaggagcagctcaggaggcagacccgggcgcgcgggggcgcgggggctcgggggcctgtgagggatccccggacgggcagctgcggggtgcgggccgggctgcaccgcgacaaaggcggcccagcggcggcatcggaggacgcacgctgccccctggtggccaggccgctccccgcaaacgcgagctcctttgttttgcggtcccggcttctgcggcccaggcttgctggagagagtctgaagccccggcttccagagcgggtggccacgatgccagggccgcgcagggaacctggtgagccgagggtcgagtcccagccctgcagctcgctggcggcaagggcc

SEQ ID NO: 29252 - DNA, 1084 bp, Homo sapiens
  chr5:174147435-174148519
  hyper
cgcctggacgacttcatctgtggaatggggagaaagctcaggctttagggggccttcagtaatctgcatcgtgcttttggcaaaagctccttctctccagccccggctcaaacccgggctcggtcctgactccggaccttagggggcgggaacaggagaacaggaaagaacaagcttgggcttgcagagcttcgcaagcaagacgtttgtacccccaaaacctccagctgtgaccctgaatatctatctacccgacttcctgggctgtgtaactcggaaagtgatctctctagacaccagaggaccgaaccttccccattctcactctgcaacaagccagtaagaaaaatgagctcagagacgagtagccttttgcccgaagtcacacagccaatgttttggggggtgggtgagcggtgttgtggaattcctggcggatgttggcgcccgcgggtctgcctgcttctgatacccgggctcggtagaataggccgctaacgagctcccattaggaggaattgtcactcctctgggagcgagcttgtcccattagggcgaattgtcattcctcctggagcgaggttgtcccggctccgcgcaggctgagtgctggggccgagagcaattaacgcggctccggcgcgggcagccgcctctgccccgggcagcgggggcggggcagggcgggggcggggcgcccggcgcggctggagccggtcacccggcgcagccccttcccccggagcccgcctttcatctccccgcgcctggcgcctgcccgaagcccaggcccgtctacagcccccttcgctgcccctcccccgcccccttctagccgctggggttacaaactagccttcggccctcggggttacaaacgctgcgttctgcgcgcagtgctccacagtttgcaaggagtgttttctccttgggactcgcagcgcgcgtacgcggttgcttcaagaaggggcctggcgggtgtaacgcgccccggggagcgcgggaaggtgcagggttgaggatctacgctcagaggcctcagccgcgcgggagggattcctgtgtctcccacttctacctgcgc

SEQ ID NO: 29253 - DNA, 1268 bp, Homo sapiens
  chr5:174150711-174151979
  hyper
cgaggcaaacactggcattcaaacacgcacgacaaacacaggctcaaacaaactcatgaatgcacacttgcactgtcttgagaaaaaggtcggatccggatcgcgctcagaaaggaggttcaggagacaagtacagagatttcaactttctaaaagtgcgctggatttgctttctagtgagagagatggggacaactgatttaaattcttcactccgaaccatttgggagagaggcactcctgaccacttctcgggctccttccggcccctcttttccaggggaaagagttgtaataataacagtgggcgcttttgagcgctggctagtggcgagttactcttctaagtgcatacatttctttcacagggatactggcctgtgagtttcagcaccgactttctggaactgtaaagtaagccaattttgacgcatagtaggggcttcgtaaatgtttctgcaatgctgtttgcgaatcttgaacttattctggcggtagagggagagtgggatgggcgcagggtcccttttaaagaagggtcaaaagagagaagaaatgggactcggcgaacttccgctttaaataatcgctcttaattaggtctcgggcttttcagtttcggcgtgattataacccttcagggatcgcctaataacaactctgctgactgctcctgtaattaactcctaatttatttcaaacaggaaaaaaaaaaaaaaaaaaaaaaaggagggggggcagccccttcgggaagagccaatcaggggcgagcgtctctggcgtcagcgccaggcccggcgcggattggcggcgcgcgtctcccacttcccctcggaggaaaggctcagctcccagcgcgcccctcccgtctccgcagcaaaaaagtttgagtcgccgctgccgggttgccagcggagtcgcgcgtcgggagctacgtagggcagagaagtcatggcttctccgtccaaaggcaatgacttgttttcgcccgacgaggagggcccagcagtggtggccggaccaggcccggggcctgggggcgccgagggggccgcggaggagcgccgcgtcaaggtctccagcctgcccttcagcgtggaggcgctcatgtccgacaagaagccgcccaaggaggcgtccccgctgccggccgaaagcgcctcggccggggccaccctgcggccactgctgctgtcggggcacggcgctcgggaagcgcacagccccgggccgctggtgaagcccttcgagaccgcctcggtcaagtc

SEQ ID NO: 29254 - DNA, 769 bp, Homo sapiens; identical to SEQ ID NO: 11733
  chr5:174151999-174152768
  hyper

SEQ ID NO: 29255 - DNA, 589 bp, Homo sapiens
  chr5:174162402-174162991
  hyper
cgccaggagcggtgcgcccagcgcagggggctcctagtcacctcgacccttccggcgcccttccctccttagctgcacctggcaagccagcaagggagtgacccttgcgcaggaagggggcgcgtcacccggtttccccatagaaccgtgggcgtcgcaggcgagaagggaagcgtccaggcgctcggccccttccgccccgcccgctgccggccgcccgtttgatgtcgcgggcccggcaggaatgcggccgggttatcaatcacccagctggatcccgaaggtctctgcctaatcacatttaattgctcgtggaggcccactctcgccccgggccggccgccgcgctcaattactccccaaatacctgccatcaataaatacgcactgacaccggcccggcccgctccaccggcacggaagatcgcagccgaccaggcgccctcctccctgccccttgtcccccatcattaaacttacacctcgacgcccaaagaagcaagccgagcagataataacagccccctgtaactgagcgcttcccaagtgccagacactgttgctcggcgatttacaccaatcaactcac

SEQ ID NO: 29256 - DNA, 308 bp, Homo sapiens
  chr5:174220739-174221047
  binary
cggcggctcctcctcgcagaaaccctccgcagtcccctaccccagaaaggtttcccttccctccccttcccgcaggcccggggctggtttggggctccagtctgagcgcctcctccgcgacgcgccacatggctggcaccggcgcgcccccgcgcggccgcctgcgagaagctcactctccgcggaggcgaaatctggttttgattcaattagattaagttcaggggcagggagggaggcttagtcccgggccctgcagggactataaaagagaagtttgaggctcgtggggtgggggacgggggcac

SEQ ID NO: 29257 - DNA, 90 bp, Homo sapiens; identical to SEQ ID NO: 11738
  chr5:176698046-176698136
  hypo

SEQ ID NO: 29258 - DNA, 719 bp, Homo sapiens; identical to SEQ ID NO: 23623
  chr5:176794807-176795526
  hypo

SEQ ID NO: 29259 - DNA, 876 bp, Homo sapiens
  chr5:177411342-177412218
  hyper
cggacgtcaggcgtggcgcgttggggaagcagctccacggggacccaggaggcgccggccgggttgagccgggttggttccgacccaagagagctcgtcccacgacggagcaggtccctttgcatcccgcggggccgccaggtgcaattttcgctgggccgacggcgcggagatgggccagagtccggccatccagaagtgcctggagcgcacagcaaggccctgccctcggctccgtgaaggtgagggggtaaagtcggcccggagtccccgggggtgcaggaggggccccgcgggttccagcagaccctcgacggaacgttccaggcaggcgagatctcgcacagaatctgcccttttaaaggctcggctttgtcctcgttaaacttgcgtctggcaacgcgaccgctgcggctcccgagcaagattagagggtttccgctcgcaggggcgcgcccggggaccgcgcctccccgcctggtctcggcgccccggcccaggggtcttcagtggtgaggggcgcccagatcgctgcatcccctggagctctgcgcccggccgagccactcagagctcccgccccgcacacccacttcgagctccaagtccttccttttctatactccaagttggatcctgctgggaaggaagggcccttcctgagagaccagggattgcgatttcccagcacaaagtcgaattcatgacttcagcttcaacggggctgcattctccccttggcaggaatgggatggagcgagggtgaagctgctggaaagacactcgttttatttttttaatcgtaaacggggcaacttccaactctgccagttttaagcttctagagtatctcctcggcggagcgcggtggctcac

SEQ ID NO: 29260 - DNA, 597 bp, Homo sapiens
  chr5:180046715-180047312
  binary
cgaaagcggaggcttccaccaccttcccgaaggcgccgtagccgagcactctccctgtcggggcagggggccagttgcaggtgagctgtacggggtgagcgtggagacaggtgggcggcgggggagccccgtgcagaggtccaggaggacaggcctggcagcaggaggagcgtggggagccacagcgggaagacaaggagaggtggacaggaggccgcgcatcctcccgggtaggtgtgacagatacaccctgctcagggtggcagcaggtgacctcagggagcctgggaactggggaccctggctgaggttctaggtacccacgcccacagggacaggtcaggccaggcggaacttcctggtgcaagttttgaaaatggagggattcaggcactccggcctgcagcaggtgggtcgggcaggaggtgtgggttgggcaggctggtgctggcctcacccaggtgcagccgctctcgggggaattcccactggctggcatcgtaggacaggtattcgcattgctcctccagaggcacctccccggggtccatgatgatggacaggtagcccgtcttgatgtctgcgtgggccggctgc

SEQ ID NO: 29261 - DNA, 346 bp, Homo sapiens; identical to SEQ ID NO: 25730
  chr5:1879488-1879834
  hyper

SEQ ID NO: 29262 - DNA, 718 bp, Homo sapiens
  chr5:1884998-1885716
  hyper
cgagcatccttctacttcccattatttattgtttacaaactactcgctctctccaggtaatgaggcccggctgaaggaggggtgtgagcccagccgggccaagggctgggatggggagtagagacccccagaggggaggcattcagctgtggcttgtcctttcctcacctatactcggggacctggcctcggcgactgtgagcactccgccggctgagggggagagccagggcccaggggcccagccacctatgccctgcacctctgggctctagtgcaacagctcagcccacccagacctgaggctggtgcatttccttccttccagacccggcggggcttaactggagccgaagccccagaacaggcggccattcatcttctgagcagagtctgggagaagcagcctccacttcccagggcagccagtacgtgggggccctttcgggggcttcctttgaccaccaccgccaccttctcctgttctcttttgcctttccagcctgtgtgcataaatcgacgctccagtccccaccagcgggcgaccctttctccgtgacccagaaacctggcctctgaatcggctttcccaggccgccgcacacacacgctccacttcctgcccgccagcaggccccagcgcctggggtccgggcccagtcacagtcaccctgcctcgggaagctcgcaactgcccaggaggcctcctgacccgccc

SEQ ID NO: 29263 - DNA, 491 bp, Homo sapiens; identical to SEQ ID NO: 24511
  chr5:192159-192650
  hypo

SEQ ID NO: 29264 - DNA, 291 bp, Homo sapiens
  chr5:3121996-3122287
  hyper
cgaggatggccaggaaacagttaatttgatttgcgaggcgaaaaggtcgcatgttttgttcagccctttctcagccccttcctccctcgctcggccccagatccatggcagcgcggtttctctctgccatagtctcggctgtgtcatggctgcatcccacgtgggcgacacacagtgccccagcgccaggcagcggggacaatggtccccagctcagggggttcctttgccggcgtcccttccccttggaatgcgctttcttgcacctcctgtttacaaacaaaataaaac

SEQ ID NO: 29265 - DNA, 1687 bp, Homo sapiens; identical to SEQ ID NO: 23300
  chr5:42950747-42952434
  hyper

SEQ ID NO: 29266 - DNA, 1260 bp, Homo sapiens; identical to SEQ ID NO: 25734
  chr5:42991800-42993060
  hyper

SEQ ID NO: 29267 - DNA, 229 bp, Homo sapiens; identical to SEQ ID NO: 25735
  chr5:42993305-42993534
  hyper

SEQ ID NO: 29268 - DNA, 1290 bp, Homo sapiens; identical to SEQ ID NO: 24515
  chr5:42994313-42995603
  hyper

SEQ ID NO: 29269 - DNA, 331 bp, Homo sapiens; identical to SEQ ID NO: 6604
  chr5:453948-454279
  hypo

SEQ ID NO: 29270 - DNA, 368 bp, Homo sapiens; identical to SEQ ID NO: 9813
  chr5:476496-476864
  hypo

SEQ ID NO: 29271 - DNA, 472 bp, Homo sapiens
  chr5:50677705-50678177
  hyper
cgcatctttgattccctttccgctttggagaggcattacccgttcaagcccagccaatgcggccggccaggatttacagctcttatcaagggttagattttgcgaaagatataaagaaaggagtttcctaacacaccgggtcttctcacagcaacaagacaccgaaattaagccttctatggtttgtgtctgtaggactttttagataaaactggcagccccattagataagaaatggctttttagaagctttgggggaagcgcgggggttcttcgtggccttcctgtgactgtctttgggagaccgtaacagatgatgggaacatgtaagaatgattgaagaaggttaccggcgagttgcacctaacagtcttctctctccaagtagtttctcgagagaaaattatatattaacgcctggggacgtgaaataggtctttcactgttctgtaataaatccctccctactcgc

SEQ ID NO: 29272 - DNA, 811 bp, Homo sapiens; identical to SEQ ID NO: 24516
  chr5:54516349-54517160
  hyper

SEQ ID NO: 29273 - DNA, 1069 bp, Homo sapiens; identical to SEQ ID NO: 24517
  chr5:54518558-54519627
  hyper

SEQ ID NO: 29274 - DNA, 887 bp, Homo sapiens
  chr5:54526958-54527845
  hyper
cgcagacagacacttgcaggatttagacaaaccacaactgtttattggtgaaagactcagcttcctcatgtgctcgctgcaaaataaataaaataccagatgctagtatcgtacactatttacaacctgcagctgaccaagcaggtcctgaagccttctctgtggaccagtactgcactcttctgaggctacgggagaggtccagcagccgggccagggactaaaaggaaacgaaggatctgttttatttcgagctcgggggcaggctgcacttctcgcagatctgaacgggcagcatgtgagtcaaggaagtactgtttatggccaccagcagctgcaacttgcccatacagtcctccagcgccgcctccgggtggtctcccagtcgcaagtccacgggccgcgagacccgcagcatgcggtccgccagcgccaggcagcagatcgccaggagggaaggggagtagctggtgaaggcatagtcggccagactcagctctgccaccccccgcgccagggcttgcgcttccagagcttcggaggcctcagcctgccccgcctccacgcgagcgtgcgtgaaatgctccaggaagaagctaatggtgggcgcacccagggtgaagtgcagcttgtgcagcacgatgcactcgaggttgcagagctgctgccgggagaaggcgccgcagcagagggccagaagctgcttcacgcgcggcgggtgcacctccacctgcaacacagggcgcactcaaccccgctttgcggcttcccgggccccaggcccaccccagtatgacgcccggactttccccatcccttccagagagacagccggggctctgcctctccactgcttccacgtaagtgacctagagcgtacttccagc

SEQ ID NO: 29275 - DNA, 1621 bp, Homo sapiens; identical to SEQ ID NO: 23303
  chr5:57877796-57879417
  hyper

SEQ ID NO: 29276 - DNA, 133 bp, Homo sapiens; identical to SEQ ID NO: 11756
  chr5:61681266-61681399
  hypo

SEQ ID NO: 29277 - DNA, 490 bp, Homo sapiens
  chr5:67583960-67584450
  hyper
cgcttcactgtcggctacttgagccccgcgagccagccagcgcgctcagcagccagtgagactattttaggtcccctcacaatggccttctcatttcccaggcgaaaatgagcaagttggtcttgcattggccacttgtcagccgatgacaactttgacttgggctcccctccccctcccgaaatccctagctcagcaaatatttgaacctgcccaagttaatcatgaagctgcgatctttatctaagggagacgtgcgagcgcctgggctcctttcctccccgatacagtagcgaaatccagttggcttctcaatgaggagccggcagtgagcggcggtggcccggacgcactgccgggcggggcgtggggcggagggacgagccgagccgagccaagcggagctgggccactgtgcacgcccggagggtcctggcggcgcccccgctcctgcgcgcactctcggcgccggacacgagcactgcctgcc

SEQ ID NO: 29278 - DNA, 1298 bp, Homo sapiens
  chr5:72529324-72530622
  hyper
cgaggggtgtcacggccagggctttgcggccccagacgtcccagcggctcgcagggggcgccaggtccgcgcttccccttgggtcttcgagaggcgtgtgcgcaggacgctgccctctgttgcccaaagcccgcaccaggctcctgggcttccgcgggcttccgcaggcctcaggcgaggggcggggacgccacccgcacgctcccgagcgcagggagggctgtcgccgaagcggtgacccacgcgtggaccccgcccgcgctgggccgggccggtcccctgcccacccgcagccctgctcggccgcgttcccagcagccgggaaagcttcctccctcggtcaccgatccaggccgctggtccagctgtcaaaacagggggtgtctctttcattctggctcacaaagtcccaaaggggaacagggggccttaatgcttgtgtttggacacaagcaattatccctaattattctttttcttttgagcctgcccgtcccgccggcgagcccgccgcggaacaggccccgtaatcctccctggtcggcggatctcagtgggctctgtgcggcccgaggctcgggcgctttcatgtcactgcgggtttagagctgattcaaactcattgcgatgggggaattaaccccggggcccgggctttcaggggcctctgataagagattatacgtgttgatggcaagcttttcttggcaaaatgttttcaaagggcttggagttgttaaatcaaagcgccattgaattgctcgggaccaccccctcccccgcctcttgcccttcccccacctccatctttttcccttcatccctcctcccccatcaccgcccaggactgcccaaggcgagcggcccagcctccgggagtggcgagtcaccttccttggtacgattttcccccggtgcctcgcccgggaaggattgtttttgtaggtgctcctgctgctgggcactttggtaccccttcccttccccgcccctccccgccccttcacacacacttgctctggtaaagaaaacatgtcccagatgaaagacgtttttttcaaacgtacatgtgttttgcagaaaacggaggtgacagggtgggataacgaggagaaaggaagggtggctttcctgcctcccccacccccgaaaggtcatcggagtcagaggggtaaccatcgggttaaaaagtattgtgggcagagttcagatgtccggtgaatcgcacggttctgccctgggggagatctgccttccacccccacccccgcggaatgacagaaagagttgggaggacc

SEQ ID NO: 29279 - DNA, 62 bp, Homo sapiens; identical to SEQ ID NO: 7438
  chr5:74753672-74753734
  hypo

SEQ ID NO: 29280 - DNA, 941 bp, Homo sapiens
  chr5:75378574-75379515
  hyper
cgaagttttcttctgtttgctcttgctgtgcccaagtttcctctggacttgtcttccagcgtcggggtgggggctgggggaagtaggcaacctagctctgcctggttgctccctggaagccaagtcgaagtgaacaagtcagtcccaggcccggaaatagaatacaaaccctctttttgtccggtgctaacagagtccagcagtcagaactccctcgcgtctcacgctggacctgacccggggcgccgccaagtgcgcaacgcacagtcacagttggtgactaattaaggactgccgcccctctccttcacctgctacaaactcagagccctgacttctccagaagtacctaccacttggaggtggctctccttccccgccccctgccccagtcccacaccgcagcagcgcctcagcaccgcgacttgccggagcaccgcgagtggcgcgcgggtcccgcctcccccgcgcgccgtgactccctgcgcaccgctggtactctcgccacgccgccgcccggcactgcagcaccagggggaggaggcaggcggaggagaggaggaggaccgcagcgtgcaagccgggagccactttcccgcccctcctctcgccgctgacacgctcagaggagtcaccactccgcgcgctgcaggcgagagtggcagacggaggcagcccggggaagcgagccggagcggcgcccgcactgaggcggctgcagtgctgacaccactcagggcaagggtgtccgacggctggagcggtgagtgggggaggtgaagcgggcatccgcggggagactttcccccgctgctggatttctcttcccgactggtggccgggcgctgcagcctggggaagtttttgcagcctttcggaagcgcaactttgccccgcctgcccccggggaagcggctgcaggtgcccgctgctttgtaggc

SEQ ID NO: 29281 - DNA, 2000 bp, Homo sapiens; identical to SEQ ID NO: 22925
  chr5:75698192-75700192
  binary

SEQ ID NO: 29282 - DNA, 1763 bp, Homo sapiens
  chr5:76011064-76012827
  hyper
cgttcaagaacgtgtgaaggacacttggaaagttaccaggccatttctctcctgggcgcccgcggccctagaacgccggcctcaccggcagacgcgcgccctcctcccagatgcgcaggtgaccccggcgggcggcgcgggaaagggaagagctccgcgaggccgcgcgggggggaagcgggagaagccgctcttcctattccactcgcagtctgcgtgtgggggaaacgagtgcccggcgtatgaaacgcctaacttcgcgaaataaagagagacgtataaaagttcaagaattctgtccagactcaagggccctttctcatttaggggcaaccctgtcactacatcataaacttttaaatccgtgatccccacgttacaaaagcagaagtcccttttagacttttagcgaaaactgaactttgccggtgtcccacacggagggagggaggacgggaggccacgccagggctgcggggctgcagggcgtggacgcatcctggccggggcgtccactgtcgacgtctccacatcccaggagggtcgagacggccgcgggaagcagcctgcgagccgtgcggccccattccaaggaccccgccagtgtgagtcactgacagcttcgcgaatcaacggtgcccagaggaaaaaacttctcatttggacttctaggcccggcagtggccggcggccagggccccccagtagggcagggcggggcggggcggggcgcacagagccagaggggcttgcgagcggcggctgagggaccgcggggagggggcgccgagcggctccagcgcagagactctcactgcacgccggagggcgcccttcctcgctcgcgcccgcgcgaccgcgcgccccagtcccgccccgccccgctaaccgccccagacacagcgctcgccgagggtcgcttggaccctgatcttacccgtgggcaccctgcgctctgcctgccgcgaagaccggctccccgacccgcagaagtcaggagagagggtgaagcggagcagcccgaggcggggcagcctcccggagcagcgccgcgcagagcccgggacaatggggccgcggcggctgctgctggtggccgcctgcttcagtctgtgcggcccgctgttgtctgcccgcacccgggcccgcaggccaggtgagagatgcacgggaatggggtgcgcgggcggagggacgccgaggggagactgcgggggtcactgttgcgccttctcctcacccctgcctcagtttcctccgaaagccaaactggcatttgggctgagatctggagttttttccagtcacgtttaggtggggcgtgccacccccttcgcgggcccagccgatgcccctttggactcgatcttggagggtgcagcccgcctgccacggggtgttggatatggaggaggatggagcggaagccccctgggggagcctgcagtcctgcgttgcacttgtcattgtgtttctcccaggaccacccccaaaaagaaaagctctcacgttgctccaccaataaacgtttcgatctttaaaatataaagtggcgaaccgctgccgctgaagttttgctttgttggaagtttttttcttgcacattttacaggcgagaaaagtgatgtagagaaaagcccaggcagtcccttggcatgtttagcagagaatcagtaccagcagcccccggcccggccttgtgtccaggaggtgcgcagggtgcgagatatatggtgacaatagcagaggctccgcgtggtggc

SEQ ID NO: 29283 - DNA, 807 bp, Homo sapiens
  chr5:76923694-76924501
  hyper
cgatttgcctccaagtttaaaacacaccgcaaaccttcccctcggccgaccgaagaaacggcatttttttcctactcctttggggcagtcccctgagcacgtgcctgaagtcgaggttagtacgcagccagcagggaccctgacaggaaaccagagcagccccggggttgggggagccctggtaggtgctggtcgtcccggacacgcctcttctggagaagcgcgtttgtcccttacttgggaggtcccgggtatctgaagcggatcccgggtctggggacatgaaggggcgccgtggccttagggaaggccccaaagaggcctaggccccggaggaggcaagagccgcggcctagcttccaccgcgtacctggggccagacacggctggggcggcgccggagagcagaactccaggctctgaaggccgagggtgcgaattgtggtcccctcccacccacggcctccccatcacgcgcacgcagcccgcgaggggcgccctccgcgccactgccccagggacaccgttcatctgaggaactctcgcgccctgcgtttcgtgccgacagcgacgctcggagtcccacctgggaaacctgggttggcccggaaacctcgggaggctcagagcttgcgtgaggcgctcgcggcgccccagcatgccgccccgtcgcggagacctcaccttgcagcccagaaaccgaacccaagcccactgcagggcgaagggcccacgcgttccaactggcgcgaatataaccattcccaagaccggcccctcccctccccccacgagacccctcccgcc

SEQ ID NO: 29284 - DNA, 1026 bp, Homo sapiens; identical to SEQ ID NO: 23306
  chr5:76940861-76941887
  hyper

SEQ ID NO: 29285 - DNA, 487 bp, Homo sapiens
  chr5:851421-851908
  hypo
cgctgcggctgctcctggccagtcaggtggggagggcggcaggggtgggagggacgtggtgtcacagagcggcagtgaaagacactcaacggccgctacggggtggggggttgatcttgaggggctgggcggtctctacagaggagggttaggaagcttcgccacgttatgcctcgctcaaagtccttgttgtctctttgggaaaaaaccttcagaaaatgaagttgatattaaatgtatttctttgagaagagagacattgagaaatagttaacaattcttcgttcttgcagtcgtgaacgtccatgatacagtggctctgcgctgcctttggtggctcctccctggtcctctaaatgtgacaccaggcggatgcggggccacaggaccctggggcttgagtcacacaagaatgtctctgggagacccgagagactcacagttatgaaacaggaccatggttctttggccgggcgcgggggctcac

SEQ ID NO: 29286 - DNA, 955 bp, Homo sapiens; identical to SEQ ID NO: 22926
  chr5:87436549-87437504
  binary

SEQ ID NO: 29287 - DNA, 1107 bp, Homo sapiens; identical to SEQ ID NO: 23309
  chr5:87956173-87957280
  hyper

SEQ ID NO: 29288 - DNA, 2242 bp, Homo sapiens; identical to SEQ ID NO: 23310
  chr5:87969885-87972127
  hyper

SEQ ID NO: 29289 - DNA, 915 bp, Homo sapiens; identical to SEQ ID NO: 23311
  chr5:87975991-87976906
  hyper

SEQ ID NO: 29290 - DNA, 431 bp, Homo sapiens; identical to SEQ ID NO: 23312
  chr5:87986873-87987304
  hyper

SEQ ID NO: 29291 - DNA, 1197 bp, Homo sapiens; identical to SEQ ID NO: 22927
  chr5:88179191-88180388
  binary

SEQ ID NO: 29292 - DNA, 1125 bp, Homo sapiens; identical to SEQ ID NO: 27121
  chr5:88184868-88185993
  hyper

SEQ ID NO: 29293 - DNA, 432 bp, Homo sapiens; identical to SEQ ID NO: 6605
  chr5:883821-884253
  hypo

SEQ ID NO: 29294 - DNA, 187 bp, Homo sapiens; identical to SEQ ID NO: 6606
  chr5:913200-913387
  hypo

SEQ ID NO: 29295 - DNA, 460 bp, Homo sapiens
  chr5:92906252-92906712
  hyper
cgccaactgcccgcgcggaaccgggccgtgggcctggggttcgggaagcgtgcgccacccccggtcgggcctggcttccttcttgaatgcccccggcgcaggcccggtgctttgtccctccggccttctcaaggagtggtggccttctgcgggggcgagagcacggcctctagccttccgccgacgtctcagtgcgcagataccgcggcccgggcccctccgccgcgcgggggaccgcactagcgtcgacctcccggcagccaaccccgcgcgcaaggctccgcggccggatatgggcctagcttccgggatccgctccctgcggggccgcgcttagggtcggagttcgctagtccagggaaaggggtgggaggggccctcggaggggcccctacaagggatcccagtccgcagaattaaaaattcgttcgcaagggagcgcccttccggggtcagggtc

SEQ ID NO: 29296 - DNA, 324 bp, Homo sapiens
  chr6:100729507-100729831
  hyper
cgacttaattgtggagcctgaagggccatcatgaaccggcgtgcggagaccgcctcgccactgctgcattacaaatgctctttattaacagcgatctgtaatcaatgggctcaggctttttgccagagcccccaaatcagacaggcgggcccctgcgtcagggtgggcggagccacggggcccagctatcgagctgggaagagaaagctgtgttgtccctgcctgactcttgggtgcgatggtaaatcagaaagggaccctagtaatcattccaggggcgccctcctctcactactggttgaatattcattagcccgggtgagc

SEQ ID NO: 29297 - DNA, 831 bp, Homo sapiens
  chr6:10381522-10382353
  hyper
cgtccacccagcgaggggcttgtgtgccctagagggcgctgggccccgcgcgctttcctggctgtccccgccggctttccaccctccccaaagcccaggtgcccaccgtgggtcgctgcggcctttccccttcttggccaaatccgattacttcgcagcctgcagatggcatcgccggctaagggcagcctgcggcaggtccccgagcctgagcactcctcctatctggggcctgagaggacgctctgggctttttcccaggcccagggtgcgcggcctgctagcgcctttcgaggcacagtcccaagataggctcttgtccttcgacgcccccttggcacaagcgcactggcgccctccgctcaacccaccttgcctttggggcgggcttcaaccctgggaagacaggcctgggggaagcgagaggagaggcccgaatagaggttccggctcaatctttcccagacggaggcctggtgtttccagctcagttgcatcttccagccgcgggctcctggcccaaacagaatgtgtttgctttcacaccgggacggcaagcggagtccgcctcagtgagcagcgagctgcgcagtccggacgggtgtcgcccccagagactcgccagccgcccccagacactcgccagccgtccccatctctaatccaccgtccaggcccgggccctgggaagaccccggggacgcgctggagcccctgaagggggtcagggggaacaatgcccgaaaagggagcctccccgaccgccagtccaaaggaaccggggatgtggcagcgattgcgaggggcctaggttagggacacgctcttctc

SEQ ID NO: 29298 - DNA, 948 bp, Homo sapiens
  chr6:10418940-10419888
  hyper
cgttggttttggcaaattcaccacccccctgcctcctcacccaccattctcacactccctcatccgtagcccaggcggcaaaaacccatttcaggaagtggagtgagttgctagctaaacttcgggcaaactttgtatctcctacagaaacacgctgcctccgcgacccagccatctggacccctttccattcttcacacatcctagatctcccgaaatctgggggtaccaagagagacaggtgcaccagaacctgtccaacactcaaccctggggtctagggcgaggccgcaggcgcagcaggctgaaaaccttcaccgccgcgcaccacaaccccaggccttctccctccccccttccgaattagtcatcctcccaagtttctacttgaggtgggaggggggtgggggaaacggccacagcacaaaccacaagtgacccaccaggccacctgtggagcgtgcgccggacttccccggcgccgggccccgcgggctgcgcgctttgcgcccagcaccgcagtcgctgcctgcgcccgtttttcctgtcttcgctgtctcctgggagctctcctgggcgctgccaggcgcgcctcacctacgactcccctgccctgggccacggcgcttcctctcctcctccccgctccggccccctcccctactccacccctgcccacctcaaccccagccaaggcaaaccccccgtacctgccagtcccccattttggcaagtatggacatcgcggctctgcgctcctggcgactggtccccgccgggcatgggctggagggctcggtcgggccagctccctggaatcgcttaggcaaatcctccttttttacctgctcaccaacatctcacctggtcataaagagctgggttgctacctgccgacgcatgcgcgctggcccaggaattcactccgccagctgcagtcccagcgcc

SEQ ID NO: 29299 - DNA, 411 bp, Homo sapiens
  chr6:10420695-10421106
  hyper
cgctgcttctaattagaggggagctttaaaagaagccacgggatttggggctcccggagccgcacctggccaggagggaggtgagggtgaggagattggcctcgggccacactctcccagagacggtgccagtcccattccgcggctatgagatcgaattgtcctgggtctaggcctgggacgcctgggccaggcccagttaccctcccgggctgctgtcgccgggacttggagacgaacaaagaaccagttttaaatcgtcttctctgacatgtcaggcaaatatgtgtaaaaggtcagctccacgctgtggagcagagacctgtcccccaggcaccaaaacctcccctttctaaccgtgcccgagagcctccgacccctgggccctgtccaggcggctttgcacctctc

SEQ ID NO: 29300 - DNA, 1546 bp, Homo sapiens
  chr6:10425397-10426943
  hyper
cgatctgtagcagagttttgggattgactttctaaactgcagccactcctcatctttggccttgtgaaaaacttgagaccccggctttatcagtcccccttttgaaaaacagggcgtgtctcagccctaggtatgcaaagctaaacgtctcaaaccgctctgcattcgaattagccaacttaagaacaagtccaacagcactgctaagcaagagcctaataactcagcgtttcgcgacatctcttggcggcgttgaccgtttgcccgggacactggtttagaagcacggcatagggtgtctctacatcttagaaatcaagacagcctctaggttagaataaagtttactctggactgggcataactccactccacctctgcgattcttcttctcgtttcccgtcttctgtcttttctttcctcccttcccaactcctagcgcgctactttaacgtctcagtctcgttcgctaagcccatgcgcctgggacttgttctttgaatctcaagtccgaaaagccaggaatcctcgatcatggacttcctcctgctaaattagagggagtgaaatttcgctctcctctccatcctacttccccatcccaaactcgctagattaagttcgctgaccaggcgcgcacccaatggcagcaccctctccaacattttccccaccagagaggcaagtgtcctacatttgtacgtaaaggtccctgagtggctaggtggagaggctcggatgtcttttcctggagcgggcctcggggagctgcagcagccccagcctcaggcaccacagccaagcgagcgcgccttgggctcgctgctctgcacgcagctggaggtctgggccgctgaccctctggccacgtagtcaacccgaggatgtgtgccccggggctcggccttgcctcgggtgagaaggctagtcaccattcagggtgcaggtgtcatggcctggaaatggcaatatctgagcaaacaggtgggcgtcgcttcccggcggtgcggtggccgctggctcgcagcgcgctccagctttcggcgccgccgccgcccctttgctctgcggactcagccagttcccgggtggcccagctgggtggctccgaggcctgcccccttgggctgcggcgggaggcggggactgcagtgccgagtgtagggcgccccagccgggctggcggttcacgctgcgctcgggcctctgccgggagggcgccctggcgccaaacccgggcgggcaggggggtggagagccgattgagtttattcccattcagaatttagaggctggtggagacagagagtctcctaaatggatgcaagtctcctgaaagtctgggccggaagcctcgaaactttctgccacgcaaagccccagctagtctccagggctcggtcctggttccctttgtgcaggcccggaagtgtccgcccggttttcccactgcctggaggggcccagggtcgcggatagactcggacaaggctccgtttactttcagtttgtcttagttgactaatggcgggactggttgtaatgc

SEQ ID NO: 29301 - DNA, 206 bp, Homo sapiens
  chr6:119030541-119030747
  hyper
cgccagattgggaagtgacacatgctggcatttctcagcgcatgcggctccccactcggctttctggagctctgccttttggcgacagagcagctagagctcctctcccctcccccatttcctctcataaagataaccagtaacaacaattggcgtgtgtgtgtgtgtgtgtgtgtgtgagagagagagagagagagagagagagc

SEQ ID NO: 29302 - DNA, 179 bp, Homo sapiens
  chr6:119510833-119511012
  hypo
cgattatatgattcatgacaagtacgggcaatttcagccccgagttcaaggtagtgttgggccatgccttcgggagctgcatcagccccgagtgcgaacatgccccccgcgaagcaggtcaggtggcccatcttgtgctccaggaggccccctttccactctgcgatataagttagtcc

SEQ ID NO: 29303 - DNA, 381 bp, Homo sapiens; identical to SEQ ID NO: 27135
  chr6:134499457-134499838
  hyper

SEQ ID NO: 29304 - DNA, 751 bp, Homo sapiens; identical to SEQ ID NO: 23317
  chr6:143247656-143248407
  hyper

SEQ ID NO: 29305 - DNA, 617 bp, Homo sapiens; identical to SEQ ID NO: 24541
  chr6:158093637-158094254
  hypo

SEQ ID NO: 29306 - DNA, 84 bp, Homo sapiens; identical to SEQ ID NO: 11787
  chr6:159205631-159205715
  hypo

SEQ ID NO: 29307 - DNA, 1971 bp, Homo sapiens
  chr6:166580090-166582061
  binary
cgttgagcttgttggtgagcttgactttgctgaaggagacgggagccttcatccagtgggccccgaagttgggcgagtcggggtggatgtagacgcagctgggcgcctgcggctccggcttgccccccggcacccattccccgttcacgtacttccagcggtggttgtccgccgccacgaagtccagcaggaaggagtacatggcgttggggtccaggccagacacgttcaccttcagcaccggaaacatcctcctggaaaacacggggcgggcgcaggaggaccccgacactgaccaggtaggccggaggcagaagctgggcacagaggcctcagttatttcggggcacagaggagccccctggggaacgtccgagggtgactcccaagctcccccttccccgagccctgccaggtccaggtggcctcctcaccatctccacggcctcgggagggaggggaggagaggacctggcgaagggtttcagtgcaggaggccacatcccgcggggacaggcggggaccagggcgcgcctcgcgggtcccgggatgcctccgaggtcgggacaccgaagtgcgcgttcctcctccccaagcttccgcggagaaagccccagaagaggggcttgtagaaatgcactcgagggagttaaccagagcgggaacaaacacaaagccctcctccaggagaaaaagggttcgacctccgggaacttgccaggtcccccaggctgcccaggcgctggagagcgcggcgcgcgcgggctccggacgcgcacccacctgccgttcttggtcacgatcatctcattggtgagctccttgaagcgcagccacagctcgctctcctccaggcccacgcgcagttcgcgctctgtggggtcgcccttctcgctgcccgcctgcagctcattctccacggcgctcagcaggtggtccactcggtactgcaggctctttcccgcgctctcggtgccaggggagctcatcctcccgtccggctcccctccccgccgtccccgaagcccagactcgctacctgagatccaccttccctgctcttggccgccgcccttccgagaaaaggggccccttggaccgagacctgcgacggctcccgggtcccgggtcccggcacagacccgggaggagggcgcggaccaagacttggggggaggggacgggggcagaggggtggggagaagttattccacttgaactccccaaggctctactagtgtaggtctctggggaccgaaattcagtgccctccccataaatagagccgcggcggcagcgctggggtgctcggcggattgggccgcgcacgctttgaagtgccgggcagcctcccattggccgagagcggccatatcagacccagccgggcgggtctgggaggccgggggccaacaatgggctcccgcacgcctgtttcatgtaaatccggggccccagccctgcgagccccggcccagcccctacacccccgcccttctccaaatgtttgcacctccatcaaagcggcggggcaagccccggaggaaggtaagctggacgccccggcctgccccagcccgccccagcccgccccagcccgcacttccgcgaggggctgcccggcagcctgcgatgctccctgattcccgcgcggggtcctcctcgctttcccagcgcgcccggatcccgcagccgcgccaggctggaacgttcgcgcggcctcacctgtccccgctccaggcgcgcctccctcccctcccagggacgagcgcatttggccgggctttgggatgcgccgcgctcgtctcgccgcagtagtagtgctgttctcgcgcctccgatgcctcaactctccagtctggcagtttccggtgcacctgtccccacacgtccctcgcccacggagccccaggcggcgttacgcacacccaggatcgtggatcagcctgccccggcgtcgggtgtccccgc

SEQ ID NO: 29308 - DNA, 947 bp, Homo sapiens
  chr6:166582089-166583036
  binary
cgcgcgcagagagggaaatggacggaaataagcaaaagcaaaacaaccccttctgagaagtgtcctcctcgctctcttataaaaacaggacttgttgccgaggtcagcgcgcgcatcgagtgtgccaggcgtgtgcgtggtttctgctgtgtcattgctttcacggaaggtgggagaaggtcggggctggcggggtggtccggactagtgggactcggggcgctttccccgcccggcccagcgccaagcggtgtcggcagcggttgttttattacctttcggtgagaacttacgcgaggagagcgaaggagaggtgacaatgagcaggaaatagttcagtggggtctctttaaacagtaacattcctcctaaaacgggagcccaggaagggggaaggaggcagaagctcccccttccaaggcctggctttgcgcttctgcacacctcgcccattcgctggacgagggcctgcctcgggtagcagcctctgtttcccggtctcctgagcgggcaccccagccccaacccctctagagaaagcctgcgcatcgggtggggcagcgagttcagaggagtcttgcgccctagcaagggggctttcccgcggacatggtatctgcgccccgcgctaagtctcccctgccccctgccccctgcccctcgcccctcgcccagccgggctcgctccggggtcgggaattgctggggaagccgaaggagggatccccgcccgggactcgagggatcgacccgcctcgcggtatgcggagggctgccaggagccagtcccggggaagggtgcctgccgcccgtgggggacagggctccttctctcccttctccaacttacaccgacgagtcaggaagccggagcgtctagtccctgtccgcatttctcagtgtcttttgatgtctgggatgcatggatattcccagggggctgaccc

SEQ ID NO: 29309 - DNA, 557 bp, Homo sapiens
  chr6:167764611-167765168
  hyper
cggagccccgcaggcccgtggccccctgcctggttctcccgcctctgcaagcctagccttcaggactccgcctcgcccccctcttttctgttcggagactcacggggccgtctgtctggaccacgtgtgcacatttctgaccacgattcctccgcacaccagctacaggcaccgcagcgctggggacggcacagctgaactgtgctggcagcgaaggggcctcacggggacggctcagctccctgagggcgcaacccacctggtccgggggcgggggggggggtgaggaataaacttccgcggttttcagtgacccagtttgttgcatggcacatgttggaaaggtgaatctgaccgcgttgaccgcgttacttcagagatgcgctgtgagctgctttgtgccgcgaaatgacctgtttacccgacagcgccctctgcagcccagcgccggaacgggctttttcatgatgttcctgcgttgtgtttacagcctccctgcgaggggttcgcacgcacaggcggacctcgttttgttgcgccttgctctattgtgcctc

SEQ ID NO: 29310 - DNA, 365 bp, Homo sapiens; identical to SEQ ID NO: 7459
  chr6:168672446-168672811
  hypo

SEQ ID NO: 29311 - DNA, 727 bp, Homo sapiens; identical to SEQ ID NO: 23320
  chr6:26313163-26313890
  hyper

SEQ ID NO: 29312 - DNA, 147 bp, Homo sapiens; identical to SEQ ID NO: 23322
  chr6:26327821-26327968
  hyper

SEQ ID NO: 29313 - DNA, 134 bp, Homo sapiens; identical to SEQ ID NO: 23323
  chr6:26328309-26328443
  hyper

SEQ ID NO: 29314 - DNA, 124 bp, Homo sapiens; identical to SEQ ID NO: 11792
  chr6:26330521-26330645
  hyper

SEQ ID NO: 29315 - DNA, 893 bp, Homo sapiens; identical to SEQ ID NO: 23324
  chr6:26331633-26332526
  hyper

SEQ ID NO: 29316 - DNA, 67 bp, Homo sapiens; identical to SEQ ID NO: 11796
  chr6:26555496-26555563
  hyper

SEQ ID NO: 29317 - DNA, 730 bp, Homo sapiens; identical to SEQ ID NO: 23325
  chr6:26577146-26577876
  hyper

SEQ ID NO: 29318 - DNA, 216 bp, Homo sapiens
  chr6:27242893-27243109
  hyper
cgacgatttgcatcgttaattatccgtagcccttcgctggctgaaaaccgacgagtttctgcagaactgccataaaaaactactggggaaaatacgtggccagtacggggatcgaacccgcgaccttggcgttattagcaccacgctctaaccaactgagctaaccagccgacgctgggtgcagctcttccccccccaccccccgcccttaatctc

SEQ ID NO: 29319 - DNA, 629 bp, Homo sapiens; identical to SEQ ID NO: 23328
  chr6:27463044-27463673
  hyper

SEQ ID NO: 29320 - DNA, 1285 bp, Homo sapiens
  chr6:27512407-27513692
  hyper
cgtttctaacctaaattgaagatatagcaaatgccccagtaataagaccaaataatatttgcaagagtccaacgaagggaacacatttcttactattttagagggaaaaacaaatgtgggcgcgctttcactatcagagacattgccggcctcggtcatggaggtcactttccctttgtatctgcggggccgactcacttccattcccagaattccgagactttccccctaacttttgtctaaaaaggaatctgattcaagtctaccccttatttttccactctgacaatactgtagtatctgaagcaagaatcaaccttattaatttagctagatttatcctgacatttacttgtttccatctttttgcgtttttctgtgctggactctccctaagatatttggaaacctgtgttctgagttcttccttttccccgggctcgggtggctgaaggccttggctcttgggaatggtctcgcgtccttcaccagaactgacgggaattatatttacctgaagagtcagagacctcttcagagtcatcttttccagttaggacagaaacaagctccctcctcagctagcacgcccgctccagtccggttttagccgttccttcggaagagtaagtcagttgaatgtcatcgaagaagctcctgatttagattttaactgtacgtaaacgcagatgaccccccactctcgtgccttcatttaattcccgttgcttctcccatgggtattcagaggcttgaggttgcttggactctcaattcaatactccctttctgcgggttcgtgagaattaggtgtgaacgtggtgtccgcggatttcagcagctagcgggcaagctccagcgcccagaaactttgagtcgcttgtctaggagtcctgtgttgaattgcaacactatgcactatgttctggttattgatgtgctctgaatgagctctttcgttcgtgagcagaggccctgacgagactgaagaccaactatttccgagcgctccactcaaccattataagttcaccccagccgtcagcgatggcgtaggtaggtagtcgtggccgagtggttaaggcgatggacttgaaatccattggggtttccccgcgcaggttcgaatcctgccgactacggttttaccaggtgcagttcccgcctttcctcaaaacttacccaaattcttgtactccatttgctgctctcctacacaatcctcccactgcatattcagataatatcctctttactcagtgaatggagactaccttatgttgcc

SEQ ID NO: 29321 - DNA, 365 bp, Homo sapiens; identical to SEQ ID NO: 23332
  chr6:27560506-27560871
  hyper

SEQ ID NO: 29322 - DNA, 668 bp, Homo sapiens
  chr6:27598659-27599327
  hyper
cgaaagacagcccagagatgctggactgcgaatgcaggcgcgctgcaggcgaggctgggagggccgccaggagcgctgcgggtatcgggagacacgcagagggaggggcaggcggcgggctccgcttcttcgcgtcctggctctgaaagcaaccacaggccagcggggcggtgctaggtgaagctacgaagaagccaaatagctcgcgtcttctacaaaaaccgtgttcttgctagaacgttggcaaggagaagccggagtctctcctttttctcctcggcttttctcgggctttctgaaaagagcacctgcatattcccaggaaattttggctcctgatggcatgggggaggatcacattcatcttccaggagagatggagatatcttgatcaaattgtgttttatgcaagaggcgaggggctgcgaagggaggatctcgggcagctcagcgcgctgccgctccggcgcgaggccggggtcgagcgcttcagtagctcatggctctgtagagtgcgcatggccaagcaaaggaaagcatgctccagtggcgcaatcggttagcgcgcggtacttatacaacagtatatgtgcgggtgatgccgaggttgtgagttcgagcctcacctggagcatgttttcttccaattgcgatttcagacatttcac

SEQ ID NO: 29323 - DNA, 307 bp, Homo sapiens; identical to SEQ ID NO: 23333
  chr6:27636317-27636624
  hyper

SEQ ID NO: 29324 - DNA, 357 bp, Homo sapiens; identical to SEQ ID NO: 23334
  chr6:27640042-27640399
  hyper

SEQ ID NO: 29325 - DNA, 1073 bp, Homo sapiens; identical to SEQ ID NO: 7465
  chr6:27655169-27656242
  hyper

SEQ ID NO: 29326 - DNA, 562 bp, Homo sapiens
  chr6:27661699-27662261
  hyper
cgtgtgtttagaagggaaggtgaggagagtcaaaggcacatggagcattaacagttggaataaacgacagagacacggaaacctccgaggtttccagagcggacccggaaatgacgccaggggatgcaaacccttctgcccctttttgctacccctgaagcttactgttagtggtcgagtttttctggaagtgggcttccgcgatcgcggggaccaacgccctgagctcttgtgcccaaaggggatcgccaggttttttgatgcggatcgaaagggactggccccggagcctacaacctgacgcaggtgggacttggggaaatgtcgagaaacctaggtctgggacttgagttggcttccagggcacacattcttgttcagaagaaacacattgcaaaaatcgggaggtgacgggcagatgaagtgtcggcgcttcgcctcgggactccagtgcaacctatggggcttttggaaatgaggaagtcgatgactctgcagggactcctctgacccaggagcagatggcgctcgtctgggcactccccaggagaaaaggtgcatc

SEQ ID NO: 29327 - DNA, 1121 bp, Homo sapiens; identical to SEQ ID NO: 25787
  chr6:28175204-28176325
  hyper

SEQ ID NO: 29328 - DNA, 827 bp, Homo sapiens
  chr6:28303261-28304088
  hyper
cggcaggcgctctactttcctttattaggactataagcccagcttctgtgaatcatcacctcagcccctgattggtccggggccaaactttcacttcggcttctgataggtcctgggccaagctaagcagcagctatgaatcatcatttcagctcctgattggtcccggaccaagctgagtcaagcgttcgccaggacagcccgcagactaagcgcattccctctcctttccagtccataaaaaccccagaacgggccccataatgggtactcccggtcgggaccccttctctgctggcagagagctttttcctttcgcttattaaactttcgctctaacctcacctttgtgtctgcgctcctttatcgtcttggaggcaggacaaagaactccgggcgttatctcagacaaagaaaggctgtttaatcttcaggataaggggcgggacctccacctactccacgggggcttcaggccagtgaatgtgtaggggcgggggtcacgcctgcgcagacgttccctccccgcctactccaaggcacagacctgaaatcttctgggaacctggcgggtcgcgacaaggggccaagactcaccttcggggcaccggcaagctacggaacaggtggcggggctgcagcaccccaatgaccgatcaaccgcaaaggccggaaatgcgtcagccgttctgagcccactggctgaagccaggcaactctttcctttctaggaattccagaggtggctgctgcttggtgactcccttattgcaaaccccggggccaaaaatcccagtcccactgggtgcgaggcggagaaatccggc

SEQ ID NO: 29329 - DNA, 795 bp, Homo sapiens; identical to SEQ ID NO: 23336
  chr6:28367069-28367864
  hyper

SEQ ID NO: 29330 - DNA, 575 bp, Homo sapiens; identical to SEQ ID NO: 23337
  chr6:28410904-28411479
  hyper

SEQ ID NO: 29331 - DNA, 219 bp, Homo sapiens
  chr6:3333118-3333337
  hypo
cgctggttttatgtgactgtcccgtgatgtcgttcacatgttccttcatgccctggtttaatctctaaactggaagctccacctaatgtctggtgagacccaggttcaggtttttggaagagcgtatcgcagctggtgcctgtgcgtcacggtgctgccccgcaggaggtcacctactgggaatgacgctaccactgacccatggagcaaagcggcggc

SEQ ID NO: 29332 - DNA, 223 bp, Homo sapiens; identical to SEQ ID NO: 6607
  chr6:36198250-36198473
  hypo

SEQ ID NO: 29333 - DNA, 809 bp, Homo sapiens; identical to SEQ ID NO: 24568
  chr6:37023826-37024635
  hypo

SEQ ID NO: 29334 - DNA, 1851 bp, Homo sapiens; identical to SEQ ID NO: 24571
  chr6:391113-392964
  binary

SEQ ID NO: 29335 - DNA, 845 bp, Homo sapiens
  chr6:392974-393819
  binary
cggcacgcgcgcgcttcgcagcctcaaagactccggggcctcgtggtcactggcgcaggggatcggggcggggtgcccggagtgcggtgcctcgtggctgaagggcagctcttctccccgcagtgcagagcagagcgggcggaggaccccgggcgcgggcgcggacggcacgcggggcatgaacctggagggcggcggccgaggcggagagttcggcatgagcgcggtgagctgcggcaacgggaagctccgccagtggctgatcgaccagatcgacagcggcaagtaccccgggctggtgtgggagaacgaggagaagagcatcttccgcatcccctggaagcacgcgggcaagcaggactacaaccgcgaggaggacgccgcgctcttcaaggtctccggcctcgggagccggcgggggcgcgccggggagggcccagagacagagcccggggtccccggcgccgcctccgaggcgagcccaggggaccgcgcggggcggacgggcgggcggcggaggcatcaggtggcgtcgccggagccgcaggaggaggaaaggaggcctcggctctcagcgggaccgcgggggccgggagccgggtcctgggcgcgtggaggctgcagggaaaccgctgaaggcccggccgggcccggggaagggcggccaaaggcttgaggggttttgcgcgttcgtccgtgcgttctcgtttccacgcaagcctcccgcccttcctccgggctcccgtctgccgcctccgtccgtgggtccccctcgccctctccgtgcgtccgcgcctgtgccggcggctgttttcgtctctcaccgcgtctctgtttctcttttc

SEQ ID NO: 29336 - DNA, 927 bp, Homo sapiens; identical to SEQ ID NO: 28125
  chr6:41605681-41606608
  hyper

SEQ ID NO: 29337 - DNA, 118 bp, Homo sapiens; identical to SEQ ID NO: 24572
  chr6:42762779-42762897
  hypo

SEQ ID NO: 29338 - DNA, 540 bp, Homo sapiens; identical to SEQ ID NO: 27170
  chr6:43612825-43613365
  hyper

SEQ ID NO: 29339 - DNA, 965 bp, Homo sapiens; identical to SEQ ID NO: 22935
  chr6:46097250-46098215
  binary

SEQ ID NO: 29340 - DNA, 147 bp, Homo sapiens
  chr6:4874031-4874178
  hypo
cgagagcctggtttgaaaccgccaagtaggaacatcgcacaggggacaccttcacatgcgccgcagctgtgcagatttcacctcctgccactgcttgctcattctggttcccgccttctgcctgtctgtacctgggtacacatgtgc

SEQ ID NO: 29341 - DNA, 465 bp, Homo sapiens; identical to SEQ ID NO: 5844
  chr6:4948996-4949461
  binary

SEQ ID NO: 29342 - DNA, 805 bp, Homo sapiens
  chr6:50691804-50692609
  hyper
cgtggggggagaggtaacatggggggaggggtaacatgggggaggagggttaggaagggtgagaggctagagaggaagcagcagagaataattctccccacccaactcacaggcgcacctcgcagaaatgcaaccgcagaacaaacagggacaggaaactcttgtaatcgcttacacatttttaatgtgtcagaaaaaaaagagcgatcactggagatgaagaaggggagaagaaaaatccctgccgtttgtatttctttcatttgaattgtaaacatctgtttggctgtaaggcgaacagatcatttattttgctctcaagatttggtctaattatgtcaacaccgacgctacgacgagtggggcggcgctgtggctttggagaggatgcgcgcaccggcccagcgcccggaagcccgctaggaagtattgatcgcacctggagagcgcgcgggacctctcgccacagctgggtgcgttctgagacgggggaggcgcggaggccgtgagtatggctcagaggcagatttagaggctccagggacccgcggctccttggagacagccgccgctgtttcctctgccccagtagcctgggatgagaagagaaaaagctcacccaggctccggcgcttgtctttcccatccagttgcagcacagacggtggcggggtgtgtgtgtgtgtgtgtcggcggggggacctgtcttgtcctaccccgcagttcacaccctgcaacggggtagttgtttttttaaaaaaaagtggcggggttgggtggcctataatcaggttgccgagcgtgc

SEQ ID NO: 29343 - DNA, 248 bp, Homo sapiens
  chr6:50789353-50789601
  hyper
cgtctgattacatctagtaattctccactgaatgaacgtcatttacaatagtaggggagctctgcgctcgctgctgcttcacgctccatttgtcctctattctccctttaaagtactcgtgtaatattaatagtcatgaatatcaattattatgaggcggtgtaggcaagcggagggaggaaggggcggccgagcagtctgagcccagcttcgggtgaaagaggactgcatctggagccccgaagaac

SEQ ID NO: 29344 - DNA, 496 bp, Homo sapiens
  chr6:50791122-50791618
  hyper
cggcacgatggtgtcccgagccacagctcgcggctctcccagctgggctcggtgtcccaaggaccctactcgagcgccccgccgctgtcccacaccccgtcgtcggacttccagccgccctacttcccacccccctaccagccgctcccctaccaccagagccaggacccctactcccacgtcaacgacccctactccctgaacccactgcaccagccccagcaacatccctgggggcaacggcagcggcaagaagtgggttcggaagccggctctctcctgccccagcctcgggccgccttgccccagctctcgggccttgacccccggagggactaccactcggtccgccggccggacgtgctgctgcattcggcgcaccacggcctggacgcgggcatgggtgacagcctctcgctgcacggcctcggccatcccggaatggaagacgtccaggtaaccacaaacaaacaaacaaacaaacaaaaaagaccac

SEQ ID NO: 29345 - DNA, 563 bp, Homo sapiens; identical to SEQ ID NO: 25804
  chr6:50803791-50804354
  hyper

SEQ ID NO: 29346 - DNA, 159 bp, Homo sapiens; identical to SEQ ID NO: 25805
  chr6:50805695-50805854
  hyper

SEQ ID NO: 29347 - DNA, 835 bp, Homo sapiens
  chr6:50810509-50811344
  hyper
cgaatgtcccaaagcgagtccaggcggtcctggaatggaggggagaaaggctgaagtcgggggaaggcaaggctttggggtggaaggggtgcattacctccccacccccgctttcctttcagtcccagctgctcgagaagggagggcgctgggaaaggaaacagagcggaatcgcccacattagcctcgctcttcggtgacccggcgcctctgggcttgtgtgagcgtctcctttctaatgccaatgacaacgacactgagggtgattttctgtgcctcgcccacccctttgcaggcaactttgtaaagaatttacggatctactggcgcaggaccggacaccgatagggaacagccgacccagccccatcctggagccggggatccagagctgcctcacgcacttcagcctcatcacgcacggcttcggcgccccggccatttgcgccgcgctcacggccctgcagaactatctcaccgaggcgctcaaaggcatggacaagatgttcttgaacaacaccaccactaacaggcacacgtctggggaaggcccaggtagtaaaactggcgacaaggaggagaaacacaggaaatgaaaaatttttaaaaaaagaaggaaaaatgttttaaatacaaaaggaaaaacagacaaaaatttaattttagctttaaaatattggattggctttggaagaattatattaggtagaatacacatacaatcaaaattttaaaaaaaaaagctaaataacttaaaaaaaaactgaggcgtacaacggagcaacaatatcggttctcagtgtctatttcaagatacatttggagacaaccgtcc

SEQ ID NO: 29348 - DNA, 412 bp, Homo sapiens
  chr6:50817038-50817450
  hyper
cgtgtcacagctccccggcccctttgttacagtgttagcaggctgtagagggagtaaggaaagagcagtagctagaacctctaggtcgttgaccggcccagcgcagggaccctgagaccgccagatccggtgggcggcttacagtggcccagaacgcacccgccggctcgtgttagcgggttaagggcttgattaaaaatagtgctggaaggaagacccgattatttttttatgaagccacattccttttcttcatttgcaaataacagttccgtagggtcccttcccagggaccctgggcgccgaagttaggggccacctgagagttgttggcccggtgggaagtgtcccttcctgagggcgctctcggcttctcagggcaagctgccttccacgcttggactttgagggc

SEQ ID NO: 29349 - DNA, 682 bp, Homo sapiens
  chr6:56716202-56716884
  hyper
cgaagcactgccctctcggcagggtccagcactgagcccccttgaatctttcttttcgatctctcatgtttaggcaaattccagggtaaggtgtctcccggagctggggatgcggagccagatttctggctgaaatcatcctcatcggaaaaatccgcagaggaagacatagagcagcgataggacgcgttcccggaactctacagagaatgacacagaaaaagcattaacagcaaaatactcacatatgctcaatgatttaaacatctcccccaccaaccaccgccgccctccctgcccccaaactgggtctggcatatcctgcaccatcctcggagctgagggaatatgcagaaaccaaaaaaataaaacccggagctcaccatcttttcttggccaagtctccaatcgtaaaaacaatacacaggcagtttcaatacatgaagatttgcacggaagaagtgtgtggcctgtggtccggccaccagctcacaaatgactggcccaacaatgaagccagaatcaacagccttcctgttacaaacctatagtatttggctcccccaccaggacagtagaaatattttccattactagcctgctgcttaattcatcaatgcaactaactcgaagtttcgaaaacaaagcacaaatgcaggatgttgagtcccaactcctttcc

SEQ ID NO: 29350 - DNA, 200 bp, Homo sapiens
  chr6:56820686-56820886
  hyper
cgtttcttcataaccagcaaaaagtatatggcagttggtggccaggggatttaacactgatgcaatgccagcacggaaggtatagcgagagcgctgcagtgtgcctttctgcggacggccacggccacctggccaggaagcggctgctgcagcagtcattctgcggcatcttgcggccttggcgggcggtgctgtgccgc

SEQ ID NO: 29351 - DNA, 1331 bp, Homo sapiens
  chr6:62995371-62996702
  binary
cgatctgtagctacgaagctcttagaacactacattgatcaccatttacttccaaactgctttcccttccctctgcgaagtgaaaatgtccctgtagaccgcgttacatacactttatggtttctctatcaatgatcctaacaggtcacatcgccactgccattagatctccgtagctttggtcttctccaaattaagacgtggagaaggagcactgctgtccgccccaagaacggggtctgtccgcccgagctctaaggcgagcatcttcagggggacagtttctgcgaaggcggggagaggagtccctccccaacttcactcccctaatcaagccgcgggtgagataggcagccggcggtttgtgcccatctgtgggggcaagtcctaccttctgccaaaaggcgcgacgcatgcacaaaagatggatccaggctatctttctctgccatcagctcaggcaaatatttctcctcttccatagcgcggacttcggattgtccccgggcgaagcgcgaggttccgctcgctcggacgcaggcagggtcttggggcagcgcctggctcccgcgctgctcctcctccgcgcggcgagggatctctgtgcgtcctcactggcccatgcacccagcacctgcgactcccgccgtcgggctgcgtggccccgcgcccacacctgcccgtcccttccgtcgtccctcgctcgcgcagagccccggctcacaccagcggccttaactggagaggcgggaacaggacgcggcccacctccgccaaccactcattggtggtggtgccaggagaggcggggcgctggcagaaggccgcgggctctcattgggcggtagcgcaagtcgggtggcctgactggcaggaggcagctgcagaggggaagggagctcggaagatgcaaacgctttcttcttgcgcccaagccttccctggctattaggcatgcccagttttgtggagttctctgtgtcttcagctaaggcgcagaggagagagagcgcgggaaaagcgcaggttaaagagagaggtctgagtacaagtggacaggggagatggagatgagaagtgagccacccgagagggtggaaaagcgccagggaaagtctcaggaaggtagatgggacttcacctgcgtccctaaggcacaggtgtctcctttccctcacacagctcaggcgcactccagttgtgcaggaatcagcagcgcactgggtctggaaatacaatgaagactgcatgtgatcggcagctggtatttccgatgacctacatctcagggacgcagtaggatgttcattgataaacaaataaagcggctc

SEQ ID NO: 29352 - DNA, 205 bp, Homo sapiens
  chr6:7237775-7237980
  hypo
cgctcgcgttggggcttgcagaatgctgtaggtcctgagtgcgcaggtaactcactgtggttacaggtgcttttacaaatccccttctaaagcagttattcgtggcagctaccaaataaatagaatcatttgctactttctatatagatggctggccaacaagtgtttttgaaacctgcgttattataaaatactaaacgggccc

SEQ ID NO: 29353 - DNA, 587 bp, Homo sapiens; identical to SEQ ID NO: 25814
  chr6:73329621-73330208
  hyper

SEQ ID NO: 29354 - DNA, 1299 bp, Homo sapiens
  chr6:86159095-86160394
  hyper
cgcgcgtcgcctctgttttatcactaaggttttaattgtgaataaacaaggaactggattcgaatgatttcttagtttctgagatttttttgtctaagcatcgtagacttcgtgcgttctcaacccaacaggaagcgtcacatctcagtgagcttcggctctcacagcccgaaactgcaaggagctcctctgcccggcctctctttactcctcctctctgcccctcagctcgctcatctttcttcccgccccctctcttttccttctttggttctttgaagtgatgagctagcgcaaccacaaaccatacattccttttgtagaaaaacccgtgcctcgaatgaggcgagactcagagaggacccaggcgcggggcggacccctccaattccttcctcgcgcccccgaaagagcggcgcaccagcagccgaactgccggcgcccaggctccctggtccggccgggatgcggccggtacccgctccccgccgggaacaacctctccactcttcctgcagggagctggtgccagccgacagccgcgccagggccgctccgggtaccagggtcggatcgggtgacgtcgcgaacttgcgcctggccgccaagccggcctccaggctgaagaaggacccgccccggccttgacccgggccccgcccctccagccggggcaccgagccccggccctagctgctcgcccctactcgccggcactcgcccggctcgcccgctttcgcacccagttcacgcgccacagctatgtgtccccgagccgcgcgggcgcccgcgacgctactcctcgccctgggcgcggtgctgtggcctgcggctggcgcctgggagcttacgattttgcacaccaacgacgtgcacagccggctggagcagaccagcgaggactccagcaagtgcgtcaacgccagccgctgcatgggtggcgtggctcggctcttcaccaaggttcagcagatccgccgcgccgaacccaacgtgctgctgctggacgccggcgaccagtaccagggcactatctggttcaccgtgtacaagggcgccgaggtggcgcacttcatgaacgccctgcgctacgatgccatggtaagacccgagcccgcgcccgggatagtagtcccggactgagagaggagccgggctggaaaagcagcggatggcagagtgtggcaagcctaggtccagggcgcggagagatgtggggataaagtgagactccggccagtgtgccagctggatgcatagaagtcccttggacgattcgtcttaaacggacgttattgc

SEQ ID NO: 29355 - DNA, 829 bp, Homo sapiens; identical to SEQ ID NO: 23345
  chr6:87646737-87647566
  hyper

SEQ ID NO: 29356 - DNA, 420 bp, Homo sapiens; identical to SEQ ID NO: 23630
  chr7:101475674-101476094
  hypo

SEQ ID NO: 29357 - DNA, 477 bp, Homo sapiens
  chr7:101603073-101603550
  hypo
cggaggatttcaccgcgtacatattctctgtttggacatggtacaacctgtggacccttttaaacatagttacatgtttgactctttatagggtaataactcgattaattttgcaaggctttttagaataccattgttctcttgaaaagaacaggtttgctgttttaacaagactttaatgccatcgagatgcctcacattggcacggttgcgtaagaatcgcacggtcccatgaaatgaaattgagagagctttttccggcgcctggttggttggggcggcctccgttcggtgcttttttcatcctcgacccagtgaccaactgtgtttgccctgatgtttctttcaattccaccattccgaaatgtctccggaatctgtcgttttagcttttgcagcaaggttcgttgtgtttgtcttgcccgcttcaggtttctctaatgagattcacgtgtaaaggaggattggcaattaatc

SEQ ID NO: 29358 - DNA, 412 bp, Homo sapiens; identical to SEQ ID NO: 25824
  chr7:101652279-101652691
  hypo

SEQ ID NO: 29359 - DNA, 415 bp, Homo sapiens
  chr7:1029909-1030324
  hypo
cggcagtgtgacagtggcgcgtgtgctgggggtggtgtggtcggcagtgtgacagtggcgcgtgtgctgggggcggtgtggtcggcagtgtgacagtggcgcgtgtgctgggggcggtgtgatgggacacctgctgtctgagacggccctggcccccgtcccagcgctgaccatgcacgtgagcggcaggcggcccctcaccgagaagagaggataagccgtggcacattcccacctgcgccacgtgaagcggcgccccaaggccaggacgtggtggccgggacacacgggtgcacggcaggcctcacactcccaggtggggccgcagggtccctaagtcatgggtggggctgctgctacggaggctgctgcaaggacgagaaggggacggagggatggaggctcggctgcgtcc

SEQ ID NO: 29360 - DNA, 1075 bp, Homo sapiens
  chr7:113722711-113723786
  hyper
cgcgtgcgtcgctttccttcatcttggctatacttcctctcatctgcggtgttttatttcgcgcaagatgcgctgacagaggccatttcaaacgaatttatctttcactaggaccgtactagagcagtgtctcgaattttgttgatttgtggtttcgtcgtaaaataaacttgaaatcaaataaactttcgtgaggaagctttgatgtccacttggtgaaactcctcattcacccagttgagccgttgaactttcttctggaacctctttaaatgacttttgccgatccacgtgctgcaaagaagacctgaaccgtgcctatgaccctgcgcggcgactacagggacagaatttggctttccttctctttccaatatgcagcgtttcgtttaaaggctgcctcgatccagtgggctgaccagtgacttgtgcaaaagaaaactattcgatcgctgtttgccctttcagcgttttcctcggctgcggaaacccggttttcctattattatacttcaactttttttggagtcagctagcacagagcgctaaaccccggccagttccagcagcagccgaggcgaacaaagcctgcagtgttcggggccatgctggggcgggagtggtggacgagttcaaggaattgcaaataaatatattttatgaccacccatcaacaaactacgtgccaccgtggcggcccctggtagccgggccgtgtctgcagtgtggccaggggcgggggctgaaaaggaggcggccggagaggcgaagcgagctgcgagccccgggcctgaactttcacctctcgaacccgggcccagcccattggctgcagccgaggggtccaccgagggcagcggctcctgacaggacctgttttcccaactccctggacagcttccctgcgggatgggttggtggcccggggcatggcagcaggcgaggaggagataatgggggcgaagttgagcgggggcacttgggagctgcgggctcagtttcactgagaaaaaggccccggaagggtacgcgtccactctataaatatatactcctccgactgagatgtcctttc

SEQ ID NO: 29361 - DNA, 1392 bp, Homo sapiens
  chr7:121946043-121947435
  hyper
cgggctcccgccgcccaggcaagagcgtccaggagcgcgctggaagctgcggcgcgcaccttccccggcgcagtctcttgccagccggcgatcacgcagagctgaaccccgcagctaggcgcgcaggaagggctgcacagagtttgaagacacggcagctgtaagctggcgtgaggaggccaaaggagcgcgcagagctgcaagcaaagggcggtggggcctggaccctgaagtgagtggccgaccgcagcagctcaaggtgccatctgcctggtgagttaaccccacgtggctgtgagacaggtggtggcgggtgtcaggtattgggccaagtgtagtgggggcgtccttctgctagagctctgaaaagggttggccccggaaggctggataacggcggactagaaaccctggcattattaagtccctgagcaatttcactcaaagatgcgaaactggaccttaaacgaaggaaattgacgtcaaagtattccctcctctctaccccattctcaacacatgccaggcaagctacccgggtccctccgccccactctaactttccgcgaaaatcagttccgcctctgccccaagagccaagaggggtggaaaggaagagagcttgggctgggaacgcgcctgatgtctaacagaaaggcagtggcagctgggtgagtggtgggaaagctcacaggctgaagaaatgggggagggggagtgagtcttattggaagttgaggacagccaaggggcaagatggggggagaggtctggctgaatacgacgggcttcagcagctaggcctgggagtgcctcgtttcaggcctcgaggtggcttcaggctgggacaactgatgcagcagagaagggcagagcgcccggggggagaaagcaaagaggcgctacactccaaggcggccctttggaaccgtccttggcccgggtgcacctactttggattcgcccagactgcaaatttttctttccttttgctggggccacgggacagagcacctgggcagagcaagcggagaggcgccacatccccgagaggcgcttcgtagttgtccttggaccgggcgcagacactcagtattggtcagcgctggaaattttctttccttttgctgttggggccgcagaaccagtctcctcctttcccctgctcagacaaagggcacgggaagggctttgctggggcaaaggggggtggggggttctctgtcccacgacagatgggtcgcggttaagactttaattgctgacttttgggccggatcagattccttttcctacctgccacttcccagcagcgaaaaatccccctcctgctgcactcctccgccaccgggctaggttgaaaggaaaaagccaagaagcgcgaagcagccc

SEQ ID NO: 29362 - DNA, 277 bp, Homo sapiens; identical to SEQ ID NO: 23349
  chr7:121951878-121952155
  hyper

SEQ ID NO: 29363 - DNA, 285 bp, Homo sapiens
  chr7:123172945-123173230
  hyper
cgcggaaggcgccgccagtgaccggctgcggctgggggcggaggccggcagttgctcggagctccggcgggtcaggaggtgacgggaggaggaggaggcaggaggaagaaaggggggttgggaggtagcgtccggtaggtctgcgcagacagcgctgccagacctctgactcccccagtcctgccgccgccgatagccccacaaggcgacatgggaagtccgccggagcagaggggagaaaattcaaaacgagtctactcaacctcgtcttggctccgaggcccc

SEQ ID NO: 29364 - DNA, 255 bp, Homo sapiens; identical to SEQ ID NO: 23631
  chr7:129483371-129483626
  hypo

SEQ ID NO: 29365 - DNA, 814 bp, Homo sapiens
  chr7:136553551-136554365
  hyper
cgggttggccagagcctggaaatcgcagatttcaccaggaaatcgccgaggtacccgaataggtgttgcctcccaaaactaattcctacttccccaagcactttggtgaagaaatgaatccagcccagctcgccgaggcatccaggtctccattctattttggtctccaggctcttcgtgaaagccaggtttgaaagtcttgtttgcttctcctttagtggtttggcgtggagggcgggggcagcgtcaatttaactccagtctaaaccacgaacaggtcacagactagccaagtggctgagacgagtgtggggtgcgtgactctgcctgcgcgcgcgccagccccgcagctctcgccagagccttggggtcggttctctcccgcctctcccgcctctcccgccccacccctacagtgtctcggcatcaactaatcttttccttttcttttgcaagatcaagggagaaagagaaccggcagctggcctcggactctaagcggtgcgcagctccagcccgagcggatcggccctgaacccacaaaggactcctcgctccttcaagcctccaccacctcgcagccggggaggcaactggagcgaaaccagcgacaggtaagggccccgcgctgtgcagctctccgcttacccactccaagggccctggcaccagggggtctctcccttcatatccccccaagccggaggctcaggggtcggggcttgggggaattggagggaggtcctccccacgtgcagattctcaaacggaaactttggatcctggggcttggagggttgcgagcagtgatggc

SEQ ID NO: 29366 - DNA, 151 bp, Homo sapiens; identical to SEQ ID NO: 11839
  chr7:137564632-137564783
  hypo

SEQ ID NO: 29367 - DNA, 242 bp, Homo sapiens
  chr7:1451120-1451362
  hypo
cgtatccggggtgttcgaacaattgtgcggcgccgacgatgcaagctgttgacctgcacagataaaccgtgcgtgcggaggaatcgggggcggcggacggggtggggggagtgtacatggctgttcttttctgctggggcgcccggcgggccctgcctgtggttcgccctgtgtgcgggcggtgtgggcgtctttgccgcagggtgcttgtcgtggcaagggttctttgtgtgtacttctgc

SEQ ID NO: 29368 - DNA, 1286 bp, Homo sapiens
  chr7:145812717-145814003
  binary
cgaattaattacatatcgaaaacatgtgcattaacggcatctgcagtcctccctccctgctccagtcagtcgggatgtttagcaccgtcacttggtgttaggaccactcggaagacctgcctgtcggacgcctgactgtggttcccggggggccggagctccaggagcctgtaccatctttatctgaaggggaggagagaaggaaaggagaaggcatccgagcgagggtgttctccttcctgcagccgggtagggggcagccaggtttggagcagggttctaggattacacggcaaatccccaacttcagcaccgcggacagcatcacctcccgcccagggagaggcgcgcgcctccttgctccgcccccgccccagctgatggaccccggccggtcggctcagtctcccttttgctttcaaacgaggccagggcagggcagaagggttttgacagccagaggggtacggtaaggaggaggaagaggaggaggaggcggaggaggaggaggagccgaggagggaaccgagaagggaagagaagggagggcttccctccgcctcgctcgccgcccgggctcacaggagctggcggcggcggcggcggcggcggcgtctcctgctctccgcggctgttgctgctgctcgcgctccgccgcccgggagatgcttcctcgcgcggcgcagcgctgaggccgtgcgtgcgccccggctgcgctgcgcgctccccacatacacaagctctccatgtgagctgacaggcgagtggaaacccctcgagtcacgctgcccggcggcggagggagcgctcgcccgcagtggcaacagctgcaccaccgtccccgtcgctctgccttcctcttctgcagcctctgctcttctgattacctccctcccccgtcctttggtgatttttttttttcaagaaggagagggcggggtaggtgtccgttccctcccctcttccccctcctttgccttcttggtttgaatttcctcccccggcgttgcactggcacacagtgcaagaggcaatacccgcacggagggagaacgaaggctgagactcccctgccgctccaagcccggaagaactggagcctggaggggggtgaggggagaagaggaagcgggaggggcttggcttcctcgcgtatttgaggacagcccatctcccttcaagaaccctacggagagtcggactgcatctccgcagcgagctcttggagcgccgccggccgggaggcgaaggatgcaggcggctccgcgcgccggctgcggggcagc

SEQ ID NO: 29369 - DNA, 503 bp, Homo sapiens; identical to SEQ ID NO: 6612
  chr7:148480954-148481457
  hypo

SEQ ID NO: 29370 - DNA, 762 bp, Homo sapiens
  chr7:150863966-150864728
  hyper
cgcgcgatctaaaggtctgggacttcaaggctccaggcaggtgccgaggtgccgaggttccgagcaggttcctgtctggaatttccaggtgaaccggcctcccgccagccctggtcggccctagcacttaccgggcagacttggaaaagtctctgagaagtgcggaggcggaggtggtgggggctctgccactttctcccgggccggcagcagctcatcagcttccagcccaccctctgggcgtcggccgcctggctcggggttgtttcgggcggcagtggcggcggcggcggcagcggcggcggcgagctcctggggcccgtagaaagcgtcgggcggctccgcgaagctgggcagcgcggtggtcagcgccaccatcgagggcacagcctgacccagccccgcgcagaaggtgttggtaaggcggccggcgaaagaggctagcggggcgaggggcgggaggccagcgggcagcggcgcaggggccagcgcctgcggcagcacgagcggccggtagggcatgaacatggggtagccggtgtacagcaagtggccggagcgcggcggcggcggcccgattagggagtcgatggagaaggcagtgcccgggcccccgccgccgcccccgccgttgcccccaggggcgctaccgcctccggcccgctgcatcttgttcggagctgcggccgccccggggcgctcctctctgggcgcctccgtgcgccccgcggctcgggcgccccgcgcggacacgcagggctc

SEQ ID NO: 29371 - DNA, 154 bp, Homo sapiens; identical to SEQ ID NO: 6269
  chr7:152591569-152591723
  hyper

SEQ ID NO: 29372 - DNA, 712 bp, Homo sapiens; identical to SEQ ID NO: 23351
  chr7:154861705-154862417
  hyper

SEQ ID NO: 29373 - DNA, 982 bp, Homo sapiens; identical to SEQ ID NO: 24598
  chr7:155166913-155167895
  binary

SEQ ID NO: 29374 - DNA, 896 bp, Homo sapiens
  chr7:155257774-155258670
  hyper
cggtgctattccagtgactacatttttttaaattttgcgaagttcaacaggtctccctccggctgggtgctcactggccctgccacccgtgctggaccgaggcgctttcccctggggacaggaactttttactccactgagacaaagagactctccttttcaaagtgtcatttttgtttaccttttgttgtttcccccccaaaacaaaagactttgtacaacttcctaagcaggattgggggagggatcagcttcgcctgtgctgaccgcgcctctggattccgctcatcaggaagtgtttggggtctttgagcgagtgatctacgcgttgaattgctgtttttccaaactttcatggcttaaaaattttttttcttctccctgtaaaagaaactcagagactggtgatctgttaccgaagacgactttttaggcgttttctgtttccccaggcagctgggccgttggcgttcccaggcggaagcggggcctctgggctgggcctctgccctgccaggaagcggtctgggggctgcccctcgggattttcagaaccctggaaggagagagctggggtctcaccgcggagactcccgagttctcgttgcctgggcccgagctgcgccccagggtcatcgctgatggcgcgagaccacgcattccccgcgaaccccgacttctgaacagttcagaaagttcgtagattaaaaaccaaacaaaaaatactggcacaacttctattgccgtattggcctctctcttattttaataaaaatacggtaacatgaagcgatcatttttttaaaaatctgttttcaaagtataacactgaaaaggggcaaggcacagctttgtaaggtaatgagttccccgtcctcagaggtgttcaagcagac

SEQ ID NO: 29375 - DNA, 943 bp, Homo sapiens
  chr7:155259210-155260153
  binary
cgccctgcaggcctgcccaagcaggcgcccccgcgagagtgcgggacagagagggcctggcggggctccttggcgctgagagccctccttctccgctgcacccagctctgccaacggggctggatgagtgggggctggagtcagaatcccagggtctacacccgccgacagcagcaatgccgacccgccctgcctttctcctaaggagcggagggaaggagccatgtgaatgaccccagcctgaccaccaagagggcgccagcatttctgttttcctagagtgaaaaggtcaaatcgatgggggctcctacaccgctggacacaggtgcgcccgggcgtccagtgcgcgcaacacacgcccagacactctatatgcaaatatgcctgccgccgcggagccggccgggaggcagcgtttgttcgctggggttctgctagaagtcattctgtctcccgctggtttaatatccgccctctgcggtctccgctcgcctcggcggctcccgaagcgcccccgggagggtcccggctccgccgaaaactgcagcctgccaggctgagccgccgcgcgctgggaggttaatagcgactgacgacaaagggccaaggtgcaattcctaaagcggggattcgccgggtgaggcagaaatcagcctccggggagatgggtccccccttcccgacgcgcccctgcacacactgctgccccggcgccgggcctccgggcggggacccctcttccgggcatcgcggccccattcggcggagagctaggccctctccaggcctccaagtagggagcggacgtgggtggtggggaagggaagccgccggcgggacggagagtggggtcccccggaccctgggtcgggcaggcctggcgctggcagctctgttgcacagatttgtgagcgatgctggtggccgcattgccgcgcggcgc

SEQ ID NO: 29376 - DNA, 1026 bp, Homo sapiens; identical to SEQ ID NO: 25853
  chr7:155302323-155303349
  hyper

SEQ ID NO: 29377 - DNA, 1084 bp, Homo sapiens; identical to SEQ ID NO: 24601
  chr7:155581242-155582326
  hypo

SEQ ID NO: 29378 - DNA, 691 bp, Homo sapiens; identical to SEQ ID NO: 25854
  chr7:156409159-156409850
  hyper

SEQ ID NO: 29379 - DNA, 650 bp, Homo sapiens; identical to SEQ ID NO: 9915
  chr7:157202474-157203124
  hypo

SEQ ID NO: 29380 - DNA, 957 bp, Homo sapiens
  chr7:157482797-157483754
  hyper
cgctggggagaagtcccggaggtcctagactccttggggcggtctctgcggggcgctgggccaggacagctgccaaccctccaaatctgtgcgctcagaaggagctgccctttgcccgctcctcctcacaggcccaccctagacccacttggggatgatcccaggcgcagctctcccctgccggcccaagcctttgacaggagtcctgcggcgaggcagagaccccctgaactgagctctccgacgccctagttgcccgttagagcccccatgcgcgccctccagccttcgaaagctctcttcctcgccccaccacctacgcgcctggtgatgctctcgtgggcccttcctgctccctccgcccccatcccagcctctctcgcctcttccagggcccacccaaccgcactacgagcgcccgcgccccgcccggcacccctggttacctgcagctgggccggcgcccagcgcccgcgcgggaggaggtgggggcgtgcgccgggccgagcggcctcggggcgcagcagctgcgggtagcggcagcgccatcatcacagccagctgcttccctgcgctggagccacagactagcggggtcatccgcttctgaccacaaacttctagggcggccggaggagacaaaggtgccgcgcgtcgctgctccagcagcagcggctgcgcggcggcacgggctcggagcccgcaggcgccggagctctgcgcggccgctcggcccagctccgcgtgctccgccccggcccggcccccgggctaggcacgctgggccggggcgcggcgcgggcgggctcagggcgggctccggacggtcccggtagggccgccggccgcgcgcgtagcaccaaccagcgcggccgccgcgccccgccttatatccggcccggcgcgcacccggccggcggcggcgcggctcgcggcccagccaccggttgctatagc

SEQ ID NO: 29381 - DNA, 312 bp, Homo sapiens; identical to SEQ ID NO: 23634
  chr7:157583915-157584227
  hypo

SEQ ID NO: 29382 - DNA, 1126 bp, Homo sapiens
  chr7:158066162-158067288
  hypo
cgcaggcacagggggagccgcaggcacagggggagccgcagacagacatgggaggagccgcagacacggggagccgcagacacagggggagccgcaggcacagggggagccgcagacagacatgggaggagccgcagacacggggagccgcaggcatgggggagccgcagacagacatgggaggagccgcagacacgggaggagccgcagacacagggagccgcagacacagggggagctgcagacacaggaggagacacacaaggagccgcagacacagggggagccacagacagacatgggaggagccgcagacacggggagccgcagacacagggggagccgcaggcatgggggagccgcagacacagggggagccgcagacacaggaggagacacacgaggagccgcagacgcaggaggagccgcagacagacgcgggaggagccgcagacacagggggagccgcagacacagggggagctgcagacagacatgggaggagccgcagacacagggagccgcagacacagggagccgcagacacagggggagccgcagacacaggaggagacacacgaggagccgcaggcacagggggagccgcagacacagggggagctgcagacagacatgggaggagccgcagacacggggagccgcagacacagggagccgcagacacagggggagccgcagacacaggaggagacacacgaggagccgcagacacagggggagccgcagacagacatgggaggagccacagacacgggagccgcagacacggggagccgcagacacagggggagacgcagacacaggaggagacacacaaggagccgcagccacagggggagccgcagacgcgggagagccacagacacagggggagccgcagacacagggggagccgcaggcacagggggagccacaggcacagggggagccgcagacagacatgggaggagccgcagacacggggagccgcagacacaggaggagacacacgaggagccgcaggcacagggggagccacaggcacgggggagccgcaggcacagggggagccacagacaccctcacactccgggatctagcgtgtgtggacgagcccgaggcgctc

SEQ ID NO: 29383 - DNA, 336 bp, Homo sapiens; identical to SEQ ID NO: 11849
  chr7:1584054-1584390
  hypo

SEQ ID NO: 29384 - DNA, 714 bp, Homo sapiens; identical to SEQ ID NO: 24612
  chr7:1641685-1642399
  hypo

SEQ ID NO: 29385 - DNA, 591 bp, Homo sapiens; identical to SEQ ID NO: 23637
  chr7:2208344-2208935
  hypo

SEQ ID NO: 29386 - DNA, 242 bp, Homo sapiens; identical to SEQ ID NO: 11853
  chr7:2448743-2448985
  hypo

SEQ ID NO: 29387 - DNA, 695 bp, Homo sapiens
  chr7:25891919-25892614
  binary
cgttacagggtgggactgggtggagcagccttcaggccgccccggcccctcgtgggaatgcgccgcgccccccggactctggagcggcccgaccctgcttcccaggccccgggcaggcgggcgggcgagacacaaagcaggccccgcgggcggtgctccgggtttcgcgagggcggcggtgcgcttgattgatggattcacggcgtttaacccccgccgcctcgccggaggcggccgatccagctgcggccgagggcctagggtggccatgggcccggcccccgcgtcctccgcgcccccgccccggctcgggagggctgccccccgggagtggagaaaggctgatttacagccggccggccgcactcttgcaaaatcactgcggccggggaaacccactcccaggactcagcccggaagaggccctgaaggggagcggagactgggcgctggggtgggggcgggggcgccgagcctcaacttcccgcgtctgctggaagcttgctctgagcgccggctgcggcgttttcccgccttctgcccacgttttcgcccgggagtgggtttcaggagagctggggacagcggcatccctcgccctgggaccgttgcccctgcgcccgccgccctgtgcctgggcctttgcacccggagcgccccgcgccccagcgcagtcgtccccacgcgccgggatc

SEQ ID NO: 29388 - DNA, 1116 bp, Homo sapiens
  chr7:27190160-27191276
  hyper
cgtccttctttgccatagccaatcctcctcagagcagccaggcctacaggcctcaggactacaggtagtctctccgattgcagaatcccaaagccagagtgttccctgaaccagcgtgcgcccccagaacgccttgggacgcgcagtttggacagaagcagccatgacgtgccaggcggcctgtgcaaccagtctccatggtgctggagtgggggtgggggaggacccgagtctataacggcgtccagctccggtcaggggtagccgaggcggggagatttcccggccatataggctctgggtgatcgccccccaggtccccttgcgtccccctctaccctgcttgctgggaaatctctgaggggccagtacagcagtcgcgccaggctgcaagaggcgggctgcagctggcgccggtcccggcgacggccacggcgtggcagcagcgagcgccagcacggtcgcaataaataatcggcccgcggcagccgcagtcaggaaggcggcggacctaggatgcaaatgcgccgctttatccgccccgagcgcacgcagagcacgggctaacgtcctaaacatccacagccccttcctatttatcgaatccataccaagatattgtctcaagttggggaaacaacaacccaaacaaaaaacaaacaaaaagaacctcggactcttttcttgtcgctgtccgaggagttctcggggcaaatctggtctgatgtgcacttaggccgagctacagttcgagccaccgcgctacgcaaagccaccgccagcagcacgctctgcgcttcctcccgggcagctccaccatcctctccccgctcgcggaaggtggggagtgcggtcgccagtccgttgcgccaaggtggattggggggtccccctatcgcccagactcggtttgcgtccttccttcaaccttagctgcgggaccctgccacgcgcgctaacagcattatgtcctctgcaccgaaacttcccaccaagtaacacccaattaatcccatcctctcctccaacacagaattccacccacgcacctattccccctcccagcgcttcagacacctctctcatcgaaaaaccgggcgaagggaagccggcaac

SEQ ID NO: 29389 - DNA, 1383 bp, Homo sapiens
  chr7:27195477-27196860
  hyper
cgaacaaacttaatgttaaaattccaagacaaatggagttaaataaatttacgaggatcgaacccattaattgggccataaaaagttttatgagcctcatttacatacaatgctatgggctccacgcaatggcgcctccgctccaattaaaaccagaaaggctgcgccgggagtcacggggctaccggctcgcaacagcctggctccgctcttccggccccgcgccccgcgctccgcgctccccagcgctgcgctccccgctcccggtcccgctccgccagcctggcccgcctagcgactgcgcctacctgaagaccgcatccaggggtagatgcggaaattggcctcagccgcgccatgcagcgcgccctcgtccgtcttgtcgcaggcgcctttggcgaggtcactgcagagcccggggatgttttggtcgtaggaggcgcagggcaggttgccgtaggcgtcggcgcccaggccgtagccggacgcaaaggggctctgataaagggggctgttgacattgtataagcccggaacggtcgaggcgaaggcgccggcgcccgccccgtagccgcttctctgtgagttgggagcaaaggagcaagaagtcggctcggcattttggaacagagaagcccccgccgtatatttgctaaaaagcgcgttcacataatacgaagaactcataattttgacctgtgatttgttgtccggcagctttcagtgtcggttttacgaggtagagtgatatatgataacattacacccccagatttacaccaaaccccattttcttttggacggagctcgccgcagcacgtgaccgcccacatgaccgcctccgccaatctcagcagtcctcacaggtggtctcgctccgcagggcccgcagccgcctagaatggaagggcaagaggctcaaatatgcggccaaagaatccgcccgcgcccggcgggcctggcgcgtcccgcggaaaaagacctggaggctccgcgggagcgcccagctggcggccaacctccgcactggggtctgcggacgccaggcggcccggccccacgcagcaccccccaccccgcccccccgccgactcctgctagtgagccctggaccaagcttgggatcctccccatccctctcctgtccgcctgcccagaccctggaagggtctctgtcccccgcaacagcctgccccgcggtggccttgtgggcaggactcagctatgagcagatcgactctgcccaagtcttctctcacccaggtccagtgggcgacaggccggacttagactcggatccagacggggaaggcgcagcatctcttgcagctgcagagagattgccaccgcaaactggagccatgtggttcgaataaagtcaac

SEQ ID NO: 29390 - DNA, 2174 bp, Homo sapiens
  chr7:27203938-27206112
  hyper
cgccctaaggccgctgatcacgtctgtggcttatttgaataatctgtcatggggacccttgtggcccgggtcgcccgcagcctcatcttggcaggatttacgccgccactggccgaaggcaagaagtggaaggaatcggccgtctcccccagcgtcccagctccggctgccctggctgccgccgctcacggacaatctagttgtacaaaaggctctctgggctgcactgctttcgaagaacggcccaaagtatctcggtcctgggcctgggcagccaaggagaggggcggccagtcttggctcgtcccgaagtgcccgccccgccccctctcgctgcagcagccgcctcctctcccgtagccctgcgggccgctcttcactgctctccagacttggggccctatctgaggcgtcccaaacaccaacttctggctcctggccccaactcgagaggcttccagcgaggacgaaggcaggctcgagagaaacctggcgggccagcagatccgggaggccggcgtggaggcggcggcggatttgaagggaggagacacttactgggatcgatggggggcttgtctccgccgctctcattctcagcattgttttcagagaaggcgccttcgctgggttgtttttctctatcaactggaggagaaccacaagcatagtcagtcagggacaaagtgtgagtgtcaagcgtgggacagtcaccccttctggccgacagcggttcaggtttaatgccataaggccggctggagggcaagcccgcgaaggagagcgcaccgggcgtgggctccagccaggagcgcatgtacctgccgtccggcgccgccgccgccacgggcgcctgggggtgcacgtaggggtggtggtgatggtggtggtacaccgcagcgggtacagcgttggcgcccgccgcgtgcactgggttccacgaggcgccaaacaccgtcgccttggactggaagctgcacgggctgaagtcggggtgctcggccagcgtcgccgcctgccggggaggctggcccagggtccccggcgcatagcggccaacgctcagctcatccgcggcgtcggcgcccagcaggaacgagtccacgtagtagttgcccagggccccagtggtggccatcaccgtgcccagcgcctggcccgcccggcccgacccacggaaattatgaaactgcagatttcatgtaacaacttggtggcaccgggggggaagtacagtcacctaataagttgccggcgcccgcgcccccattggccgtgcgcgtcacgtgcccgtccagcagaacaataacgcgtaaatcactccgcacgctattaatggtccgatgttttgcagtcataatttttatagcaaaagccatatgtttttatgtaaagggatcgtgccgctctacgatggggtttgttttaattgtggccaacgacgattaaaagatcaaatctagccttgtctctgtactctcccgtctccccccccatacacacacttcttaagcggactattttatatcacaattaatcacgccatcaagaaggcgcgggtcccgcgtgcgagtgcggccagcggagcccctcacataaaattagacaataattgaagccataaaaaagcagccaaatcgcattgtcgctctactgtatttaaatctatatttatgatatttcataaggagttattgtttcagaagccacacaggctggcgggaagtcggaaacgaccaacagattcgtttgcctcgccgtggctcccagctgtaaaaatttacgaggacttggaaaggttagactgttgtgtttggttggcgagctccctgtaaataatccctgcggtccccgggagaggcgagtttacccgcggccgccctcgaaaagtcaaattcaacgcaggatccgtcccaaacggagccgccgccggccctaccagggcactccaggcagggaccggccgctcagggagtaccgcgggtgtaggtccccacagctacccgcctggagcgaggggcgcccgggcaacccttaaattcgcctttgctacgaggaccccacggaggagctggccaggagggagcggccagccgccaccagggcgaaggttttgagggcctggttggttgtgcggcgcgctcggtccccggccctcgaccccacgcacacgc

SEQ ID NO: 29391 - DNA, 60 bp, Homo sapiens; identical to SEQ ID NO: 23638
  chr7:2798471-2798531
  hypo

SEQ ID NO: 29392 - DNA, 955 bp, Homo sapiens; identical to SEQ ID NO: 22944
  chr7:3082731-3083686
  binary

SEQ ID NO: 29393 - DNA, 1809 bp, Homo sapiens; identical to SEQ ID NO: 22945
  chr7:37487365-37489174
  binary

SEQ ID NO: 29394 - DNA, 1107 bp, Homo sapiens
  chr7:37955597-37956704
  hyper
cgcccctggcagccttaggtgtggccgcccagttctcgattggcagccacagccccgggcgcctcctcgcctccctccatccttcctacggcctcaccctccgggaggtccgtgacgatggcttcaggcgagatgcacacgccacggtcatagacaggcagctcgtcgcaggccaggctttcgggccagctgtggttgtacatcttcatgaggggctcgcagtcgtcgcgcgcgcgttggcacaccgacttgcacggcttgatagggtcgtgcaggaactccagggtgcaaatgggcgcgtacatggcacagaggaagaagcgcagcacggcgctgcagttcacgtccaccagctcctcgtactgctcgatggccaggatggcgttctcctgcgtgctgtggtgcaggtggttgggcatccgcgtgatgttccagggcatgtgccggcacatagggatgcgcaccgcctcgcagggcgcgccgcgcacgcccagcgccaggtgcagccacaggcacagcgccactaggatggagaggaacatggcactgccctctcgcgctgcgaccccggcagacagaaagcgcccttctcttcctgccaccctcatctttcgctgtcccttcgccgaggaagaaatcctctggggcgcaggagagtttcttcccccaaactccagtcggcagcaaagcggggccgcggggtccggccgcggagctccgccgtctggcacacagggcacgagcagcgccagctctcagccttcggggcgcgaacccgcccgggcagctccagtcccggactccgcagctcggagcgcagccagccacggccattgcgggaccctatttatcccgacacctcccctgacgtgggctcggaacgctcccttggcagctgcagccgcggcgcgggctccccctcggccgccccacccccaggcccgtcggtgcagaagcggtgacatcaccccctctgggccgcagcccagggctggaagcctgctttccccctaaagtccctcctttttagtctggccagtcttttttcttcggaccaagaaaaagaacctctggcagttgttttcgacaccggatacaagagggtgc

SEQ ID NO: 29395 - DNA, 947 bp, Homo sapiens; identical to SEQ ID NO: 22946
  chr7:37960179-37961126
  binary

SEQ ID NO: 29396 - DNA, 848 bp, Homo sapiens; identical to SEQ ID NO: 23361
  chr7:42927739-42928587
  hyper

SEQ ID NO: 29397 - DNA, 100 bp, Homo sapiens; identical to SEQ ID NO: 23639
  chr7:44097742-44097842
  hypo

SEQ ID NO: 29398 - DNA, 343 bp, Homo sapiens
  chr7:44349372-44349715
  hyper
cggaagaaactggggacgagagagattccgacgccagcaccgtaggggccgcactcggcgtccgtccgcgcagccttgcagcgaccttcaaaggcggcgcttaagagccggtcacgcccctcctggagcggcggcccgcgggtagtcaccgcgcctgagcagccagaaccaggccgaggccgcgcggctcgcgaaggacacgcgggaagagcctttccgccggctgagccgtgggcgccaccgccagggaccccaggctcaccaagccacgcgcggaaccgcacggtggccgagaccgggcgggggcgggggcgctttgggagttaggatacgctttgtgccc

SEQ ID NO: 29399 - DNA, 1369 bp, Homo sapiens; identical to SEQ ID NO: 27245
  chr7:4801650-4803019
  hypo

SEQ ID NO: 29400 - DNA, 335 bp, Homo sapiens
  chr7:50251388-50251723
  hypo
cgctggcatcgggaggcaggtatccacacactggcatcgggaggtgtccacacattggcatcaggaggaggtgtccatacgctggtattgggaggcaggtgtcagcactctggcatcaggaggaggtaccctcacactggcatcgggaggaggtacctacatgcttgaatagggaggaggtgctcacacgctggcatcgggaggcaggtgtccacacgctggtatcgggaggcaggtgtcagcatgctggcattgggaagaggcaccctcacactggcatcgggaggaggtgtccatatgttggcatcaggaggaggtgtccacacgctggtatc

SEQ ID NO: 29401 - DNA, 552 bp, Homo sapiens; identical to SEQ ID NO: 24646
  chr7:5647853-5648405
  hypo

SEQ ID NO: 29402 - DNA, 521 bp, Homo sapiens; identical to SEQ ID NO: 11869
  chr7:6207763-6208284
  hypo

SEQ ID NO: 29403 - DNA, 484 bp, Homo sapiens; identical to SEQ ID NO: 22948
  chr7:63767582-63768066
  binary

SEQ ID NO: 29404 - DNA, 976 bp, Homo sapiens
  chr7:64349108-64350084
  binary
cgttcacacccagccccgcagagccggatagaaacgctgccactgccgactccatgctgccgggaagtgcactgtggaggccactttctggaaagaagaaaccgtctgaacacaaagttgctcaagccatgttcatctatctgccagggaaacggaggccctgagtgccagagtccaagtcaccctgcaagagaaaactctggtggagcccagggtgtccagcccctgtccacccagccgccgtggtcaaggttaataagggcaaggggccaagcagaaccgcctacaaggaaccgagtgtccacaaagcaggaagcgaagaacgtttctcctacctagagcgcagccgttttgcggaaggcacagtccgggctccgggagccaagcagggatccgggcctcgttgcggaggggacgcccgggctgagctgagctcacttgctggcggcggcagcccctgcagtcatggggtcaccggcttgtggagaggggctggcgctgttccttggccccgctccccgcccgcaaagggccgggaggtcgggctcccggcagtgtccaggctctcgcccgccggtgcctgagccgtacccaccgcgtcccctccgccccaacagctggtgctgagggtccggcccggggtcatctggcagggccgtgcggctcctgcgggtgaccaggagcgcggagccccttcccactcgggctcgggtggcctcacctttcctggggctgcgtccccgcgggacgccaggttcccggtttcttctaggtcgccctggttcctggcagctcctggtgccacgcggtcctctacggtctcctctgacctgagagggacagtgagatggggctggcggggatgggggtccccgcgctgttggaaagcagcggggctgctgctgaccggagccgcctgggtctgttctggaaccgtcgccctggggcccctccgccccgcaaacgctcgggatgc

SEQ ID NO: 29405 - DNA, 209 bp, Homo sapiens; identical to SEQ ID NO: 24647
  chr7:6442423-6442632
  hypo

SEQ ID NO: 29406 - DNA, 167 bp, Homo sapiens; identical to SEQ ID NO: 23643
  chr7:6443294-6443461
  hypo

SEQ ID NO: 29407 - DNA, 425 bp, Homo sapiens; identical to SEQ ID NO: 24649
  chr7:6443704-6444129
  hypo

SEQ ID NO: 29408 - DNA, 177 bp, Homo sapiens; identical to SEQ ID NO: 11876
  chr7:6448767-6448944
  hypo

SEQ ID NO: 29409 - DNA, 690 bp, Homo sapiens; identical to SEQ ID NO: 23364
  chr7:64734140-64734830
  hyper

SEQ ID NO: 29410 - DNA, 170 bp, Homo sapiens; identical to SEQ ID NO: 24650
  chr7:6524924-6525094
  hypo

SEQ ID NO: 29411 - DNA, 144 bp, Homo sapiens; identical to SEQ ID NO: 11878
  chr7:653114-653258
  hypo

SEQ ID NO: 29412 - DNA, 274 bp, Homo sapiens; identical to SEQ ID NO: 7555
  chr7:653522-653796
  hypo

SEQ ID NO: 29413 - DNA, 448 bp, Homo sapiens
  chr7:65553884-65554332
  hypo
cgtgcagctctcagatgcctacaggtaagccctgaactgccacctccatctgccgctgccggcctctgtatcccccgccgcccgcggacgtggctgccttcctccccgtcccacccctccgccagacctggccattgcggcgctggaccagccaagggtccagccccttcagcgccagcacctctgtccccagcacgggaagcagcctgatgccccagaagaaaaaccccgacagtttggagctgatccggagcaaggctgggcgtgtgtttgggcgggtgagcaaggcagggggaggggcggggcctctgggctgatggtgggtggccaggggggcaggatcccgggtccagcccctgtgcctccctcttcccgcagtgtgccgggctcctgatgaccctcaagggacttcccagcacctacaacaaagacttacaggtgcgaggcc

SEQ ID NO: 29414 - DNA, 107 bp, Homo sapiens; identical to SEQ ID NO: 24652
  chr7:66293261-66293368
  hypo

SEQ ID NO: 29415 - DNA, 123 bp, Homo sapiens; identical to SEQ ID NO: 27255
  chr7:7102882-7103005
  hypo

SEQ ID NO: 29416 - DNA, 272 bp, Homo sapiens
  chr7:76106210-76106482
  hypo
cgtgccttcgtggaaagttttagctgatgtcctcgcctgtatttcccaggctgtttttgcagagttgtgagagttggttcatccgggccatgaggacatgttgggacataccccgtgtgccgatgatggaggcggccgtggctgcccgagagatgcgtgacacccaggagtaattggcttggaaggcagtcctctgatttgtacctcattgtggttacagaaacttccaattgaagacactgagctgaaccattccgcccgcccgcccgccc

SEQ ID NO: 29417 - DNA, 229 bp, Homo sapiens; identical to SEQ ID NO: 27256
  chr7:76145303-76145532
  hyper

SEQ ID NO: 29418 - DNA, 171 bp, Homo sapiens
  chr7:76631508-76631679
  hypo
cgcagcgtctggatacagcgatgtgactgacagcaaggcaatcgggcccctggctgtgggctgcctcaccaagtgcagccacgccttccacctgctgtgcctcctggccatgtactgcaacggcaataaggtgcccccactggcccggggcggaggcgggtggcctgcccc

SEQ ID NO: 29419 - DNA, 376 bp, Homo sapiens
  chr7:76751570-76751946
  hyper
cggttggcttgactaggcgatgtaaacatcagctgcgtaatccccaggggcaagttgggatttgaaagctctgaactctgacctggaccccttgcctaagtccaccccctttcgctaaggccgacgggatacgtagttctaaagcggtggaaagtcgcagagctccgcctcttagaaaccacatatcccaggaggcaatgcgcaggggagcacgggtaagagggcaggtgttagaatcgctggaaaggcgggcgccctttgtttcaagaccattggctattggaggggcggtacatgggaggccactggccaatgggaagcacggaagggggcaacgagggtaaagctgcatggtcaccttggataccaaggacgc

SEQ ID NO: 29420 - DNA, 940 bp, Homo sapiens; identical to SEQ ID NO: 27257
  chr7:8473085-8474025
  hyper

SEQ ID NO: 29421 - DNA, 752 bp, Homo sapiens; identical to SEQ ID NO: 23366
  chr7:8476320-8477072
  hyper

SEQ ID NO: 29422 - DNA, 1117 bp, Homo sapiens; identical to SEQ ID NO: 23367
  chr7:87229392-87230509
  hyper

SEQ ID NO: 29423 - DNA, 274 bp, Homo sapiens; identical to SEQ ID NO: 11892
  chr7:889360-889634
  binary

SEQ ID NO: 29424 - DNA, 300 bp, Homo sapiens
  chr7:915072-915372
  hypo
cggaggagtcttcggaccgaacggcgaaccgccttcaaaccccaattcttacagccaagccgttcccaaccctgcacggctagggctgggcctcaggccccgtttctaactctgactggggtttggaccccgtttccgcagcctgacagggctggaagctctaggccgacccagttcccccttccagcaggacccgatcctggaggagtgagccgtccacccaggcacagccgcaggtccccagccacggccagggaaggaccgcaggtggcctttcaaagaggaggaacgcccctcagc

SEQ ID NO: 29425 - DNA, 742 bp, Homo sapiens; identical to SEQ ID NO: 11893
  chr7:925633-926375
  hypo

SEQ ID NO: 29426 - DNA, 945 bp, Homo sapiens
  chr7:93203842-93204787
  hyper
cgttagtctcagtcctccctctccgcccctctcctggttttctgacactttaaatctgtcttaggtggttcagacccaagtctaggttgtattatcagctaaaagacaactgttctttcccctggcttgctttctacctccccagagtccaggaggctcaccttcccggcgccttcctgcgctctcccagctgtgaagctgtgcgcaaacttctcctgacttaagagtctcaatcctagcctgcgctcccgccccacccccgcccgcctcccgacaggcggcagaggaggtggcagcagaattgatgagagccagccccccttcccggaccccgccaccccagtcagccccctcctgtcccaggagagggaggggcgagctggtgagctccgtgcgcctcgcgccagccccagtcgccccggcccgcgagtggggctgcgctcgcggctgctgtctcgctccagtcagggctggggctcaccctgcgagtccgggagactaaagcgccgcgtaaacacaggaagcaggcgagggacccgagttagaccttgagtagggagggagaggggggcgacagtctggactgggagacagctttctgggagccctgtcccctccccggagaatgcaaattccggagggaggtgagtttccacaagaaccttatcccagagacattgtgaccctggcttcttcagccgccactccggggacagcactagggagcctgtggagggagggtcggtagtgggctaggtagtgaaagtggggtgaggacgtgggaagacggctggctaagagctggggtgctaaaaggaaaaaagtgctgagaggaaggagatgagaagagacaccttgggggtcaggcaagccctgggaaagcgtccggagttgggcggctgtaggctggaggcataacttggatttggagaaagagtgccctcc

SEQ ID NO: 29427 - DNA, 907 bp, Homo sapiens; identical to SEQ ID NO: 23368
  chr7:94284379-94285286
  hyper

SEQ ID NO: 29428 - DNA, 605 bp, Homo sapiens
  chr7:96621730-96622335
  hyper
cgcgtgtgggcgcggtcctcgccgcgacgccgcgcgcgggtcaggctcaactgcgaaccttgccaccgagctttcccgcgggaggcttcgaatataaccttgcctatttctcgcctactgagatttctttccagaaaaggacattctcctgctccgaggagatggatccctgaggtccccatgcccgcacagggtgtcctggaggagtttagaggacactcctggggcccttccctgtgtagtacgcttattcccgaggtgggggctgagaatcgaagagcagcgccccccacactgggattgggggtggtcgaggggctacagatgcccgcattgggcttcttagcggcctaggctgatgcctggaggtaggggggattgggtttggctggcgactagctttaatgcccatcgagttcctgggacacccaagttcagcacttctgcatgaaaccgaaacggccagggaggggcggagtgggccgaggctgagggagcggcggtgttgacgccctcttcccacccaggatcgatcgatcggtagggaattttttatctttgggaaggagaggtgaggaagcggacctaaaacgaggggaaaattc

SEQ ID NO: 29429 - DNA, 471 bp, Homo sapiens
  chr7:96633059-96633530
  hyper
cggcaccttttctctatttctcagtttccttcggtcctgtaacttatggagtccagaagaagtaggatatacagaagtcctcagtagttttcccaaagggagacactgtctccttcccgcaacctccagacactgcagtacagggttgttagatattagatagtacgtttctccgtgtgggcaaaggctcgcggcttaggtctctaagcagatcgaaagtcggggtccagaccgagaggatcttcaggtctcgtccacccaatctcaagcctctggaagggcgggctgccggcgacctcctccagtcccgggacccggaacccgggaccctggacgccggtgcgggcgggcctgccctcctctgtgcctggcccccagtctggccctcctacctgttgaccaggcctgaaccacgcaccggggctccgctgtctctgcttggctgccttaacctgcgtgggtctggagacc

SEQ ID NO: 29430 - DNA, 129 bp, Homo sapiens
  chr7:97680605-97680734
  hyper
cgggatccggtttggctccgcccccgccctgctgtatccatggtaaccaggtctccttcgcaaggctggaccagtcgccacgacgagctccggggcgccaccggtggcctctctgatggcccgctcggc

SEQ ID NO: 29431 - DNA, 448 bp, Homo sapiens; identical to SEQ ID NO: 8738
  chr8:100796506-100796954
  hypo

SEQ ID NO: 29432 - DNA, 317 bp, Homo sapiens
  chr8:101920213-101920530
  hyper
cggagtgagaagctcttatccgcaggcaggtcatcctgacatctctctgcgagtctagctgagtctgggacttctacgggttttgaagggaggaagtgtgtgctgattggtccatgggtggccatcggcggggctggaaaaaacaccaaaagttctcactcccgcggtggactccactgggaaccgacaggccccaggcctcaggtcgtccctgtcttcaaagtggggcttcaccgggaccgcccctttccacccgggaacctatctgcctcctgctgccattgacaggtttgtccaccgcaatgccctggctatcc

SEQ ID NO: 29433 - DNA, 891 bp, Homo sapiens; identical to SEQ ID NO: 27265
  chr8:110986505-110987396
  hyper

SEQ ID NO: 29434 - DNA, 925 bp, Homo sapiens; identical to SEQ ID NO: 23373
  chr8:114446946-114447871
  hyper

SEQ ID NO: 29435 - DNA, 871 bp, Homo sapiens; identical to SEQ ID NO: 27266
  chr8:114449549-114450420
  hyper

SEQ ID NO: 29436 - DNA, 875 bp, Homo sapiens; identical to SEQ ID NO: 28215
  chr8:11561282-11562157
  hyper

SEQ ID NO: 29437 - DNA, 885 bp, Homo sapiens
  chr8:121136702-121137587
  hyper
cgggtggggaatcagcaggttatgaggtacaaccacacgaaattgcctacattcgtctttttgtaacctacagaaatgtccatttcgatacctccagctgattcccctgcaccttaaagtttgagcatcgctgctttggcgttttagagcccttggacttgttcacaagaggaagagggagaagaggaggctcgaagggggcctttatagtggatacctgtttcactcggagctcagggtctttgacgcgggaaggcaaagtctgtcttttggaaatggggaagtgggcacacagcacctgagaacaggagggctcgagacctcccaaagagagcagggggcctggtttgggagcttgcagtagcttctgccccagtggaagggaaagagcctggctcgctctcggcgcgccacatccggctgccgcgcgcacctggggggaccgccaggttcggggtaggcgagcgcgtgagcggcacggggctggcttctccacatctccggtagggcggggatgggggagaggaggaggagagaaagtgggggcgttatgggcttaggcctgcctcccacctccccacctcccgcctccgcggccaccctccgctctataattggctgccggcgggccttcctttcctcttatctgatcctgggctcccagctggagaggcggaggcagctccagggggctggaagtggaagcgcagcggcagaaggagagggagagagaaagagagagaggctaattaaaaaaggatactccgagggaagagagcaagggcggtgcgccgccaaggaccaactagcggcggagcttcgatcttgcctaggcgcggagagctcccaacctgggctggaaccttgcccagcacaggtcagttc

SEQ ID NO: 29438 - DNA, 57 bp, Homo sapiens; identical to SEQ ID NO: 11904
  chr8:124238881-124238938
  hypo

SEQ ID NO: 29439 - DNA, 308 bp, Homo sapiens; identical to SEQ ID NO: 11905
  chr8:124730010-124730318
  hypo

SEQ ID NO: 29440 - DNA, 73 bp, Homo sapiens; identical to SEQ ID NO: 11906
  chr8:125680364-125680437
  hypo

SEQ ID NO: 29441 - DNA, 340 bp, Homo sapiens; identical to SEQ ID NO: 23645
  chr8:126044399-126044739
  hypo

SEQ ID NO: 29442 - DNA, 997 bp, Homo sapiens; identical to SEQ ID NO: 24662
  chr8:128871653-128872650
  hypo

SEQ ID NO: 29443 - DNA, 617 bp, Homo sapiens; identical to SEQ ID NO: 25915
  chr8:128888848-128889465
  hypo

SEQ ID NO: 29444 - DNA, 980 bp, Homo sapiens; identical to SEQ ID NO: 22954
  chr8:132052356-132053336
  binary

SEQ ID NO: 29445 - DNA, 993 bp, Homo sapiens; identical to SEQ ID NO: 23378
  chr8:132053354-132054347
  hyper

SEQ ID NO: 29446 - DNA, 171 bp, Homo sapiens; identical to SEQ ID NO: 7566
  chr8:134335659-134335830
  hypo

SEQ ID NO: 29447 - DNA, 242 bp, Homo sapiens; identical to SEQ ID NO: 23379
  chr8:140643192-140643434
  hyper

SEQ ID NO: 29448 - DNA, 104 bp, Homo sapiens; identical to SEQ ID NO: 9968
  chr8:141634072-141634176
  hypo

SEQ ID NO: 29449 - DNA, 327 bp, Homo sapiens; identical to SEQ ID NO: 6625
  chr8:142227279-142227606
  hypo

SEQ ID NO: 29450 - DNA, 934 bp, Homo sapiens; identical to SEQ ID NO: 6626
  chr8:142235190-142236124
  hypo

SEQ ID NO: 29451 - DNA, 835 bp, Homo sapiens
  chr8:143386158-143386993
  hypo
cgctgtgagctacggggtagagacgttcctcccaggggggacatggccatacacgcccctggagagcggcatgacggttgagcacagcctcctcctgccagcggtgacaggccctacaacagccccactgactggggtcccgtggcctgggtaaagtcaaagcccccaggtaaacataacaaacttttgaggtaagaggtccccggggcagcccggctggtgtgcccgaggacggagatgtaggagcctgccctcggccctgacagcaaacagccacaggcgagggggctggaggaaatgtgctccctcccacgatgaaatcctccagggcagctaatgcgggcgagtgagatggccaggtggagaaggcaccacaggacgttctgtgcgatgttccctggacttgggggtttcagtgacagctccccaggagctgtgggcagagggtgccaggcacccatggagacctgcctcggatctgtgccttgggattgatgccacctcctgcatgtggagaaggggaagctcaggaggataggggagggcgcaggggtgggaggggggtgcaaacggggttccgtgtggacgcccaggaaagcggccaggctggggtgcgggctgtgtggacacccaggaaggcagtcacactgggatgcgagccgtgtggacacccaggaaggcggcagggctggggtgcgggccagaggagaccccgcaggtgctcggtctccctcacctccacagcgggaggatcgggggcctggtgccgctctccccagcagtgcaggacaaaagccaggggaggaagagatggcttagacgcccgggtccctcc

SEQ ID NO: 29452 - DNA, 943 bp, Homo sapiens; identical to SEQ ID NO: 24670
  chr8:144343416-144344359
  hypo

SEQ ID NO: 29453 - DNA, 231 bp, Homo sapiens; identical to SEQ ID NO: 6627
  chr8:144351704-144351935
  hypo

SEQ ID NO: 29454 - DNA, 227 bp, Homo sapiens; identical to SEQ ID NO: 23649
  chr8:144414263-144414490
  hypo

SEQ ID NO: 29455 - DNA, 209 bp, Homo sapiens
  chr8:144557018-144557227
  hypo
cgcaaggtggcggcgccggctgcctccagacacagttgtcgaggcgtcgccaatgcgattacgggcgccgcggccccaggtgtgcgctcgcccgggcgtgtttgccgtacctggcatcatcctttttccaaaagcgaaacatggtgcttgtgagcaactctcccccaccccacagaaaatcaggggccgctcagccacgcgaggtgggc

SEQ ID NO: 29456 - DNA, 372 bp, Homo sapiens; identical to SEQ ID NO: 27282
  chr8:144589930-144590302
  hypo

SEQ ID NO: 29457 - DNA, 425 bp, Homo sapiens; identical to SEQ ID NO: 24674
  chr8:144636447-144636872
  binary

SEQ ID NO: 29458 - DNA, 244 bp, Homo sapiens; identical to SEQ ID NO: 23650
  chr8:21959595-21959839
  hypo

SEQ ID NO: 29459 - DNA, 334 bp, Homo sapiens; identical to SEQ ID NO: 23651
  chr8:23423722-23424056
  hypo

SEQ ID NO: 29460 - DNA, 995 bp, Homo sapiens; identical to SEQ ID NO: 23381
  chr8:23559353-23560348
  hyper

SEQ ID NO: 29461 - DNA, 988 bp, Homo sapiens
  chr8:23566783-23567771
  binary
cgagtgcctggtctacgggtgtttacaatcatcaccgggcacccacaagagaccctgaacttagaatatttccgcggtaggagttccgcctcgtccttccaggggatactgacgactcgctgggttctcgccttccaagtgctggaggggggaagtagggccacccggggtagaaacctaacgccagaaaccttccagcgccttatcagttggtggaattttcgtggcagacagtcgcgctctacctaagtcgtagaagaaaagacaccttgtgggggacttggcgtcggaagccttgagttcaaatcgtagccctaggtccccagccttgcccttcctggcttgctgcgaggatgaaatgagatttttgtacgtgaaaatgctttctaacccctctcgaggggtggaaacgtctccattcgaccagagtccgggtctgcggagcaatttacccgccgctttccaagagcaggctccccagcgtagcgagtccttgttatggaaagggtcgtttcggctcaggatgcgcgctcccggcgtagacctggggataggggtccctgtcgcgctcgccccacccctgcagggagcaaggccgtccttctgcagcaccgcgccacgcggcgggaatttgcagtgtcctgctttctggtttcagcttcttcgctcgcttgggtctctctcggtcacctctcggaggggcctggagtccctcctccctcctcctacttcagcgccagaagcattgaaagccgcccgcccgccgagagtggaaccggtacctcgaatctcgctcattccgggtcaattggaggcgcattagcggctgccttgcagtgcaacagaggctcgagtgacaggccacctgcctaagcgctggcgcccaggaaagccggggaggaaactaggaagggaggcgacagcagaaaagccagagagtccagagactcctaggcaggcctccgtgcagccccaacagcgtggtgcc

SEQ ID NO: 29462 - DNA, 798 bp, Homo sapiens; identical to SEQ ID NO: 27287
  chr8:25903657-25904455
  hyper

SEQ ID NO: 29463 - DNA, 106 bp, Homo sapiens; identical to SEQ ID NO: 9980
  chr8:26267649-26267755
  hypo

SEQ ID NO: 29464 - DNA, 1497 bp, Homo sapiens; identical to SEQ ID NO: 11931
  chr8:29206374-29207871
  binary

SEQ ID NO: 29465 - DNA, 660 bp, Homo sapiens
  chr8:29387050-29387710
  hyper
cgccatccgtcatttctcggcttcctcccacgcgccttcatgcggatgtgtaggtatctcctctccctggctgagtcaagtcactcagagactgaaaagagagagaggatgtggcgtgaagctgaagcctgcacccagggcctggcacctactgggttgggcttggcgctgcgtgcttgcatttccgcggatagaccgagatggcatctgggctgtgacactggctgcccagcttttcttttctttttttccaacagcatctggaagaggctctgggagggtccaaacaacaaaccacgcggcgttctctggtggctgtgctgggacgagtgggcggaaacagccgcaggtctctctcttctcttcagcctgaaactcactgcacaaataccagaggttttttttagagattagataaatttgcatccttctccccccaaccccgcccctaagccagaggaagtgcttgaggaagtaatgtgtttaaagaatgtgggggaggggagcttacattaggaagcaggactcttagcgtgtagccagaaaccccaataacctttaagctgttaacccttgaggatacggctcaatggtgtacccacgtggagttcattatttatctccgaaagccctgtctgtctctcattccgacccttaaac

SEQ ID NO: 29466 - DNA, 640 bp, Homo sapiens; identical to SEQ ID NO: 22955
  chr8:33371797-33372437
  binary

SEQ ID NO: 29467 - DNA, 406 bp, Homo sapiens; identical to SEQ ID NO: 25932
  chr8:38008224-38008630
  hyper

SEQ ID NO: 29468 - DNA, 824 bp, Homo sapiens; identical to SEQ ID NO: 23382
  chr8:38323132-38323956
  hyper

SEQ ID NO: 29469 - DNA, 132 bp, Homo sapiens; identical to SEQ ID NO: 25935
  chr8:42147407-42147539
  hypo

SEQ ID NO: 29470 - DNA, 1359 bp, Homo sapiens
  chr8:4848968-4850327
  hyper
cgaccgcctccagcctcacgactccgcaaacaggtcacgaattatgccccacgcatcaaaaactctgcgcctgccttcgccacagcgggagccgccacccgggcgcgcgcggcgcagctgcccacggcagtggccgggcgccctcctgccggagcgctcctccccgggaaagccctgctgcttgcaagcgcctccggtgggccctggagcgcgctgccgagccccggggcccagcgccgacgcccccggggggaggcccgaccttggtcacccgggctttgctaggcaaggggaacgcgacgccgccccaatggccagagcgcacaaacggcgactccggcgctggcgtcaccagcccccttcctgcctgcagccccttcccaggccggtacaggagctcgcacttgaccccgcaggcgtggaggagacacggtccctggtccctgtggggttaatgaaggagctccacggacccactgcctcgtgggccagacaatagcgcagtgagagctacgtccgagcgtcctggaccccctccgcgcgcacacacttgcgcacagcacctctccagctccatgcacgccaggggcctgggaccctgggctccacttctcggcttctacagccaggttctgggacctgcagcgcgcaagaggagctctcttccacggggctgccccgcagggcccgaggcgcccaggactttgcaacccctgccctgttcgccccagaatcatccagagcagcccccgcccactacctggccctccacaccctccctcccgcctccgcctcagcctcatcctagcgctgcagcccacccgcgtgggggcggaatccgcccggcacacacgtgtgcggattattaagcagccgagctagggccgccgcggtctccacgcagcaacctctgctaattgcgggggaaggcagccggagcgtgcggaactcgagggaaccgagagtgagctcagaggctgagttgcctgcctggaaaggaggaagccccgggcccagttaggcttggagtgcaggggaaagggcgggaagttttgcggagttgcgtggcaggtgtttcctctccacgcaggggctcggctggaaaaagccaggtcctgtcccttgggctcctgccctcaccccgctgcgacacacacgccccagcacacctcacagggcacaaccctcttttccctagactttagctgcctcgccttccaattcccagccagtccagtgctgaccagaggccgctgccagtcgggccctgctcagcaggcgctgcctccgcagccggcaatgtcagaggcaccggccaaggcatccggactgagccgggcgggtgggcagagggtcggc

SEQ ID NO: 29471 - DNA, 441 bp, Homo sapiens; identical to SEQ ID NO: 23652
  chr8:49571728-49572169
  hypo

SEQ ID NO: 29472 - DNA, 273 bp, Homo sapiens
  chr8:49608956-49609229
  hypo
cggaggtcgggaggcacagggtgtgggtgctgcttgtctccccagcttctccaccgcaccatgtgtctgggtctgtgattaccggaggcgactcgcaacaggcccagactcgcctgtgtgcatagcactaagggtaatgacaactcctctgtgtgtgcaggtgcctgttggagacgcagagctctgcagcagcaggtgagctgatgctgcaacctgctaaacgccgctcctgcggagcgccagggcccagagtgcacatggctctcaggctcc

SEQ ID NO: 29473 - DNA, 199 bp, Homo sapiens
  chr8:53322368-53322567
  hypo
cgcacaaagaaaatgctgtctattcagaactcatttcaaaactcttttcactgagagtgagcgaacaagcgggctcatgtcccgagcccagtcacatctccagcggtccggtgatggccgtggggctggcgccgagtggcacggcctccacagtggcccacaagggtctgttgtccacgccgcgtggaccgcgcaggcc

SEQ ID NO: 29474 - DNA, 331 bp, Homo sapiens
  chr8:54570292-54570623
  hyper
cgcagctcccacccggcctcccctccgcagagctgggaccgtccccccaccccccatccttgctctgtgggcgccgcctgcactctctgaagcgcgaggctctgcacggtgtggggctggggcctttcgctccccttggctggctctctcctcctttgtcatttgcctttgtttgctgtgtgtgtctggttcaaagggcacgcctaccgagctggatagagtaaaggaagaatcagaaagagaaagcgctcagcgcgtgttgcttagcagcacagactcaaaacaggacaaagcaattagagaaaattatcacgggcggaaggggcggatc

SEQ ID NO: 29475 - DNA, 1259 bp, Homo sapiens; identical to SEQ ID NO: 22956
  chr8:55366368-55367627
  binary

SEQ ID NO: 29476 - DNA, 1018 bp, Homo sapiens; identical to SEQ ID NO: 22962
  chr8:61193218-61194236
  binary

SEQ ID NO: 29477 - DNA, 905 bp, Homo sapiens
  chr8:65290524-65291429
  hyper
cgcatgctccctcccgcctcgtgtccctctccccaccctccccctcctctctcccgcctccctaacactgcgctttgattctgtttttcaggggcgcattctggggtctctgcgcaagaccagctctcagctctctctcctttcctcggactctggagcgggagcgggcctttccctcgggtcgaccacgccgtaggggacgccgtgaaaagagccgtcgcgcccgctgcctcctgcccgctgcgcagagggctccgcccgtagaggtcaacttccctcacccttttctctctcctgcttgccctccctccgcccggcccaggcgcttccagccccagactgtggccactggctgaggagtgcgagtcggctgcgctgccctgagcctaatccctcttccgggcccagacccgaggtccgcgctcctgggcagtggggaagctttagtgagcaggcttttctctccgcagcaaacttgtagccagaccagatgggccgcccagctctctcgggactaggcaggtgcggatgagttaatttttccgcattacaaagaaagatgacccagcccgcccttggactctcttttcccaaaatctcccaaccaaacccgcggtaacgttatcaaaggacacagagcccaggcatatctgtgtgtttatcttacaggcacacacgcatggttttctcttttatatgctagatttcatccctgacagcagaaaatgattggcaatggttatgacggagaacatgcaatagcgtggtccttaaaaacctgccattccttacaagtgccttagaaaggattcagggcgaaccaactgggttaattgcattcagtaaaataacacgattacaaaattagatctgtaccagaggggtaattaacttggatccacgcc

SEQ ID NO: 29478 - DNA, 438 bp, Homo sapiens
  chr8:65499649-65500087
  hyper
cgaggagagtgtttgtgctgggacctggcaggactggaggaggaaaggagccgccttccagcaggtccagcatccctaggttgcaaacacaccaaatgacgtccacgcagcactcgcgcccaccgcgctgtttttgcttgcgcagtgctcccgaagggattcgggatccgcatccggagggattcgggatccgcatccgaagagcaccccttctctcaggacttcccctgggaccgacgtttccagtcacccctgcgggcgcaattgtccttcaaccgccaagctccttgggacaaaaagagaacttcaggggctctgcctcaaactgtccttcgagggtggctcgaggatcgggttgtcccctgtatggcagcaggcatgtgggttcacacgcagctgccaggcttgtaagaggcaccccgcagccgcaccaaaccc

SEQ ID NO: 29479 - DNA, 1501 bp, Homo sapiens; identical to SEQ ID NO: 22963
  chr8:67024920-67026421
  binary

SEQ ID NO: 29480 - DNA, 491 bp, Homo sapiens; identical to SEQ ID NO: 23385
  chr8:67026485-67026976
  hyper

SEQ ID NO: 29481 - DNA, 943 bp, Homo sapiens
  chr8:70946701-70947644
  hyper
cgtagacataatctggatggcggagactgaagagtgattatctctaggtggctggatgctgggtataggttggccgcaatgttatttttgtaaggctaggagaaaaacgttattttaaatatacggaatttgctcctctccaaatccactctccctttcgcctccctagaggttgtcaggttcaagaagcggcccggagttgcaggaagggcgccggcgtcactggccccaagagctcggaacgcgcgcgccgcaggagtgccggctgcggggtcgggttgagactggcgggaccctcggcctctgccggggtgcggaaggtggatgctacgggcaaaggggcggggcttgcggttcccagatccagaggcgggttggggacgtgagccggcgtccatgtgttctgcaccccttctcgcccggtgcctctctcaaggcacgttttccaaagtgtgttgaattcgggaatcgatcgaaaatttcaaggccaattaaatgccctctgatgtagagctccgattaggcccgaaaggcttcaaacagcccctctagaccctcgagggtcttcgccgcggtaaccttaggcgtcccctccccgagaagtctccctgaggctttcacagagggcgggaggggctgcgctggggcctccgttcccagtgcccctgactggtggggagggatggccttagtgtctgagagcagagaccagattgactcccacttgagaccagaaaacgaagaggaagcggaacccgaggtggctgcggctcccccgggacacaaccgggagaggaagtcctggccatctgccggccccgcctgggggcatctgctcgaggatccctgggagccgttatcgtattcctcagaatctgccgtgctgtccctccgcccccaaaaccaacaggacacccattctgtgattctcttcttctccatc

SEQ ID NO: 29482 - DNA, 860 bp, Homo sapiens
  chr8:70981729-70982589
  hyper
cgcgtactcgtggctgctgctcaggaagggcggcacttccctggggacgtggggaattgggtaccacggtggcagcttgctgtaccagggcagatcgtagagaggctccctctgtaggcccagacccgggctcagcaagggaggcgccatccggaaggggaaggggggcatggcgggggcagcagacgctgcggcctccagctgccggaaaggttggaagtcttcctccacggtggccaggctgtttctgtagtgtccataggacgggaaaggcgtgtagtacgcggccaggttctgcgggctgctctccggcgggtagcacaccttgtcctgaggcacggcctcacttggccggggtagagccatcccgggaccgcacgctcggcggctctgcagaaaagcgggcgccgctgaggacaccgcgcgggagcttcccggggtccgacccgcgcctccccaccagcctcctccaccccagccagccccagatccaagggaacaggataaacgcccccagtccgatcccgccagcccgctcccacaattaagacaaaacgaaaaaacagcaatagaagcaaacacaaaaaagccccaaacggaaatctgccgggatcctgccctactctaaattccgggttagtgttgccttccccttccctctccaagcaccccttccctaagcccggccgccttcccacacccgctctccgctttcggcccccaacccggttcctgcaaaacccattgaagttccctttccttccttcttctcagtcctacaaaactcgttggtagggtctgtgggagccgcggggccctgccaacctcggggctgggccgggagccgagcgcaggcggtc

SEQ ID NO: 29483 - DNA, 232 bp, Homo sapiens; identical to SEQ ID NO: 23653
  chr8:71447942-71448174
  hypo

SEQ ID NO: 29484 - DNA, 369 bp, Homo sapiens; identical to SEQ ID NO: 23388
  chr8:81478144-81478513
  hyper

SEQ ID NO: 29485 - DNA, 864 bp, Homo sapiens
  chr8:97157277-97158141
  hyper
cgcatctctgcgaacaggttcttgcgctgggatctggtgaataccaccagcagggcccgctcctggggaggccgcaccctccggccgaagcccagactccgcaggtccgggggcggcggttgctggggtccccgcgcgcgcgcctcggcctccccggcgtccagctcgccccatgcggcccgcagctccaagcacagctgcttccagggctggtggcgcaggccctgccacacgtcgaagacttcccagccggccggcggcgccccctgcgggtccagggtccgcgcgtccagcagtaggggcgaaaggcaagggaagagctgcacgtggagcggcccggctggtggcccccagggcgctgagggcgcctggcgaaagagccgcagctccgcgcccaccagctcttctttgtctgagagcatggacacatcaaacaaatacttctgtctccggagaggagtgtgcgagagatcgtctgcgagataaaaaataattacagtcagtttcacttaagggggagatcagcccggtgctcttcggccgccccgggaggaaaagggcggggagtgggggcaggtcggccgggcagtccagcttgcccggcccagggcctgaccaccccggctccccatctggctggtgcatggcgcggggaagggggcgcgccaggacgggccccctccttcgcgtcagctccggactctcagggcggaagtcggtggctgctggcgaggcggcggcggcggcctaccgggttttccccccaaaaggcttcgtaaccactaatgtgccctttgtggtctcaagcctgggccgcgtttcccctagacctcctctgggctgggctggctcgttctcgttgac

SEQ ID NO: 29486 - DNA, 980 bp, Homo sapiens
  chr8:9762601-9763581
  binary
cgacccctctcctacgtagacactgtgaaagcaagccacagggacaaataaaagacaatccgaataccctcagcgttccgcacgccgggcggacgcccttccgcagcggccacgcgtgttctgggttcagcgctcctgcgcgtcccttctcgccgaacccaaggtgctttgtcccggcggccacacaaggtcttcggctttttgttctccttttttaagagactggccgcagtccccagcgattcagccggcccaaccaaaggcagtggatctactgaaatgaaaaggatcgagataatacacaggcagatgaataaggggggggatgctggaggtgcaggaagcatcctgggagcggccgccacggccaagcccgaactgcttgctgccttcgctggggaaggcgcaggaggcgagccggcgctggtggtcgctccacctggcaggaggaaatgataaccatgataaggaacgtgatgatgatgatgatgatgatgatgatgatgatgagcatgatttaaaaaaaatcagtctccctcttggtgaaccagagcatgcgtgccggagggactgcactgctggcggcggcggccgggggaaggagagcggcgcaggaggcaaaggttgaggaggcagcaccctcggatgaataataacaccgcgccgcgcaagttgcggagccgcctggaaatccagcccttcgcgtgaactcgcgtcgagcgcggattgcaggggatgaggaagaagggggaggggaggggagggtggaggagggagggggaggggtagaggggaaggcagagagggacagagagaattgggagccttttaatttttccttaccaagccctaatctcgtgcgccgtcctctttggctgaggtcgagctcctttttaaaaattattactcctttaaaggattattcaggtaaaggaagccgcatctgctgacggttccgaaaacaagaggattaggagccc

SEQ ID NO: 29487 - DNA, 1474 bp, Homo sapiens
  chr8:9763598-9765072
  binary
cgcagacccccaccccctctgcaccagcacacgtcattctcactgcccccgggtacctccctctccttcgtgctcggggagagctgtgccaaggaaaatgcggatttggggaaagtgagaagtgggagagctcggaagagcgggaaagccaaggccggaggtggcgattcgcacccccacactcacacgcgcttccgtttatccgtttctatcccgggaaaagggggcgcctgcccgagcccacgcgcgccgccgcatctgcagcggtcggcgccccacgctccctgaacgccccccaggcggcaccagtgccgggcagagtcccctcggcggccgcgggcgtcaaatcgacacctgactccacagctcccttccctctcctcttcttccacctccccgggggtccaggcaccgccgtgcgtccactcccggtctccacggcttaggcagacggagtgggggactccggggacccgcgcgtcctctcctcctcggccctggcgggaggagccgggctggggtttccgcgggccgcggcgcgttttagggctgccggggactgcggcggatgcggttgacatcactgcggcggctgccgggccgctgcggcgacctgagcgccggtgcagcctcccccaccccgcctgggcgggcgtctgggcaggacagctgcggggggttgggagaggagtcggggagagggggacgatcgccccatcccccgcccccccgcagtcaaggtgaacatgaaggagagccggcgcgcgtgcccgcgcctgggaggcgcgcggccccgcccctcccggagccctccagcgcgcccgggccagatggacgcccgagattagaggcgcagaagtgcgctccacgacgggcccacccgtcccgcggacatcagacctacttcggggaggcgccttttgttgtggtggccgtggcggtgtttgtgtctttccgggagcacagggtgagcttggccttcaggaatgactcagaatgaatccgcctataagagccaaactaaagacgaccccccgccccagccccccaaccataacccaacgcctgccatgagaaaccttcggactttccaaggggtcagtgcctcagccacgaggggcagccctgacccgcgcggttcacgcacacgcagggcccatctgcttcccctactccggcttttcttctctgatgacttaaaagagagtgagtgagggagagagggagagagagagagaggtctaagtgtttcttgggcactgctggattcagggcaactagagatggggagaacaagccccgccagctaaaagcagccctgctgaaaccacacagcccgcgagggtcgcagcagaggcgcccacccagcaggagtggctgcacgaagggtgacccgggcgaggcccttctcgcttcgaggccatttcggctcttgtcaattattgggtgtttgtcccaatataagtagaatggc

SEQ ID NO: 29488 - DNA, 816 bp, Homo sapiens
  chr8:99985860-99986676
  hyper
cgtgtccatgaagcctctccacgtggccgacttcccttagagaagtcccacaagccctcagccctcacagcctcgcccgcgacgccgtgcccacccctcccctggcagccccgagactctgggcgtgtgcttcccgctccccgagggccttaggcccagcggacgcccggccggagcctgatgccggcggcctccccctccctcagcgaggcacgcgcgtccccaggaccgccggtgccggggcctttaaccctggccgccgacgccgcggggaaaggaagcttctgcggctacagatggcgcaggccccaggtcgcagagaagccctatccaactctgcggactggccctgggagaaagggcccgggagttgcttctccagtcggtgaacgctccgttgagccacgtctatgcgcttgctcatggataagcgcactgggggactatactgcagtgtgaccgccagtgtccccagggaggctgcggaaaagtagaggcaatgagacccgagcagaaatagggacttctcgcggcagtccgcacggaagcagctggggagcatccagctcgaccctccccacaggcccagggtcgggacaccgagggaaggcgcggcgcgcgcggcaaggccaggggcgcggggctgggctcggccggcacaagtgctcggaccgcggagcgtcctcggtgaggcgttcggtatggattgggtaggagcggccctgggcgatgggcctgacgtcggtgggcgcagttgaggccactgcaaggccgctggatcccggatccgcacccgagacggagcgggggccacac

SEQ ID NO: 29489 - DNA, 1595 bp, Homo sapiens; identical to SEQ ID NO: 27316
  chr9:100610054-100611649
  binary

SEQ ID NO: 29490 - DNA, 150 bp, Homo sapiens; identical to SEQ ID NO: 10003
  chr9:100849678-100849828
  hypo

SEQ ID NO: 29491 - DNA, 776 bp, Homo sapiens
  chr9:1051528-1052304
  hyper
cggcggccggtgggtctttggatttctttgtgtttccccagagtgagggccgccaggctcaggccccagcgaagccccgagcgccatggccgacccgcaggctggctccgcggccggggactgggagatcgatgtcgagagcctggagctggaagaggacgtctgcggggcgccgcggtccacgccccccgggcccagcccgccgccggcggacggggactgcgaggacgacgaagatgacgacggggtggacgaagacgcggaagaagagggcgacggcgaggaggcaggcgcgtcccccgggatgcccggccagccggagcagcgggggggaccgcagccgaggccgccgctcgcgcctcaggcctcacccgccggcaccggtccccgagagcgctgcactcccgcgggcggcggcgcggagccgcgcaagctgagccgcacgcccaagtgcgcgcgctgccgcaaccacggcgtggtgtcctgcctgaagggccacaagcgcttctgtcgctggcgcgactgccagtgcgccaactgcctgctggtggtggagcggcagcgcgtcatggccgcccaggtggcgctccggaggcagcaggccaccgaggtgcgtacccgcccggcccgggcgtctcaggccacagtggaggtgggggagttggaggggagcggggcggccgtccacaccccccgcgcccagggccttgcggtgcctggcactccctaggaaggatggtaagaacgcttttctgcttgcactggcgagcagggtc

SEQ ID NO: 29492 - DNA, 837 bp, Homo sapiens
  chr9:110227818-110228655
  hyper
cgtctattttcacgttagccaaagggaagcctagaagtccacagtccccgggagctggaagccaggcagtgacagcgccagcgtattctccttgacttgattgtaaatttcacaactttggtagcttcaacagggaggaagaggaggggcgccggctccctccagcaaaggcggcgcggagcgggtagccaggtccggagccgtcctgtgccgggccgtccggtggggggcactgcagaccgcgcgggcgctgcgcccgcctctagctccgggcgcagaggggtggccacgctctcctgagtccctcgcgcccctagccgcgcctgggagagcggactggcctcccagagaggatgcgggggaagccgcacaggggcccactgggactgggtaagggcgcgggatgggatcggctctggatatgggtgccccccgagccgcgccccaccccgcgagcgctcccatttgcacctccacttgagcacggagcttcaagaacgagctattctggggtgcgggttccgacactaggccccacacggatctggggactggtttggctacgacctggcggaaggggggaaacctggcctgagaacggaaactgcgggacgatccggcggcgcacttaaatctggctccgctgcttcctcgccccgcccccgctgtcaccttcctctgcttctgcgcagcgattccacaccccactccaccccatcccacccagaccgctcacccgattctgactttgaacccaaaagcgatcaggcgtgttctgggcccggccacagccagcgggcgctctggccctcgcagaagccgccgcaagcgggcatc

SEQ ID NO: 29493 - DNA, 638 bp, Homo sapiens
  chr9:110399862-110400500
  hyper
cgaggtcaaggtcggggtcagggtcggggtccggtcgtacgccctagcactgcctgcggtggggcgcgcacagtcgagcgcggggcctccccgcaggctgcgctgcctgccgggcggcctcgggaactgaccaggccgcgtgtgagcgccgggattcctgatcctgccttaaatatgccggttatttttatctccctacgtcaggcagcgaaggccatcccaccggtggcccaggcggctgctacacaatgtttccctttagtcgggaggggaaatggagggaggccagacttcctgatcacatggtgctgaagtcaatgaaaaaaaattaagggggacccctccctttttcttcaatgcctgatccagattcccccctccccgctcccccgacccaccccctctgggctccgcgcgtcggagggaagcgcagcctcccaggcggagggccagcgaggcaggagagcgcgcgcaaacataaacacgagactgttgcagtaattggtggctctgaaaacactgaggaaatgagaggcttgtacgaaacatcagccgacaagaaacggggtgatgtcagacagccttccaggattagaaacccttaaaagctccgagcccgcggccgctgcggaaaactc

SEQ ID NO: 29494 - DNA, 126 bp, Homo sapiens; identical to SEQ ID NO: 6637
  chr9:123176142-123176268
  hypo

SEQ ID NO: 29495 - DNA, 60 bp, Homo sapiens; identical to SEQ ID NO: 11949
  chr9:125986796-125986856
  hypo

SEQ ID NO: 29496 - DNA, 1461 bp, Homo sapiens; identical to SEQ ID NO: 27324
  chr9:126779491-126780952
  binary

SEQ ID NO: 29497 - DNA, 411 bp, Homo sapiens
  chr9:127212652-127213063
  hyper
cgaggggcggggtctcccgggccgaggggcgggatctcctggtatctgccagagcccgccgctgcctccccgacttcagtccccgcagatgcctcgcagacggtgaacggccacaggcgccaggccagccatagcgggtgaggaactggagctgggaacaggggagggaccagcggatgaaggggaggcccctgactcaggcccattggcgcctcgcggaggagggacgcgcagtggtgggcaaacttcgcatctccctctcgggcctcaacgagtgtttggagagcaagaaaagtgggcgccagggggcttgagggcgcgaatccaggcagacgtgaacgagggagtgcttttcagaatccaaaacgcgggagcctcccagtcctccggtgaggggcgtgttggattttc

SEQ ID NO: 29498 - DNA, 454 bp, Homo sapiens
  chr9:131872473-131872927
  hyper
cggcctgtctctgggtctaagggtgggggtgctaactgaagccggggtcccccttgtctttcctgggtcgttggaactgaatgctccaggacgtgggtttaatcccgcttctgaccttgcgccccaatctcctgctctgccaaacctgggacgcccgcctgaccccaccccatcagctggaggccgggtcgaacagcggccgcaggacgcggtctccgttcccggacgcaaccgcacggcccgcccaggccgtccagggccctcaggcccgggatccgccgcactcaccacggtcctggcagcgaaggctaacatcttcgctgcccgtccgcggacacgcagtccgctccgccccacacaccgggcaaagtccgcgccgccgccgccgcggctggggtcggtgggtccttgctagagccttcgggccaaggtcgctgagttacagccgccagcc

SEQ ID NO: 29499 - DNA, 258 bp, Homo sapiens
  chr9:132643756-132644014
  hypo
cggggcgtgggtggggaaggggctctgggaccagaccccccacactactgcgtctttgtttctatcagtctttgtagaagcaggtggtggtggaaattccagcaggtgggtcccgcagaggccctgaggcctcacttttcggatcttctgtcccagatcctgctccctccctgctgagcctggggttcccctggcattggccccagccttctgaaagccggcgctgcagccagaggccgcacgctgcactgtcgcgac

SEQ ID NO: 29500 - DNA, 203 bp, Homo sapiens; identical to SEQ ID NO: 6640
  chr9:135781263-135781466
  hypo

SEQ ID NO: 29501 - DNA, 574 bp, Homo sapiens; identical to SEQ ID NO: 11954
  chr9:136385211-136385785
  hypo

SEQ ID NO: 29502 - DNA, 1254 bp, Homo sapiens; identical to SEQ ID NO: 24716
  chr9:138660497-138661751
  hypo

SEQ ID NO: 29503 - DNA, 277 bp, Homo sapiens; identical to SEQ ID NO: 23657
  chr9:138743599-138743876
  hypo

SEQ ID NO: 29504 - DNA, 463 bp, Homo sapiens
  chr9:138780573-138781036
  hypo
cggaaataattccaactcaaggtaaaagcgaccagtagtccacgccccagctccatcctggagaggccagacacaagggtaagaaaagctgatgtaatggtccccacagggccaagaccacctgacccccacccagggacaaccagtaacaaactgcaccttgacagcggagcgccaggtgcacagacaagcacacaccccacagggcgctggcccgggcatgccacaccaggctcaggtgcagacttggcttccagccagaaggccagcaagggagaccctcgggaaccctcagagaggggagaggatcccagagaagagggggctggatagggagaccctctaaatctgtgtcacatcctggccactcctgaagcaactacagtggcacagcagccactctgagggccacagcccacagcccagccagagcggcaggacgaagaccgaaaatgaaacctac

SEQ ID NO: 29505 - DNA, 246 bp, Homo sapiens; identical to SEQ ID NO: 24717
  chr9:139000411-139000657
  hypo

SEQ ID NO: 29506 - DNA, 216 bp, Homo sapiens; identical to SEQ ID NO: 11958
  chr9:139106812-139107028
  hypo

SEQ ID NO: 29507 - DNA, 568 bp, Homo sapiens; identical to SEQ ID NO: 23658
  chr9:139110897-139111465
  hypo

SEQ ID NO: 29508 - DNA, 123 bp, Homo sapiens
  chr9:139546468-139546591
  hypo
cggctcagcagtgtctcactgtacggatgggccttggcttgtcaatgcactcatccgtggatgcgcatccgggtctatccacctctcggctcctgtgagcacaacgctgtgtgtacattgcgc

SEQ ID NO: 29509 - DNA, 174 bp, Homo sapiens; identical to SEQ ID NO: 11961
  chr9:139730175-139730349
  hypo

SEQ ID NO: 29510 - DNA, 309 bp, Homo sapiens; identical to SEQ ID NO: 11962
  chr9:139803935-139804244
  hypo

SEQ ID NO: 29511 - DNA, 344 bp, Homo sapiens; identical to SEQ ID NO: 11963
  chr9:139804283-139804627
  hypo

SEQ ID NO: 29512 - DNA, 485 bp, Homo sapiens
  chr9:139809677-139810162
  hypo
cgaaaactacaaaaaaggtgcattctgagacgtcagagggaaatgtgtcaggctccccgtccgcagcgccgtgcggtcgttcagaaatttgcattcccataagcattgtgggagcaccgtctcccgagacttgccagcacagtgtggtgtgaaggttggacgtgccactgtgatgtgtgagaaacacatcagtcctctgtatcgggggtccacgccgtggatccagccaaccgtaggttggaaatgttcaggtaaaaatgcactgaacacgcgcggacattttttattgacacagcgttcacgttgtattggtcatgagtcaccgagagctgatttcaggtatgagggagggtgtgcttaggctctgtgcaaacactctgccatcttccatcagggactcgagcatccttgggtttcagggaccctgagaccaacctcctatgggtggcaagggacagcagagcctcgaggcggttctgacgggc

SEQ ID NO: 29513 - DNA, 318 bp, Homo sapiens
  chr9:139818341-139818659
  hypo
cgtatctacctgaacggcgacggcaccgggcgaggaacacacctgtccctcttctttgtggtgatgaagggcccgaatgacgccctgctgcggtggcccttcaaccagaaggtgaggccgtccctgcaggcttcgctagggccgcacctgggagtccctctgggcagtgcagcttctgtggtgcagggttgtgcgggacaaggtggcttgggctcgctggaccaggtgtctgcagcaggcacgtcaccctgtgatgctgtgtcacgcggtggagagctctggcagtttgttgtttccatgatttctgagcactggtcc

SEQ ID NO: 29514 - DNA, 2601 bp, Homo sapiens
  chr9:139834961-139837562
  hypo
cgtgaccggccgctcccaagccccgggcgcacaaccacagccaggagcagcccctgccaccactgggccaccgtccagggccccacaggaccagccgaaggtgccccgggccgaggccagctgggtcaggtgtacccctagcctggggttgagtgaggagcggcacccccagtatcctgtgtaccccaagttgcccaggaggccgagggggccttgggctccatctgcactggccaccccgtgccaagcatcacagctgcgtgagcaggtttgtgtgtgagcgtgtggcggggcctggttgtccccttcctaaggcgtaactgctataagcatctccacctctcccgctcgggaaaaagccacagagcctggcgatgtcctcaaggggtcccggtggctccagtgcacccagcacacctcagcgcctctggctggcaagccaggagaagaaggtgcgaggccgtgggcgaggtgcctggaggacgcgcatggtgcgtggggagcgccaggctttgatggtggcgtcgtcgctggccgtgagcagcagctcctgctcctggggactgaagaccactgagttgaccacatcctcgtgccgcagcctggccagacagatgttgtagtggcggtcccagatgtagccgtgccggtcctccgccccgctgcagaacagcgcctgggtgagccggccgcccgcccgctgctgcccacacccgccctgcaccacgccgcgccctgcacctggccacgaagtccctgctgacgtccaggaagatgaagaagcactcgtcgttgggcgtgtaggcgcggtgcgcacgcagagcccgcctcacctcccgcatggtcttgaggtcgaacaccagcaggtcaatctcctccgcgattggtggcggctgcatggggtcggccaccaccgcaccgttgggccaggcgcggctgttcacgtacaggtacctgggcgaggggcactgtgctaggtgtgggccgcctgcgggcaccccgcctgggacactggcaagaggcccacctgttgtcgggcgacaggcccatgccgatgatgtgtccgtgtatgtctatgacgtggtccagcgcgtcgaagaaggcatcggagccccggccctcacccagcacgggccctgccgtggtcatctggtgtggcaggatctgcttgatgcctgcagggagggctacggtgagggtccctgtccaatgccccaaggacatcactccagggcagcttcctacctcagtggtgtctctggggctgtgagcaccacagaggtccgtgggcactgcctgctccgggggccccagacctgaatcaggcccgtcggttgcttgctggccagcggccctgcctgcgtttgttttcactgctcatcccacaggccccaggtctgggcttgtgaccccaggggcgagtgaacgatcccagctttgcctgtggacttgcttgctgtctgcccctcaggacccctgcccggcctcccccaagctcctaggaccgaggcgggcagcatggcggcaggggtgtaccgatctggtgtggggagtaggtgaggcagccagtggtgaagatgaggtacttgctcttggcgcctgtggcactgcgctcgggtggcttggtgtggccctgggccagcagctcggccaccttggtctctagcatgcgctccgacagctgtggctgcgcccgcccctccagcacgcggtccagaaagtgccgcaagccctccttggcgtgggcgggggccgggccagccaccacctcctcgttgtcgctgcccaggtcaaagatgcggcagggggacgtggccgggtcaccggcttccagcagcaggtcagggctgtcgaagcggctgcagtcggccaccatcaccgtgcggacggtgctggcattgaggttctggatcttgaacagccgcttcaccacgttgacgttctctgactccacatcctgggggcgggggcacgtgccaggtgggcgccgggcgccaggccccaggagggcagccccgcccctagccccgcacgcacctggaaggcattgttgagccacagcaccgagcaggaggtgatatctccgatgcggtgcaggttccccgagatgaggctggtctcggtgagccaacagccaaacacgtcatagggcttgttccgcacgcgggacagcagcgcgaaggagtctgtggggaggccggggctggacaggctgtcggcgtggggcgggggcagggtcaacccgccgcccgtgctcacctaggctgatgacagcaatctcgccggatgaggagttgtgcggccccaggaacacccccgaggccagcagtagcgagtcgtccttgttgaactgggagaactgggtgtagctccagttgtagggccgcatgtccgcgctgtgcagcagcgagatggtcaggtcgttgctccagatctgttcggcaggggcggctgtagtgatcgcctggccaggtcgcggggcgggggcctgctactacacagccatgaggccccagctctgccagccctactcagaggccaccagggagcagggaccccttccagccactgtcatccactcggggggcattggtatagagc

SEQ ID NO: 29515 - DNA, 42 bp, Homo sapiens; identical to SEQ ID NO: 6646
  chr9:140166945-140166987
  hypo

SEQ ID NO: 29516 - DNA, 249 bp, Homo sapiens; identical to SEQ ID NO: 11969
  chr9:140582119-140582368
  hypo

SEQ ID NO: 29517 - DNA, 581 bp, Homo sapiens
  chr9:140707377-140707958
  hypo
cggacattttataaatctcatctgtatcacattttcaagtcagctttaaatgttttgtggccttacattttcccttttagcctctttctttctcgggattcagatgtcaccttaaagaacaaggaaggagagacgcccctgcagtgtgcgagcctcaactctcaggtgtggagcgctctgcagatgagcaaggctctgcaggactcggcccccgacaggcccagccccgtggagaggatagtgagcaggtgagcccagccccaggacggctttgtggcaaatcagcggtcagcagggctttgggaacttgcggtgaaagctgctcctgaagccgaaacatccccaggctgcagtccaaattgtcagggccaggtgtttgccagccgccccactgcacgctgtgccaccccctgggcagagcacgtcagccaccaggtgacacctgtcctttccatggcagggacatcgctcgaggctacgagcgcatccccatcccctgtgtcaacgccgtggacagcgagccatgccccagcaactacaagtacgtctctcagaactgcgtgacgtcccccatgaacatc

SEQ ID NO: 29518 - DNA, 947 bp, Homo sapiens; identical to SEQ ID NO: 23663
  chr9:140708213-140709160
  hypo

SEQ ID NO: 29519 - DNA, 497 bp, Homo sapiens; identical to SEQ ID NO: 23664
  chr9:140727446-140727943
  hypo

SEQ ID NO: 29520 - DNA, 734 bp, Homo sapiens
  chr9:14348305-14349039
  hyper
cgagttgggttctgtagtaactaccgggggtgaaaaaaaaaaaagaccccaaattggctgtgagtttacagcctgaagcagcttatttaggctcgctgagcgccgttccaaacggcagggctcacgctatttcgggagaagttggagggtggagagaaaacaaggttatttaaagtgactcccagaacgcagctttcgttcctagactctttaggtgtcagtgcttcggctccagtttagcacggcacaggcggcccagcctttgatatttaagccaggccagcgcccgggtgaaactacctgttgggggattctgccgcctggaacccttcttcttctgcgcaatactggcagcagtgggatggctctgggggtgccacgcgaagagagagggcggaagagccgggagcagcggacagtcagctgcatgtggcagtgcctagcgagctgctcccgcgcctctgctcgctctttgaaaactggaaacagccccctgtgctctgtgctgggcccctggctgcggagatgggcccaaactcggcacgattctctaagttcggaaaccacgaagcttgcgccttcatgcgtgtctaacattaaaaacaaaaaaacctcctggcggcttcctgggctcccgcccccaccttgcgctccaacacccggcacttttccctgtaccgaaattcactttactacttcttgaaattcggaaaactccaccgacgcttggactc

SEQ ID NO: 29521 - DNA, 224 bp, Homo sapiens; identical to SEQ ID NO: 6320
  chr9:16133902-16134126
  hyper

SEQ ID NO: 29522 - DNA, 155 bp, Homo sapiens
  chr9:16154671-16154826
  hyper
cgcagctcctcgccgctcggccatctggcgcgctcccgctccctccacccttctgtcgctcacctggtggagcgcggcccggggacggcagggggcggctgtgcggctccgacgccacgctggtgctgcagcagcaagcgccgcgagccagccac

SEQ ID NO: 29523 - DNA, 138 bp, Homo sapiens; identical to SEQ ID NO: 11977
  chr9:16192269-16192407
  hyper

SEQ ID NO: 29524 - DNA, 430 bp, Homo sapiens; identical to SEQ ID NO: 23396
  chr9:19127135-19127565
  hyper

SEQ ID NO: 29525 - DNA, 435 bp, Homo sapiens; identical to SEQ ID NO: 23397
  chr9:21395928-21396363
  hyper

SEQ ID NO: 29526 - DNA, 383 bp, Homo sapiens
  chr9:2177846-2178229
  hypo
cggccagaggtagatttcttaactagcatatcagccttcagcatgtctctaagcttaaaatataatcaaagctaaagctgacatttatgtaaagtttataatgtatgcagtcaccagtttagagtcatagtatagatgtggaattatacttttggtttgtggaggtaatgaggaaaaaaaaaaacggttcccagatgaagcataacaaattaaatctcagtagtgtgtgtatataagccatgcatacaaggagttcaaactaccacttgcacagtggtatgtggctcttttccatctcgtactctatggtctcatggccacgtcgcggtgtctgttcacttccatgaagaggagaggttcttgtccaccaacacctgtgaacc

SEQ ID NO: 29527 - DNA, 964 bp, Homo sapiens; identical to SEQ ID NO: 23399
  chr9:34701373-34702337
  hyper

SEQ ID NO: 29528 - DNA, 894 bp, Homo sapiens; identical to SEQ ID NO: 6325
  chr9:35756575-35757469
  hyper

SEQ ID NO: 29529 - DNA, 857 bp, Homo sapiens; identical to SEQ ID NO: 23401
  chr9:36036762-36037619
  hyper

SEQ ID NO: 29530 - DNA, 1370 bp, Homo sapiens
  chr9:37026705-37028075
  binary
cggggtctctctcagagcctccctgctggagaccgcccggagctgcgcggagaggcgggaaatggtgctagcgcacccgggctaggagcgggtgcccaactccggctggcttccctccctggctggctcaagcagcagctccgggcccagcccggggtagctgcggccaaggcgcccgcggcttcgggggcatagcgtaggggcccgcctccgggacagccagcagcccccggccccaggaaggagcagctttgaggaggccgccggaacaatcggcccttgacttcactcagggggcggagagacccgggggctgccaggctggttccgcggcctcgatgcttctgaggtccctcctcgacccctcggtctccgccagatcctttctttctctgcttctccgagtctctggggctcggacttgccccctccgcctctctccaactggctctccgacgtctcggacgaagttgcaaagaacttcctctccggcagcgcggggtcctggcgggtttggagatgcttccgcccctgacgctggggccgcgactccggagtccccgggagcgtgcagccctccaacactgagacccgctgccttcaaagttcccgcggcccccgctgctcgcccatcgctgggaccaggaacggggacaccagcgacggactcttcctcgccggggtgtctacctcgtgccaaccaactcttcgagccccgccgccctccctcgtgggtctgattccactgtctttccgctgcctcttccgggacggccgccgtgcctgccccaggcgtggagtgaggaacagaggagagagcagagggtcccagccaccaaggccgccggggctgccggggctgagatggagccgcagtcggctctgactgcctgcgttgccgccgccgccgccgtcgctagccctccgcctgctcggcgcgcacagtgcgccaccgcgccgccccggagccgctttcaggacccgctgcgtgtggacagcgccgcccggggctcagctccctccgggcgggggcggggcgggggctaacctgccaatcacgctccaccaagccaatcagagtggcgtcagccggccctggcccgaaacaccgccccattggctaagcagcccacaggctccgcctgattagcggacacctgggcaatgggagagaatggggggcggggcccaggcggcggcgccacgttcattgacaaacgcgctggactaaggcctagtggatcgcggctgtggggaggggaaaggggcccacgcagtgcctggagagtcccgctgcgggtcccacgcgggctggacctccccacagcgatgctgggatcctgggacgctctcaaggcttgagagcagtc

SEQ ID NO: 29531 - DNA, 61 bp, Homo sapiens; identical to SEQ ID NO: 10024
  chr9:37118798-37118859
  hypo

SEQ ID NO: 29532 - DNA, 163 bp, Homo sapiens; identical to SEQ ID NO: 10026
  chr9:74640002-74640165
  binary

SEQ ID NO: 29533 - DNA, 512 bp, Homo sapiens; identical to SEQ ID NO: 23404
  chr9:79626891-79627403
  hyper

SEQ ID NO: 29534 - DNA, 334 bp, Homo sapiens; identical to SEQ ID NO: 23405
  chr9:79636205-79636539
  hyper

SEQ ID NO: 29535 - DNA, 600 bp, Homo sapiens; identical to SEQ ID NO: 27350
  chr9:79637630-79638230
  hyper

SEQ ID NO: 29536 - DNA, 1264 bp, Homo sapiens
  chr9:93955385-93956649
  binary
cgtgaaacacaacgtgagaatgggaatctgacatatgagtaacccggccgagaggcacctcttggaaatgacactgggccttggctagaattacgcacaggccctgggagggctgcggctcgtaggcccgtagggggcagggtgagggcggaggtcctggcgcccccaggcctgacccgcccgcaccgctgggctatttttagcgtccactaaacttagccgactccaccctcttgaataacccacatcttaaaatgctatttttctccaacaggtcaaaagaattctgcgagttagagcgcagattaagttgctagcgacgggcattgaaggttttagaaccgagaaaatgagccggtggcggggagcgcgtcctcagcggccaggcccggcacggggctcgggcactcggggacacacggtggtcgtcgctgtgtctcagcaggaccctgtgcgctggagagcttggggccgcgagtcgcgcagcaaggaggcttctggcttctctatttttagcctctgaacgttttccaaaataattaccaaaaggaaatacacacgcacacatggacctaacacacaaaacgtccttctgcgggaagccagcactaggaaagaaaaaaaaaaaaatccgaagtgaaattatgacacagggttttgtaacccgcggtggcgcgcttctgaaacccgagcccggcagcggcttcttatctgcaccgcgttccaggaagcagccggcgtttcggccgcgcaagggcagccgccgcacgtaggcagcgtcccccagcccgggacccgcaggaatgcgaggggcaagacagatcgccggaggagcaggggtcagaagtcagtgtttaaccactcactggctttcggtgaagccagaatgttagcagcgagtcgcggtcgggggccttggggttgcacacgcttgctccaagcaccgaggctcagctgagcacatgcacaaccctctcgatgcagcggaaagtcgtgtggcttagggccgcaccccgaatttcgccgcacccgccgctgtgccatttacaaccccccaccccgccactgctgtcacgtagcaatcaagagtaaaggttatcacaaagtctgttcttcgaaggaaagagttggaatcaaggacttcggacgggaggaagttggtaagttaccgcttcctccctcctgttttcctctccttgtttaacttctcacaagaacatgtggcagcgctgcaggttaactcatcttacataacttcggggcc

SEQ ID NO: 29537 - DNA, 370 bp, Homo sapiens; identical to SEQ ID NO: 11989
  chr9:96069038-96069408
  hypo

SEQ ID NO: 29538 - DNA, 1252 bp, Homo sapiens
  chr9:96713161-96714413
  hyper
cgggaaggcaactgagacctccatgagaagggggcacctgagagcacatgcaaccaagctgtgtccctgcaagggaccaccctccctaggccggtgtcagctgagtcctctctctccgtcggccaggtgccctcactgcccagaggtggaactcagcagcccaggcgccgccgccctgagtatcctgcggaaaatgtgagaactctggggagccattgctgctgcaaggacccgcgggcgggctaccgcgctggtgggggggctctgtccaaaccttgcgtcctcgacttcccatccgcctcataaagggttggtgaagaccatctcaaggaccgcacgaactggtccttcaagtcccaggaaaccgaaacaacaaccgaggcggctctctgtccgggccacttccggagcgagctctgcggcggacctctggctcccgctcctttgggcacccgcggtgcggccagaccgctcctgccagcgactctctggctggcaagggagaggaggtggagttcagactggcccctcacgcccagagtggaagcgattcctaggatcctgcagccaccgagccgcccgccgtgcctagcccgggcttgatggtgaagagcacagctgccttcgacagagccggaggaaaggaagtttaagaagcaactgcccgcgttccgcttatcttgccgagcccacccccacccccaccctcaccccctgcggattcagaagctgctccaccgagcccgattgtgtcataaaatattttattggaaaaaaagtcaccgtcttcgcaagagggggtaggggccccagcgacatcggggacccggcctccaggccgagccgacgggttgccccggggcaatctcaggccgttgtggcctgagcccaaccgctgggtccccgacgtccagaagcgggtgtgtgcctggaggctccccggccgggagggcaggccccagacggggtgggggtgcaggcgaggagcggggcgtgaatacgcgtggagcgctctgcgccacggagctcagggtagagactgtagcttccgccgggctggatgcgagtctcccaggttagagcccagaagcgcgctgggacctgggtctggcttttgggtctgtgtccttcctcgtttggccccaattgtccgcattcaagatcataataaaaaggcttaggaagtaaacttcttggacgcggaagggccggctcgcgggtttccgccgagtgagggggctgcgggtggcgc

SEQ ID NO: 29539 - DNA, 1379 bp, Homo sapiens
  chr9:96720648-96722027
  hyper
cggcggcggcggcggggcctcctctgctcaggcactgccgcgttggcggccgaaaaaagagggtcccagagaaggggaaccccctccctgtcgaggacaccgaggcccagagaggggaagcctcctccccagtggggtgcagtctgggattgcagtccccaccccaggggcgcagctgccagcccaacgcctgggacacaccccctcccgaggcctctagccgccgccgcgaaaatcccggaaaccgtcctgctcgcggcgggcgcagtggaaaaggtgacctcagcgccccgggccagccgccctccctagcagccgggcggcgaggggctccgggcggcaggggttcctcggcgccgcccggtcgctggatgaggggccctcggagcgcagaaccggccccctccccacccatgttctgcccctcagaccctacagcccctttggaggctgcgggacagggaggggaccacctcattcccacaaccgaatcccctaagcattcaggtgtaggttccagaaccacctcccctccacccacacccttctcctactccagcgcctcccagacgggattgtgaaatggctccgcgtgcgaacgggtccaggagccgttcgttgtacagaggaggaagctaagtctggaaggagcactcgagcaggctcagcggccagcagccagcggcagggggatcgtgcatcgcttggagggcgctgggctctcctccatccgcctcagccgtgggcagtttgtttccgctcccacttgcagcgggtctgcatcttaattggcaaaacgaagttggggccgcggtggagcggaggcttcttccagaacggtcagctcacctccggatgcggtcgtccgagcagccgcctgcggggggtcccacgccctctatctaacaggttgacgtccagcccctaggggcccaggcggccccgggccgccccacctcgcggccttctgctccccgcgcagccttgcgcgcccagccacccagcacacggtccgtccctggggacgcgtcgcgagcgccgggaatggagctcgtttcctcttttcttttttcttcttcttcttttttttttttaaacctttggttctgattgtccttggcccagcaggctgttggtggcgttggtggtgctgctgggactggggcaccggccttggccgcaggtgtgctgtgcccgacagaggccgcctggaccgcgcccggaacgccctgtccgggtgggctgcggcgttcgccctgcttttgccccgagccgagactggcaacatcttttctagcttcaaaacagaaaattttggaattataaaattaccccctccccacgcttacaggtcattatctcctggagaccaccaactc

SEQ ID NO: 29540 - DNA, 1306 bp, Homo sapiens
  chr9:969529-970835
  hyper
cgtgtgcccttcggcgggcggctgtagctgtagctgttgtgacggctacggcggaggctgcggccgcgcggggaatggagccggaccgcggagtcgtcacctccaaggtgtttctagtggcctcctggaagatgatcccgcgcccaccttgccggcgtgttcgcgggcccctgcccactgccccccctctttctttaggtctggcttttgaggatcccggagtcttgcagctcccgccattccgcagataacctccgcacacttaattgtgacccgcggggtggtcggagaagctccgcacgcgtcctcagtgggaaagtgtcccctctcagcactgcccccttcagtccccctgcatttctggaaagtcaggcaaggcccaggtaggctgccagtgcactctcagccttgactgagcacctttcgggcctctggtgagccccgagagccaggtttggctcggcagagcgggcttgggctgcgcaagcaatgcgcatcgtggccgcctgcaccctgggaactaggcctgtccagtgggcagcatcctcatttttgaaaaggcccttctaaacccaccggcctcgcctaacgccgtttggtgctgcatccgagcggcctcacgcggtcccctggaagggccactcccagcgggagggcggggcccgggacctgcgctggccacgcagggtctcaagctgaccggaagacccggcttttggcctgtgtccaatagccccagaagagaggggtctggagccttcctcccacgcgtagtgacgctcaggtgtcctcgggttgttagtcttgacccaggagagtgcaagacaggcccaaggcctggggggattgcgttatgaatgtccaattctaaacacaaggtagagcacagacagtacatcctcacggctggattttaaccgtattttaataaacacattcgagggggtgtcagtttccccaagctctgcccccttccgcgggcgggatccatggtgtgtgcagtgtaagagtgcgcagaacgcgtgtgttcaagtgtgggcgtggcaggcgtcgtgtgctcgccccgcgcactgtgcggatcgcccagacagccttgacaggtttttgcagatgtttgggtgctacggtgtggggaaacccaggcaggagcgccaggcctaattctcctggactcttggtgagcggccgctactccacgaggggctagaagcaaagggggcacgcgcttttccccaggccgcctcttgctgccgcagtggctgagggcgctgatgacccctccccgcttccagcggacttgacccgc

SEQ ID NO: 29541 - DNA, 352 bp, Homo sapiens
  chr9:97317346-97317698
  hypo
cggcatgcgcataacctcaggatataaataatgctgaagcagagttacgttttttttgttgttgttttttttgtttttgtttttttaggtttccgtgtgtttctattgagctgctcagtgcccggcttagaagaccaggaaaaggagtcacaggtcgtatgctggaggcttgagccgcggcaccgtggcgcggctcgcctcgctgcggttggtggtggcggtggacattgcagcgcggctggaggggtaggaagaagaagatagttttgggatagatagaggtgggtaaagagtgtggttagtgccaaagggaaaaaaggatagcgaggaggagaaggcgttgcaaaaagac

SEQ ID NO: 29542 - DNA, 338 bp, Homo sapiens
  chr9:97864931-97865269
  hypo
cgttctgggagggtgaacaactgccttggttttcccaggactattctggttttactgcctcaggtccgacagcccaggacacccttcagaactgggccttccacctcctgaccaccactaaagggagcctcttgtcgcatgcgcactgtgtgaatggcagcgtggggacgcagagctaagagtaaacgacgtggtgtggaccatgacgttcgctctcctcggccccccctggcagcacacagggcctgcagccggcctgcaacgagcccgccagggtcagtgcagccagcacgggggctccggctgtagcccaggcacgtgccagtgtgtccctgggc

SEQ ID NO: 29543 - DNA, 360 bp, Homo sapiens; identical to SEQ ID NO: 27355
  chr9:97867233-97867593
  hypo

SEQ ID NO: 29544 - DNA, 237 bp, Homo sapiens; identical to SEQ ID NO: 11994
  chrY:14532909-14533146
  hyper

SEQ ID NO: 29545 - DNA, 338 bp, Homo sapiens
  chrY:14533316-14533654
  hyper
cgatcccctgcaccccgctgcagcccccgcacctcttccggcgccctggctgcctctgcccaaagccggcgctgggggcccggagggcagcgattggcctctgtcctgaagcccggccccgcctccgcccagccctggtaggcgcgggtcagctcctcagccctgcagcccctgcccgcaagcccgcgcgcctcctggtgtccagccccagctaccaaggagagagacccaggaaccgccagtggctgcgctccacgccggcgcccagcccctcgcccaccgcggcccccttggcagttggcggtttctaggtttggacatttaacctttaattggcc

SEQ ID NO: 29546 - DNA, 940 bp, Homo sapiens
  chrY:16635744-16636684
  binary
cgcgctggaaaccccgcgtgaagatgaaatgactgtagctccgtgctgctcctccaaactcgggagcggtatccatgcacccctttcccgtgtgtgtgggttacgacgtgggtgggagtggtgaggcaagccgcaaaagtggggtagagctggtggttttgcttcttcggaagcctttgagtgtggcctggaccttagatgggggtgcagggcggtttgccgctgccaccctcggcaccatctctgaactgcccgcttttccggaggagcggaaaagttggaagccgaaaagacaggcgcccggagccctggtctaggtatcaggtgatccggagccctagtcggtgcccactaagaacaccccttctcccatcgggggttcggaggagtgttaagcctgcgggtctgccagtccctaaggtagggatgggggaggggtctgaggaatccgttccaataggcacaccatccccacagccctagaaaaggcaaccaccacccgctccttcctcccgcaccatcccatctcaaggctctctgctgacccgggccgatttcatctggtctcttctcccccgcttcccacctcccaattcccgcgcagctcggctccgttccctcccactcccctaggcggaactgaaagcgaagatcagccaagagcacagtcggaggcggcagagacggtggcgggtgagctaggggctgtgagacgaagcagggagagagtgaacttcagccccgtcccctccccactgccacggctggggcaacccaacccgcgcctgaagcggcttggcttgacctgcggaagcgcgggccgggatggcgtggggagagggaggtaggtgccactgggctgcagatgacgagtgggttgggggcttgctgtgggacaagaggttcaggttccggcctgcgccttccactccgcggtggc

SEQ ID NO: 29547 - DNA, 715 bp, Homo sapiens; identical to SEQ ID NO: 24731
  chrY:2655227-2655942
  hyper

SEQ ID NO: 29548 - DNA, 167 bp, Homo sapiens
  chrY:4869596-4869763
  hyper
cgcgtagcgataaaacggctcttttttttttcgaggaaagtaatgtaccttttaaaagaggttcatcggaaaatgtgactttttaaaagcgagcagccgcaaacgggtgcattttttagactttagaagagcggagcggcagtccgcccgggttgcggctgggactc

SEQ ID NO: 29549 - DNA, 246 bp, Homo sapiens; identical to SEQ ID NO: 12003
  chrY:7140850-7141096
  hyper

SEQ ID NO: 29550 - DNA, 200 bp, Homo sapiens; identical to SEQ ID NO: 24732
  JH636052.4:5118715-5118915
  hyper

SEQ ID NO: 29551 - DNA, 89 bp, Homo sapiens; identical to SEQ ID NO: 12004
  AC241851.2_88-34049:15853-15942
  hyper

SEQ ID NO: 29552 - DNA, 205 bp, Homo sapiens; identical to SEQ ID NO: 12005
  AEKP01149809.1_1-6354:1345-1550
  hypo

SEQ ID NO: 29553 - DNA, 59 bp, Homo sapiens
  chr1:101703569-101703628
  hyper
cgcggggggaggcggggagaataagaagaagaaagaaaaggcagtcgcttcacggaggc

SEQ ID NO: 29554 - DNA, 1444 bp, Homo sapiens
  chr1:107682636-107684080
  binary
cgaggagttactggaaacggcgcttctgtggaggagccgggggggatggggagtagagggagggggccctgttgcctcagcgccccgaggtcgtggagcggcagcagctgcagccggagcagcaccagcaacagcaacagcgagcgggacggagttaggaccgctcggagcgcacaggtctcgaggtagtataaggtttgctatccttccacttgctggcagttgcagaagaagatctgctttttaagtgaaacgtacatgccacccctccgagggctgcggcttccccgggcttgcttctttgccgctcctctttccggctctcgcgctcactctttaattggcactggcccctaagtttgccaggagctcgctgcccgctcggagcagggtcccggccgggagccgctggtgggggcggggagtccgggagccgcaatccagaagcgtcgtgggccatgtatatttcatcaaacggactttgggtgcgtcgcgtctcactgccatcagtgctatgtgcagtgacatttctgacttgagtggaggaatgcgcgaaggaaacccgggcgaaattggtattagaggatcttcttggcgccaatgctaattgtcctgatttatgccccttctgactaagctcaacgtcttcatctgaaataaaatgaaagcggtgccaagcggcatagaaccgcctggccgctggttctgatccccgggaaccagaaaatcgtcctgcggcttgaaaaaaaaaaaaagaggaaaaaaaaaagaaatagaaatagaaaaaagaaaaaatatccctcagtaaaagtttaaggcgagaagtgtcagaggcagcggagcgaggaggcgcggaggagagccggcgagcaggggactgggctggcacgacctccgaaggctgagatctcattattaatatcactatatttttggagggagaggcacctttctcatcctctcttcctctccgcccacccttactccctccccctcatctacctgtcaaagtcactgatcttttgcatttcggaagaggacgtcaacgggaaggaattccccctctgggtgcgggctccgagagggggcgacttgcaggaggctccccccgggggcggaggcgaaggtaattaagcggcggggagtggcgggccggcgctgggttctcggtcctcggggtcctctcccgccggcggccgggcgcgatcggaatccccgggctgcggcggtggcggcggctcgggtcctcacgcccacccctcccgctccgcccgctcccgcctggggaggaggctccgcgggagctgccgccctccgcccgtacgccgcccgcgggctccgctgctgcggccgccgcccgaggcggaccaggctggctgcgcagggccgccgccccgcgccgtcggctcggctcccgcccggcgcaagggcaaacgagccacac

SEQ ID NO: 29555 - DNA, 2283 bp, Homo sapiens; identical to SEQ ID NO: 22736
  chr1:108506290-108508573
  binary

SEQ ID NO: 29556 - DNA, 741 bp, Homo sapiens
  chr1:109203593-109204334
  binary
cgcttctgtctttgtacgggccgtcgcttccatcatcctgcggtaagcagcatgcccaaccgaaaaaacaaagctcgtcgcggagccgccagcgtcctcaactcagcgccgccctgacgcccgcgcacgcacggcctcgctgcgtgacgctaccgccgcggctacgccggcgcccgcacccgcgcctcggcctccccgcggggctcgccaacctcgtgcgctctcacggtcggccttgggccccgggagcctcatggtgcgccgagctccgtccctctaggctctcagttccaaggcgtcggttttgcgtctcgtaacggccgctgtggcgcatgcccagaagccattttcaaggtcctcttccgaaccttggcgaggacccctgcgcctgccgcgccgttgaccccgctagcgtgcggctgcgacgcggcacggtacggcagctgttggcgaaggcccccaactccgagcgcgtccgcagaccgcgagccggaaggcggcttgggcggctgttgagttcgtggcgctcccgaggcgtggcaaaggcctaaaaacggtcctggccagcggaaggcggcaagaggagcagcaaggctccacgcgaggcggccggcggctggagtcccagtcagcctccgctttcatcccagagcagtccacgggggccttaaaggaatgtaggctgggtgaagttggcccagtgacacctgcgttcagaaaaacgttctttccgctcccaac

SEQ ID NO: 29557 - DNA, 1087 bp, Homo sapiens
  chr1:109656099-109657186
  hyper
cggcgcttgggaaattgcggctaaggcaaactcctcgcttaaactcggatcaactacagtgtcagggcttctcttctagccggttgtaaaagcacggatggatttggcgggatgtaagatctccaggagtggccttcgtaggagggaacacgtactggggcctcttccaggcgacgacgtctggagggtgatctctccatcttctttctctcggttcacacgccacgtgtgcaacatcggagatgctcataaaataacccctggcccgaaagggcagtagaaaacggaaatttgttggctggcttggaggatgcttccactgtgttcttcacacgagccccgggcctgcctgttgggccggttgcgcaccccgggcgcgcgctctcccgcgcccacgccgcgcgcaccagcggcggcggctgccatggcgacccgcaggtgagctgcagaggcgcgcgtggtccctgccccacccgcgcggagccagagaggaggcggttgtcaaggcgacgtgggtaggaggagaggacagagggaggaggaaggatgggcggtgttggcgtagccgcagggaggtgactgaagcgagcctggcctcttgcatcctccgcctgtgtacctccctcccctttttttccgccttctgccagcagaagcagcagccgcagcacctgagccgctactgccgctcactcaggacaacgctatggctgagcctgggcacagccaccatctctccgccagagtcaggggaagaactgagaggcgcataccccggctgtggcggctgctgctctgggctgggaccgccttccaggtgacccagggaacgggaccggagcttcatgcctgcaaagaggtactgccgcccccctacccgatcccgctttggtcacaaaagtcttggatccaggcggagaccttggggacccaggcgcagagagtttcagacgccacggagtttagatttctttggggatgaggcgtggggggagggaagaggagccagtctggcgtcatgaggaggccagcacattggaggactcacggatagatcatcctcacagattgggatgctgagctcagc

SEQ ID NO: 29558 - DNA, 1303 bp, Homo sapiens; identical to SEQ ID NO: 24743
  chr1:110610350-110611653
  hyper

SEQ ID NO: 29559 - DNA, 906 bp, Homo sapiens
  chr1:110753530-110754436
  binary
cgccgccgccgcctcgtgttgaccgcaagcagcccgggcccacggagctccggctgccgtgagagtgtcggcctggccccggcagccgctcggaggacttgttgctgctgcgctgccgccgctgcggggaagccggctattccggggcttggtgcggtcttggagccggagggtggcccgtgtgagcgcgagcgccccggaccttcgcggtgcgcgtggactgtgcgcttcctcgtctttggtcggggtgaaggcgggggcgtgtccccggcccagagcgtttgtgtgtcccgtcgtagcgggggaccgcgtgtgtgcttgcttctacttccccgggtcctccctctctgcgcctccctctctccggagcttcctgccctaaccccaaccacctgtgtaccggagaaatccaactcctcccgctccgcgtcctagggggataggcaggggcaagcccaagccgcagagggggccgccaccgcctcctgcctcctcttcgtctcctccccctcccccgtctgacgctgcctcctcgggaagggtgtttggagggcagcggccgccccaagccggagccccgcagcgcttcttatgatcagctcggtgtgtgtctcctcctaccgcgggcgcaagtcggggaacaagcctccgtccaaaacatgtctgaaggaggagatggccaagggcgaggcgtcggagaagatcatcatcaacgtgggcggcacgcgacatgagacctaccgcagcaccctgcgcaccctaccgggaacccgcctcgcctggctggccgaccccgacggcgggggccggcccgagaccgatggcggcggtgtgggtagcagcggcagcagcggcggcgggggctgcgagttcttcttcgacaggcacccgggcgtcttcgcctac

SEQ ID NO: 29560 - DNA, 915 bp, Homo sapiens
  chr1:111217139-111218054
  binary
cgcccgcggccggcagtgagggcggcagcggctcgtagcggtcgcagccgccgccgccacagccgccttgaggcggggcccctccaccatcggccacctccggctccagcaggtggtccccgggcaccacggtcatgtcgggcggcagctcgcggcctgcggcgggctccgcgtagccgtggttcaccagcgtgtgggcaccgccgctgctcgctgggcgctgaggagggtgggcgcggtggcgggctgagggcggcggcggcgagcgcagaaggctgaggcgctcgtccatgcggcggggaagaggcggcagcggtgaggccaggtcgctcctcctcgcgctccccgccctttcgccgcctccgcccccgagccgagcccaccgcctgttgcagccaaagccgcgatgctctgtctgggtctggcgcggtcagccgggctcccgcacggggacgcctcctccctccttctcgcgctctccgccccctcccctgcggggcgcgcgcccgcctccgcgtccccttaggattcccgcccaccgcgcgggcgcgcgtcccgctctcgggggcagccgccgggcctgcatttcttgcagccctcaaggcccctcggtgtcagcgaaagagccctcatgttgtacctcggcgccccgcgggaatgcccacccagcagagccggcccacggggagtcaggctgccggcccgggcccctaggctccgcccgcttctggtcagcgcccctcgcccccggcccgcctggccgcgtcccagtcgccagggttttcggcccgtgggccgggagagctcccgccgcggccccgcgggcgccggccccctggcctccacacccctaggtacagcccggggagggcaggcgggcccagtgtccagggagggagtgcaggccaggcgggc

SEQ ID NO: 29561 - DNA, 835 bp, Homo sapiens
  chr1:11538713-11539548
  binary
cggagggcgcccggggatgcccgcgagtgtccaggaggctggtgacctgccaaggctgggcgggctggctggagaggagcgggagcgcgggcccgggagagacttgggtatcaggaaactcggaggcggggctggggggtggtgcctggcccggaccgtctgcaggggcggggaccgacccccaggggtcgctgcgccttgcgcttcccccgcccgcgggcgccagggccgggctgaaccaccgcgcggatcggcagggggagcggcggcgaagacagcgccagacagcgggtcccagagaccgcagcgcgcggcgtggcgcagggtctcgccggccactgattcaaggcgcggcggcgcggagcccgagaggcgccagggattgggcggcagcgcggctccggagcctggctcggacacccccgcgacccgtggtaggagcccggacccaaacaaaggcgggcggcgaataaaaggcggcggcggagcggagtgctcgggttgcgagctgaggactgggattcgcgcgcagcttcccgcggtctgcttgccctggagcggagggggagccccagcctcctgcggctccgagaagcttccccctgcgacttccgcgaggagacgagtctgcgcagcgtggtggccgccgccccccgaccctctgcgcactctctcccgcgccggcggctcagcctagccccgttcggccggccgaggtgagtgcacggccgcggggcgccatccgggcttggtctcggggctgggggatgcattgctaggaggagggggaagtcctccgcgccgtccgcaccccgacctgcttggcgccgcgcgc

SEQ ID NO: 29562 - DNA, 877 bp, Homo sapiens
  chr1:115631850-115632727
  hyper
cgcctccgcgtttgagcacccagccctccccacgagcgcgactcggacgccgcagtcagcagctcggggaccccggccccgcgcccgccacccggccccctgccctgaccggccctcccggctcctggtctcacccagaagagcaggttgaagccaagcagcaggtacttgatgcaccgcaggcccccgcggaagcgccccatgctgcggcccggcggcgggatccccagtccccaggcccgcgctacgagcgcggggagcggcaggctccggcggggagggggcggagcggggaggaccggggcggggcctccggggggcggggcggggcccggcggggaggggcgcgtggaccccaagcggcgtggctggcgacgggtgggggcgccagcgggtggagatcgagcagcccgagggagcacgttcgctcttctcccggacccagggaccaccttccttccctccagtgggcgcaccgccgccggctatcggagcacctgcagggcgggagcgcccaccggggactggggacccatttaatcagcgccctgtgcggagaccggtttgaggcccgggcgatgcttgagggataagcacttggtctcgtggctatggaaatctaggaaggtgacctcgggtagaagagctaagtggggtcggaggttgccccgaagctggcaggaccagtcgcggggcacctgactgagtgtccagggctgcggctccgcggcgcggagcaagcacacaagcagcttctaggggaccctccctccggcccctcccccctcctcgggggactcttaccttaataggcaagaactgagagagggtgcgggaggcggcgccctgagtcctgtgggctgccctcaacccagcc

SEQ ID NO: 29563 - DNA, 718 bp, Homo sapiens
  chr1:14026481-14027199
  binary
cggtcggacttgccgcgacgccagccgccggggttccttcccgaggcgccgccatgggatccgcggtgacctacgaggggcggctgggtggtggccattgggcgacggcgcagggtcaagggccgggctctgggatcgtggggagaccgggggtcccggagccccccagccccgcaggccactgcctcgccgcccgacgtcacttccgactggagtcaagatggcggcggcgcggccgcgggcgccggggccggcgaaacagcggcggcggcggcggccctcggtgctctgaggcgctggcgcggcgggcgcgggtaaggagtggcgcgggtgggcggcctctgggctcgcgccgggacgctggtccctccccccgaggagcgcggcggcgacggcggcggcgacacgctggggacccggcgccgcagggatggccgggtcggcggacgcgccccctcagaggtcccgggcgtgccgggggccccgggacgaggcgcgggcctccgggtcggtggccccgcgggtgggtggcggcgccgggctcctccttgtcggccgtggggtccctgcggcgaagttcgggattcggtttgtcgccgtgaagagccgcgcgccccgcgggggacgcgtgcgggctgcagagactggccgggtgcgggcggcggtggggccacctggggccccacgtggggccgggcgccgtcccaattgtcaagcc

SEQ ID NO: 29564 - DNA, 1087 bp, Homo sapiens; identical to SEQ ID NO: 24754
  chr1:1475244-1476331
  hyper

SEQ ID NO: 29565 - DNA, 121 bp, Homo sapiens; identical to SEQ ID NO: 12015
  chr1:15102346-15102467
  hypo

SEQ ID NO: 29566 - DNA, 221 bp, Homo sapiens
  chr1:151801432-151801653
  hyper
cgacagtgtgagactctgtctcaaaaaaaaaaaaaaaaagcctggtgcaggctccctgtctcccttggcagcagcgctgagttcctgagttcctgaggccaccccgcctccgcacacccccctacctctatctccttccttccccggcctggcagtcggccccaccccctcccatctccctgcctctgtccagcatttctcctcgccttttttcacaaggc

SEQ ID NO: 29567 - DNA, 298 bp, Homo sapiens; identical to SEQ ID NO: 12017
  chr1:152733117-152733415
  hypo

SEQ ID NO: 29568 - DNA, 220 bp, Homo sapiens; identical to SEQ ID NO: 12018
  chr1:15283890-15284110
  hypo

SEQ ID NO: 29569 - DNA, 534 bp, Homo sapiens
  chr1:1534828-1535362
  hyper
cgccgtcatggccaccacgatgtcctgcatgccggccggctcggcggtgaactccacgcactcggccggctcgggggtctctggcgcggcggcggcgggcccagcgcgcagcggcagcggctgcaggcacaggcggtagaggacgctgtcgtgcacgtcgggcagcaggtagtcgcggcaggaggccccgaggagcacgcgctcgcacgggaagcgcgtgtaggcgccgcgccacgagcagttgagcgcgaaggcgcgcacgcggcgcgcggcggccggggccaggcgccactgcaggaggacgctgcggttgcgcaggacgctggcgcgcagggagcggccggccggggcgtgcagcacgcagcccggagcctggcagcggaagccgcgcgcggggctgcggaagcacaggcgcccgccgcccgcctcggggccctcgggcagcaccttgtaggggcaccagggcgcgtcgggggtcggctcccagcccggcggcgtcggggcggccgcggcgcagggcggcggcgcgcaggc

SEQ ID NO: 29570 - DNA, 976 bp, Homo sapiens; identical to SEQ ID NO: 24762
  chr1:153651442-153652418
  binary

SEQ ID NO: 29571 - DNA, 383 bp, Homo sapiens; identical to SEQ ID NO: 12020
  chr1:15374975-15375358
  hypo

SEQ ID NO: 29572 - DNA, 1237 bp, Homo sapiens
  chr1:154474305-154475542
  binary
cgcaatttgccgccgccgcccccgggcttggcccgctccgacacggtcttcaggttcagggggaactccttgaaccacttggccgccatgagggggccccggccggctcggcccaggagcgtcggggccgtggagcaggcgagcgaggaagcccagcccagacacgcagaggcgccaggggtcggggaccactgcattccccgtgactggggcgctggaggccgcggcgaggccccgcgacggctgctccgtgcgcccccggccggccgtcgcccacgcccggcagggtggggttctcacggctcggggcgccgagcgggcgggcgctagcctctgctccggacacggcaggcgacaggcacgacgcgcggggggccccgcccgggctcgtcttcaacgcctgcccggcccgaggacaccgtggctctcggaggcggcgggcgccgggggcttccccctgctctttcctcctgcggtgggagaggccaggcccacggaagccccctgcggcccagcccacgctcccagggaccagagaggaccgagcggaggcggcgggagtatccccggcgcagcgacagacggtggacggacggcgagcggcccatcaactccgcgcgcccctcccctccgcggctggcgcctcccagccccgccacctcctgcccagagctgggggcggcggggtgagcgccatggcagaggcgggtcgggctgcgagctctggagaaaggggcggcggccgcacgtgcggatcggccgcgccccactgagcagagagcccccttctgccgccgacagcccgcgtctgcaccgagccggtctcggccgggcgctgccttcacacgcgcccaggagtgtcacgtgcgccgctcacccccgggaaggaagcccctcgcccacccactccgctctactccactctttctgcagacgttatttttggcggtagggcagaggttgcggcccgaggtccgggcgcagggacaacggtcgccagctcctgcgctagttccgttactcttcggtggcacacggtcctgggcagcgcgaggctcttcccgccgtggccgccggggattggctgccggcaagccccgccccgtgcccccgggctcagagggggcggagcgcggagggagaaggcgcgaaggctgggcgtcgcgatcgcaggtgcacgcgcgtggcccgcgagacgaggtatggcttgtcggccccaggtcccgggatgccaggc

SEQ ID NO: 29573 - DNA, 903 bp, Homo sapiens
  chr1:155164146-155165049
  binary
cggacacagaactatcctttggggagcagagtggtattggggacaggtaggcacgtagcggggggcaaaagcacacgtgaggtgcgtaatgcgcgacagccaagaggtgtgtgcggcagcagtgcacgaggggaggaagctatcccaggccgcggcagcacgtggaacttgggtcccgcagtcgcaggctgcgctctaggccgacggaagcagttccgcctgtattcagaaaacagttctcagccccaaagacacaggttggaaagaacactttaaaaacacttcggcgaggcacgggattggagcgcatcagatcagcaggcgagagaccaccgctctcgcccgcgcgccgcgcggcgcccgaggcgcagctttgtgtgcggcgagaccctggggcaggcgctgggcggggtggggacatctgacgtcagcgcgcccgggagcgcgggccggggaggcggggagccccccaactcgcaggccggagaaaacacgagtagctaggtgggcggccccaaacctcaactcccggcattgccaagcaacagccattcagttcggttgctgggacacgcgtcaccatggcgacggctccgcgccgcgcagtctgagtacttaaagagcaagcgcgcgcaacgcccgggcgtcggaaagcggccttctgggactccgcaaactcccgttctccctcccccctcccccttgccattccctttgccttccgggcgccaagtctctctggcctccaaggtgaacccaactccccagcgcgccccgggttcccgggtcgggccggcttcaggcggtggggagcgggatcccgggccccgggcgggcgggagggacgggacgcggtgcagtgttgttttttcccccgccaatattgcactcgtcccggcctcc

SEQ ID NO: 29574 - DNA, 1526 bp, Homo sapiens
  chr1:156390054-156391580
  binary
cgcggctctagcccctcgctcaagcctctccctcccgcccgtgaggccggctttccccgggcccctctgcgcagtgtatggggttatttttactttcggttatctagctttatgaagactccacaccactcatacagctagataaccaaagataacaaccaaccccgcctcctggctgctgtcgccgcctcttccacgcagcctcccggccgccgccgccgccagcacctccgcagcttcccggtcgcccgtcagcgggagtaggagggaagggacacgagtggagttgagggggagggtgaagagagaaatgaagtccgagacaaaacaacaacaaaaacctcagacacggagatacagacacgacagagaccgaaaaaggcgtggaaaggacgcgatgacccgtggcgtcgaagtcggggagttgaccccgatccagacccaaaaagtttctggtgccccatttcccgctctcccattcgggccaggagcaggagttccgctggtcccaggtggaagggacgcgcgggcttttcgtgccacccgggaagaccgcagcgacccaggcagaggcctccccagcctcgccgggtctccactgcccttctctggaagatcgagggcgcatccgacagccagagccctgccttcggcggagcccgagcctggcgcgggatggaaatggggagccgcggtgccggcccggccacgtcgccaactcagaaaggcgttggaagcgaagcggagcccttgtgggggaaagagccggattcaagaggccgactaaaaggggaaatgggcagccaaaccccggaggtaaaaaccccagagatgtcctaataggaagcagggaaatcccggcgacccaaagagagaggaaaggctgtggggggcgggtgggggcgacccagagactcccaagcgagtctctcaaggagagaaggaaacagcagagaccccacccgggaagagatccgggagagtacccatgagaggggcggaggggaggaaagcagagggcgacagggcaggtgaccagagtcccaggccctgcagagccccggataaacggctttgttcaaagaggaccagagatcacccagggttgtgaaaatggccgggggttcgaggcgagcggtgctctaggggtgggaaaggggtgcgatcaggaacgggaaaccgcagccccgaagagggtgggggctcggccggcccctcgtggcggacgcgcgggcacgccggattccgaggcgctcgcccacctcgtgctccacgctggccaggccacttacatcgagcccagggtgcccatccgtgctctcccgcgcggtcctcccggccagttcccgcccctggagcgccagggccctgagttccagatgccggggctcagcgggcgccgggcagaggaggctgccctgctcttagcctccgccgagcctaggcgagcagggtggagcgggtctcacctcctagctccctcctctgcctctgccgcggctctggccccggcgcgctccggctcc

SEQ ID NO: 29575 - DNA, 484 bp, Homo sapiens
  chr1:156818577-156819061
  hyper
cggagtacaacttgcgggtcctggcttcctgggtcttcatagcctcgctgagctccgccctcacctgcctgtggtcccgaagaaattggcctcgtccggtcccgcccccgctccggccccgcccccggcactcacgactccttgtagtacacgatgaagctgagcaggtcgcgggcctccagtggctcatagcgctcccagcgtagcaggatgcggtctgcctccgtcacgttggacacgaagcgcagggtgcgagtctggcctgggtggggcgaggggcctgctcgcaaccgcgcctgccagctgcttgagcgcccaccctgaccccgcggcatcccattcccagtgagacctctgaggagaacttctcagagtgtccccctcgagctttctccctcccccgggtgtgcgtgtctagtgtgtggccgcgtgtccaccggcactggggttggggtctcacaggcggcgcggtctccgttggtgc

SEQ ID NO: 29576 - DNA, 211 bp, Homo sapiens
  chr1:158669657-158669868
  hypo
cgtaggtacatgagagtcacactgccaaagaagagcgaaaagacaatgaagtgagagacacacgtggaaaatgctgtgcggcggcctccagctgaatgaatacgtagaattacagccacaataccatcgtaggacatgaagatgagcatcacagctgtaataatctccactgcatgaatgacatccactacctgaatcatgacgatggctc

SEQ ID NO: 29577 - DNA, 73 bp, Homo sapiens
  chr1:158710971-158711044
  hypo
cgtacggtgggtttatgtgcagatttgttacacggggattttgcgtgaagctgaggtttggagtacggatctc

SEQ ID NO: 29578 - DNA, 461 bp, Homo sapiens
  chr1:161582198-161582659
  hyper
cgggacatgaggagtgcgggggggaagagaagacggcggaggaaaatcccccggcggtgctcaactgcggctttctctctcggctgtgagccggctccgccctccggcttccagagcaagtggcttctgcgttcaccgccccccgccgtttgtggggcggggccgattcataagaatcggttctcaccaatggagggcttagcatgtttaacctcaggatcataaacaaaagacactgctagaacggtcgggaaagtcatacgctttgcttatcttatatatagatttctaaaattccaaaccggggacgcgttggtggtgtagtggtgagcacagctgcctttcaagcagttaacgcgggttcgattcccgggtaacgaaacgtttttgtctttccttctacgaaaaacttttctgagccggagcctccagcgcgctgtgtattcgttttacgcctcaac

SEQ ID NO: 29579 - DNA, 456 bp, Homo sapiens
  chr1:161591298-161591754
  hyper
cgcggaaaaaagacctgcctcgctcagggctgtgagccgcgccctgaagcacggaaagctaattgtgtcactggtttcaaatcaacttcaaattttttggagacgtaagagtgctgagcattttttcttcagtgaagtgacttggcagcccaggtcgccaacgcccgtttctgtagcgcgatcggttagcgccttcggctgttaaacgaaaggttggtggttcgttcccaccccgggacagaagtcccacttttgtgaaccttgagtttttgaaactttcactgaaaaaaaccgcgtgcgatgctatccgccgggagcgctggagccttggctctcaaaaccagccgcggtgctaaccgccgggatccctggcagctgacctccgcgttgtgtggttcccaatgtcctcttctgccttagtgctgtacgggtaattttgaggtatttggtttttcc

SEQ ID NO: 29580 - DNA, 245 bp, Homo sapiens
  chr1:163392854-163393099
  hypo
cgccagtggtattgtggtattgccggcccccacctcccgcacagcggtgcttcacggaattcctgaggcgtactgggagcaccggcacagccgccgccatttcccggcaggggcacatgggagcgacagcgaggcgtcagggccggaagtgtccctgtctttgccctcgttggctactgcggggcaggctgggaccgaggctgtgtgcagaggcctttggtggctgcgcacgttggggaggggac

SEQ ID NO: 29581 - DNA, 375 bp, Homo sapiens
  chr1:166916749-166917124
  hyper
cgcaagcctgcacgcctgaatagcggcagctggctttggagaaaaatgggacaactgtctcctgcccggctttcaagagctgccattctttctttccaggggctgagccaatttctcggtgccacccactctcgcgcctgcccccagcccccgtttcctcccccgctcgggccggcgcgggtccacccgactacaatgcagcgcgcggctgacccagctgctccggctcctgcccggggtaaccacggtaaccgcgggccgccaggaatgcgcgctaattgaaggccgagtttcctcccacagtgatgagcaacaagtgaagcaaaaatagtgaggcggaataaaggctgcgaggagggggcggcgggcgcgacc

SEQ ID NO: 29582 - DNA, 238 bp, Homo sapiens; identical to SEQ ID NO: 12032
  chr1:167096217-167096455
  hypo

SEQ ID NO: 29583 - DNA, 740 bp, Homo sapiens; identical to SEQ ID NO: 26037
  chr1:167599123-167599863
  binary

SEQ ID NO: 29584 - DNA, 1563 bp, Homo sapiens; identical to SEQ ID NO: 23689
  chr1:171810215-171811778
  binary

SEQ ID NO: 29585 - DNA, 475 bp, Homo sapiens
  chr1:175354887-175355362
  hypo
cgggaaacctgaggcccatagtggggaaggatttatatcaagcacagatctggttgccagtagaggtaggatgagaagctagttttcctctcctagtgagggagcgctgcttttcctgtatgctggaaacctcttgcttccttctcgcggtgtctatgacaaggccaatgctctgacacaccttgcctcattcctaatactcctcttgctgtgatgacaccaccggttggctccacccctctttccctccttgtgcgtctctcccccaccgcagccttacctgttgtgaactgagtggtggcagaatcgctctcgttggtccctcggacggcactgactgacacctcgtatcgggagccaggccgcagggcctgcactgagtattggctcaggggaggctgcagccggaaggtggtcctcccaccttccccgcccaccaggccatatttcaaaagaatgaaatcgactttggctc

SEQ ID NO: 29586 - DNA, 344 bp, Homo sapiens
  chr1:175365604-175365948
  hypo
cgctactatcatgaatgcccatgatctcatgtaggagaaaagaaaaatgaagcaggacggggaaatggtacgtacgggtggccaccttggcagtgatgggaaggctgaggatgttgctaatgacagcgtagacgctgatgttgtaggtgagacctggctccagctccgtgatggtgacaccactccaatctccaggcacccgctgctggagctggaggccccccagggccgtcggctggtaagagatcacatattccgtcactgccatcggcccgtcccattccagctcaatggacctgtcgctgataccagccactcgcaagtcctctggaggggcaactacc

SEQ ID NO: 29587 - DNA, 403 bp, Homo sapiens; identical to SEQ ID NO: 23690
  chr1:175372314-175372717
  hypo

SEQ ID NO: 29588 - DNA, 384 bp, Homo sapiens; identical to SEQ ID NO: 23691
  chr1:175375048-175375432
  hypo

SEQ ID NO: 29589 - DNA, 1090 bp, Homo sapiens
  chr1:180123493-180124583
  binary
cgatcctgtggggtcttggtggtcgcagaccaagcgtccctcttctcacatctaattcacaacgtctcatcgctccgcgggagcccaggaactgccctacaacagccgaaatccgggtcgtctattccaacggactcctcttccgttggatacgggggccgtgagaggccaaacaacctccgcgaggctacccccgcagcgaccgctcggcgggcgctccattcctttaccggactgtacacctcgcctcctggggcctgaggcgggaacccgggtcgcgctgctccgaggcctcggcggaccgcgaaaggatggctcaccacccggccagggccagcccctgcaacaagctcagccccgcccgctcccgcgcccaggagcggccggcggggcggggtggctgggccggcctcgggggcgggggctcgggggcgggggctcaggggcggggccacgtggctcctccttgcgggcggaggcaggcggtgccgcggcgccgggacccgactcatccggtgcttgcgtgtggtggtgagcgcagcgccgaggatgaggaggtgcaacagcggctccgggccgccgccgtcgctgctgctgctgctgctgtggctgctcgcggttcccggcgctaacgcggccccgcggtcggcgctctattcgccttccgacccgctgacgctgctgcaggcggacacggtgcgcggcgcggtgctgggctcccgcagcgcctgggccgtggagttcttcgcctcctggtgcggccactgcatcgccttcgccccgacgtggaaggcgctggccgaagacgtcaaaggtgagaagcgggggcggcccgctcccccgtgccccgccgcccggacccctccacctgcccggtgggcagcctcctactccgggagcgcgtccctcttccagtcacctccgcccacctcttcctctccgcgcatcccacgcccaccaccttcatgtttctcagctccatttttgcctcccgctcccttgccttttcctcttggccctcatcccgagcttctttccctctccgcggcctgggcccccagacctgccctgctcgcccggttcgtccccc

SEQ ID NO: 29590 - DNA, 1580 bp, Homo sapiens; identical to SEQ ID NO: 12039
  chr1:180199369-180200949
  hyper

SEQ ID NO: 29591 - DNA, 226 bp, Homo sapiens; identical to SEQ ID NO: 12040
  chr1:181382621-181382847
  hypo

SEQ ID NO: 29592 - DNA, 336 bp, Homo sapiens
  chr1:181767556-181767892
  hypo
cgacacgcgggcagcatctctccacctgctgatggaagcgaggagggctccccgctgacctcccaagctctggagagcaacaatgcttgcctgaccgagtcttccaactctccgcacccccagcagagccaacatgcctccccacagcgctacatctccgagccctacttggccctgcacgaagactcccacgcctcagactgtggtgaggaggagacgctcactttcgaagcagccgtggctactagcctgggccgttccaacaccatcggctcagccccacccctgcggcatagctggcagatgcccaacgggcactatcggcggcggaggcgc

SEQ ID NO: 29593 - DNA, 360 bp, Homo sapiens; identical to SEQ ID NO: 12043
  chr1:184943416-184943776
  hyper

SEQ ID NO: 29594 - DNA, 870 bp, Homo sapiens
  chr1:197882002-197882872
  hyper
cgcgctcctgaccctccggggagctgctgggggtgtctctttcttggaagggatggaaggggggccgagaagacactgtttctcacacgtgtaggggttaactggaaactggcttcacccacatttttttgttgttgttcagtcctaacccagcgcagccgtttctgcgcctgatctcagcggacgcagtgcgggacttctccctttatttctgcagagctgagggcaggcggcgcaacaaatctcaggtaaaagagcatcagatttcagaagagctgtattctagacttggcgcaggcccctttggggagaagagcccaggggctatagagaacagaggtttgaaggaagcaaaagctggcgagaggttttttttttgtcgcgaagggtgagggtaggcagagaacgcgcgaaagggcagggccttggccgggaagtaccgcccagcgaaaggctggcaagggtgcgcagctggagcgtggcctcgggtacccctttccaggcagccgaactccccgtatcccagctctgcttggctgactcccatttgtcttgagggaggatcccctagtaggactgaatcagaagtgcgcccgtgcagcagccccagtatggatctgccaacctcagtgtagggggaaattttccacatggagtatctcagtctccactgtctggagaaaggccccagcgtgtcccggcaatccgctcaccttccatccagcgcagcccgggcatccagggccaggtggcgcggcactgaacgcatggttcccagcctcaggctgacgctgacgtttcactgggccttgggtgctcaggacagtgccagacgctggatactgttttaagagccgcgcctttcaaacc

SEQ ID NO: 29595 - DNA, 888 bp, Homo sapiens
  chr1:197887902-197888790
  hyper
cgcttccctttccagattactaacggggggggggggggactacagaagtctccggaaattatttcggccaaacatagctgtgtagatcctttggtaccacagtaggacttgtagcccaaactaatcaggagactgctctagcccttatcagctgggttttgggtccggccaagtagcccaactggtgaacgtgtctatatttgtaacactcattcagtgccggggcccctggtcggagtaaagggctaaactttactttttcaggcccgctgaagtttcgtggggaagatcaacccatttctgctagtcgtgagggaaatgtccggaggttaactccttttccctttttctggtcatcacttttaaaaacaaatagtagcaacccaaacccaaattttgcagcggggctgggctcctcaaggtggggccactggggcatcccgagtcgggtcagtgggacccagagggaagcataacttgggcactaaacagattttcaagacaaaggtctcagtacgcctgttgatgctagggaaagaggggactgtatacagcgggctggacagcggaccctctttgggaacagccactttacacatttattgggaacggcaccaatagccctgaaaattagggaacagcaggggctgccaaatatatctcaatcaaaacaaagtcgaccaaattatgagcagaggtccaataatctcccctttgcttttgatttcaatgctgcttataagaatttagagaaatcgaactgtaatattttttgtttaaaaataacctgtgctcgttgaaatttccttttcactcccttatcatttccgttgttttattttgtgtgcgtcgaaaaccacaatttttagcttgtaattatttgaattc

SEQ ID NO: 29596 - DNA, 290 bp, Homo sapiens
  chr1:203598471-203598761
  binary
cgaaaatcacgccgctttcgccgcggcctcccatcgtggaggctcagagtgcagctattcctgcagccggccttcctattttcagtaatctgattaggggtcgatgttggtgggctcggggacggcttctccgtgaggtcgttatttagcgcgcaccgggtcgcctgagcccggggtcgcggccaaaggggtaatcggctcccgcagtctcagcccttcccccggggctcggggcaggattgactgcgcaaccctgcggcccctgtgctctccgcggcctctgcgacccc

SEQ ID NO: 29597 - DNA, 890 bp, Homo sapiens
  chr1:205425562-205426452
  binary
cgccctctgcggtcggggcagaccctcagccggagcttcttcctcccccacccctgcaggccgggcccaagctgcgacacccccagcacgggctcagcctgtgaacaaactccgagctcagtactcggaggaactggcgagagcgggacggctacctgcccgcacgcccgatttccgggcacagctagaaagaccgggacgcgattcaactcccaatccggtgaatccgcctagcgccttcgggtcctgccgcccccggccagtcccgacccgcacacatatgcaggcatttgcacacacgcgcgcacacacatgcacgcacatgcacacacacatatgcacaccctcgcgcacacagacactcccgcgcgcgctcacgcccgcacacactcagggttataacaaaggaagaggggccagcgctgccttacttttgtctctcttctctcttttgcagccccccagccccggggccggcgtgcccggcccaccccgccctccgcgccccccgacggccgcggtcagccggcattccggagcagcgcgtcggagctgcaacttcgcgcctaagcgcccgcacctcgcagcccggcgggcgggagacaaaagctgcggcgccgccgccggaggccgcgcggccaaggtgtgttcgctaattgtcaggaaatgtgtgtgtgtgcggccgggagcccgcaggggcgggggaggggacggaggaagaggagacccacccctcctacccccgccactcgccagcgccgggtacccgaaccgggattagagaataaattatctgctctcttctcattgggctgtggctgaggacgccgtcggcggcgccgggctgggagctctcccggctctttgcattcaccgcacagctccggctc

SEQ ID NO: 29598 - DNA, 1158 bp, Homo sapiens
  chr1:210110997-210112155
  binary
cggagatctgagacgagtatgtggctgattcgggcaaaacaaaacaaaataaaaccaaacgaaaccaaaacagacttactattaccaaatctgagagtcagtgggtgggaatccttttcaaccaaggagacctgtccatggtcctgaccacatcatttgccactcgcctccttcatggacaccgtttgctccaagtaccggacgggagggcgcccggcgccaggaagcttgggcttgggcccccacacgagctcggcgcgcttcgggcgggtctcgggcgcgggcccgtggctctccgggccgggcacctgtttcgaatcgaggcgcgaggcgcggtggggcggtggggtggggtggggtaggttggggtgggggcggggtggcgtcacgtgccagcggcggccccgggaaggttccatttcttccgcggcccgcactcgcggcgctcggggcccctccctcgccccgcccgcggcgcccctcgcggccgcacagccgggcgactccgggccgggccccgcccctctcgctggcggactcagcgcgtcctccgccagccctcgcgtctgctgcccccgccatccagttggtgcggtccatggcgagcgcatcatggcgattgaaggtaagtggaggctgacagcggggagcgaggaccgggaccacccagctggcggggggctcggaggtgcgccggcaggccgaggcgctgacggggccgcctcctgtggtctggagccggctgaagacgcgcgggggtcctggccgcgtctcgggaggcgggtgggcggagcggcgccgctgggacgccgggcccgactggctcgctcgccccggccttcgtggttttgccggcctcccggcggccgcacgcggggcaaagcgggctggcgggcaggtacagcgtccgggccgccgcctcctgccggccgcgcggagtggaggtcggggtgaggccctgcagaccccacgggacgggctgggaggagcgaggggccacggggggctcaggctgccctttcttttctttccccggccgcggcaaaccatccttccgcaatacccaccttcctgccaaactgagagtccagttttttgtcccattcctaacccttccctgtgcccgctcgggctgatgctgggttacactctctgccc

SEQ ID NO: 29599 - DNA, 785 bp, Homo sapiens
  chr1:212873467-212874252
  binary
cggagggaacgcgaagcccacccacgcgaggcgacgcccgggggggtggggaccaggggggcgccatgcagcctttggggtccttcggcggctgccggggaactcaggttgagaaacacagtgggtgttttggggtcggtgttttttcccggtcccatcgcggcatcttcctgcgcctcagccacgccctgcgtccgccccccggcgcgggggtcacagtcccgggggactttctccgcggcgatcagtcatccgggcgccactctcgctcctccagcggccccgaagccgcggctctggggtgaagacgccggcttcaccgagtcccaccgcgcaccccgagccacgggcgccccagggactctgcagggagtgcctgcccttcccgtctcgggtccgccgggctgtgggagggaacgaggcggggcggccccgagggtgaattcccggagcggagggtgggcatggggaggatgtcccggacaaaaacggtgacgggcttccctgagagcgaatctgccacgtgggacgtcactagtgacaggtttggggatctggacccgccatgccacggttaaacggcccagatcatttttctttttcaagatttatctgctcgtgccaagctggggaccgggttgaggtagggcaagtccctgtccacctgcctgccagtcaaaagatgcgaagccaagacaattacccgtggtcctagcgaaggaaacactagcggccacaggctgtggtctgcatgctgtgagcaccgggaaagataaccgcgattc

SEQ ID NO: 29600 - DNA, 973 bp, Homo sapiens
  chr1:213124073-213125046
  hyper
cgtcccgaggtaggatcttggagctgccgcgcgcccttcctgcgcgccgcccgcctgcagccagtccctcccggtgataggcgctggaactcggggaaaagggggcggatggagctctttccactagatccccgccggggtccgggagggcttcctggaagaaagcgggccgccttgcaagccaaggctgctgcagcgccctcgcgccagctctgggcgctcacatgccagcacgttcgtggctcccctcctctcttggccacatctgaggacccaggaatgtgtggagccttgcgggaacctcctgttccttcatgctacacaagctgtctttcttctccccacatcttgcgctccgcatcccccaagctccttgtgcccctccatccccaaccccccgggtttaggtgtgtgtgaagcttcgtggcacattttgagctgcctttctaggtaatcgcagggctggaagcccgtcatcgattctcagggaggctgtcagcgtgcaggggggagcggggagtgtcgtggagacactccgggacccctcactcggttccgctgtgcgtccacttagctgtggtgtcagctgtgtctccgctgatttcaggcaccgccggtaagcagggagcctccgcggagctcccgccgccgctcccccttggtgagtcctgccgcagcgagaggcatggagaaggccgcccccgcggggcgctgatcccctcgccgcgcccgcgcgcacacgccccccgccgccgccgccgctgccgccgccgcgcgcccccagtacctcgctccccgcccaggccccaccatgaccggctccgcggccgacactcaccgctgcccccaccccaaaggcgccaaaggcacccggtcccggagcagccacgcgcggcccgtgagcctcgccaccagcgggggctcagaggaggaggacaaagacggcggggtgctgttccacgtcaacaagagc

SEQ ID NO: 29601 - DNA, 632 bp, Homo sapiens; identical to SEQ ID NO: 22992
  chr1:22140678-22141310
  hyper

SEQ ID NO: 29602 - DNA, 975 bp, Homo sapiens
  chr1:224803363-224804338
  binary
cgagccctcgttgctgcctcttcagcgcagaatagcccaccaagtccacgtttccctagtcccaaggtcggatggctggggagggtagaggatgcaacggaaggacgttaatggagaattttgcagggtctgggagcagagcagtaaacgcagccctaagcactgagtatgctacagtttggtaaaatccatccaagcagctttgggatccaaggcttgcactgtatccccaaccaacactaggcaacgccccaagtccccacacttcccactccgataggcgaaactgcaagaaccgggaggggcggctgcggcgtttaggcgcgaggcacacaccatacccttccgcagcttcccacctcctccagacgcacgtgtttaaagagtccctgctccaaccggtcccgccccacctccgctcggcctccagccctgcttgtactgctggcttcaagtttcctccgagaggcgggcgtgcacagctgcagtggcggcggcagcggccaccaagcgcccggcggcgcttcgccacccacctttcctcagcccccggcgctgcagtctccgcccgccggggagggcgcgctcagcggaacaggagtcgagggtggggcgccgagaggagggaatcccgggtcgcaccgctacagttctcgcagtggcaaaggcggcggcggcggcggcggcagcggcagcagcaggtggagcgagctacagcgtttggcctgaaacccactgctgcagccacccgggctggagttggcccgttgggtggagccagtgctcgccccggtccgacccccggtttccgggacacttgggttgcggaggccggctggccggagtcacggttggggacgggcgcgcctcggagcgcacggctgcgctggaagccgcgtctggggcgcaggaccaacgggacctacctcctcccggctacctaaagactccttctctcgggaaagagcgctgccc

SEQ ID NO: 29603 - DNA, 983 bp, Homo sapiens; identical to SEQ ID NO: 24813
  chr1:226411007-226411990
  binary

SEQ ID NO: 29604 - DNA, 311 bp, Homo sapiens; identical to SEQ ID NO: 12052
  chr1:226827405-226827716
  hypo

SEQ ID NO: 29605 - DNA, 421 bp, Homo sapiens
  chr1:226829329-226829750
  hypo
cgcctggctttcggtgccaggcaccgtctgggctaaatggagagtcctcggcagagggctgacagctgggcagggctagaagccactctgctctgaggcctgagccccctacacagccatcccgcctgaggaataggctgatgtctccaaatgtctggccttggggcgggccacccacattctgagcctgtgcctggagaagcttacagcttccaaagggcgctgagagaagccaagccccctgaggtgggcacgggtggggcccgaggctgccctcactcgccggcctcaccttgattccctcgatcctgaaccccagggtggccgtggagctgatggtctcccgccactgcatgtaccgtggcttggtcacagcccgctgtgctttttcctcctcggtgggggcctcggggtccacctc

SEQ ID NO: 29606 - DNA, 1363 bp, Homo sapiens
  chr1:226925637-226927000
  binary
cgtctcgcggaccggcgagaagcgaggtccaagtccttggctcctaagtatgctgtgtgcggggcgcggctgactcagctctcccgggctgaggacaccccagccaccgtctccgggtctccccagcctgagcaaacattggctatccagggcaacccggcagccctcgccctgggcttcagggtctccctgctccaccctctcggggcatcagagaccgaccggctcggagggaacctaagcgggacctgccttgcccgagccgctgccagcgcccggatctgggagggcgcccgcgtgcccgccgtttaccttcctgaccctagccttggggctgtgtctctcggcctacgaaggcctgggcgggcagcggggccgcagccgaagcatttttcagggctagccttgtcgcctatccctagacaagtgttttgtgagtgtgggcgcaccgaggttctacacgttctctttaccggaaccagtacttgctgcccccctgccgtcgtcccctatgggggggtgtctgtgagtgtgtgtgtatacacgcgtgtgtgtatacgccgcacgcgcgcggagcgagtccgctctcagcgcgccctgttgccgaggacgcgactgcccctgcgggctcccggacccgcgcccactcggaggaacttaggggcgtgcatggctgcagccgggcagcagccctaggtgcacagagcctctagctctgcaaacctcccaggagccggcgctctaacaccccagggcagcgccgcggagcgcagggcttctccgcatcccgggcagcctcgcccggcgccagcagagccgccccgagaccccagcctggggactcctggagcgcgctgagggaggcggcgcggagtgagcggcccggaaggcgggtaggagaaatgcggagacctcgtctctccctattttctccccaccgccactccatgtcaccctccaaaatcaaacccccttccctgcctccccagcccacccctttgccctgtttcggaaccaggaacgccgagattcgctccagagcagaaagtgagggaaaagagggttgttcagaggcgagagccattaaaaggccgccaaacttacctgcagtttctcagattctcaggtcctgtgtagactacatgcccagaggcgcaaacctcgtagggacgagatggctttaaaagtaaaaatgctcagaaattattttctcacaagctatggaagacaaaaaagaggagtgcgaaagaggggggaaagctcttcggttcaggggcccggcgatcccggcagtggcgacgccaagccggccctgcacgcccttttcgaccgtggagatactgcccctgtcagtgtctgctcc

SEQ ID NO: 29607 - DNA, 252 bp, Homo sapiens; identical to SEQ ID NO: 24815
  chr1:228083414-228083666
  hypo

SEQ ID NO: 29608 - DNA, 162 bp, Homo sapiens; identical to SEQ ID NO: 12057
  chr1:228111872-228112034
  hypo

SEQ ID NO: 29609 - DNA, 217 bp, Homo sapiens; identical to SEQ ID NO: 12058
  chr1:228459748-228459965
  hypo

SEQ ID NO: 29610 - DNA, 829 bp, Homo sapiens; identical to SEQ ID NO: 6689
  chr1:228461610-228462439
  hypo

SEQ ID NO: 29611 - DNA, 339 bp, Homo sapiens
  chr1:228473703-228474042
  hypo
cgtctgtcctggggagcactgctggccaagcctgcccaggacggtggggcccctgagcagtctgtgcctttgcaggccggagagtgcacatcatcgaggacctggaggatgtggatgtgcaggagggctcctcggccaccttccgttgccggatctccccggccaactacgagcctgtgcactggttcctggacaagacacccctgcatgccaacgagctcaatgagatcgatgcccagcccgggggctaccacgtgctgaccctgcggcagctggcgctcaaggactcgggcaccatctactttgaggcgggtgaccagcgggcctcggccgccctgc

SEQ ID NO: 29612 - DNA, 963 bp, Homo sapiens
  chr1:244013722-244014685
  hyper
cgctcgggcgggggccgggtcacgccggcggggcggcggctctgggccccggggcgcgcccggcgcggggaggggttctgcggcctcctcccgggctgcgcctcgctgaggggaccccccgccgcctccccgccccctccttcctcccgctcggggccgccgccgatcggttctcgccgtcgccgcggggcttgttgttgactttgaggaaaactcctgacgtcaggggctggctctcggcgactggcgggagcggcttccccgcgtccccggccctgcccgccgcctctgctcccctccctgcccggccctcgtcctcaggcttccccgcgcccccaaaccagcggtgccccgcgccccctctcctctcgcgagaacatccccctagccagccagagccgggagcgggggcagtcgctcccgggcgggaagttctgggtttccccctcgcccgcgtggcccttggcgggcacccgaggcccgggagcggaggctcctcgcccagccgcttcctcggcgcatccgcccacccgccctggccgcggacgcgcgcgccgccaggccccgggcgtctcctccagtccgccgcggccccttggggagatgggcccggcgcgagggctcgcacctggaagcccacgaagtgggcggtgcccaatgaggtagggaccggagagcgcggagcagtccagaagccgaccccaccccctgcacctcggggaagagggaacccgggtcagcccgtagcaagaatcattcctgactatcccaggagaccacggcagaccaaaaacacctctctgaacagccttccgcaccgctcgctgcaagcattcgtccacacacggtacacagattgcgggcggatcgtaattcactcttgaaatcacaccctttttagggatattcgttttcaatgactttgggaaagccacgaggtactacatttactacgaagagacc

SEQ ID NO: 29613 - DNA, 248 bp, Homo sapiens; identical to SEQ ID NO: 12063
  chr1:247614695-247614943
  hypo

SEQ ID NO: 29614 - DNA, 1005 bp, Homo sapiens; identical to SEQ ID NO: 28352
  chr1:248020330-248021335
  binary

SEQ ID NO: 29615 - DNA, 265 bp, Homo sapiens; identical to SEQ ID NO: 23716
  chr1:248027980-248028245
  hypo

SEQ ID NO: 29616 - DNA, 85 bp, Homo sapiens
  chr1:248047804-248047889
  hypo
cgtgagccaccgtgcccgttctaatgagagtcttctttaacctccacttcactttctaaaagtgagtctctttttggcgggggtc

SEQ ID NO: 29617 - DNA, 204 bp, Homo sapiens
  chr1:248074847-248075051
  hypo
cgggggggacgggatgatattagtcccaatgtcgcagagggtgtacaccgcctctgtaatatccacgggggaaaaggatgatacaattcccactatcgaagggggtgtacccccctgttgtattgttcctgatatccagggcgtgaggaaatgatatcactcttaatatcgcagggtgtgtacaccctcacgttgataatgttc

SEQ ID NO: 29618 - DNA, 741 bp, Homo sapiens
  chr1:248099374-248100115
  hypo
cggggtgcagaagagtctcagccagagtgatgtgctgggcagcgtccaattttaccaccctccgcatcaggtcaaacagctgcacgtgctccagagagtcttggagcatgtcactcttcagacgtttgcagttcttcacatatgggctgtcagagctgttctcatcccaaactaggccccatttgtagaaatatttctgcttcttggtacaggagatcacgcgtaatgggatgagccgtagggtcttcaacatcaccaggcgctcttggttttcacaggtctggaagagtgtgaaacctggtagtacttaaagagaaggtagcccatgccctggacatggcaggggcgtgtccagcccagatcaaggatcagttcaggcaggcgacagtgaccgtggtcaccatggcgatgtggtgcccacggtcagaggtggcattggggaagtcagccactcggacgctggtgctcctcactgacttctcatcgctcctgtgctcgctgtagacggtgtttaactcagaatccacatgcaggatgttctcggttttcaggtgtgcgtgggtcagccggttctcgtgcagaaatctaagggtgtggcagagctggtgggccatgtgccagacatgtgggaggggaatggctggatgttattctccttcgggaactcaagggttttcctgcccaggagctcaaaggtgatatgcatggaccgcggagggtgaaccagtcacaccccaagac

SEQ ID NO: 29619 - DNA, 399 bp, Homo sapiens; identical to SEQ ID NO: 12066
  chr1:248469372-248469771
  hypo

SEQ ID NO: 29620 - DNA, 2063 bp, Homo sapiens
  chr1:25255291-25257354
  binary
cggcctcagcttccagccacctcgggcagcaccacccccagccgccggcccttcctgccctgcccttttctcacggcagctgtgagaggtttaggggaaaaccgaggcgttttcgtttcatctcgctgcccccttaaaaaaatgaaaatgaaacagtcgcctactccctggcataaagaaaaaggtcctctaaatggctgggggctgccagggttaggggtcccccaatctcaactcgccattcgggacgcataatatccccgagcaaacgtctggagagcagtgccccgatcccggcctagcgccgtccggtaaaatttcggaagcccgagggtgtgagcaggaagcttttgcgaagcggcgcgggaggaggggtgctggaggcggagggtaggccctttcaccgttcgcaccccacccgcggtgtccttgcccctgtcccgggatcctcttctccgttacccgcagggctgtatctgagcgatccgggttaggggggcgcaaaaccccatccgcccatttccgcaccaacgtctctacgcaaggcgccccaaaacccaggtggagcggggcaaccccgttaaaagtcattcctgcagggcgcatccaaaacggaacgccgaggtcccggagccgagcgcgcagccagactgaaccgggtgcccgggtgtcgccgcggcgtctcgggcacctcccatccccactgctcccgaggctctggctcccgcagctcagacgcccggagccccagggccggcgccctcccgccccgggtcccgcactcaccttgaaggcgacgggcagcgtcttgttgcagcgccagtgcgagggcagcacggagcagaggaagttggggctgtcggtgcgcacgagctcgcctgcgtggtccgccagcacgtccaccatcgagcgcacctcgggccgggcgcgccctccgggccccacggccgcctgcgcgctcagcgcgccgctgttctcgcccatcttgccgccgccgccgccgcaggggaaggccggggagggaggtgtgaagcggcggctggtgcttgggtctacgggaatacgcataacagcggccgtcagggcgccgggcaggcggagacggcgcggcttcccccgggggcggccggcgcgggcgcctcctcggccgccgctgccgcgagaagcgggaaagcagaagcggcggggcccgggcctcagggcgcagggggcggcgcccggccactactcgccagggcccgcccgctgcgaggcctcgctggcccgacggccgcccgcagcctgcccggctagtcccgcatcctcggcgcgcggccccgcgtgcggccgcccctcgtggctgtcccggctgcctgggccgcggcggggcccgcgcggggctgtgccgctgccgccgcctcccgccccgaagctcgcccgcggccgccccgactccgcggccgcagccccagaacaaatcctccagaatcaagtggcggggccgcggccgcccgcgcggggttagtacccccggggcccgcggggcggggctggcggagcgacgcgtcgcacagccaatcggcggagcccccatcgcgggcacctcggtggcgttcgcggggaggaacggggcctgccggaggccgcccaacggggaggggcggaaggcgccaccccgcggaggaggccccagtgccacagcccagggcccccgagagctctgggagcccggggcaaatgctagaaatttgcttagaacgtccgggtcccacggaaggcgcccttgccgccctctctcgggtcgtagctccctgacgctggggcgcaaccccttcgctcctcctccccgctggccgcggccgggcttccccagctcttgctgcttcgggcctgtgacttctgcaaccccgggctgggggccgcggggtctcagggccggtgacgccgcactgggagccgccccaaagaggttactcacctccctcgtcccgcacattattctgacccaagagcctccaccccacacgggattttgcgcgtcgtccacgcccggccggcggcctttgctgctcccagccctgcgc

SEQ ID NO: 29621 - DNA, 129 bp, Homo sapiens
  chr1:2999275-2999404
  hypo
cgcagcaaggagaggtggggtgcgcttcatctcagctgccccagggctgagctcagctttgcccgctttgtgcggagtccaccgagggggcctgggggacaggcgagattggaaagcgatggggccggc

SEQ ID NO: 29622 - DNA, 156 bp, Homo sapiens
  chr1:2999791-2999947
  hypo
cgcaggggtcgggtctcctggctgcgccccaccaagcagcaacctggcggctgggccccggaactgcacatccctccccatcatagccctgtcctggactgggcggcgcgctcatttcaaggcagtgcggccatctgggctgggcctggcgctggc

SEQ ID NO: 29623 - DNA, 373 bp, Homo sapiens
  chr1:3052594-3052967
  hypo
cgctttgtccgggagccacaggacaccaggctggggcggggctgggggcagaacgctcctccagcagcctaggagccacccctgggaagaaagggggtctcgggcagcctcgccatgggaccaccagctttgggccttcgttacaggggtgatgctgccccgctgatagggttgggggcctggggctgcagcgtagctgaagtggaacctgcccagcctgcacttcccagctggccagccccgcgcgatgctccggggtctcggcgaggcacgccaggcactgagtcctcagacccgctgtccggggacctctggtgtcgtccattttacagacgaggcagtggaggcccagaaagatggaccgacagtcccc

SEQ ID NO: 29624 - DNA, 671 bp, Homo sapiens; identical to SEQ ID NO: 23723
  chr1:3111118-3111789
  hypo

SEQ ID NO: 29625 - DNA, 164 bp, Homo sapiens; identical to SEQ ID NO: 12075
  chr1:3193780-3193944
  hypo

SEQ ID NO: 29626 - DNA, 589 bp, Homo sapiens; identical to SEQ ID NO: 23726
  chr1:32410105-32410694
  hyper

SEQ ID NO: 29627 - DNA, 223 bp, Homo sapiens
  chr1:3277485-3277708
  hypo
cgggtgccgtcccgcggcgggaacgaggcaggtggctggcggccggagtctatgcactctcgttttctcggcggagccacttgtgtgtgctggagcgaggacactgactaacaacggcggcagtgtctgcggaacagcgttccattgagcgcaggaaaggccttttgaagtggggacagttttaagaggcagcattcctcgcctcacatttcggctctggggc

SEQ ID NO: 29628 - DNA, 764 bp, Homo sapiens
  chr1:32930144-32930908
  hyper
cgactacccagtgaaagaaaccgcgggtatgcaataaaaacctgttgaatcgattaaaccatttcccttatttccagatttttgcggaaagcgccagtaggtgaaatatgtgcggactgatgagtcaaagctcttattccctggactgcattaatacccacgacgtgcttttcgctctccagacaaagagaccggtacttggcaggtccctcaagtgggactcaaaagaccgaaccgagctgcagcctttcgctagcactggtcctcgccccttttggcatcttggtacttgtagttttgtccactctatctttacccgaaaagccagcgctgagaccacaactcccatcaccctgcgagcaccagcgccttcagagcgcatcctccgaggggcaccagcgccattgaccaccctgctggccgaagggcccgccttcccgaggccaggcgctcccgcgattggccagccgccccgcctctcatcggagggcgccaggtgaatgaaaggggggcgtgtcggtgcgcggtgctccgtggctgcgctgctggaacccgctggaaggtgagcgcgaagaagcgggttggcgctgccgctttcgttggtttggggaggattcctagcacccgggaggctggctggagattggggttagcgggcagggttgcccccactcagtcatcctccttcggaccgcttggccctggcaactcctgggacctccgccccgcgagcccttctagcgtggggaggggcaggcgcggcc

SEQ ID NO: 29629 - DNA, 859 bp, Homo sapiens; identical to SEQ ID NO: 12079
  chr1:3321132-3321991
  hypo

SEQ ID NO: 29630 - DNA, 514 bp, Homo sapiens; identical to SEQ ID NO: 27433
  chr1:33219389-33219903
  hyper

SEQ ID NO: 29631 - DNA, 238 bp, Homo sapiens; identical to SEQ ID NO: 12082
  chr1:3343487-3343725
  hypo

SEQ ID NO: 29632 - DNA, 863 bp, Homo sapiens; identical to SEQ ID NO: 22998
  chr1:36042841-36043704
  hyper

SEQ ID NO: 29633 - DNA, 949 bp, Homo sapiens
  chr1:38510073-38511022
  binary
cgtttggtgtggccaggagggcagggccccgcggggagcaggggccgcgctatgcggcggtcggtctgcagcagggcagaagccccttcccgtctgggtgtgtgggagcgcagacccctccggcgtggccgggaaccaagccggggctcggatgaaacgaaacgaaaaatgaacactcgaattttttttgttagttttttttttttttttttgcttttttttggggggagggtagggtagggaaatataaggggaaaaataaattaggctagattaaagctttggctatttcctgcttttatacacagacgcggctctcgcgacctcccctccggggccccgataaatacagtatactgcgatttaaattaagggcgcgggcggagttagaaggaccccaggagccgagaggctccacgaataaataaaaaccgtaaaaaaccaagcccggagaaaggggaaagcggggtggggcgcatccttataggagagaagaggcgtgtagcgaataaagtgacagccccccaccctggacccgcaggctcaggagtccacgcggggagaggggatggagaactctcctcgcttcgtcctctctcccggggaatccctaaccccgcactgcgttacctgtcgctttggggaggccgctgccgggatccggccccgaacagcccgggggggcaggggcgggggtcgtcgaggggatgggggcagagagcaggcggcgggcaggatgcccggggtgagttggcgagttccggatcttcgctcctctctcccggggctcgggcgacgcagcctaccgggctgtcttcgccgctcaccggagagggtcgtccgggtgtttggttttgttcgaaagtttctgggcttttttttttttttgtaaaatccaaagcaaccgaacaaaaagagtccaggccgcgcgggcgggctgcgcgcccgc

SEQ ID NO: 29634 - DNA, 813 bp, Homo sapiens
  chr1:39956953-39957766
  binary
cgtgtcgggcccggtggcgaccacggcacaccacggcgaggcagccgggtggcaccactggcgggaccgggacggcgccgcggccttaggatctctgcgccgaggcccgcggcgggagccacgacggccctgaccacgctgacgcccaggctgcgggctcctcgcccggaccaaccgccagccacgccgaggtcgcacctcggggtcgccccacccgcaacacctgccgccgcccggggctcctagcgggcgcggcctccgcgcccaggccccgcccccgcgcccccattggtcagtcccgggggtgggcgggcggcacagacggctgagccggggcaaggactcgcgggaatcgcgccgcccgggtcgctgccggagctcgccggtcgcccctgcgctgcgcggaccgcagccacagccggactggtgggaacggcggcgacagacggattggctgacagtcccagccctcagaacagccccggcctcgaagcgttggcgtctgcgtccgcgtcagcgtccgcttgtcccggagccggggcaggtgcgcgcggggggcgctccagggaccgcgctgaggccgcagacgccgcccgccgagccccgccccctgctcgccgaactcagctccccgttcgccgtcggggcgtccccgggcccaggggcggcggcggagctgatgtgcgcccgctgagcgcccccggcccgccatggccgcgcgccccggaccgctctggcttctgggcctgacgttgtgcgcgctgggcgggggcggccccggcctgcgacccccgcccggctgtccccagcgac

SEQ ID NO: 29635 - DNA, 214 bp, Homo sapiens; identical to SEQ ID NO: 12084
  chr1:4037053-4037267
  hypo

SEQ ID NO: 29636 - DNA, 738 bp, Homo sapiens; identical to SEQ ID NO: 24853
  chr1:41284015-41284753
  hyper

SEQ ID NO: 29637 - DNA, 130 bp, Homo sapiens; identical to SEQ ID NO: 24854
  chr1:42128212-42128342
  hyper

SEQ ID NO: 29638 - DNA, 913 bp, Homo sapiens; identical to SEQ ID NO: 5881
  chr1:43389625-43390538
  hyper

SEQ ID NO: 29639 - DNA, 1369 bp, Homo sapiens
  chr1:44872462-44873831
  binary
cggagagcttccgtgtggccccccgggcgaggccgcccacggtggtgaggccatccgaggggatgcccggttcatcccccagtccaggagcctctccgagagctcgcggcccaggtcgaccccagctggcgagggcgcgcaggagtcccgaagtagcggggactagggcagccaggaggcagggggaaagctctcgcttcccgttaagcacaccctgcattctcgggtcgtggatgcagctccagcggagagcccgtgttccggccctgagccaggcgcgcgtcgcactgggtgggtgcatggggcccgggccataggtgtgggggcacagccctacctggccggcccgggtcgtctggggtctgcgccggcccactggcccgggagccgccgagggggagagcaccgcactcgctgcccacgacgcccagcagccacatcttgcctctcgcctccgctccggactcggcttgaggggcaaaggggagagaaaggaaaaataaagaaaaaaaagggcggcagtgaggaagcagcgaggggactggggggagcagagtgggcaggggggctttgccttgcctggcctcctctttccgtctcgcgggctcttcctgcaaaggggaatgagcagaggggggaaaggcagaaagagcgtcgaggaagagcggtgctggcgtcttccgtgccgatccctcctggcccgcagagacccggcaaaagtggcgtgagttcgcttgctgcgcttcgaggcaaggctggggaaggccgaggacggggcggcgccgcgtcgcgccgctggtggccgacagggccggggccgggcgcggagcgagcggggacacacacctgttctgcgagccgcgcggtgtgcggcggccggacggccgcggtgcgggccgcagaaccctccctcccgcactgcgcatccgcagtccaggagctggaagggcccggcagccccgcgccggtccgtatttgcaggagaagcgggagtggaggagtccgcggctgcccgctgaagcggtggtgcgcgcggcggcgggacccgggtgacccccggggcggggctgctcgggggctggaggtccttggactttggtcgaaggctggcagctctgagcccctgccccgcgggccccgcgcggctgcggaccaggggcccttgcacgtgtcggttcttcctggactggcgctttggttgcccaaagttgggcgcagattgtttcgtgcggaggttgttgggacccagagtattctatatacaaaggcaaccgagagccggagggagaggtcgggccaaagagtagtgggctcggctccgcgttgggcccaagtttatgtaggtttcgccttcacctcttcttccccc

SEQ ID NO: 29640 - DNA, 109 bp, Homo sapiens
  chr1:4659133-4659242
  hypo
cggcagtcccacgggaacgcaaggccctccgggtggctgagtcagtatgctctgtgagaattgcagagggacagagaaagtttgagcccggccgggtgcggtggctcac

SEQ ID NO: 29641 - DNA, 339 bp, Homo sapiens; identical to SEQ ID NO: 12086
  chr1:4673912-4674251
  hypo

SEQ ID NO: 29642 - DNA, 593 bp, Homo sapiens; identical to SEQ ID NO: 24857
  chr1:46951168-46951761
  hyper

SEQ ID NO: 29643 - DNA, 270 bp, Homo sapiens
  chr1:4726576-4726846
  hypo
cggagaggggcccgtgaatcacgggaggggtgcggagaggggcccgtgaatcacgggaggggtgcggagaggggcccgtgaatcacgggaggggtgcggagaggtgcctgtgaatcatgggaggggtgcggagagcgggcctgtgattcaccagagggttgcagagagaggcccaagaatcgcgggaggggtgcggagaggggcctgtgaatcacgggaggggtgcggagaggggcccgtgaatcacgggagggatgcggagaggggccc

SEQ ID NO: 29644 - DNA, 1886 bp, Homo sapiens
  chr1:47696310-47698196
  hyper
cggctgtagcggaaaaaaacccgctgctttgttctcccgccaaaggagccaaaagggacaaactgctgcgctctgggatgattattttaattaaaatagatgttaatgatgacgattgtgatggtgatggcattagcaattacaataattgacaaaacaaaattctttcaacccgagctagggccccactaacccggtccctcccagagcccggattcggcctcggtctcggatgcgacgggtatcagacccaagcggcaacgtcgctcacccgaagagggggcgggaaaatcttcccaggaggtgatcccgaatgtccccacccgaggctcgaggcctggtgaatgtgcccattgtcctttcggggcctctcccttggagcccggcggccgcacccacgaaactgaccagaaatggatgaagccggagtgcagcgggaaccgaagcccgcagctaccggctcgaaggcgccggcctcggcgagcgctgctcagcttcaagcctggaggagcctcccactcaccaacgaacccctcaaacacctaggcacaggcgggcctccgggcagagcagccgccgaccgggcgctgtccgcccacccaagccaacaactggctcccgaatacatcataatttggaataaaatgtgaaatcccgctccccgcccccatgccgccgcccccaccagcgcctcgatctctcgctcgccctccccccactcccgcccccagcgatttgcaaacgcacctctaaaggacacaggcacacaggcatacaactcagtgcggacaggaccacacagggtccagccccacagaagggcagcaaacaaacaccacctagcactgccccagaagccgacttggtcagccccgcacactgcccaacaggacacaacgaaatcagtcaaacgcagcggctcacggacacacaatccagcacagtcgggatcacacacgcccgacataacgacgacaccacccaaacacagtcgcaggggccacacacccccacacacagaatcagatccctgctgagaacaccaacggagcacaatcgtacgcaacgaagaaaacgcagaagggcctcgaagggtccacatctacacaccccaaccgcgcaggcacaccacactcggacacagagcctgtcgccaagaagaccacacttagaagcagccaacgccgcccacagttctcatgaacgcactctcacaatcccaccgcatgcacacaaccacgaagaagaaatgaaaaccaaccacagcctcgcgcatttctgtatattgcgtaaggaaaagggggaaggaaggaagagagtctccgaggcgggaggggcggcggcagccggggcgggggcgtccgtggaaaatgcccccccaccgccccccccggccatcgaaaggaaccgagggaaagggagcgaagacctcttttgcggacgtggggaaaaagaggaggaaattgatgaagaattcggtgggaggccgcgggttgcttttcccctagaaaaaggccagaatgctcacgtttttccgctacgggggtacgcgtgtggccattttgaggcccggtcctgagcggcggcggcccggcccctcccgcggcccccgctcccccgcccgccccgcgcccgcccggcccctccaccgacgcgctgtaatcccactcacgttccaggcctcgttagcatgggccgaggcgcgccggggccgtgtgcgccgcagagataaggcactgccgcgggtccgcccgcccccgataagcgcctcggccattatgggccaaatgattcattttaatttggcaatttcaccggagggagtggggactggttgagcggcgctaggaccggctccggaacgcgctgcggggagcgttggacgc

SEQ ID NO: 29645 - DNA, 689 bp, Homo sapiens
  chr1:47909457-47910146
  hyper
cggttaattcttttcaccgcttattcctccccatctttctttctttctcctggggctcctcggaccacccaggagccggagttgaggtgggggcggacacttcccctccatatccaatttgctcttgccacagcgggcgcgtcttcgtggttacaaagcgctttttccctgatgacttttttccccttttcaaaaacacttctttctccccccttcaactagcaaccctccccaggcccacccctcctccctctccgctccggtttatttaaacttcgcctcctccagcgccgccgcagcgcgcacttaatgaagttgaaggctcggtgagcccgggtgaagagggtttggaatctgttgaaaggggcgttttgtgacactgattggggcgggggcgggggcagtcgcggaccagacaatgaccgaccaggcgggttttcctgcgcacagggtcaggcgaataaaggcgccgacgctgtttaaacgaaggaccttgtaagagaaagggagaaaagattttgtgtgtggagcgtgcctcgtaaggtttcgtgcttaggagaagttgggaggaggcagctcgcctagagtctttacggaccgaattcggagtttatttcgaacactatgcatcaagccaaagaaaagcggggccagtttgggtttgcgcctaacttaattccgatacgcgc

SEQ ID NO: 29646 - DNA, 570 bp, Homo sapiens
  chr1:47910449-47911019
  binary
cgggaacggatttttccgcgggctagtgggcgcggcgcggcgcagggcggagcgggcaccgcctccttccgtagcggagcgagagctgccgctcgaggctgaggccgctccggaggcctggaggcttcggactgctggactagtggggaaggaaggcggtttcctccgcagcgccccggtgctgcactccgcaccgtcaccttctgggttgtttctggcgctccctctgctctcagcctcgagtcctgggtccctgcggagcgctgtcttttcgctccacgcggactctgagcggaagtcgctcgctgtccgcgactttgcatttctcctgcagcaggggtctctacccggtgccttcctcccggcacgctagcctcctcgccgaaatttcgtcgtcccggagtcggtaaccgagtcccaggctttactgccactccactccctgctgggttatttaagagatacgcggcttccgaggggttttcatcagaccccgcaagtgcgctcggctgggaaggatgcgctccgatgccgctacaggggttccgcgcgtttcaccgcgggaagccc

SEQ ID NO: 29647 - DNA, 464 bp, Homo sapiens; identical to SEQ ID NO: 27445
  chr1:48058828-48059292
  hyper

SEQ ID NO: 29648 - DNA, 678 bp, Homo sapiens; identical to SEQ ID NO: 27450
  chr1:53098674-53099352
  binary

SEQ ID NO: 29649 - DNA, 896 bp, Homo sapiens; identical to SEQ ID NO: 12087
  chr1:6052426-6053322
  binary

SEQ ID NO: 29650 - DNA, 935 bp, Homo sapiens
  chr1:6240609-6241544
  hyper
cgagcccgggcgcagggggaggcgaggaaacaccgcccccgcgcaccccgggcagagccagccgccgccgctcgcctgcgaaggcgctgggccccgagcccccaagggcgcggaggcagggtcttcagggcagcgcgcggcccgctcccccactcggttcacaggcgccgggacccaccccgctcccggctccggcctcggcacgttcctaaccccctctccaaagaggattagaagaaaaatgtgttccacacttggggaaaagacgctctggagactgtgggtctgatttacagcagaaaaatccgcgcaggcgggctcccctcacctgcttccccgctcccaccgcccacgtgcccccttccaaaaagcccctccaggctgggtgcagctgaaacccatgcagacccctaggggtggtgcggatctgcgatgtctgtgcccaaaactcccgctcagaagcgacacctgtcgcagagcaggaaggagccgccgccaccagccctcggtcgttaaaggtgaagatggaggccaaagccctcgggagcaagactggaattttaaatgagcgcctccagtctccgcggcggcaagtcttaaagctaccttaagaacgcaaaagttccaggggctggccgaccgccagctctctaaccccagaaggcccgtgaagggagggccccctctcactgcctcgcaggggcactgggggaacccacctgagacacgcaggatcggcagcagtttcccttcttcccgttcaattttattgccagcaaaccccaaacaaaagaccctctgcattcatccctgggcaaggagaggtcggtccagccttctggaaccaaagactggggtgttgggaacccctccatctcccagatccgctttaactacgctgtagatagagaagccgggtcagcccagtgctggcc

SEQ ID NO: 29651 - DNA, 1990 bp, Homo sapiens
  chr1:63787581-63789571
  binary
cgcccgcatcaagccgggaaagagcaggtaggacctgagtggtttggttgggggagggggaaaaagacatctcagcaggtgtcttccccggaatgagcactgaggccagaggggaatctgaaatctaattagcaggagggagccgggtgcgctgctcttactctttaaagctaaaaacaatgaaacaaaaagcaaaacagagactaagttttgctttttaaaacacgatatgggaacctcgttctaggtcgcccagtccctgtctaaggagtgtgacaaagtgggggggagaagggcggaagggagagggggcggggaaggcagggcagcgacagtcgcacagtcccgcggacgctcccaggcccacgccctgactcgctcacacccacccacactcacacccacccgctccctgggccccagggcccggatccagcctgggtgggggggtctccgggcgggccgcagcgccctccgtgccccggggatgctggcgcacagtgcggagcggagttgcgcgtctctcgtccctttgttgacaattccctgaaccaacttgagtttggccggctcggccgcggccctgacgtcacgcacggtcacgtggccccgcctcccgctggatctttaagtagaaagtaatctatcaggccagtccttaaaacgggactttcgactaccggggcttcggcgtccctgacacccagccccctgcccccccgctactgtccctgcccgcgccctcccgagctgctcggcgcccggcgtcccgcgcccgcctggaccgctcctgcgccccacgccagggccagaggccgaggaaggcgggctaagtgagggggcgcggcgtggagaaccgccggggccgggagcggtagcgagcgcctagtaccgagcgccagggacggcaggagttcgcggagcgcggccgctgggggcggacggcagagcccgcgccacgcgatgcggggccgccgagtgtgagctgagcccagcgggccccaagccacctgcggccccctcccctctccctgccccccatctttcgggggcactcaaaccctcttcccctgagctccgtggcagcccccgaacaccctcatcgcccgctgccccctccccgccgccgctaccaaccccgaggagggatgaccctctccggcggcggcagcgccagcgacatgtccggccagacggtgctgacggccgaggacgtggacatcgatgtggtgggcgagggcgacgacgggctggaagagaaggacagcgacgcaggttgcgatagccccgcggggccgccggagctgcgcctggacgaggcggacgaggtgcccccggcggcaccccatcacggacagcctcagccgccccaccagcagcccctgacattgcccaaggaggcggccggagccggggccggaccggggggcgacgtgggcgcgccggaggcggacggctgcaagggcggtgttggcggcgaggagggcggcgcgagcggcggcgggcctggcgcgggcagcggttcggcgggaggcctggccccgagcaagcccaagaacagcctagtgaagccgccttactcgtacatcgcgctcatcaccatggccatcctgcagagcccgcagaagaagctgaccctgagcggcatctgcgagttcatcagcaaccgcttcccctactacagggagaagttccccgcctggcagaacagcatccgccacaacctctcactcaacgactgcttcgtcaagatcccccgcgagccgggcaacccgggcaagggcaactactggaccctggacccgcagtccgaggacatgttcgacaacggcagcttcctgcggcgccggaaacgcttcaagcgccaccagcaggagcacctgcgcgagcagacggcgctcatgatgcagagcttcggcgcttacagcctggcggcggcggccggcgccgcgggaccctacggccgcccctacggcctgcaccctgcggc

SEQ ID NO: 29652 - DNA, 940 bp, Homo sapiens; identical to SEQ ID NO: 24869
  chr1:6479997-6480937
  hyper

SEQ ID NO: 29653 - DNA, 904 bp, Homo sapiens; identical to SEQ ID NO: 24872
  chr1:66998805-66999709
  hyper

SEQ ID NO: 29654 - DNA, 718 bp, Homo sapiens
  chr1:67773109-67773827
  binary
cgtctctatggctgtgaacgctgagcacacgattttatcgcgcctatcatatcttggtgcataaacgcacctcacctcggtcaacccttgctccgtcttatgagacaggctttattatccgcattttatatgaggggaaactgacggtggagagagaattatcttgctcaaggcgacacagcagagcccacaggtggcagaatcccacccgagcccgcttcgacccgcggggtggaaaccacgggcgcccgcccggctgcgcttccagagctgaactgagaagcgagtcctctccgccctgcggccaccgcccagccccgacccccgccccggcccgatcctcactcgccgccagctccccgcgcccaccccggagttggtggcgcagaggcgggaggcggaggcgggagggcgggcgctggcaccgggaacgcccgagcgccggcagagagcgcggagagcgcgacacgtgcggcccagagcaccggggccacccggtccccgcaggcccgggaccgcgcccgctggcaggcgacacgtggtgagtgaccagtgactcggggtcggggacagagagagccccaggatcccggaccagcggggtgtctgcgtgcccgggattccgtgtctcgcgtctcccgagggggcttcggcgacggcttctctctttatatatatatatgtatatatatatttttaaagtcttccaatacgatcc

SEQ ID NO: 29655 - DNA, 1024 bp, Homo sapiens
  chr1:85462482-85463506
  binary
cggttaacctgaaaacacctgatcctctctccggaatccttgcctggggaaaacgataaggctgccgggccatgcctcctccttcaaaactttccagggctctcgggattcggaacaggaaacaccgttcacggccgactcatttcgccctcgccgtaacgcgtccgccgaagttggagccctgcaaagcggggttcccttctcttaccctttctgccggccgcgtggtgcgcgcagaccccggcccgagagcaggcgccgcagtcgtggagtgcggcgggcagttctcgggcggctgaaaggcggctctgtgtgcaccctgcaggatgcggcgcgtggccaggcgctcccgccccgcccccaaggggctgccccgccccgccccgccccgccgcctcctaccggggaccggagcttccccagttggggtcctaggggacttattccacgcttcagcggaccagcctccccgcgctcccggagaagggggtcggcgacgcggaggcggggtgggggccgtaggggatggaaccgaggcgcgcgcgagaagagccgaggaagtaagcagtcccaaaagggggcggcggtggggcccccagggaggcgtggggcacgccaagggcgccgtggggcactgacctgtggtgcggcccccaggacaggcccgaggcgcggttgcacaccggcaggtccagcacctccatgcctcgaggcatggcgcggccagggagcggcaggaggacacctagcgtgggacggctacacctgtctgggcgcaggcccgccgcccttgcactctccacccaagtgcccaacgctgcggtacggcccgctttggctcggggtgtctgccggagaagcgccttacagagggacccgggcggtgggccctgcggcaaagtggcccacgcaccctccacaccgctcccgggcggccgcacctggcactcccggccctctggggttcctgcctttttcgggggggtggtggtgagaccgggtctcactctgtcgcctgacctgc

SEQ ID NO: 29656 - DNA, 1156 bp, Homo sapiens; identical to SEQ ID NO: 12095
  chr1:90098160-90099316
  binary

SEQ ID NO: 29657 - DNA, 669 bp, Homo sapiens
  chr1:91869781-91870450
  hyper
cggctggggaccgaatcagcacctaaagcaaaataacagctctgtggatttcctaaggagaatatcctaaatccaaggcagaggccttagggccccgagagtggcacaagaacggggcgctggggcgcgtcactccaccccccgggtcccgtttcctcccaccgctgtgaaacccgcggctcagacagatgggtacgtcccccccagcgctcgctcagggggcgccacacaccggaacacaagacacaggaaccgaacaccaatcagccgactttaggggcgggccggacgcccagccggtcccacctcgcggggagctgggcccgccctgcgcccgagcgcgccgcaggcctcaccgctttctgactggaaatgcggctgaggcgctggcgcgggccggcggcctggagacgcctggtgaccaacaactcgccgcgcccgtccgctgcctgcccggcagacggctctagagatcgaccgctgcccggacggctcggctgggtccccacttccccgcgggcgtcgggcccccgtccccaccttccccgcgggcgtccgggcccctctcctcacctccctgcggacagctcctaggccagtcgagcgccgatttatcagcccctctgaggaccgccaagcctggctaagccgagctccaagcaatggatc

SEQ ID NO: 29658 - DNA, 476 bp, Homo sapiens
  chr1:92495420-92495896
  hyper
cggcctggcccgccgcaccccgcaggcccggctctcccctgcgcgctccgggctgggcgcggcgcgtgtgcggagccgccgcggtgacacggaacgccggccgccccgggccgggggaggcgcgcgtcgagaggcgacggcgggctggcctggcgcgctgcggcgctcgctcacccgctcccgaggaagggcagtgggccccgccgccgcctcccaatggcgaggctgcgggattgcctgccccgcctgatgctcacgctccggtccctgctcttctggtccctggtctactgctactgcgggctctgcgcctccatccacctgctcaaacttttgtggagcctcggcaaggggccggcgcagaccttccggcggcccgcccgggagcaccctcccgcgtgcctgagcgacccctccttgggcacccactgctacgtgcggatcaaggtgaagggccgcgcgggcctggcgggagc

SEQ ID NO: 29659 - DNA, 3973 bp, Homo sapiens
  chr1:92948154-92952127
  binary
cgtcactggccagctccgcgcaaacgaatctaagcgacaagcagctagggtcctgccgcctgggatggaggcagcagccccagcgggcaagctgtccaagtcccagagaagccggatgcctccttcccctacgaatcagctcccttctcccggaaagactctccaactccccgttagcatttctacgcccaaggtcgcgccaattcccccccagcactgccgggtccctgcagctcccgcccaagaggttcccagtgggttcctacctggagacgcggagggtgacgggggcctccagaagtcctcaaactccgagctccgttcgcagacgctgccttcgcagctgtctggggatgcggaggctctgtctggggcttcggtcagctgcgattcgggggacaaacggtcccggggctccgccttcgccccgcctgcatttgaagtgctgtctgcaaagaggaggcaggtgaggggctcaggctgggaccggttgagtctgagggtgctgaaggctcccccaatcccccgaccagggcagccgagcgtcttcccctctccacccagaccccggccgggaaccctctcggatccgagggcaggcgcagagaggccatggcacctaggagacaaacccggaggaaccaggacagtaggaaacaaaaacagcagcaaaagggacgttggggcagcccctcccagctccggactaatggtgtgccgaggtgcagtaggcatccgggggagcagccccgcctggcccgcgcgcgcctcgcacctgctcggctaggcgccggtacattctctaaacggagggaatagtctggtcctggggagcgcggctggtggtagctgtgagccttcttgcttttgacgagaaatgagcgcggcatggtggtccggcactttccccactgcgccccaagagtccctggagccgctgtcacccacggtcactccgagggcttgctcagccccagcccggaggagacctgagagggaaagaaaaccaggtggagacgtgggtcagtactctccggtgcggcggactgggcacccaggcggagggagagcgcgggccagggaggcgcgcagagggcccacgggaggaggggcttgaccctgctgcgccgcgcttaccaggtggcacttggacaggtggcgcgaacccgccgtcgttgccgccgccgccactgacacagctcagcggtaaaacctgtcccggggccctgtctcaggcccctttcctcctccctgcccacgccccccagctcctcccctttcctagcgaagctcgctccggcaatcaaactccctggagagctgtagttcccatcgggtgggttaccccaactcagctactcatcgcctgcctggctgtgctttacggctggcgagggagggcggggacacgcggatcggtttaggggccggggatgcccagtggtcgaggacccggaaggggcaaggagccaagacctccaagagccagctaccaactggagtgaaaggaccggggggaggggggaacagaacacaagataaaactgtggggcggcgggaggacagcagcagagggattggggacagcagaggccagagaaaggaggtgggagagcaaagggacaggaaagtgaggggaacaacagacgaccaacccccgccccaggagaaactcgcatctgggtgatcccactcgcccctcactagtgccccacgtaggagaaactttgcccttggactcccggctgcggcgggcaccggtcgaggctgcggcgagccatcccagaccatggagacctaacctcgggaatcaggtcccgggaaaaaagcactttccgttctgctcaccaaaaaatcttgtcctagggaggtggagcccgatccacgaacgttgactgggaaatgctaggtgtcccgagtcggtagtgcaccgacaatttagcagacaaaaaagacaggacgccagagcgcgcaggctgcattagcagagagcgggggtcgggcccgggcccgggagggaactagctgcccggggcgtcgctctcattaacccccaatcagttcacctaataccaggtcgaaatctgagcgcagcgggagggcgtggctgcgcctgccgctaggctccagccggctccgggggcggtaccccacagtcgaggtggtctggagtaaacgaatctgccttcctcccggggtgaaggcgatggtgaccgggttcacacgtgagctgcagtacagcagttctccgtggcctcggctggttcagaaacgagggtgctgggaactctgggccggggcaggacctgcagtcctccggcttcgcgctgtttccactgccggactaggagcccctcggcttcctaggcaagatgcaggccacacagtctacgtctgtccgttggcgctctcagctcaaacgagtcctacaggccttggtccctgtagggtgcaggccccctgctccagatccccagccccattgtgtccccttctccggaggaatgggaatagacctgggagaaaagacgcctgggacgtgtcgcggggctcccgcgaagtttcccgctacccaagcgccagaatgcccctaggggtgagagtgccatccgcctccctccggggtggctcctagggctagagctttgtcgcttcctgcacttctcgtccgtacaattagacgccacaaaccccaaacccaattctttaaacagccacgaaactcggaagaaaagaaaaacggagtggcgttgtcccgagggtcccgctgcagcttggacccacgttggctgggagcgggacagatgggggcggggtaactgtcagcgccggagctgggtctgggctggcgccaccagagaccaggcggacgcggaggccgcctccccacccgggctgtaagcccacgcctctctcgcaccccggcccgctttgctggttcctgtggggagcgacagagtttggaggagataggggccccggggcctgggccgagcgcgtgggaaggcaaccccgcgctgcagctggcgcgggaggtggggcggcccctccgcgcgctcaggcctctcctcaccgtccgggcccaggaaggagggagccgagggcgctaagggggcgtcctcccgagcgcagctgccgccgcctccccaccagatgtttccttccctggtggatttggctcccctgccgaaccaccagaccgcctgctgcgcgcccccagctccagatttccagtcacactgcgcgggtcgcgccctaacccagctgccggagctctctgggctcccgcacggcggtccgcagcaggtgggaaaccgcccgcgccctctgatcgcccccgcagtgccagtgctctgcgagtccccgcggccgcccccaccagggcaggaggcgcagaacaggctcggcggacctacctgcggagtcacggcgcgggcaccgcgctaggagagttttcaaacggaatcttgctttcgggagagaccgctctatctctctgacttaaaaaaaaaaaaaattctccttccgagctcagcccccaaaaccacaagcttcacttcctgagcgttactgagtcgctcgcatagccctcccagacctgctcccaacccccgtcgggcggccgggcgcgctcctttgcgcaagtggccaggcggtggggggcctggcctttccagcccgtcccgcgcgccccttagtagtcctcccagttctctccctgtgggtcggcaggggatgggggaaattggaggtccggacacttaggcactagaaatgacttgaaagaaaatgaactattcttggctccagggagacttccgcagcgagagaagccacagattgaggacacagattgactggcgagagaggggtggggggcgccccgctccgaggaccctccccgcccctcaggcctcggtcacccgccccccccacccccgaccccgccgcctcctagggctgcaccaccccc

SEQ ID NO: 29660 - DNA, 1351 bp, Homo sapiens; identical to SEQ ID NO: 26139
  chr1:9711649-9713000
  binary

SEQ ID NO: 29661 - DNA, 833 bp, Homo sapiens; identical to SEQ ID NO: 24886
  chr10:101292301-101293134
  hyper

SEQ ID NO: 29662 - DNA, 855 bp, Homo sapiens
  chr10:101294530-101295385
  binary
cgaaacgcgcctccgcctgctaagggcgttctttgggtactggggctgtctcagggtcccacagcgccaggagccacaaacgttcccaaaagtccagccatttactaccgcacgctctgcgcagccaccaaaaagggtcacggtgctccaggacaggagccgcggtgcggccgggaacagctaaggacgctgttgtttgcttcttccgcagaaagctgccagctgaagaagtctctagagacggccggagactgcaaggcggcggaggagagcgagaggccgaagccacgcagccgccggaagccccgggtcctcttctcgcaagcccaggtcttcgagctggaacgcaggttcaagcagcagcggtacctgtcggcacccgagcgcgagcacctcgccagcagcctgaagctcacatccactcaggtgaaaatctggttccagaatcgcaggtacaagtgcaagagacagcggcaggacaagtctctggagcttggcgcacacgcgcccccgccgccgccgcgccgcgtggctgtcccggtgctggtgcgggacggcaagccgtgcgtcacgcccagcgcgcaggcctacggcgcgccctacagcgtgggcgccagcgcctactcctacaacagcttccccgcctacggctatgggaactcggccgcggccgccgccgccgccgccgccgccgccgcagcagcggcggcctacagcagcagctatggctgtgcgtacccggcgggcggcggcggcggcggcggcgggacctccgcggcgaccactgccatgcagcccgcctgcagcgcggccggaggcggcccctttgtgaacgtgagcaacctaggaggcttc

SEQ ID NO: 29663 - DNA, 641 bp, Homo sapiens
  chr10:102497154-102497795
  hyper
cgggttagggcggccgcttacccggcgcgcgtggcacagcggccagcggcccgactccgcaccgcacttcctttcccttccctcttttcccgcctttgcgggtgcgggtctcgtgttccaggcagcagcagctccgggaaaggcgggggggagctgcggagctgggcaggagacagggctgtgtttgggaaaaggaaaccgcacttcgaggcggctccgcagagcagagctgcagagtcttccgccctcccagccgccttctccctttgcctctttctcttttcaccgccccctccctcatctcttcggtagccacgtttggccggggcacaactccctggaggccctgcccccctagacggccccgagcccttttggacctcatccggctagtttaaaatgacaatgacagaggcgcgtgaccgaacgtgcctgccggacgtcctggcgcaactgccgcagccgggtttgcgaaggatgcgggttttacttagtctcgctgagcctgttccggagcagcgaaaaccatcaggaaagggcgagagaaggaggaaggggattgaatcagcaactagggcaattgtggtcttcagctatcgctgcctatacccccagaacttacaaaaataagccgtttattc

SEQ ID NO: 29664 - DNA, 999 bp, Homo sapiens
  chr10:102586603-102587602
  binary
cgccccacctccgcccggcccgcccgccacggccattaccctgcccgcgacacctgcgcctgagacccggcgggaggagcgggcggagaagccaccggccggactcgtggggtccgccctggcttgcaggcgtctgatccccactccccgaccctcccgcagggagcgagttctccggcaacccgtacagccacccccagtacacggcctacaacgaggcttggagattcagcaaccccgccttactaagtgagtacgccacctggctggccggcggctcagcgcggccgcgcggcttctgggcacggtcccactcccggcgacccgacctctggggacccggccgggccagggggacaggcttgttagtgcagcactgaggcccggggacccctcgaggacgcccgcacctcctgccctcccgtgccctccctggtcgctcgaaggctctgcgccgccctcgccctcggatcccctggagggtgcgcagccgggcgtcaccagatcgggtccctctcatgccccgtgaacgcaactattctccggggcaactggctccactgcccagccaaggtctcccagtccggatcccgctggaccccagccaggggaggtcttttctgtgcttttctttccttttttgttctcctgtttgtcctctcacccagcccattcttctcctgtgttaacttccaggttccccttattattatagtgccgccccccggggctccgcccctgccgctgctgccgctgcctatgaccgccactagttaccgcggggaccacatcaagcttcaggccgacagcttcggcctccacatcgtccccgtctgaccccaccccggagggagggaggaccgacgcgacgcgatgcctcccggccaccgccccagcctcaccccatcccacgacccccgcaacccttcacatcacccccctcgaaggtcggacaggacgggtggagccgtgggcgggaccctcaggcccgggcccgcc

SEQ ID NO: 29665 - DNA, 835 bp, Homo sapiens; identical to SEQ ID NO: 27460
  chr10:102894440-102895275
  hyper

SEQ ID NO: 29666 - DNA, 749 bp, Homo sapiens
  chr10:102899933-102900682
  hyper
cgctggggcctggggcgtccggggggcggcctttgagcttcccggataccgctcgcctgctcccggagctgttcggccgccggctgcccgggtcgtgcactttcagtagggccccgctgactctcctgcccttgggctaggcctcccggggatgccagactcctggggacgctgggacccgcggcgcggcgggacacgcaggactcccgcctctccgcccggaattcgttgagacggaatctcagcggatcccgcgtccgccgagcgccgcggccagggagaaaggccggtgtggcggctggacccgcaaactccgtcccaagtggggcggaggctggaggggaggggggctgcgagggtcacagtcaaggccaactactcacaacagaaagctcgaaactctccctctacctcccctgccggaaatgacccgtctctgttcaaaaatagaaaaagaacgatcggaataattgttcgcagaggtgccgggagagaaggggaattaacaaacctgcctgcgcggagaggtctgcttccttctttggcttcagaaccgacggcaatcaccaaattcctgcggccagcgagccctgcccctcagatctggccctctggttgagtgggtggcggcctgaggggccccaggaacccaggcagggatggggtcctagaggccctgtgcagtgcggtgggtggcacacagagaatctggctcaacctgttaactataatagcggctttgtgtggcc

SEQ ID NO: 29667 - DNA, 773 bp, Homo sapiens; identical to SEQ ID NO: 26144
  chr10:102996797-102997570
  hyper

SEQ ID NO: 29668 - DNA, 794 bp, Homo sapiens; identical to SEQ ID NO: 27461
  chr10:103535710-103536504
  binary

SEQ ID NO: 29669 - DNA, 273 bp, Homo sapiens
  chr10:105344345-105344618
  hyper
cggcggccgtcgctgcggcgcgaggcggacgacgcgcgcctctcggtgagcctatgcgacctcaacgtgccgggcgcggacggcgacgaggccgcgccggccgccggctgccccatcccgcagaactcactcaactcgcagcacagccgcgcgctgccggcgcagctcgacggcgacctgcgtttccacgccctgcgcgccggcgcgcacgtccgcatcctcgacgagcagacggtggcgcgcgtggagcacgggcgcgacgagcgcgcgctc

SEQ ID NO: 29670 - DNA, 206 bp, Homo sapiens
  chr10:10965173-10965379
  hypo
cgcttacgctgtgacgtctaggaaaaatggaaaaatgcaactcaggcaactgccaactagtgatatgtggctgggaaggaagacggtggcatttgagaacagttttatggtttggttttcattggctatgactgtcttgaaatgttccgaaagaccatttacacgggttgcataagggtggagtatttccaccgtaattaccttac

SEQ ID NO: 29671 - DNA, 974 bp, Homo sapiens
  chr10:11059337-11060311
  binary
cgtgcagagacaggtttgtcttccttagggcactgcgataagtccctaaatgtcacttgggtcatagatctgatctttattttgcctaaacctcctatatcctttcggtgatcgcccttagttcctgcccgggcaagcacaccacaccgaggagcatcgaagcgaaccctcgggctgctcgcctcccgcggctgggctctgggagcgcggctcgggtatggaagtggagcgggctttggcgcctgggtggccctaaacctactccgagcggccacggcggcctcttgccagggacccccgggcgggggagcagagccaggcggggagcgggtttgccttcgggggcccaggggaccctgagaagtctggccgtgcccgggcggtgagcgcggaggcggcccgccctgtgtccccgcggggcggagccgggttcggggccgcgctctgggccggcgggcccgcaggggttaagcggcggcgggcgccccgcgagctccgcccccgcccgccgcacctggcgctcggcagccggccgccccggcgctggatttcggaggggattggcggagcgcgaggagagaatgtgacaagtgccggctcggcggccgccgggggaggccgcgcgcacctgtccctgcccgtctcgcgccgcccgcggccgctcggacgcgcgcagagccgccccccgccgctgccgccgcgtgcgcccgcgaacatgacttctgccttcaagctggatttcctcccggacatgatggtcgagggccgcctgctcgttcctgacagaatgtgagtggcgccgcgtcccgaggccgggcgagcgggcgtcctcctcccagagtcggcggcgcgaaggggacgggcgtcgcccgcagctcccgggcgcgactcggccgcttcggatccgtcgcctccctcggccttcggaggccggcacgggacgcgggaggagggagcgggtgcggacgagcagc

SEQ ID NO: 29672 - DNA, 1260 bp, Homo sapiens; identical to SEQ ID NO: 24898
  chr10:118890928-118892188
  hyper

SEQ ID NO: 29673 - DNA, 767 bp, Homo sapiens
  chr10:118893719-118894486
  hyper
cgcggccggggcgcctgcgtgcaatccccccggcccggcgggcccgggacctggagcaccgcccacagccggcgggtgcggggatgcagcgcccgctgggcccggggcggcggcggcggctgcggcggccgagcctgcagcggcgcccgcgcccagggccggcaagctgggcccgcgcagcgctgagccgagagcgcccgtggcgcaaggcggcagcagcgcaggcaggccgggcggcgacaacaggcggccctgctccagcagccgtagcacgctgcacgtggccgcggtctccgacaccaccgagcgtagctccgagtccttgccctggtccttcttctgcttggtgcgccggttctggaaccagaccttcacctgcgcgccggggtgcggggagagttggagagaggggcagggaagaccagcgtcaaaggaagcgagctcccggggcgcgcggctccggggctctccccaagtcccagccctatccgcagccccacccagcagccggaggggtccgggccggggcgctgctgggggagctggcgccgccacgagggggacacagctgctccaccgggctgcgcttccgggtcagggaagcaggcccaggcaggcgccgcttacacagaacaaagtaataaaatgcccacggcaggaactcgaaggaagaccggaaagggtttcactggcttccgcgctaccccgcagcggtgtttggggctcacagatgtgtgaatcagtgcagtcccaaagccggaatttcc

SEQ ID NO: 29674 - DNA, 239 bp, Homo sapiens; identical to SEQ ID NO: 12108
  chr10:121265805-121266044
  hypo

SEQ ID NO: 29675 - DNA, 1308 bp, Homo sapiens
  chr10:121301363-121302671
  binary
cgcacccaaaggcctgcacaggtcgtagctattgtgatgagcaaaagggtggaaggaccggaatcaagggcacggctccaccttcaccgtggggtctttggcctatcaagttgcccgagatcgtggctcaggctggcccaaagtgacggccaaggcgaatccttcgtaacgtcagaacttcgctggctcggaccgcagaagtgcccttctccatcctggggttccgccaccctcgcgatcccaccttttggctcctcgcggcagaagcgaaggcccccgacgccccaggcccaggggcccagtcggatgcccgggtccagccgtgctcccccgggcgctcggcatccttccacccacgcccgcagcggaggcggagagcgtcacggagggagaagcccgcgcgccgttccgctttcggaatctggagccccatgtcacctccaaagtttggagatttggggcgctcctttttctcccagaccatcactaaaaagaaaactgcggctgttcctctttcagccaaacttcctccccggggctcccggaggagctctgcgctcccgtcgcggctgggaccgcgaaggtgcggtacccagcggggagaggtggtgcggtcggccggggctccagtctgggaggtaccaccgagccgcgcccgagcacaagagggagggcaggaggccgggcgggcgaaacggcgccccgaccccgagcccgcgggcccccgaagccgcttacctgacggcggccgcttcctgctcagccggctcacggcgcggttgaacatcgccgcgggcgcccgaggaggaagaaggagcagcccggcggcgcggcggctgagccggaggaaggcgaggaggaggaggagggcgaggaggaggaggaggagggcaaggaggaggagcgggctcagcaccgccccggagctctaggtccccgcccgccgccctcctcctagccaggcgccgcgtggcgcgctcagtgcgccctgcccgcccccgctggtgaggactcgcggttccgctccggggtgcccgggcggggcagggcagggcagccccgggtgacccccgatcgcccagagtgtgccccgcgcctgggataaggtgcactggcccagagggagcccgcgccgccgggaacttagtagccccgcggaggcggttagcgcgtcccggggtccctggccctcgcctgagatgccgccccggcccgccccgcccagcttcaagctcccgggcccatcgcggtctcccgccttctccctgtagccccggagaaactggcacggcgccgcgggcgcaccgc

SEQ ID NO: 29676 - DNA, 1193 bp, Homo sapiens; identical to SEQ ID NO: 6732
  chr10:126106668-126107861
  binary

SEQ ID NO: 29677 - DNA, 392 bp, Homo sapiens; identical to SEQ ID NO: 12112
  chr10:126819324-126819716
  hypo

SEQ ID NO: 29678 - DNA, 379 bp, Homo sapiens; identical to SEQ ID NO: 12113
  chr10:126830153-126830532
  hypo

SEQ ID NO: 29679 - DNA, 242 bp, Homo sapiens
  chr10:130203310-130203552
  hypo
cgcacagcggtgtgatgtgtaagctgcacaacatcagggcgggagttgatgtggcccacagtgtgaacggcgccctccaagatgagcagtgtgatgctccgcagagtcgtagacaggaaaagtggaggctgaagtgggaccggacagcactggcacggcttgactttggcaatggacaacagggaaaatggaggcgcaggtgagaaaggaaggcaggtgaagcgcccgactcactccaagcc

SEQ ID NO: 29680 - DNA, 175 bp, Homo sapiens; identical to SEQ ID NO: 12114
  chr10:130300191-130300366
  hypo

SEQ ID NO: 29681 - DNA, 98 bp, Homo sapiens; identical to SEQ ID NO: 12115
  chr10:132869762-132869860
  hypo

SEQ ID NO: 29682 - DNA, 992 bp, Homo sapiens
  chr10:134601242-134602234
  hyper
cgggctctgagctgagacgcgggaactgcggggccggggggggcgggcagggggagttgggggcgggggctgctgtcgccctgggatcccccactctgcgcggccgggcagaccctgggcgggccgggaggggtgcgggtcgcccgaactgaggcccaggaggcgcgcgcgggcggaacggcgggaggaagccgcgctcgggacaggctctggctcttctcacagcctggaggggcggggcagggggcgtcgctagcgctgttttatggctgaggaaacatggacctggaggcgctgcgctgcggcccgataaaccctgggtctgtctgcgccccccggtcctccctgggctgccgagggaacgcgtggggtcgcgggtggggctggcgtgtcactggctgcggagcgcgcggctctccagggctcaggggcgcgggatgaggggccagggtgagttgggggcgcagaggagccgggtaagggggggtccctctcccacgttcttgtaagccgtggaagtcttggcgcgctccgcaggtgccgcgtcctacccggctccccggcctgcgccccacgcgctttcccgccctcctcctcgcggagctgcgcgtgggtccggtggcttcacctcctacgcttcccggcgcccactccgggccccgtcccctctccggcccccgcccgcaccttttctcctgcgtcccccggtgccgccctctcggaaaccaccgaggcaactccccctcctcccgggaaggtccgagcgcctccgaccgcgatgtctttgcctgggctccgccgcccggcggccccgctgcctggagaggtccgcgatgccacctcctggcccgcgagcagatgtcccgcgaggaaggctgccggcatcggcgccgacgctccgcgctggaaaaccgagagcgcggggtttggcagaggccattcaagtttgttttactcgttcagcctgtatttgtggggctcctaccgcgccc

SEQ ID NO: 29683 - DNA, 117 bp, Homo sapiens
  chr10:134659540-134659657
  hypo
cggcatccgtgcccgcttaccttggacacggcggccagcctctgctccacacgggcgcccaggctggtggtggtcctgtcttggcaccggagctggtgctgtagctgcagcagggcc

SEQ ID NO: 29684 - DNA, 118 bp, Homo sapiens; identical to SEQ ID NO: 12117
  chr10:134680051-134680169
  hypo

SEQ ID NO: 29685 - DNA, 502 bp, Homo sapiens
  chr10:134830248-134830750
  hypo
cgctgggcgagcaggccagggctgcccgtctccacctttgtgctggaccatttacaatcaaagcgcagcatcgagatacccaggaaagagccaggaacaggccaggaagctgctgccccaccactgaccccaccgctctccttccctccttccttcccgctgggctgggcacaggtggagctcaccgtcgtcccccttcatcccttggcccctccaaggctcaaggactggaggccgactgggcagcagacatgtcaccatcaccatgctccccgtcaccacgctccctgtcgccatggtcactgtcaccatgctccctgtcgccatgctccccctcgccacgctccctctcgccacgctccccgtcgccacggtccccgtcgccacgctccccgtcgccacggtccccgtcgccacgctccccgtcgccacggtccccgtcgccacgctccccgtcgccacgctccccgtcgccacgctccccatcgccacagtccctgtc

SEQ ID NO: 29686 - DNA, 449 bp, Homo sapiens
  chr10:134875690-134876139
  hypo
cgcatgaaaatagccagttccgggggctccgcacccgcgtagggggcgcgtcggtcctttccattttagctgcgtgggggagggtgttggcggcaccattgtgctttcattccacgtttcctcagtgattcaacacgttaagtaacgtgtcacgtgcctgctggccaccaccgtccgctcctgggaagaacctgttgactcagctgccgttttacctggatcatccgtcatctttctctcgagatagagttctccaggctttctggacccggacacacatggcaacacgccctgcagacaacctttcccaaagccacggcttactttgtaactcatcatggtgccttttaataatcaaaaattcctaattttaatgaagtccaatattcctgatgtttctttacaaacagttctttttatgccttctttttaaaaatctttgtctttgc

SEQ ID NO: 29687 - DNA, 1339 bp, Homo sapiens
  chr10:135043450-135044789
  binary
cgggggtaggctcggcacaggctaaaaacgagcggagccgccggggcttaggcatcgcggcacctccgttgaacgggtctaagaacagaactcctgaggaccctccgtttccaaccgaagccagtctttgctctgcgtcttcccggccgcagcgccaggaccgaccccttaggacccggcgggcggggcggggcgcgcggggcggggcggggatggtgggagggtcgcgtagacccggctgggacggagggacggcggcgcgggatgctcagaacgcgtgtgggcggcccgggcggcgtctggccctctccccatcctcgcgcgccgcgccccagccccgggatgctgctccggccccgcaggccgcccccgctcgcgccccccgcgccgccctcgcccgccagccccgaccccgagccgcggacacccggagacgccccggggaccccgccccggaggcccgcctcgcccagcgcgctgggggaactcgggttgccggtgtccccgggctcggcgcagcgcacgccctggagcgcccgggagacggagctgctgctggggacgctgctgcaaccggccgtgtggcgcgcgctgctcctggaccgccgccaggccctgcccacctaccgccgcgtgtcggccgcgctggcccagcagcaggtgcgccgcacccccgcgcagtgccgccgccgctacaagttccttaaagacaagtttcgcgaggcgcacggccagccgcccgggcccttcgacgagcagatccggaagctcatggggctgctgggcgacaacgggcgcaaacggcctcgccgccgctccccggggtccgggcgcccccagcgcgcccgccgcccggtccccaacgcgcacgcgccggctcccagcgaaccaggtaggcgggggactggggggccaggtggggccgaggactgcggaggaaccgggggctgccgagggctgcgggggaggggcgggcgcgccccgcgaaaatccgcccgaccgcctgctccgcgttcccagacgccaccccgctgcccaccgcccgcgaccgcgacgcggaccccacctggacgctccgcttcagcccgtccccaccgaagtctgcggacgcctcccccgcccccggctccccgccagctcccgccccgaccgccctcgccacctgcatccccgaggaccgcgcgcccgtccgcggccccgggtccccgccgccacccccggcccgcgaagaccccgactcgccgcccggccgccccgaggactgcgcgccccctccggccgcgcccccgtcgctgaacaccgccctgctgcagaccctggggcacctgggcgacatcgc

SEQ ID NO: 29688 - DNA, 293 bp, Homo sapiens
  chr10:135090197-135090490
  hyper
cggggtccgcgtcgcgtcctgcggggagagccaccctgccccgcgctgcgcccgggacggttccctggaaccactcaccaggcagcatcatcgcgcccagcagccagagcccgaggccgcgcatggccgggtcggggagcagaggcggaggtgacagccccgcgggacacggtctggttcctgcgctcctggcccgaggctcttttccgcgcgccccgccccggcgccccgcagccaatgggcccctcggccggtgggaggggcggggcgcgcggcacctgggggcggggtcc

SEQ ID NO: 29689 - DNA, 558 bp, Homo sapiens
  chr10:1443319-1443877
  hypo
cggcagccacaaacaccgtcaggcccagcgtcaccctccccacctcccggatgagaaggagcctccggagcagctgagggacccactgtggaggcagccgggtgggggacggcccggtgtgtgtggtctggtcgtgactttcccacaaggcatcacccatgggaaggaggcgtgatgatggtaagcagcacagagccctgcggggaccagggttttggaacaccccggccttcggtcatgctgcgggaagcctgggtcctctccctgtcagagaagacagctgggttctggggtttcacagcacacgggtacccccggttccaggactgaccatggagggcaggtgccagcgctgttcggggcctccggtgatggtcccagctcccttcccacaaaggccaggtgcagccttggaatcctctgacacttggatccccatggattcaatgggagctcgcatgctgtgaagaccgcggtgcattttaaacggcaccagcaaggaggctacactgtgtatcccgtgtccccatttctaccgaagagcggcggcttcacggc

SEQ ID NO: 29690 - DNA, 954 bp, Homo sapiens
  chr10:16563076-16564030
  hyper
cgccccggcggcgatcaggcgcctcctgctgcccaccagccggctcagcgcggggcgatcctcttgtctgcttttggacagaattttgaaggttgggcggggacctcttcagagccgaaaacaaccccctgcgaaccccaactcccctgggcgtgcgtgcgccggccgctgctgccgactcctgctccccccgcggaggctgcggctggggagggagcgcgggcgcccagtgacttgagccgaagtcccgagcccggggtgggggccgggggaggggtgcgcggggcgccctcgccccccgcgagctccttcgcacctgtggctgcagccggcgccggcgcggccaccgggagggcagagccagccgccgcctcctgagctcgcccgggcagctcacacttttatgccgccgccgcctgcgatcgacttttccgtttttgcagactgcgcctgttcgcaccaactttccgtctgaagttgcctttttctgcctcctcctcctcttctttcgctcgctcagttcgcccgtccgctgccttttttttttattgcctcctttctctcttcctcctttgccaccaccacaactcgaatagacgcgcaccccaaagccccgcgtgggcccgggcgtcccccgggtgcgcccagcggcggcggcggcgggcacggtcggcacggcgaggctcagagctggggcggaggagcgagcgagcagcggcgagcgcctcacggccgggagcggagcgagagagagactgaaggcagaattctgcctgggtaccacctgccaggagaagaggaggctgacaaacgcgcgccggagcaatttataggcacccaaggcacagaggaaggggagccgctttggcatctcattgcagcatctgctctgctcatcccactcagagagagtttggcattactctgacaatgtgggatttttttttttttttc

SEQ ID NO: 29691 - DNA, 588 bp, Homo sapiens
  chr10:1708231-1708819
  hypo
cgggcatggaggctccaggctgagaccagcattggatagggtgggtgggcagggattacttaggtgccaataacccaggagtagaggagatggcaccgctataaaatgccacgagaggtgcgcacaagggttcagggctgcatagaaccgggagggagaggaagaccccgctggagcaagtgccagggtgacagagccagaggactttctgagatagcacagccccgagggtcggcagggcactgagggccacctgccctgcctgccccgccagggcgagcatctgaatccacattctcctgggccgcagctcatctgcgagtcggagcctccgaaggggggccagtagcacatgtcccagcctctctcgcccaggtgatcctcatgaccagacgcggctttgctacaagacagctcagactgtgttcccccaatcgtgttcccgcaggaaagctgcccgaggatttttgtcatgcacacgccgctgccagcccattagctctccctgcttcccatggtctgccgcatctggggtatccagcgtcctcctgcagccgagggggaattctgaatgttttgctagaaacc

SEQ ID NO: 29692 - DNA, 90 bp, Homo sapiens; identical to SEQ ID NO: 12128
  chr10:17157485-17157575
  hypo

SEQ ID NO: 29693 - DNA, 2530 bp, Homo sapiens; identical to SEQ ID NO: 23765
  chr10:17270086-17272616
  binary

SEQ ID NO: 29694 - DNA, 353 bp, Homo sapiens
  chr10:17347083-17347436
  hypo
cggtcgtaatattcagagggagatagggtgatagtacccctaatgtcgcaggggatgtgtacaccccccgtgataccggttgcagtatccaaggggggacagaatgatagtaccccccatatcacatgtggcgttttcactcccctgtgattccggatattatttccaggaagggacaggatgatagtgaccccaatgtcgcagagagtttgtactcccctttatgatactggtcaaaaaacccagcggggggaagattcatagtacccccgatatcgcagggcatgtatacacccccctatgatagcggtcgtaatatccaggaagagaaaggatgatagtacccctatgtc

SEQ ID NO: 29695 - DNA, 1697 bp, Homo sapiens
  chr10:17495133-17496830
  binary
cgcaaaacaaacctgaatcttaacaccggtgccctttaaagcatagaaaagaaaaagcaaaccaaccaaatccctccataaagacaggctgagctgcttctctccaaaggtggcggggtcgggggcgggggtgctttcaacacaccattgtcgagaggaaaactcagcacccgtttttcaaatgcagctgctggaggatcccccttgattcaaagaccattcacatccaggcttagagggttgagggagtgtgaagggtgcccccccccaaccccgcgccctcttcaaacacacgcacactcttacactcactcgcgccgtcccagcctgcctactcccaacgagtccaagccggtgcagccgcgccccatgcccggctcgcagctcccgagccccagtccgcccgcgctgggcgccgctgtacctgttagtggcgcgcggtaccgcggtcgccgggctccggagcgtcctcagcgctgcgggggtgccgtgggtggcctccctgctttcctccaccagaatcctgcacagccggggagaaaacttaagttgctacaccccgccgggagctgttggctgaaaggctgggagtcgcgctccttgcctggcagggagatctcgcactccccggctcccaggccaggtccccagccccagagttggaagagccttagggcgggaaggaagagacagcaaggaccagaatggggagcatgagatcctgatgcggaacccgacggcaggtcccgctccacagctgcctcgcccacagcgatgcgcgctagagcccccgcagccctgaccggtccctctgctccccagccgccgtccaccggtcggagggtcgcctccctgcgaccccctcccccactccactctcaggccgtcgccgcccgtgggctgctccccgccgcggccaaaagtctccgcgcccgaggggaagcgatgggcggcttgggggtccgggggcgccaggcggggcgcgcggcgcggggcgcggccggcgggtgggtgggttacctggcgcggccgggcgcgtctgccgggcaccagagcaggcgcagcagcagcagcagcagcaggctggcgagcagggcgagcagtgcgccccccggccgcatcctgagccacaggcgccgccgccaccgctgctgccggggcgaagcacagcccgggcggccccgactcgcggctcccgccgccgccgccaccgccgccgtggccgcagccccgcgcacccacagcgttcacaggcggcagcgaggggcgcccgcagcccacccggcagagtctccgcggcgggcggagaagaagccgcgttcgggctcgccccgggctcccggccccggcccgcggagcgccgcgatcggctggcagatgacgattcgccgagctcgccgcctgtcctcccggaggcgctcggagctgctgcgggctccggtcgccgctgccactgctgctgccgccgccgccgcgcggggtcacctgaaggttggggcgcggaagctcaactccgtgctgattgggctccaagttttctgcgccctcgcctcgtcccgagtgcccgcgaatcccccggacgcccacgcagaccacccagccacaccacaactctgcctgcggagagaggagaggagaaaaaggggccgcttcaaaaactttcaaaactgtgcagtcgcttggctggatcctcccac

SEQ ID NO: 29696 - DNA, 202 bp, Homo sapiens
  chr10:1767779-1767981
  hypo
cgcccaggaccccacagcgggggaattacccacccacccggggcaacacccgagagagcagggagcaaagacattcacttccaggacagaaggccacgctgccgcactcgtatccgaagtttgaatgtcctcagccgcagatgcgttttttgttatgagtgacaagaacgctgacacaagacactaacctttctagaggtgc

SEQ ID NO: 29697 - DNA, 225 bp, Homo sapiens
  chr10:1789180-1789405
  hypo
cgcgtgacgtgtatgcgagtgtcacatgaatcgcctgatgtgtacgtgtcacatggattgcgtgacatgaacgtgactgtcacatggatcgcctgatgtgtatgtgtcacatggattgcgtgacgtgtatgcgagtgtcacatggatcgcgtgatgtgtatgcgagtgtcacatggatcgcgtgatgtgtatgcgagtgtcacatggatcgcgtgatgtgtatgc

SEQ ID NO: 29698 - DNA, 264 bp, Homo sapiens; identical to SEQ ID NO: 12138
  chr10:1994498-1994762
  hypo

SEQ ID NO: 29699 - DNA, 166 bp, Homo sapiens; identical to SEQ ID NO: 12139
  chr10:2006696-2006862
  hypo

SEQ ID NO: 29700 - DNA, 1465 bp, Homo sapiens; identical to SEQ ID NO: 24911
  chr10:22541133-22542598
  binary

SEQ ID NO: 29701 - DNA, 1786 bp, Homo sapiens; identical to SEQ ID NO: 23769
  chr10:22624349-22626135
  hyper

SEQ ID NO: 29702 - DNA, 1368 bp, Homo sapiens; identical to SEQ ID NO: 23771
  chr10:22764575-22765943
  hyper

SEQ ID NO: 29703 - DNA, 416 bp, Homo sapiens; identical to SEQ ID NO: 12141
  chr10:2932075-2932491
  hypo

SEQ ID NO: 29704 - DNA, 2454 bp, Homo sapiens
  chr10:3108901-3111355
  binary
cgggaaatggcagcttcgtcatggcccagcccgccacgctcaccttttcccaccacctggaggatccactctccgtccgtccttcccgacctcaggctgcagaggaaacctgggggcgggggtcgaggaagccgagccccgaggctcccagcgccgccccaggaggaatcttgcgggccactagaagctgtgcgcgcggccgggctcggcccccacaacggcccgagcggccgggcctgccgcgagcctccgcgtccaggtggggtctccgcgcccccattccacccctccccgccatcggcgctccccgcaactgcggggtttccacccgccccggcgctcgcgcccactcacggtctccctcgcccccccgggagatgctcccggcgttctatcccgccccgccctggcgcgccccgcaaacgatgtgaccccggccccctgcggtctcccctcctccggacgctgcccctgccccacctgtggcgctcccgtcatctctagagcccccaaccagagtcctccagcccacccgcgaggctcgcgcacctgcgatgcggccccactagcagggacccgcccacctgtggcgctacccctgcctctgccgcctcccgcaccgctagcgcggcccccacctacgacgacccccgcgtagatgctcctgcccacacccgccccagccccggcccctgcccctagccgcgcccgcgccccctcccccgcagcccctcccatacgctcgggccccgcccgtcaccgcccattggcgctggggccgggcgggggcgcgggcggggcggcggttccgagtcaggcgcgcgcgggcagggtccccattgcctgctgcgcacccggacgtgcggctcccctcggcctcctcgccatggacgcggacgactcccgggcccccaagggctccttgcggaagttcctggagcacctctccggggccggcaaggccatcggcgtgctgaccagcggcggggatgctcaaggtgcgcgcccccctcccggcggcgagggagggacggacggacggagctggggagaaccgggcgaaggcgatggggtgaccggagagaagaggggggaagcgatgggggggacccggggaaaggtggcgaagcgatggggagaaccggggagaagagcggggaagcgatggggagaaccgggaagaagcccgcgcccggaagcggcaggggtacctgcggggcggcatgagccggcgaggcagccccggggtccttgcccggtggggcgggggaggaagggacatggcggtaggaacctccatccggaagatcagtgagttttccaccttcggttttgttttaaatggaacctggcagagggagtcgcctgaagcgccctcgggggtcgttctgcctctgagctgtaggacggggccgggcgtcccctccgaagcgtgggtacagcgcgatcacttcctaagtgcccccccgccccccaactccgccgcacgccaccccctagaatgtcgaggaagaaacggctgggtccccgcgcgcctcctgtcgcctcgtgccctgcgcggcgtgggcggggtcctggctgctgcaatgcgggacgcggcgggggtgcgcggggttcccgcctggcgtctccagggcggtccggcagcccctcgcgtttccgctgggagatttttaaaaagggtttcctgcgctcgcatgtgctgtcgccttccggctcgtgacaaaaacgaaaaccaaaatgggtcccaggccctccccgccagcctccgcagacgggaaggatcaggaagcggggactccgggatgtcagcggcgccgcggcgcgggctccgggcttccctgccctgcaatgtggaagctgctctctaggaggggcccgaggctgggcccacggacgcgggcgcgccgggaggatatttaacattgaagagcggaaggtggcggagactcggcgcgccccaggccccgggtgcacgtgggggcgccggtgcccggatgatggagtgtcccgatccgtgcaatccctggcgggtagatcggcgcttcccaggcgaacgcaacctgggagccttagcgatcgcgcaggctggagacgcggcgcgccccgagctgggttttgatttttgttttcccggttcctcctgccgcagatgcgtggaaaggcccggatggcggatttcctcccgtttcggggccgcgcactgcacagggttggagcggggatgcaccccctgcccactgcgcgggtgaccttcccttcgcccttgagcgcgcggggcgggcgcgggtgccgcaggttgaggcgctgtgggcgccgccccgcccgccacgagcgcctacgtgatgcccggcccgtcgtctccacgagccccggccccgacacccgtgcgccgcgcgctccccaggcccgcagcgcagcctccccaggcccagcgccccccgcgggagaccc

SEQ ID NO: 29705 - DNA, 1491 bp, Homo sapiens
  chr10:43248989-43250480
  binary
cggggggcgtccctgcaagagcgccaggtccccgacacccaccagggaatgaatctgcgcccaggtccccgacacccgccagggaatgaatctccgtcccaggagaagggcgtggcgaggggagaagcaacaaccacaggacccgtgacagtggccaagccttagaggccccgcatgcctgccaggcgcccgagcccacgcagtccaggtttccccatccgggcgggaaccagctgtttcccctgcacgggcgagggcgctggggtcacctccgccgacgccaggcgtgagctccagaacccgctcccaaccgcccggtcccgtgagcgcggggagcctggctctcgcctgacaataaagaaatcatcacggacagaaggaaagaggagcgaggctgggaagggagcggctttaatccggggtccgcccccttcaattctccagcgcagcggccccgaaagtggggtggggacggggattgaggctgagctcgcttcttccttgttttccgggtctcgcgcctctgaagcgaactgggcctggaggggtgctggggatcgagggagcggcgttggtgggtgaccgagggaaaggtggggccagcccctgggcaccggtcggaggaggattacgaggcggagccgctgcctgcccgcgcctcacccgcttggtccacccaatagctccgctgtagactcgcggcggcaggagcggcgggccagatggtgattacaacccggggcgctatccctttggaacctgacccccaactccgctcagtaaccggatttccggaagccgcgacctcgaagcccccagcgtttctccaccgacggcggggccggggctcctggaagcctcggagccgcagctccagcctgcagcgcacgccttggcccccagggagcagagaggcagagtacccccctgcatccggagcatagcaagcatgccccaggctgaggacctgcgacttggtgggacttcggtgcccgcccctccgccactacagggagcagaggcggctctggaagtcggtttagtgcggagaccgcgaccggaggagcgcagaacgctcctcccagcgtcctgggctccgcaggcacaatttttaaaccagaggcgaaatccgagtcccgccgccctccggggagggagcgtggccgcctagccgagccccttctctggctccgcccgcttttgcgccgcgaggccgcctggtgagttccagggccctgtggtcccccagccgccggcgctctcgggtgtcttttggccgcggcaggaacggagctgggcgctcagacggcgccggggtcgtttctgtgcccccgcccggtggccggagccgcagccttgccccttccccactggggcagcgcctgcctttctcgcggccggaccgcgccggagtcccaggccccaggcagcccgggccgcagctgtcatggagaagcccggcgcgtacttggggtgcccggcaggagcccc

SEQ ID NO: 29706 - DNA, 924 bp, Homo sapiens
  chr10:43572363-43573287
  binary
cggccgcaccccgcgcagccagagcaagcactggagccccgccccttcccgcaccccacccgcctccggccccgcctggcccacccctggaccgcccccgccccgccccgcccctacccgctcctccggcgcagccggcgcttacctcgcttcagtcccgcgaccgaagcagggcgcgcagcagcgctgagtgccccggaacgtgcgtcgcgcccccagtgtccgtcgcgtccgccgcgccccgggcggggatggggcggccagactgagcgccgcacccgccatccagacccgccggccctagccgcagtccctccagccgtggccccagcgcgcacgggcgatggcgaaggcgacgtccggtgccgcggggctgcgtctgctgttgctgctgctgctgccgctgctaggcaaaggtgagttctgccggccgccggctcccgcaggggccagggcgaagttggcgccgagcagcggagcgggcgcgttcagaagcgcctttctgtttgccgtgggcagcgggctgtgcggtcgccggccacccggcctcggctgggagcgcagtggctgcggcgggcggcgggcgaagggcaggacgcctcgggccgggcgcctcgggccggggctgggcgggtctcgggcgggagcggagcgcgggccgggccgcgggggtcggtgctcagaaccctagccatagccgcaggtctcaatctggccgcgccctgcgccaaagccgcgtcctggagcaaacgggacagccgtttcggggccgacctggcggacgggtcagggagccccgaaagcccgcgattcgtgcggagagttctgtttcggcaggagacggctccgtcctggtttccttttcccgctcagcgtccgtgcgttcctcccccagctctgccgtcctggccagccgagggattc

SEQ ID NO: 29707 - DNA, 843 bp, Homo sapiens; identical to SEQ ID NO: 26166
  chr10:50606013-50606856
  binary

SEQ ID NO: 29708 - DNA, 989 bp, Homo sapiens
  chr10:50817510-50818499
  binary
cggcggcggggagagaagaggcggagctgggggaccagaccgctaaaggagaaagggggattccaggcaaggggaatgtggccaggcagtgcgggagggcggcagcggccaggctaatattcgcgaccccgactggggcgcggcaacttctgccctcagtccccacaagctcccggccgcgattcgcggccgagaaattctgcggaggggccggtgggtcagagccaggccaggcagttgctgagccttcccctcccctcctggcgggagtgtgtgtgcaaggggccagggggcggagtcggagaaagggttgggggtgtccgtgtccagcgctcctccggacgcggctccacaatccagctgcgagaacagatggacgcagcggcggctcacctcgggggcttcctgctcgctgtgcgccgaggtccaggctgaagcggagatcgcaagcctctggctcccgcctctcccaaggggcctcgaggaaccggctgccgcgcccccttccccaagaggagaagagcgggcgctgaccccgcgagtcctagaaccgcgggcggggggcaggcagggggcggggggcagagggccagctaccggcgcggaacgcccatcccaggggctggttcaagacttccacaccgagagcccttcctgggcctccagccctggagcatctggagagcggacccctgcccggccacgccccgcccccggcccccgccccgccgacgtcgcattagcatgagcgacgtaagtggcccgggcaccactcgggggctgggactcgccgcgtcacagccccgagtggaagggaaaaaaaaagaggaggcggcggaggaggcaagagccgacgcgaggggaggggagcgcagcggcggggctaacgggcgggcaagcgggcgggcggcaacagcatgtccctcggccagcgcgggcggcctcttagcgcggcgggggctgctctgggcgcgccccgggcgaagtgc

SEQ ID NO: 29709 - DNA, 1284 bp, Homo sapiens
  chr10:64574564-64575848
  binary
cgcccggagcttttctccctcttttttgcctgggggttccacggctgaggcaccaagacaaacaccacccaagaatcgacctatcccagtcagtgccgtgatggtgccaaaccgagaggagagcccgagaagggggtgggtgatttcccggctgctccccatccccggcgccttgtgcctttttctccctccctctcccgctgcgcttcagccgagggctgctggagcgaatgggggatgtagaggaaggagtccgtaggtttccgtgccctcccaatcttctccgcctttcccgacagccgcgcgtccccgcctcagcccaaggccagtggcccggcctcgaggaaggcgcgggggccgcgagagacgactttccacagcatcgccaaggaaaccggcgtcgccggtgcccccgcgggcctccctcggcagtccgggggctgcttcccgccgttgcgcgccctcctccaccacccactcgctgcctccgccggccggagcccccgccttactaaccccctcaacttcgcgggcggcgggcaggtgggggcgcgcctccaggccgcaagaagggagcgctccgagattttcccggggtcggctctgcccaggagggagctaccgacgctttcccctggcgcttctccgccgctcggctctccaggcgcgcagctctccccgagagccccgaactttaccgtcactttgcccctgccccgggagaggggaggtcgaagtgctgccggccagagggcctacgcaagcctcgaaacccggggggacgcctcttccacccccatccctgcgctcgcccggggctgggcgcgccggggcgcacgcacgccggtttgctggcgacctggcgcatctgcccgcgcgccctggtctcagctgtcgcaggttcctcctgcacccacttccagtcttcaaagccagtgcagtcagcaccgtccacctggagccccaatcctctcctgcgattcccgcacacccactgcaccccatccaccacctccgggccgcgcaggtccgggcctgcgaagacacgcggcttacctccggccactccgttcatctggtcaaaggggcctcccagttcggcattgggaaagatggtcaccgacgtggcggcgaggtcctccaccgggtagatgttgtcagacagctggtgcacaaaaccactgagagttactgggattttgtctacggccttggcggtcatcatttgctcctcgcacaacctggagacccaactccctcgctacctggagtgtcagaaaagcc

SEQ ID NO: 29710 - DNA, 470 bp, Homo sapiens; identical to SEQ ID NO: 27491
  chr10:64578291-64578761
  hyper

SEQ ID NO: 29711 - DNA, 149 bp, Homo sapiens
  chr10:6527875-6528024
  hypo
cggtgctcagaaatacatcccggcatttcccatagggctgccacaggtgaagcagcagaagtgcatggacatccttgctgagcggccatggcgggaacgtgtccacggcacatgctcctacctgttgagtgctctcaatcatggccagc

SEQ ID NO: 29712 - DNA, 1236 bp, Homo sapiens; identical to SEQ ID NO: 12147
  chr10:71078140-71079376
  binary

SEQ ID NO: 29713 - DNA, 204 bp, Homo sapiens; identical to SEQ ID NO: 12148
  chr10:71158354-71158558
  hypo

SEQ ID NO: 29714 - DNA, 246 bp, Homo sapiens
  chr10:7202899-7203145
  hypo
cggagagatggcacagagacaactttcatggcgacgccaggctgcgccctcctgtgcagtggtcccagccatctcctccctggcacgtgcacagacagtgctcacccatggtgaccgcaactgcacagagaaacgctgaagttaaactgtcagggtgaaggatacggagagtcttgggcgcttggctccacgggaagcaaacactttcccctgcgacagtggctgtatccttcctgagctcctggc

SEQ ID NO: 29715 - DNA, 398 bp, Homo sapiens
  chr10:7212711-7213109
  hypo
cgtccctgccaggcagctctcagcaggggccttggagggagaagggtctcgcacacctgccgagcagcgccgaagaaccccctcgcaggtgtcacgaggaagccggctaggacacgaggttcatttcagatgcagagtctcagcacatcaaacaatcgacacgcggcaaccaccgtacctgctcctgaaatatcttggccaagggggcacagtctgtcagcttaatgaacctcaccacgtcggtgaccgtccactccaacgggttgctctccagaaccagtctctcctcctcctcctgtttcgtgtcctgcagagaaagggcaggaggagctcagctgcggcacagtcagctggctgggtcctctccagcactctccaggcctcggccgttcctggcc

SEQ ID NO: 29716 - DNA, 955 bp, Homo sapiens
  chr10:7213624-7214579
  hypo
cgtccaggaaagaggcgctgtctccaccctgggcactccattctgatgccgaaaggcccctccacccagaggtgaagtgccagcctttgttcctgacttgggaactagctagagcagctgctgctgttggaggtattttaaacaggtttccccacatcgtggccctgaagtgtaacaggtgtgcttcttcagacccagcgggaagccctctgtccccacgcccgggcatcacctctgtcccctcgggcttggtcggcgggcacttctccccttcctctgctgaggaggcagccggcgccccgcggccccttcgtgtcctctctgggggtggccggcgcacgggctctgagccgctccgcagggtgacggccctccggggccgggccgagggcacctccgccgacgaggtgtccgtctggtcatcccggagctcggagccggtctcctcactggcggtgtcatcgtccatggcgtcagcgtcctcctcttcactttcctgggaaggaggaaaaggcatttaaggggctggtggcccgggggcctgtagcggtggccccgcggtcagaccctgggcccagtgcagaccacctagcaaaccctcggaaatggagccagtggtcccacccgtgggccctacgaggcccttcccagccaaagcagctggacacactacatttgttttcagcaagtaaggaggagggggctcttcttcagtgtttctgaccatcttgccacaatctccagggccacctctgctgtgaagcagccacacttgccggccagggccagatgacagagctacaggctggcaggtgccccgggcagaacatacctcccccgagcccgcggtgaagtccacggcagaagacctccgtttcttctgcacgaaaatggatttccgtcgcttcctccgcctggcgggtttggggtgtccgctgtcggggttgctttcccc

SEQ ID NO: 29717 - DNA, 285 bp, Homo sapiens
  chr10:7215989-7216274
  hypo
cgtttgatcacagcatggcatttggaaaaactgtcgggaagccgcacagcagcagccctgtaactcccaggaggcacacctgctccgggagccccggcctgttctcatcaatctctcaaaaggagcagctggcaggagagcttggaacaatgtcccgtgtccagttctataaggaccgtgttactcagtgagcaggaataaactgccgtgggcgagcattgctctgtggccatctccaggtacggggcaaatgagcaagcctctgtcccctcccaaaccccaagc

SEQ ID NO: 29718 - DNA, 626 bp, Homo sapiens
  chr10:72238261-72238887
  binary
cgcactagcgacgagggaagaggaactggcttcccgggcagtctcccccgccccaaacttttcctcctcgcggagggtgggcgggcggagggaggaagcgcagccggggaacgtggcgcccgcgttcctcccgcccgggggctgcggctgggctgagtgtgtctttaaatctgagccccccgcccctcgcggtggggccgggactcgcggtccgggcgggggcgggcgcggtgattggcggccgggtcgggtccgcccctcggcgttgggtagcggggcgctggggagcagcgcggcgcgcacgggccggggcgcgcaggtcccgtcgccggtgagcacgggctccctctcgcgtggcctcgccgggtccgcctggcctgcccacctccggagccacctctgcccccgcatgggctggcgaagttgggaggagcgagctggagccagagcgcgcgccgggcgcgccccgtcgctgcctgactcggcgcccgcagttcgggcgcagcacgccggccgcaggagcacggatgccccccggagccgcgggctggcaggtaccgaagtgtcctgccctggggctggcgaggggagggcaaatctggaatcccccgggcaccccccagccc

SEQ ID NO: 29719 - DNA, 217 bp, Homo sapiens; identical to SEQ ID NO: 12153
  chr10:72765340-72765557
  hypo

SEQ ID NO: 29720 - DNA, 260 bp, Homo sapiens
  chr10:7409523-7409783
  hypo
cgcaaggttctctctgctccttgcaaaattacaggcgtcatgaaggatggcggctcgtaaatcgaagcctttgaaacaggggctcaccgtccggcggcatcaacaccttgttgttctgtgtgcaccaccccacggggtgcaaatccgcgatgactacgtcacaccagaagtcggccctgcggtcctccccgtaaccgcagtagcgcagaagcagcagctgcccgcacgtggtaatgatcgtggccacccagtacgtgtcc

SEQ ID NO: 29721 - DNA, 1461 bp, Homo sapiens
  chr10:8096151-8097612
  binary
cgcgcacgtttccccacatcgatgcgctctcccaaacaccctgcattagatcctaataatgatccatgcgtgcctattttttaaaagtctgaaaaagaaaattctgcccatcgaaatgaacttcatgaatggggcaggctggctgcaccgggacggaatcgtccacccgacccgaatgaattggcaggagccgcggccacatttaaagggccagagcgcgcgttccctcccgtccgcccccaagccccgcgggcctcgcccaccctgcccgccgcccctccgccggcggccgccctctgcggcgcccctttccggtcagtggaggggcgggaggaggggcgggggtgcgcggggcggggggagaagtcctggagcgggtttgggttgcagtttccttgtgccggggatcctgtcccctactcgccagcgccaggctcctcccccccggcgcggatgacactagaacctccttaagttgcgtcgcgccacagctgtctgcgaacactgagctgcctggcgccgtcttgatactttcagaaagaatgcattccctgtaaaaaaaaaaaaaaaatactgagagagggagagagagagagaagaagagagagagacggagggagagcgagacagagcgagcaacgcaatctgaccgagcaggtcgtacgccgccgcctcctcctcctctctgctcttcgctacccaggttggtactggtgactttttttttttttaagtttgattttttgcccccaaccacttgggaggacctaaatcaattttaaaaactcaactctcctcttttggaggttttctaggggctgagaggacggtcccgggaccggtgtccccgagggagggacttgccctccaagtcgtaacagtcagccctgggacttgccctccaagttgctcagccagccccggctcccgcgagccgggctgcagggacgtccccgagagccctgcgggctccgcggccgtgtccccgcgctcccgtgcgggtctcgggtgcgctgggcgggcgggcggcgcgaggggaggttgtgccactccagcaactcaggggctcatccaggtctcccattctctcccttgcaggtgacccgaggagggactccgcctccgagcggctgaggaccccggtgcagaggagcctggctcgcagaattgcagagtcgtcgcccctttttacaacctggtcccgttttattctgccgtacccagtttttggatttttgtcttccccttcttctctttgctaaacgacccctccaagataatttttaaaaaaccttctcctttgctcacctttgcttcccagccttcccatccccccaccgaaagcaaatcattcaacgacccccgaccctccgacggcaggagccccccgacctcccaggcggaccgccctccctccccgcgcgcgggttccgggcccggcgagagggcgcgagcacagcc

SEQ ID NO: 29722 - DNA, 186 bp, Homo sapiens; identical to SEQ ID NO: 12157
  chr10:88200334-88200520
  hypo

SEQ ID NO: 29723 - DNA, 822 bp, Homo sapiens
  chr10:92617319-92618141
  binary
cgccaccgtcggggctcaagtcgggcagcccgcgccccacttctggcagaaggaaagagcggaggtgcccgtagaggtccgggcggccgctgctgttaacgtccatcatcgcgccgccgtgtgccgctgcccatggagccggcgccccggccacgcgcctccggctgccggccccggggcttcacctcaccggttccgctccgcccggcccagccatggggcccgcgccgaccgctggggggcgcctggctctgtctcggagccccgcactccccggacccccggccgctgcgggtaacgcggcagcgcggcctcacggggactccctgcgggaggcgcttcggcccccgacggacgcctgggacgcgcggagtcgagggagctcgggctgggctccgctggcagctccacagttcgcagcagcagctcggctgcgccgagagcgcccgggcggcagcggcagaagttgcggagtgcgccccgcccctcgcgcccgccgccgccgccgccgccgccgccgctcccctgcggcagccgcgccgcgtccccgccgccgccgcctccggccgctgcccgctccctcgcgctcctgggacgggatacccgggctgggcaggcaccgccgcctctcccgcgcctccctactgtgagggggcggcgctgcacgcgcctcccgggatcccgggtcccctcgcccgggaagctgtccttgccgcatgatagatacttagaacccctccagccgaccccagcctccgcacactagtcagccacagttcagtgggggcatttttcttttgttaagaggcctaatgagccagc

SEQ ID NO: 29724 - DNA, 667 bp, Homo sapiens; identical to SEQ ID NO: 24936
  chr10:93647052-93647719
  binary

SEQ ID NO: 29725 - DNA, 1068 bp, Homo sapiens
  chr10:98272415-98273483
  hyper
cgtgagcgtgagcacccctctgtccgtgctggaactgccccacactcatcagcttgctggaacatgcgcttggcccttcggaggctaacgcttcaacgactccagctcggaagccgctcccctcaggactcacgagccgatcagtggccccgaggaagcgggagctgcagcgcccgggcggcgattgcgcccgaaaggcccgtacgtcctggggcgccgcttcctggagggattagagcacctgccggcttccatctccgcccgcccagagcgaccctcaggccggtaccgctacagggaagtttccggctattcgagtcttgctcattctccctcggcgacccctttccttttgcccgctgtgacgcttttctttttaaaatctcccaagagtaaccacagatcttgggaaactttgcgcgaaacttaaaaatgctgtgaaatcggagccaggaactccatctgagcctcggagcgccgcgcccagtccagctcttctgctccggcccggagcgtctggcggtggccagtgctgcccactcgctgtcaggcggccctggcacccaccccggcccctgggcgccctctcggcctctggcacccgctctgattcgctttgggaacgcgccagctgtcgccccccggtgcgcaccgcaaacctggggccgggacatcccagcctcggagtggtttttaagcaattcctcggaggcattgtcttccgggggagccggggatctcaggggaggggaggggagacccgccccatagacggtagtgcaggcttgcccaccacctcatttgcatttcaaaggcaaacttctgcgggacttccccagcggcggcacctaccggctttgcaagggtcgtggtaatgctccagctgctgctccgtgccctcctcgccgtccagctctgagtagtctgcggtggcgtccgggcgctccccgagtcccccggcgccgcgaggcagcggcagcagcagcagcagtgacaccagggccccaagtgcagtcgcccggggcatggtggcgcggggccggctggggcagagggagttgcgtgcac

SEQ ID NO: 29726 - DNA, 250 bp, Homo sapiens
  chr10:99474279-99474529
  binary
cgtttccactgtcgcccgcgcccgggaaccctgacgctcagctcccgcccgacggcagcgccgccgccgcccagaatcccagcccagaatcccgaccgccgcgccggacgcgccgtctcccgggacaagcgcaggctgcgatccgaggggctgacacacactcgcagacgagccgccccgaggcgaaacctcgcggttcctcttcccttccctgctgagactaagacgtggacaggggccgcgcagatcc

SEQ ID NO: 29727 - DNA, 1408 bp, Homo sapiens
  chr11:106888298-106889706
  binary
cgccctagcctaggggatcctctgtcgccggagccactggaaccctaggccgtgcagggtaaggccgggccgccccccagcggtcgggctctgcgctcgcgccccggctcgcccagcgccaactttacagatccgcgttctctcccccgaaggcggtccccccttccgccccccgctcaccgagggcgccgtcaggcggctgatgctctcgcccagcgagtccaggttgacccgcctccggcgctgcaccctcctggccccggcagtggcagcggcggcggcggcagaagcagccggggtcggggccggggcggcggcagcggcagctgcggccgggctgggctccagcggcccgggcgggctccggctgccattccagcagagcctagacagggggcactccccctcctcctccgggctggtctccaggtagtcggagcccagggagctgaaggactcggacgaaatcttccttcgagacatgctgccggcggagctgcagcggccgaggcggtggcggcgaggacgcgagcggcggcggaggcggcggtggcgggaccggcaagcgacaacgttaagcgcgtcggggccgcggggcgctgcggtcgcgcccggcggggcgggagtccccggggccgcggagccccccgagccggctgctcatggcgggaacttggggcgccgccgcaccttggggcccgggctcggcggcggcgccgggctgggctgggggccgccgccgcctctgctgctgctcgcgcggcgccgcctcagcgcccgcctcggcgcatcgccgtgcgccgcgctcccgctcacggggaggctccgagagtgtgtgaccgcggtcggcggggcggggagggctgcggcccaagcagaaggggaggcagaggcagaggcttctgccgcctgcgcgcctatctcgccccctttccctctctgctcccgcctctctccacttgctgccctgcctccctccttctccctttatccccccgcccccccccatgctctccctccgcgggaatcacgtgtcgccatcatactcattgggagtctctgcctcgcctgtcgccacgtttcaggagcaacgaggacacttcgttgctgtcctctgcgcgccctccctgctccgaggaggtgcgcacaggagctcgggtcggactgagggccccaaccccaaacgccttatcctcggccctcgggagcagatgggtcccggcggcgctggtggggagaagggctcggggctggggggcgagaggcctccccctggagccaccttggggaaacctgacagtgtgaagtgggggttagggtccatgttgtcctttctccgagtttatttaggaagttccgaggcaaaagggaaaggccaagcgtccagccagcccactccagaggagac

SEQ ID NO: 29728 - DNA, 1221 bp, Homo sapiens; identical to SEQ ID NO: 26186
  chr11:107798868-107800089
  binary

SEQ ID NO: 29729 - DNA, 784 bp, Homo sapiens
  chr11:111411097-111411881
  binary
cgcacagctggcgaacttggctaaggtcagcgggagaggaggggtgagatgtggtgctagttttaggcacactgtgctcgttatcagattgcctaggggcccgactgaagtattcctccgcccagcgcctcgggcaaacgcgggatctcccagggaagctcggagggggacagggagctggttcccctctgcgactcgcccctctctggctggccgagtgtctggcgccaacctcgctggaggaggctgtcgggggcgggccagccagcggggctgccctcctcgcagtgacgtcccagggggcggaggggcgaccgactgactccgcgccctcccccccgcctcccgtgcggtccgtcggtggcctagagatgctgctgccgcggttgcagttgtcgcgcacgcctctgcccgccagcccgctccaccgccgtagcgcccgagtgtcggggggcgcacccgagtcgggccatgaggccgggaaccgcgctacaggccgtgctgctggccgtgctgctggtggggctgcgggccgcgacgggtcgcctgctgagtggtgagtgcgcgcgctggggcgggggctggtgccggggtgggctcactgcaccccagctgctgctgaccctcttctgggtcgccacgtatgggactagaaggccgtcccatgccccactcccagacgcagcccttcggagtctcttgcgttctgggggcagtcgcacggcgtctgagacccacgccagttcccggagctgcgcagttccctgcgcgtcctggaacgctc

SEQ ID NO: 29730 - DNA, 827 bp, Homo sapiens
  chr11:12029894-12030721
  binary
cgcgccgccagggcgcacccacctcttccaccgcgctgcgcaatttgtgctgcgtgtcctccatcagttcctcaacctcgcggaacatctcattgagggtggcctcctcctgcgggtagctgagagccgggccgggcttgactggagccgaggtcgccgtcggagcgggcgcgggggccgtggggaccgccgccgccagcagcaggcacagcagggtggccccaagccgctgcatctccgctctgcgcccgcagccgccgcctgtgtgtcccggaacgcgatcagaggcgcgcggaccacccccctcgctgggcccgccgccccgccccgttccgccccgccgcccgcccctggcgcccctctttcccgcacccgcccggagacgggaggaaaccgaggcccctgaaaacgcagctcccctacacccgaaaagacgcgaccccacccgctccagcccgagccccgatcgccccaggaccccgcacccccatcctcgagcacaagctgagctctgctcctcacctgtgatgctggagccctcgccagagcaaccgaacccggatcctctacgctaatagctcccaagccccagctcacctagactctgtccccggttcaaaccctagcccctcctcgaccaggtcagagtgcccgacccccacttccacctcaagcctctctcagcccctacctggggtggaccaagcacaggtcagccccctccccttggcgtcgggtcctactcgagcgccccgccccacatccaccaagagaggctgagctcagcagagtcgtcccctcccccgccgccgcccctcacccacccc

SEQ ID NO: 29731 - DNA, 799 bp, Homo sapiens
  chr11:128563902-128564701
  binary
cgattcgcaaagtgaagtcacttcccaaaattagctgaaaaaaaagtttcatccggttaactgtctctttcgctccgctacaacaacaaacgtgcacaggggagtgagggcagggcgctcgcagggggcacgcagggagggcccagggcgccagggaggccgcgccgggctaatccgaaggggctgcgaggtcaggctgtaaccgggtcaatgtgtggaatattggggggctcggctgcagacttggccaaatggacgggactattaaggtaagcggcggggcaacggacgcgggcggcggggaccggccggggaggcgaagcggcgggcgggtaggtgcggggcccgcgtcccggaagacgtggcctctctcccttccctccgcgccccggcttcgcgccggctcctccggcgctcgggtggcgagtcctactcgcgggccagccggccaggcgcccgcattgagggcgaccctcccccgaaatcccagcccccaaagtggagccccggcccccctcccacctcgctgcccgccggggctgcaggaggggacggcgggaaaccgggggaccccagggtacggaacggagtcaagggcgagagacctcggggtccaccactcccaccgacacccggggctcccgtggccccagcgctaggcactgggcttcctctccgcagaggcggaacacggcgggggcgggggctgcagtcgcccgggctcgggtccctgcctggtgggccctggggtgggtaagtggcctcgttgcacgagggtaggggtgcaagtgagtgtgtc

SEQ ID NO: 29732 - DNA, 981 bp, Homo sapiens
  chr11:13031317-13032298
  hyper
cgaacccccgaacgaggacgacgaggacgacgacgaggcgctgccgcagggcatgctgtgcgggcccccgcagtgctattgcatcgtggagaagtggcgcggctttgagcgcatcctccccaacaagacgcgcatcttgcgcctctgggctgcctggggcgaagagcaagagaatgtgcgcttcgtgctagtgcgcagcgaggcatcgctgcctaacgccggcccccgcagcgccgaggcgcgcgtagtgctgagccgagagcgcccctgtccggcccgcggggccccggcgcggcccagcctggccatgacccaggagaaacagcggcgagtggtgcgcaaggcctttcgcaaactggccaagctcaaccggcggcgccagcagcagacaccgtcgtcctgttcgtccacttcgtcgtccactgcctcgtcctgctcttcgtcgccgcggacccacgagagcgcgtcggtggagcgcatggagacgctggtgcatctggtgctttcccaggaccacacaattcgccagcaggtgcagcggctccacgagctggaccgcgagatcgatcactacgaggccaaggtgcacctggaccgcatgcggcgtcacggggtcaactacgtgcaggacacttacttggttggggcaggcatcgagctcgacgggtccagaccgggagaggagccagaagaggtggcggcggaggcggaggaggcggcggcggcgccccctctagccggcgaggcgcaggcggcggcgctggaggagctggcccggcgctgcgacgacttgctgcggcttcaggagcaacgggttcagcaggaggagttgctggagcgcctttcagccgagattcaggaggaactcaaccagaggtggatgcgacggcgccaggaggagctggcggcgcgggaggagcccctggagcccgacggtggccccgacggcgagctgctgctggagcaggaacgggtcaggac

SEQ ID NO: 29733 - DNA, 902 bp, Homo sapiens; identical to SEQ ID NO: 12168
  chr11:133734500-133735402
  hypo

SEQ ID NO: 29734 - DNA, 842 bp, Homo sapiens; identical to SEQ ID NO: 22771
  chr11:133938756-133939598
  binary

SEQ ID NO: 29735 - DNA, 1248 bp, Homo sapiens
  chr11:13689464-13690712
  binary
cgtgccccacccctcagaagtaaacgttattctaactcctatcactaccggtaagttttgtagggaattattttggaggaagtggaaggtggaatgaatgggcccacagtcccctgggactgggcgagacccgtggaggctccaggggtccgtagagctcttcgctctcaccgacccgggccacacccgccaagctggtagttctccgaacggatccctcacgcccagcaatggccggagggcccccgggccccaccataatagcgctaagcacgccacaatggcagccccgctgtctcccgcgcgggcctcgctgcgtgctcccaaccttgggagttggcgcccctcccgcgcgacggacagccgggcgtggccctgggcgcgacccgacaggacgccagcagccggcgggggcgctccaggactcgagatgtggggcgcgggcccattggctgagcattcccccgcgagcctcccggccgcagggcccacctcccggccctctctccgcgcccccattggccgttcgcgttccgcgggcgtccgctcccgccccactcccgcccggagggaaaccgggttgggggtgagaggctaaagcagggaggaggatgactggtcctgcggataagggtgtgcgcgagagccaatcaaaagcggatgtcgaaaagaggcgccgctccagccagtcacgtcgcgaggtgcggtcggggccggctgacgcgactgcgggcctcagccaatgggcgtgccactgcccgtccgctcttcagcagccggtcgcgggcggtggaaaagcgagtgaagagagcgcgacggcggcggcggcggcggcgcagctattgctggacggccagtgggagagcgaggcctgagcctctgcgtctaggtgagaagggggtgcgccagcgggagcggccgggctgcgggctcctcctcgcctggctcgggaagtggttgcgggagctcgggctgcaggcctggccgaggcgggggcgccgaccagccgtcccgcccccgcccccgcccgggtacgcccagaagtgagggcgcccgcctcaccccgggtggtctctgcccctctttgccccgccgccgcccttcacagggccgggaccgcgtgggggacgtacggtggggcctggtttgcagccgcggagcccggggagccgcctggggtgggaggccgctagaggtggcgaaggtggggcggggtggttagccgagcagcgggctccgcgtgctcgc

SEQ ID NO: 29736 - DNA, 576 bp, Homo sapiens
  chr11:1958729-1959305
  hypo
cgtgtccctgggggctgtgggatcccttgacacagctactcgaccacctgcatggggctgcacccagggtgcccccggcgatgccacgctggggatcctgtcatggagcccagctgcacagccagtgccatttccccaaggatcgcagtgtttgggggctacttggagtttcgatgttttctgggattcttctccctcctcctgtcgccttggcttccctgcggcgcccagggcgggctcctccgtggtgcacgtgacctcacggcctccctgttgtgccgtcaggggtcattgcagacccctctgagggtgggcagtcggcgtggtgtgcatgtgcctgcgtgtgtgcatgtgtgcatgtgccgagagtgcccaggaacgtgtgtgagggcacggcctttgccagccaggtgtcctgctgagcagccgcgtctgaatggggccggcctcgcgggccgaagcactcctgtcctccacccgccttcacccctcacccgcacccagctcctcccggctcgtggccacatgaagacctcagacaaatggggcaggctcctgggcccctcagaggccacc

SEQ ID NO: 29737 - DNA, 157 bp, Homo sapiens
  chr11:2108016-2108173
  hypo
cgaggaatgcacgtcagaaccagtaggacagctgccatcccaaagccagaccacggcaagcgctgggcgtgggggagtcggagctgcctgtgctgctggggatgggccgtggtgccaacgctatggggccgtgggctcctcacacatgtaaacctac

SEQ ID NO: 29738 - DNA, 828 bp, Homo sapiens
  chr11:2466019-2466847
  hyper
cggaggcagggccaggccggtccgtggggagagggcgggccaagccggtgggcgcgggcagggacgccctgtgcgcgccggaccggcgggggcggggcgtgcaggcgggggcggggcacgccgtcccatgggaccggccctcggccactgccccctccggccccgccccgagcgcccgggctgggccggcagcggccccccgcggcggggctggcagcagtggctgcccgcactgcgcccgggcgctcgccttcgctgcagctcccggtgccgccgctcgggccggccccccggcaggccctcctcgttatggccgcggcctcctccccgcccagggccgagaggaagcgctggggttggggccgcctgccaggcgcccggcggggcagcgcgggcctggccaagaagtgccccttctcgctggagctggcggagggcggcccggcgggcggcgcgctctacgcgcccatcgcgcccggcgccccaggtcccgcgccccctgcgtccccggccgcgcccgccgcgcccccagttgcctccgaccttggcccgcggccgccggtgagcctagacccgcgcgtctccatctacagcacgcgccgcccggtgttggcgcgcacccacgtccagggccgcgtctacaacttcctcgagcgtcccaccggctggaaatgcttcgtttaccacttcgccgtgtgagtatcgccaccggcgacggccggcacgaaggtgcttcctgagagctggtgtgggggagctctgtcccagcgccacctgccccgtcggagctgcgaccccggagcagaggagggaaggaagtggggaaac

SEQ ID NO: 29739 - DNA, 154 bp, Homo sapiens; identical to SEQ ID NO: 12176
  chr11:2782417-2782571
  hypo

SEQ ID NO: 29740 - DNA, 140 bp, Homo sapiens; identical to SEQ ID NO: 12177
  chr11:3128538-3128678
  hypo

SEQ ID NO: 29741 - DNA, 481 bp, Homo sapiens; identical to SEQ ID NO: 26208
  chr11:3164459-3164940
  hypo

SEQ ID NO: 29742 - DNA, 960 bp, Homo sapiens; identical to SEQ ID NO: 23037
  chr11:31825604-31826564
  hyper

SEQ ID NO: 29743 - DNA, 1467 bp, Homo sapiens
  chr11:31826573-31828040
  hyper
cgatgattatgcgcctagaactcgaccgcgaagcaactaataggaaaacatatggtgtcaatttggatgctccgcgcctcgcgcacacccgggaacgagcggcacaaagccctgccggccggcccgcgaccccgcgcccctcggggcctgccagccgggccgcagcgacaaacgctcagggctgcgcgccctggctggggcccgcccgagagacagcctgcggctggggagtctgagctccaaggggagagcccagccgccgaaggcgagcctaccggccaagccctggggtccggcaggttctgcacaactactcccgcaaagctcgccacctttgtgccctttcctcagctacgcgcttaccagccccggaagcaccagggggcgaccggcgtttccaaaacagatggataaggtgctggggaccctccttaagcctgtgtggttcggccagggcaggctgctggaagacccgggcctttccacactttgagttcagttgagccccgacgccgtgtgcctcaaccgtaacctcaaaccgggcctggtttcgctgggcctccaggctcccaggtcggagctctagactagccctgccgcgtaccagcacccaccacgaacaggaaggtgggtgggaccccacggggtctgggcagaggaaagcagggaggtacaagggccataagtatcaaaagcgctctgggcctgggactatcaggacccaagcaattgcagttgccagggcagggattttccaattcctgggcacctccttaccagacccagtaaaccgtgctctctcccgcgccctgtaacagcgagtttaccacccctaccctgctgcaggcctgggggctcctctccccatcccttctaggcccgtagtggggtgaggaggggaggagctgccctgagagtgacttggggagagaagcccccaaccccgccgggttggtggagactttcagtcttggctaagcccaaaggggcctccttctcgctcaactaggagaagacttcgccccgccctgatcagcccagcccctctctccggggtcagagcccgggcaggggcgagagggggtgtgagttacaggatttgggggggatggggtttctctaccgcagcttcgaaaactcgggcgggctgttcttaagggcccagcccctgcttctccagtatcgagaagagccaagcaaacgccctcccctcccgggctgccgggcgcggagcggggagcagccgccgcaggtccccgggcctcagtcggtcggcggccgggccagcgcgggcgtcgcgagtccctgtgtcctcccctgaccctcgggtccgcgcaccccgagcccgaagtcccagaaagaccagaggcacttactgttctgcatgctggctctggctgggggccgcgggattccacggggctcgaatatggggctctgttagcaagaaaataggagttaatcctc

SEQ ID NO: 29744 - DNA, 716 bp, Homo sapiens; identical to SEQ ID NO: 12179
  chr11:3243313-3244029
  hypo

SEQ ID NO: 29745 - DNA, 236 bp, Homo sapiens
  chr11:3249619-3249855
  hypo
cgtgggcggcggcacgagtaccaggctgggaagagggcggccaggcactgctccacgctgacggccgccaggagactcaggcccacgatgtagcagaagaagcgcagcgttgccaggctggtctgcacgaagcccgggaagtccagccggccttgcagcaagtcggggacgatggccaccatgtggcagccaaggaagatgagatccgcgcaggccacgtccaggaggtagatggc

SEQ ID NO: 29746 - DNA, 1479 bp, Homo sapiens
  chr11:35439856-35441335
  binary
cgctggagtctggcgactcctgcccttgtcccaaaccacacgttttcccgcctcccgggaagcacccaaatctcttccacccttccttagagctagccagggagattccgccttccagggacaaggaccgatcggagcgggcccagcatctccatggcgactctgcaaacctggcgttcaaggccgcgcgcgctggtccttgccccgccccagggccctgtcttggctcattccttccgagccggcaccacctgcaagcccgcctcgggcctggggcgccgcgctccaggcgctgctaccccggtgtctgctcacactatgcccaatcccctattgttttgaaatcccaaaagtaacctcaagaggatttcttcctcacactctcaggcccccagcgcaccttaccctttttatcaaaataaaacaaccctccacctctcgcattttcaaaggattaagcagcaatctccaggaaagaaaatcaatcccctccccaccatcccatccccagccaagctacggctccgccaccacctccgaggcccgccgccgccgcctctctatccgcatcccggataggggcgccaccaccccgcgcgtgaccccgctttcccgcgggtacagataaaaatcccctcacccttccgtagatgccatggtctggggaacgccccctcctcttcagcactatccggcagctgtgggcgagggagaaagcggacgccggggtgagcgcgaagtgcggccgggagcggtatttaagaggagcctctgcccgcccttccacccgcctccggggtaagccctttagcgcctcaacgggcgcaggaggctcctgcgggcgctaatccgcgtcccggctctccacggcgcgcgacccgcgctcccctccgcccgcggggatggcgcttggcggggagctccgggggctccgagggtggcttccccgagagagcgatgcgcccagggctgcaggagggcgcacgccggcgatgcgcccctgcagccgctgccacctgtgctttgctgcggggctcgcgggcgcggcgagtggcgggagcagagagtggtggcagaggacggtgagcgtgcgtgcgcgtgtgcgggtgtgtgcgcgcctggggaggcggtggaggccgctgcgctctggctcggcgccggccagggagggattgcaaggtttagccccgccggagctggggatttgcaggcgatccctctctattttcgtcgagagctgacatcacccgcgccgccgcctcgggcaactcctttaaccgccgccccccgcccccatctccagtcgcggtccctcctctgccatccctccccccagcctctcgccataaattagccaaataagaaaagaggccccgccgctcgtccgggaaggcttgggcagccggtggcaggagcccaggatctaaggagtagctattgtttcccctgaagcccgcgtggccccaggtcaccccgtgc

SEQ ID NO: 29747 - DNA, 1303 bp, Homo sapiens
  chr11:43600280-43601583
  binary
cgccaataaagcacttgcaacacgtggagcggtggttggggggaggtgtccaagagtcaagaagggggcggagggacaccccatggcctcatttccacctccccattcttccccaccccttctcattgcttggcacaatgcacaagtttaccccccgaactggatcctattaaataattcaatggtagcggtgtaattttggttggaaccagcacggattcccaagtcgtgactgcaaaaagtgagtaatgcgcgctggctgcgtcatggctctagtcacagttcattccgaactgagaaggaatcgtgacttcgcctggagacgtcccctacatgggagatggggggcgggggggcaccaaatcagtggggacgggggtgggggggaagacctatccaatgaaaaccgctgccaggggggcatttgaactccgtcgcttgctgtctcgctgtcccctctctgccccgcgcacctcgctccccctcccggccggcgctcgcagtggcgcgcctgctcgctctcccgctaagcgacgagtcttcaacaagttggaggaaggcaggaacgcaggggttaagctcggaaagccgcaattaccaagatcgtgaccctcccacacagtacagtaacttatatacttacctggaagaacccgctttgccgccgggcaaacacccgtggggggcggggaggggccggagggagcgggccggcaggagaggggctgcttccagctggctgcagtgcggacgggaccggcgcgctcccgtggcccccagaccgaggtaaggagcagggagtcggcgcccgggtcggctggtggtcggtcggctcactggtagtcggtcggctcacgggtagtctgagcagaacttttttttcccagttgccccgcgccgcggcggcggcgggcgcagaccgcggagcccctctggcgcggcgggcgcgcagacgctcggagggtgtgtgcttgcgtctgtcagtcccggagccgaggggatgccgtgggagggtgagtgggtcgcggagctgcaggagggtgatggatgggcgaagggggtgggtcgacagggacttgaagacagtgcctccaccgtcgagagacgttttctccgggcgtgctgggcgagggtgggagtgtgtgtgcgcgcgcgcgcgcccgcccgcacgtcgattccagggtgccaaagaacaaatatggcaactttccccccaagttcttgcaatgtttgcagtaacccatcctgggtgaggtttcccccactgggggactatactgctagggagggagatagtcaggac

SEQ ID NO: 29748 - DNA, 779 bp, Homo sapiens
  chr11:43963626-43964405
  hyper
cgcgcgcgcgcctgcggaggggggtggcaaggatccagaaggggagcccaccccttcttccgagctcagctctggggagccgggcgctcaggctcgccaggctgcaaagagagctgagagctgcctcgcgccccgcgcagaaccggcggtggaataaccagcgcctcaagtgtgtgcatctgggaccagggggcgggggagggggacctgcggccccgcggccaacccggttggtgcagacttggggatcccagaagggacagtgcccgcccagtcgcggcgattgagggtccctgtccgggcgcagctcgggccagccgcgtgctccggggccgcggcttctcccggaacccccgcgggcggggcctgccttccggagccggttggcggggggcgggcggcgccggggaaggggccgttactttcccagagcggcggggcgacgtcaggcggaagggcgcggggcgcgcacgctttaaatggcattcgctgtcatccgagctcagagccgtgtgggcagccgcgggctatataagccgcgagcctggccgccgcggggcagacggcgacagcagcggcggcgagcgcctcggagcgcggcggaacagcgccccccgagccccgtgccccccgacgggtccgcccgcccgcccgccctcccgaggagcgccggcccgggcccgcgagggccgccgccaccccgcagcagatttggatcccccgcccggcgagcccccggctgctgcctcccggggggccccggcgcagcggccgccctc

SEQ ID NO: 29749 - DNA, 830 bp, Homo sapiens
  chr11:44325686-44326516
  hyper
cggtatcatcacatagccgggtcctcgcagtgttggtttcccaatccgatgactgtcacctcggtgaggacctgtgctgatggccggagaaccctgcgctgcgggcgcacatggccaggtggcgcctggcaggcgacgtccgggtgcaggacggcgctcttaccgccccaccccaaaccgttgcctgggcctaggtccttcggcttcctgaacaggggtttggggggctaaggacgctgaggctccgggggcaggaagttctctctggttaagcgttctctcttctctccggcatacactcccctacccacccacctcgcctaccctcggggcgagaggctcaccaaggcagggcgcgccccccccatgaatcatcccaaggcctctgagccgcgggggctccgggcaactatccccctcctctcctggcctcaggcaccccagtccaggggtctgcagagaagcccgaagcccggacaaacgcgccggacgtcaacaacctctcatccctggcagcagcaaaggccaatatatttccatttcttatttcagtttgccaccaaaacaaagctgcgcgcggctgagggcaggaaggcgctgagaccgagaagaagggacgtcccggagaaagtgcgcccagctgatcttagaaaccagagtcctccgggacttcgccgagattttctgtagggcgttttaatctgttttcctactgcgtgccggcgtcgcagcgcgtgcggctcagggcttggtgactccggcttagcccggcggtcgcggcgaggttcctggcgcagccgcttggaacttcgcattagaatcgggaccgc

SEQ ID NO: 29750 - DNA, 1330 bp, Homo sapiens
  chr11:44748073-44749403
  binary
cggcagcgggaagcccaggagcccgatcaggaccgaggatctcaccccaacccctgcgtttgggccccggggtcagctgaaagttcccctggaataaacacttcgggtccagcatgcccctctccccactcccgcaacgatcttccgaattcagacgcagagagggcccgcgagcagagcgggaggtggtcggaggcggaggaaggggagatgggcagagggtgggcccagggacccccagacaaggcctggacgcggggttggaggaggaggcggaggctggcgggaggcgaggggcagcccgcagaggagacgcgcttctcggcagcaacggcgtctggagccgggaggggcggaggtttggggagggggagggagggcgggggaggggagggacggacggcggcggaggtggggccggcgggctggcgggcgtgcagctgccgccggcgtcgcggggctccaggctgcggggcggacgtagcgccgagcgatccaccgcggagccgcgcgaggccgcccgagccccagccccggccccggccccagccccggccccggccccggccccggccccggccccggtcccggccccgagccccgagcgagcgccgccgcctcgcgctgcgggtccccggacgcgccgccaccgccgggaaggcagccggcgccgggcaagttgcgagcgcgcccctccgaccaggaaagtttccccccggccgccggcgggatttggcgcggggtccggcagccgccgctggaaggtatggggctccgcacctccgtgccctccgcacgccgccgccgcgcccccggggacctggggacccccccgcgcgccgccccgggggtgctgctggacgcggcggggaattggggtggagtagggatcccaggacggaagcccggcaaccaagttccactcaaactagcacgcgggggctggggggccggggacggtctccaccccgtgcctgcccggagtccgctgagggccgggggctgcgcccaggacaggtgcagagccggtgggctcccagtgctccgggtggaggagtgggggcttctggagaacggcgcggggtggcaggtgtggttacaaggttcggggtttcggccagggctgcgcccggaaaggggctgctcgccacgccacccggtaagacagtgagggaccagggactgggagcggcgatcggggccgggagggctgtggggcccggcagctgcatggagggcgggctgcctttggggtccctggcagcggggcggggcggggcggaggcgccactcgttcctccaggaccccccttattccttaggtgtgtgc

SEQ ID NO: 29751 - DNA, 578 bp, Homo sapiens
  chr11:46354343-46354921
  hyper
cgccctgagctaggttcgtgcccgtggtgggctgggccgggctcgctcccttcgtgccctgagcgggcgggctgggcggagcggcgccctcccctccggaccccaccggctggagagtgtctctaaggtgacactcgggtgcgcggcagcagcggcggttgcaggagctcgctctccgcccgggctccggctccgctccagccgtccggggggcgccgcggcgcgcagagcgcagcaccccgactccagccaggagcccccgcccccccggagcgcaggaggaccccggcccgcctctcccaggcgcagcgcccagcatctcgctgctcctgtcgtctaagcgtcggcgtcgctagggacctgcggaacccggcgctcccctccctccccgcctcgcgtccccggcccgggcggactggagactcgaacttgagcgggtgcccgaaaggccgcaggagccgcgggcggaaggcggccgcacgatggccgaggggcagggcggcggagggcagcgctgggactgggctggcggcggccgggcagccgaggaggaggtggtgcggcggcgatgccggcgc

SEQ ID NO: 29752 - DNA, 701 bp, Homo sapiens
  chr11:536867-537568
  hyper
cgtgcggtcccgggggtcccgcctgccgtccgtccaccgcgcggtcgcagtcagagctcggctcggggcggacacgcatgaacgcgagtgagaagcggcgactggacggcgggcggcagcgtgtcccgcgggccgggcactcgggtgcgctccggcgtccggtgtgtgtttcctggtcctcgggggcgcttcccccggtgcttccttttgccgtcggcctcacttccaaccgaaggtcaggacggcaggcctcggccccaggggcgacccttccacctgggaaaggtgggcgcgagcctccagcagagaccgcctttacccgccccgcgtgggaagcgccaggatcgcgaggaaacgcgacacgtgcatcgcgacggcccaggcacggagccgcaggaagctggcacctgacgcgcctgcgcccacccaactcgagttggtggcgcgtcaccttcccctgggatcgcccgcagcaggggcgcccacgcacgtgccagtccacgtggccccgccctagcgaccgttgctaaggggcgtggctcagccgcacggaacccgagcccccggcgacttataaatatttgcgtattcaaatgaggcctggctcccgttgctatggcgcccaggccgcaaccccgcggcggccggaagaacagcctggagtaggagacagcgcctggaggtggagggcgcccagggcc

SEQ ID NO: 29753 - DNA, 333 bp, Homo sapiens
  chr11:60282711-60283044
  hypo
cgttcctagaggcaccaaaacgtagttaaccgggtgtctgaccacatggctgccaggagcctagtgagtctgcgcacacgcactacctccgccccggcagttcctgagtgggtgcgcaggcgcaagaggagcacaccgttgccattgcagaccgtcactccctgaggagcctgagagccggccgggtgctgggctcctggctatccctgtgatggtagctcagcgagatctggggacctggcgctgagcgcgttgccagccgggatcttcctcttcatctaggcctgggcgctggcgtgagaactcggactgggtcctggacgagcgcccccc

SEQ ID NO: 29754 - DNA, 614 bp, Homo sapiens; identical to SEQ ID NO: 23814
  chr11:60718609-60719223
  hyper

SEQ ID NO: 29755 - DNA, 992 bp, Homo sapiens
  chr11:61276083-61277075
  binary
cggcgctgggaccccactagggtggcgccttggccccgccccgccccgccctccctccgcctcattggcagccgcacgcgcgtcggggttgccagggcgacgggtcgctaagctgcgagtcagcgcgaaccctagccagtcggcctccggcggaggcaacgggggaggcccgagggcgggcggtggagcgcggcgcgcggcggcggtgccccaagtgggtgcctcctcccggccccgcacggcccccctcccggcgcgggggaaggccggggcggggggcccgggggccggcgcggctccggcaccgtcggggcggctggggggcggccggggcggggcgatgcctggcggtggcagtggcggcggccccggccggggcccgtgaccatgggcatcgccgagtccacgccggatgagctgccgtcggacgcagaggagcagctgcgcagcggcgaccagcagctggagctgagcgggcggcggttgcggcggctgcccagcgcagtgtgcgcgctgagccgcctgcagaagctgtatgtgagcggcacggggctgcgcgagctgccggaggagatcgaggagctgcgcgagctgcgcatcctggcgctggacttcaacaagctcgagcgactgcctgacggcctgtgccgcctgccgcgcctcacgcgcctctatctgggcggcaaccggctgctggcgctgcccgccgacttcgcgcagttgcagagcctgcgctgcctctggatcgagggcaacttcttgcggcgcttcccgcggccgctgctgcgcctggtggcgctgcagtcgctccagatgggcgacaaccggctgcgcgcgctgccggccgagctgccgcgcatgacgggcttgcgcggcctctggctctacggcaaccgcttcgaggagttcccgcccgcgctgctgcgcatgggccgcctgcacatcctcgacctcgaccgcaaccgcctgggcggcttccccgacctgcaccc

SEQ ID NO: 29756 - DNA, 1460 bp, Homo sapiens; identical to SEQ ID NO: 24969
  chr11:64512349-64513809
  binary

SEQ ID NO: 29757 - DNA, 525 bp, Homo sapiens; identical to SEQ ID NO: 24977
  chr11:67350943-67351468
  hyper

SEQ ID NO: 29758 - DNA, 1258 bp, Homo sapiens
  chr11:69516911-69518169
  hyper
cggctctgggtgggagtcagcgtccagcgtgccgaccaccccctttctctgcagtcctctcacgcaggactccgccataaaacctgaaacaggcgctccgagtacacggagcacggcagaggcaccgagcaattttgagactctaaaatgctttgtcccgctgttcacaaaggagctggttgggccggaggcggccccgcctctgcatcctttctggggtgggggccccgggcaggcgcggccacccccgccctggcccctgctccgccagggagtccggggctgcgtgtgaggcctgcgcgggccgagacctcacacagcctcctctgcgcgcggggccgcgggaggggcgcgggttcgttcctttgaactcccagcctttgttcccggccaccagagccccagcgctcgtacacttccggccccgggacctctgcggttacctgggccttccctgccagcccccaccccctgcccccaccagaaagcgtttacaggacaggtgaggcccgcaggaggaaaagcactcccctggcgcaacatgactccagcgcatctgcgtctaagccacaccgtgctcctggtagattaaaaattaattctaaaaaaaaaatctctcctatcccaaatgcactgttttctgccttgcttgacaattgatttgtttttaaaggaaagttatgggtagatcctcttttttctttcccattctttttttcttcttttatactggagggagggaaacggaggcgaggaccacacacgcgcaggcagaggctgaaaaggcccgaggtgggttttcctgtttaatatcaaaggaggccgaataatgggtttcctcggtccggctaggccggcctttgactcaattggaaatgcaaaggcagcttttgcctattctctggctgctggctgagaccctaaatttccgtaggaaatcgtcggacatgcacttaatcggtctttgcaatctttccctcgaagttgcacgcgggtctgggcggaggaggcgaggaaaccctggattcgaaccagcgcctttctctccttcaggcctccgcccggggacaggcgccggtcccccgccccggcgcatccgccccgtggggacacttaccagcccctgcatcttgccgtcggcgcccatgcagaggtaccgcacgctgtgcacgcccttgatggccacggtccgcagagcgactgccttgatctccagcaaacctaggcgcaggggaagcgagaagctgcagcaaggacc

SEQ ID NO: 29759 - DNA, 880 bp, Homo sapiens
  chr11:73693765-73694645
  hyper
cgagccgcagggagaacacggcagtgcgtgcggctgtgtctgtcggctggcggagggcgcgtcggacgagccgggcgagcgtggacagtcaatcccaaggcgcgcgcagctgggcttcgcagtggggctccgcgcaggcggcggcgcggcttaagcctcgggggcggggcccggggtggggcctgcggggcggggccgggcctgccagctcctacttgggtgcggagaccctggagcagccgcctttccgcggggaccgccccgcctagggttctctccatgactttctccactcccgtttccgtgcgtcccatcaccgcgtttactccttcgttccccgagatggtcactcccttgccactccccgcctctgcctcacactctctcgggccgccaacctctgtgaggatggcaagactgaccgccagaaacaagtcttgtccagtcacacacctcttgccttcccagccaggacggtttctaacagcgtccagcggggccgtgtcttaagtgcacttcctcttttatgggcccagcccccctacgctgggcaaactacccaccctcctgcgagcgagcgcgcggctggctcctgcagggcgggactggggcctcgcgaccggcctcgctgtcgattggttacagccgccgcgttgtcgggggaaggaaccaatcagaactgcagcaacaggtggcccggcaaccgacaacagccgttgggctcggctggggttcgcgccttctcccccggtggagcggcctggcgtttagggaccaggacactaaaggccccggcggggcgggagcacccagcgtgacctcacgctcctacacacagacaagcaaacgggccggcccccgcacgtgacaaggcagagcc

SEQ ID NO: 29760 - DNA, 1380 bp, Homo sapiens
  chr11:74951647-74953027
  hyper
cggcagcccggaggggcgggggcggagaggatgaagagaaagcgcagcagccgacagccctgattctcgggagcctcccaccccgcctcccacggcgaggagggcgcggagactccgctgggggcggaggacgagaccgggaggcggggaggggggaggcaaaccctgcccactcggctcggagcccggagcggccgcggaagccggaggccggcgcgcagggcgagggcaccgggggcggggggctccgctccccgtctgacccctcttgcccccggccagtcagccagtaagtgcggctcctcagactttcgagacagcgaacggaccgaccgggactgccagccgctccgggtcaaggactcgccccacccgtgccccccaccaggcgctcccaactcactggtgagcgcggcggcccgggcgctggatgcgggggcggccgcgatggccccgcgcgcgggacagccggggctccaggggctgctgctcgtggcggcggcgctgagccagcccgcggcaccctgccccttccagtgctactgcttcggcggccccaagctgctgctgcgctgcgcgtcgggagccgagctccgccagcctccgcgggacgtgccgcccgacgcgcgcaacctcaccatcgtaggcgccaacctgacggtgctgcgcgcggccgccttcgccggcggggacggggacggcgaccaggcggcgggcgtgcgcctgccgctcctgagcgcgctgcgcctcacgcacaaccacatcgaggtggtggaggacggcgccttcgacgggctgcccagcctggcggcgctcgacctcagccacaacccgctgcgcgccctgggcggcggcgccttccgcgggctgcccgcgctgcgctcgctgcagctcaaccacgcgctggtgcgcggcggccccgcgctgctggccgcgctggacgctgcgctggcaccgctggccgagcttcgcctgctgggcctagcgggcaacgcgctgagccgtctgccgccagccgccctgcgcctggcgcgcctggagcagctggacgtgcgcctcaacgcgctggccggcctggaccccgacgagctgcgcgcgctggagcgcgatggcggcctccccgggccgcgcctgctgctcgccgacaaccccctgcgctgcggctgtgccgcacgccccctgctggcctggctgcgcaacgccacggagcgcgtgcccgactcgcggcgcctgcgctgcgccgccccgcgggcgctgctagaccggccgctactggacctggacggggcgcggcttcgctgcgcggacagcggcgccgacgctcgcggagaggaggcggaggccgccggcccggagctggaagcctcctacgtgttcttc

SEQ ID NO: 29761 - DNA, 993 bp, Homo sapiens; identical to SEQ ID NO: 26229
  chr11:75378820-75379813
  binary

SEQ ID NO: 29762 - DNA, 782 bp, Homo sapiens; identical to SEQ ID NO: 22775
  chr11:76381512-76382294
  binary

SEQ ID NO: 29763 - DNA, 879 bp, Homo sapiens
  chr11:82444299-82445178
  binary
cggccgcggcggcctgcgacgcctcccgccggggggcagccttgccgtgggccggggccgcgactgtcggggcgctaggggcggccagcggccgtttggctggcgtgtcggcggcgctcggggagggcgggccggggggcgcggcgcccatgaggccgctgcagcgcttgatctgcttctgcaggtacttgcggtggttcaccttccgcttcgacttgcccggcttgtccagcgccagcttgatgttgctggacgccgagtcaatgaagctgagtagatcgcgggtggcctcgcgcacgtcccctccttcggctcccgacagcagcgcacccgccggagccccggtctcatcgtcctcgaaacagcagcccttgtccagggctccgaaggcgccccctagcccgtccggggagcccccgaagccgaagggcacgaaagggtgcgtgctgaggagcgccgcctgcaccgccatcgccgcggctcccgggctgtccgcagcgctgcccgtgcgcccccgccagctcctgcccgccgcccagacccagctcccgccccggcgcggcgcgcgcggcgcagcctactagttccgggcctggctcgctgcgctgcctcccgggggagctcattaggtcttgtaagcaaggggcggagggagggagcgcgcggcgaccgtcccggtggtagaggggaggggcttacttagcctggcttggaggagtggggggtcgctttagttttctgagctttctgaagctcaacgccttaactccttcgtttccctttgccccgtggtgtttctcttgactcctctaaccgcaaggggtgaggaagagatggctggtctcaaactccagttcaggcccatgaggccgctgcagc

SEQ ID NO: 29764 - DNA, 174 bp, Homo sapiens; identical to SEQ ID NO: 12199
  chr11:97588960-97589134
  hypo

SEQ ID NO: 29765 - DNA, 212 bp, Homo sapiens; identical to SEQ ID NO: 12200
  chr12:104443924-104444136
  hyper

SEQ ID NO: 29766 - DNA, 1311 bp, Homo sapiens
  chr12:104851507-104852818
  binary
cgccctcttcttcctaccggctccgggctggaggatgggaccaggaggggcggtagtttttttttttttttttttcttcttctttttttctttgtgtcccttgtctgtctgtctgcgaggtagcagggaaacggagaggtgtgggaagcaaccgggggtgaggggctggtttgaggagaacgaaactccctccctgctgctgccgaggtcggaggatgaaagagttacccggagccggctgctctgcgcccgggcgagccgcctcttcctggttgccgggccgggggcgaagggtgtacgccccggcgaggttgcgagtccctgcagcaggctgggagcccgggactgggctcccacgtgtcccgggctccgcgcagagctgagcaggtgtggagagtggtcgggtgcccagcgttgcccctccaccacgcgccggccgtttgcccccggggtccgggtccgcagtgaccttgcggctggtgccccggggcctgctccagcccccagccctgagctggaaactccgagctcctgggtcacgccttgaccactgcagttttggaggaaactttggccaggtcctgggctgaccgtccgtttgcatcccccacttctgggatccgagcaacgggaatcccccgggcggcgtgggaatgaaccccattcctccggtcccttgtggctcaggcaaagttccacgtccgaaatctggactgggggagggacgaggctcgtcgcttcctaggggtgcgagggaaagtttgggttctggagagggaggggcgccctcgagcgcggcggccgggggtgagcagctcggctgcgaagcccaacaggtagaacgttccgagaagccttccgggtaacgcgggtctccccgccaagccgtggctcccctgctcccttttaccctcccttagcagccccctgccgggccacgttggctcagaaatccattttctacgcctccgagttgcctttctcagcgtagtcacagcaataatttgcttttctaattgcaaggaggagggaggtggaaacgcatttccttccagggaagtggggttggtgtttttcatttttgcctcccgccttctcctttcactgtgtatctaacactttaaacagacgcagtcccgaattcatcaagcctgcgtttgggtcgatggcagaggaataaagctgttctttccatcaaacaggcagggctgcaggctgcagattccttgacagcgcagggacagacggcccctttgccccactcggtctggagcagttgttaaggcagccacactgccaaggatatggtcc

SEQ ID NO: 29767 - DNA, 404 bp, Homo sapiens
  chr12:108297338-108297742
  binary
cgattctcctgtttctggggaaggattctcagaaggtggctcatatgagtaaaaatcatttttcctgggtagctgattcctagaaactcgcagggcggcacagcacggcggctcgtggcagcagaagaggaagatgccgcggtggaaggcgtcttcgcggccgggcagcgacgcgtacacctgccgccggaagaagagcgacggtcgcacagctctcaggccgggggccggagccccggcagcccggccgcgcccatccacgcccagccacgcccagccacgttggccgcccgcccagcctgctgggaaactgctcgctgcgcattcgcccgccggcgccgacttggcgatggccagctacacaggtccggcgggggcggcagccatgtggggcgcgggctggc

SEQ ID NO: 29768 - DNA, 180 bp, Homo sapiens
  chr12:117316485-117316665
  hyper
cgagcggggcatcctgaggtcagggcgccagaggctgcagaaccctggagggtgtggctgcaggggacgcccgggcgggacaaggcaggtaggagaagaacccagaggtgtgggaagagggtgtctccgagtcagggcgcagcacggaagtaactctggggtagaaggcgagggcggggc

SEQ ID NO: 29769 - DNA, 266 bp, Homo sapiens
  chr12:122667648-122667914
  hyper
cgcgcacgcgtcctagcggttgccgggcaacgcggcccgggccatggaggcgtcgtacgagtccgagtccgagtccgagtctgaggccgggcctgggactcagcggcccgggaccgggaccgtgagcgcggccgtgcgcgagcacttgcggaagctgtgtctgcgcgagttcccgtgcggtgccggcagctgggtgcgggcgccggggccggaactctgggggcctggaccggctgcggggaggcacgggcccgggcgagcggagc

SEQ ID NO: 29770 - DNA, 623 bp, Homo sapiens
  chr12:122688584-122689207
  binary
cgggcgcggtagaccccgccagcctgggccgcccgcgcccgacgcgcagcgctgctgccaaccccggcccgggggtccccgcagagtgggtctctgctgccgtcagcccttcggagactgtcgcgttgaaagaatgaaccagagttcgccccctgcccgcgccagggcgttttgggtcaccgagtcctgtggggatccgaggcggctgccgcccaaggccgagcgcagcctcaggacccgcgccccaccagacggggtcgtgcgctccgcggcgggtggagagccgggctctggggtctccgcggctcggagggcggcggggcgaggccgtgcggccagcgcctggggacgcccgcggcgggacaggggccacccgggccgcggcgcagcctgggctgaaacctcctgggacggaaccaagccacctgctgtgcgcccttctcggtgaatggcaccgccgcccgcccgggcctctcgtccacagcccgcggtgctcgcacacctgagactcatctcgcttcgaccccgccgccgccgccgcccggcatcctgagcacggagacagtctccagctgccgttcatgcttcctccccagccttccgcagcccaccagggaaggggc

SEQ ID NO: 29771 - DNA, 467 bp, Homo sapiens
  chr12:124246524-124246991
  hyper
cggtcggcgtggggtggggtcgcaccctcggctgcagcggcccgagggcggctcctggcggcgagggtcccgctccgcatccaggggcgtgcgcgctgccggggccagggagcaaccagcctacctcggcggcccgggggcctggtgcgcgcctccgagatcccggggccggggcgtgggctgcggctcgcgggttcgggatcgaggggccgggcgcggggcactgccgagcttgcagcccccagcgccggcgccgtcggcggggcgagctgcggccgtttccggggcgcccattgctagggccgccgttgccacggacgcccgccctgcgcccggctccctctgcactgcgcggcgccatggacgacctgcgggtgctgtggatgcgcgaccgcgtgtatgcggctttcggcatcaccgacccccagcttttcgaggacctgctcaaccgcgacgacggccagggc

SEQ ID NO: 29772 - DNA, 344 bp, Homo sapiens
  chr12:128899673-128900017
  hypo
cggcgccggggagaagctgccatgcctgagggtctttgctttccgagaaaccagagaggtgcggggcagctgccggctgaagggggacctggggctgtgtgtggctgagctggagctcctgtccagctggttcagtgccccgacggtgggtgccgggaggaagaagtccatggaccagccggaggggacccctgtggagctctactacaccgtgcacccaggaaacgagcgaggggactgtgccgggggtgacttcaggaagggcaacgccatccgtccaggaaaggatgggctggaggaaaccacgtcccacctgcagaggatcggcaccgtcggcctttacc

SEQ ID NO: 29773 - DNA, 557 bp, Homo sapiens
  chr12:129189650-129190207
  hypo
cgtggctgcagttcagtgatggctctgtgacgcccctggacatctacgacaccaaggacttctccctggcagccacctcccaggacgaggctgtcgtgtcagtcccccagccccgctctcccaggtggcccgttgtggtggccgaaggggaaggccagggcccactgatccgagtggacatgacgatcgccgaggcctgccagaaatctaaacgcaagagcatcctggctgtgggcgtcggcaacgtcagggtcaagttcggacagaacgatgctgactccagccccggcggggactatgaggaagatgagatcaagaaccacgccagcgaccgccggcagaagggccagcaccatgagcgcacaggccaagatgggcacctctatggcagctctcccgtggagcgtgaggaaggggctctccgaagagccactaccacggccaggtccctgctggacaacaaagtggtgaagaacagtcgggcagacgggggcaggctggcaggagaggggcagctgcagaacatccccattgacttcaccaacttccctgcccac

SEQ ID NO: 29774 - DNA, 332 bp, Homo sapiens
  chr12:130037501-130037833
  hypo
cggtccagatccaacaactacaacatggatgccccaagtccgagtctctggggacaagaaaggtcacgccaccatccgagccccagccttgctggtctgacagcatccaccggagcagcttcggttactcaacctttcaaggccaggctcttccccttttgagactccgagagtgttgcgcgtttgctcccagctgtgtctgagtcactgcttgtggctcatcagtcaggctccctgctggtcgctctcaccactgctgccccgatgcccagctcttcactctgccacagtggcccgtggtccctggctgcgtgagtccatcctggggctac

SEQ ID NO: 29775 - DNA, 604 bp, Homo sapiens; identical to SEQ ID NO: 23848
  chr12:130184247-130184851
  hypo

SEQ ID NO: 29776 - DNA, 160 bp, Homo sapiens; identical to SEQ ID NO: 12214
  chr12:130892190-130892350
  hypo

SEQ ID NO: 29777 - DNA, 573 bp, Homo sapiens; identical to SEQ ID NO: 12215
  chr12:130933888-130934461
  hypo

SEQ ID NO: 29778 - DNA, 174 bp, Homo sapiens
  chr12:131077283-131077457
  hypo
cgggggaccttggccgtggcgggccaatcagcctgcatttgtgagaagagcgtttcgcccagcacgtggatttgtttcccaggcagggaaatcgggagcgggagagatggacagcgagctggtgaggatccgggctgcgatgtcgggagcggtgagagcgagcgcggcttccac

SEQ ID NO: 29779 - DNA, 429 bp, Homo sapiens; identical to SEQ ID NO: 12218
  chr12:131095743-131096172
  hypo

SEQ ID NO: 29780 - DNA, 229 bp, Homo sapiens; identical to SEQ ID NO: 12219
  chr12:131110936-131111165
  hypo

SEQ ID NO: 29781 - DNA, 439 bp, Homo sapiens
  chr12:131159367-131159806
  hypo
cgcctgctcgggacgggtcgtatacgtgggatcctgtaacacgtggccttccgggtccggcctcttccacacagcgtgtccgcaaggttcatccgtgtggtggcgtgtgtcaggcttcattccttttcgcggctgaatcagattccatcgtgtggatggaacacattcacgtttcgtttatctgctcatctgtagaggggcgtgcagtgagctttttacagatgttcccacccattcgtgtcaaagagagcatccttgatccaaagacacaaactacaaaagggcacagccgggactaggaccccagttgtcccgaaggacctgttggccgccagatagtggttgaaggaagggacgcaagccctggttgacggagccgcggcctctgctgagacaggcgggtttgtccgcaggccttcgggaacgatgggtgtctcac

SEQ ID NO: 29782 - DNA, 174 bp, Homo sapiens; identical to SEQ ID NO: 12222
  chr12:131193281-131193455
  hypo

SEQ ID NO: 29783 - DNA, 1454 bp, Homo sapiens
  chr12:132312451-132313905
  binary
cgcagggaccgcagagcctccgccgaggaccccagcccccccaacacccgccctcgccctccagtcccccgcgccccccaagccccaccctccctctcccgcggtccgcgggctccaccaagcgcccacctgctgcgctgcggcggcggctccggggcctgaacccgggtctgaacccgggcctcggcgccgtggggggtggacccgggagcgcggccggagaggggagtcagggtcagctccccgcaggcgccccgacccccgcctccgcgcccatcccgcgcgtccccgccgccccaagagcgtcctaagacacccggggaaacgccttccctgtgatgccgcggacccagtcccgtcgcggacacggcggggcgggcgggggtggcagcgtccgaggcggcgcgggccctttaaggcggccggcctcgttagcatacatttgcatggccccgccccgccgcttgaggctgccgcgcggggctcagtccggcgggggcgccgcggagagcggagggcgccgggctgcggaacgcgaagcggagggcgcgggaccctgcacgccgcccgcgggcccatgtgagcgccatgcggcgccgcgcagcccggggacccggcccgccgcccccagggcccggactctcgcggctgccgctgccgctgctgctgctgctggcgctggggacccgcgggggctgcgccgcgcccgcacccgcgccgcgcgccgaggacctcagcctgggagtggtgagcgcgcgggcgggacgggcgcggagctcctgggccggagccgggggtctccgcgggccgggtggcggggaccgggaagaccccagcagtgcacgtcggcgtcgcgcgggagccctggcgccctggacccatttcctgggtggggagactgaggcagggacgcgggctgagcgaccgggcgagcgcacgcgagtcctggggaggcgccggctgccgtcccggctccgtgcgctgggagcgcgccgcagccgcaggagcccgtggagttgtgagggggtcgcccacccggagcccgggtcgccggcttgcagcagccccggagcagccgggctgggcgagagcaggcatcgcggccgccccgagctctgcgcgctgcgtgcgttccgggtgggagtggcgggggcaggagcacgcacccacaaagcgaggaagggcaggggctacggagtgggggcaccccgaaagccttgagcccccgagtttgctcggttgagggtgttgggggcacagggatgctggcccccagctccccactggacaaggacctggccctcagcctccttcccctccaccccaggtcggccaggctggccctgccttgccctggtacagtgctgagccgggggcgcggggagagccttcctcactccacacccagtagctgtccccagctcagcttagaaaccctgcctgggggcagcgac

SEQ ID NO: 29784 - DNA, 258 bp, Homo sapiens; identical to SEQ ID NO: 28503
  chr12:133481383-133481641
  binary

SEQ ID NO: 29785 - DNA, 1272 bp, Homo sapiens; identical to SEQ ID NO: 28504
  chr12:133484584-133485856
  binary

SEQ ID NO: 29786 - DNA, 857 bp, Homo sapiens; identical to SEQ ID NO: 27559
  chr12:1639033-1639890
  binary

SEQ ID NO: 29787 - DNA, 454 bp, Homo sapiens; identical to SEQ ID NO: 6830
  chr12:1943616-1944070
  hypo

SEQ ID NO: 29788 - DNA, 155 bp, Homo sapiens; identical to SEQ ID NO: 11058
  chr12:1992067-1992222
  hypo

SEQ ID NO: 29789 - DNA, 1454 bp, Homo sapiens
  chr12:22486814-22488268
  binary
cggatgaaagggatgcctctgcgagacggtgcaaggcggtcctcgccggtgaccctgtcctctgcactcggggaggaaaggacgctagaggggaggagccgcgagggcaggagtacctgaacgctctggccgcggtctggttcctcctccacgccgtgccctgttgcagcaccccctgcacgatctctttctcgttgggcagccggtagacggggaagatgtagagccaacagaggaccacgacacagagggcactggctcccatgggcagccgggtccgcgggaacttccacgccagtacagccatggcccctctggacgtttgtcgccgggcccgcccgcaggggctcatcgcagccccggcgtcccaggggcgggggccggggcctcagcacaaagctaggcgaagtggcagcggagggtcccccaccgccagccccccatgcacacacacctttggttctcttacttgcaaacgcacgcacgcttcttcggccccgtcggccccaaaggtcagcgcaaggattttttcaaatgcaacttttccaaggatttctttctaggggaagtggctgggggtgaagtcacgatctatggccatggtcgcttcccctgcagaaggcgggcgctggggtctccgagtgcgcagagagcggcggcggcgagtcgctcccgccggttctgcagcatcacggtcgccctcggcgagggtccgggagaaggctcggctccctcctaaacatgtggcccgtggcgtccccttgtcccctccgagcgatgctcctgcgcccttcgccgcctcccgcgctgctgcgccgccaggcaacccccccccccccaccccgccccgagacgcgctctctgcgccgcaccaagtccttggaaatttccacggcggcccgggaccgctatcctgccccgggctcctccgcctcgcccgccgggaccctcgctccccacccctcccggagaagaaaagaactcgctctcatcagttaattcagcggcgcgccgcagccttccgctgcgccccggacttcgcagacaaacgcccggggattggtggaaatcaaggtctccccctccctcccccacccgcaaaattgcctccttcgacccgatccgagccgcgacactcgcccagagcgcgcacccctcactcgtgcccttgttctttggagataacggcagacaataaaaaccaacagccccccgccaatagaaatatatcagtccctgagtgtggcggagactggctaatatcctgatccttcgacaagcggccggtgtgcccaggctgtcaccctgctgccgtcaccctagtctttctctagctggttggatattaacccgcagccaggcgcgaggaggctggcggagatttattccttcctgggcccccacccccattagccggtcccggagccgcggcccgtgtgtgtgcgcgcgcgccc

SEQ ID NO: 29790 - DNA, 758 bp, Homo sapiens
  chr12:25055487-25056245
  hyper
cggtcaaaatattttggggtggcagagtcacgtaggatgtggctgtgggttctggcagcccagagattcagctcccgcctcctccctcagagcgagtccatagctaccctcacgtcccccgtggcggtcctcgccacgctccggagcgggttacccatgagggtgctagacctgggcagcgggaacctcgaagaggtggagattgcaggctgggactccagatttcgggcagggatgcggggaagggaagacgcctcgctggaggcggaatggagggcaaggcgaaggaggatggtgcaggaaacggcgacaaggcgcccggccaggcccgcgagctaccgagacccgggttccaatcctccccccttccgcaaacgcccgggttcgaggtacctggcgggcaagggccgcagcggagcgaagcgggctggccatggggaggctgcggggacgcggggctgcagagagcggcagtggcacggagcgcgcggctggaagcgaaagcaggcggtgtggccaagccccggcgcacggcccatagggcgctgggtaccacgacctggggccgcgcgccagggccaggcgcagggtacgacgcaacccctccagcatcccttggggaggagcctccaaccgtctcgtcccagtctgtctgcagtcgctaaaaccgaagcggttgtccctgtcaccggggtcgcttgcggaggcccgagaatgcgcgccacgaacgagcgcctttccaagcgcagatatttcgc

SEQ ID NO: 29791 - DNA, 209 bp, Homo sapiens; identical to SEQ ID NO: 12228
  chr12:2602388-2602597
  hypo

SEQ ID NO: 29792 - DNA, 116 bp, Homo sapiens; identical to SEQ ID NO: 12229
  chr12:2613903-2614019
  hypo

SEQ ID NO: 29793 - DNA, 327 bp, Homo sapiens
  chr12:2788614-2788941
  hypo
cggtggcctgttcggcaaccacgtcagctactaccaaagcgacggccggagcgccttcccccagaccttcaccactcagcgcccgctgcacatcaacaaggcgggcagcagccagggcgacactgagtcgccatcccacgagaagctggtggactccaccttcaccccgagcagctactcgtccaccggctccaacgccaacatcaacaacgccaacaacaccgccctgggtcgcctccctcgccccgccggctaccccagcacggtcagcactgtggagggccacgggccccccttgtcccctgccatccgggtgcaggaggtggc

SEQ ID NO: 29794 - DNA, 211 bp, Homo sapiens
  chr12:38595387-38595598
  hypo
cgcagaccgggcagtgcgggaaccagatcggcgccaaggttggcagccagggctctgagggcccagctcgggcctgccgggtggccagggaagatgttggtagcggcagtggtggggctggcgcccctgcgttgcggcccctgggctccctgccagggacgcagtggaactggccagctggcgaggcggccagggtggaccccagggacac

SEQ ID NO: 29795 - DNA, 2373 bp, Homo sapiens
  chr12:4377809-4380182
  binary
cgtgggctcactctgcagctgcagttttcagcccttgcagtttagaagattctgcatgagcacggatgccacgagggtatccagcgagtgggaagggagtcgccctacatgttttcacatcgatttgtaaaactgttttgaaagggtatttctagatccatttgttccaaatgcagcaaaattcatccgatatcgctcacaatgcatgcacgggttatcttacatgtaatagccatcgtattaaccaacccagctgatactgagatggtgaatggggcgggggagcagggaggaatatgtcgcgcatgaaaaactccgggtgtaaaagtcaatgcagaactcactccccgaggaaccgaaaaagacattcacgactctcaagtggagagaggatagaaagtcaagtggcgggggtcgcgaccagtgatcgggatttcagtctgatctcagtacccagcggaacaggaccataacctaaagaaatgagctttttccggagcaaagagcggccccgatttcaaagtagaaaaaataaactgcttgggggtggaagatggcgaggggcggggggcggggagggaggcgggtcgcggcgctggctccggggtccgcggcacggcctcctctgccgcgctgcccagggcccggaccctgcccggcgctgcgcccaccgcgagggtgccagacccgccgcgccgccgccgcgctctcccagccgcggccccctcccccgccgcttcctcttgctctcccagccccttcccccacgtgtggatgacgtcaaaattccgcgaaaaagccgcgtggtggctccccgagcggaggcgcgattccgccgcccagcggccccctcccgggggcgcctggagggggagaagggcggaggcggccggttccttctcctcccgggaggcaggaccccccgacgccgaccgccggacgccccccgccccaaagcttattggaaaattcacttttgtaaagcaaatgtatttccagagctattttcggccgcgtgaggcgtgtcctaagctgaatcagacaggaagagggggaagttcgggtcttttaattttttttttttccgaagggaggggagtgagatgctaggtgggtgacagacggcaggcgctcgccttcttaactcacgcctgtcgcatctgccgcctcagtaatccagccccgtccaagccgaaattcgccgaagggagtgcggatgcacaggcctggcggactctgcccccctccagaacgcagcggcccagcgccccggcgggcgcggctgcgaccagagggtcccggaagcgagtgaacacctgcaatcgcactgcccgtccccacccaccctgctcccccgtgctctccgcttcccgacgttttcctcttctccttgtccgcatttttctactttgcctgcactccctccttcctcttgatgtgcctcctatgtgtcccctcggatttatgtgtcccctcgcattttgccagtcgggttttcggttttgattgaccgtccatccctccacggagaaacacaaacacagctccactctttgggggagccgaggggaaggcagtggctcccatttctgagcctgaactcagtcactacccgctccccacctggcctaggcgcccctgcgcggagaaggcgggactcgaactcgcgctgctcccgggccttgagccgaccgcggaatcacctggctgggaggcatcctccaggtaagcttgggagtatgtgtgcttagtgctgcaggctcctgcagaaaagtgcctataaacacccaacaccctgctgcaccctccacctccaggctttgtacactttccaaccgaaactccaaaacgctagcgtagagggtggggagccggccggaaaaagaataaaagtccaataaaactggcgttcgctaaagtttatcaccagtcctacatgggatatatatatatgtatttttttttccgtgaagggtgaaaaggagataaggaagaaccaacaatctaccccctcccgccgccccccacccccgcgccacggtgatcagtttggacttcaaagccagagcacaggctcttgcgctttttcttgaaaccgaagtctacactgaaagaaagtgtgcacttttgcctagaaggcaacatgcgttttcccgcgtgctaggtggagtgcattttaacaagacattagggttttaacacatggctggagtggcgaccaaaagggaaaactcagtttccagtccaagcctcctagagacattcctgccaacctccgcaccctctcacgccccaccccacgtgtgagagtctgcaaaaccaccggggattggattcgatggcgagcttcacgctcgggaacagtcagtaatc

SEQ ID NO: 29796 - DNA, 1898 bp, Homo sapiens
  chr12:4380708-4382606
  binary
cgctgcaactttctttgatccgctcaaaggtggcttaggtgaaattggagtaattcccttatgggggtcttaaaatgtaagtgaatgtccttatccggggtgactcaaaagcttaagtcgggaagcccaacgtgactaaaaccaataggtgattgttcggggccgactgtgtgcgggtgtacacggtattcggcccgggtgtcatccgcggcgctggactgtttcattttgagtttgcaacttgggtttttcagcgagctttttttcttcctgaaagctaatggcttccacagcaattagacattttcctcgcccgccccttccctcccctttctttacatataggagatgggatactcattcccgctgctattgataaggtcggaggcggccgggcctctccccagctttcgcccgccccagcgcccgctctccctccgccctcccttggcttccttttgatgtagtggggaacgcgtcctactaaaaaaaaaaaaaaaaaaaaaaaaaaaaagtaatctgcccggtaacaatcagcgcgcagtagcaggagccccagagctattggctatgcaaatagagggaggggagacggcgccccaaactcttcctcacccttttaaagcgatatcccctcctttcccccccaccaccccttccgccccaccctcgtttaaagaggctggctccggggcctgagttaatcgcttgcacctctagtttattcgctcccctcctccgccttgcagggaacctagtgtacggctcacccagcccgcgccccaccccgccttgctggctctccgcgcccctgcccgggccccctctctcggtgagggaggcactcagtcggcctcggtgtgcccagagagctcgagccacgccatgcccgctgcacgtgccagcttggccagcacatcagggcgctggtctctccccttcctcctggagtgaaatacaccaaagggcgcggtgggggtggggggtgacgggaggaaggaggtgaagaaacgccaccagatcgtatctcctgtaaagacagccttgactcaagcatgcgttagagcacgtgtcagggccgaccgtgctggcggcgacttcaccgcagtcggctcccagggagaaagcctggcgagtgaggcgcgaaaccggaggggtcggcgaggatgcgggcgaaggaccgagcgtggaggcctcatgcctccggggaaaggaaggggtggtggtgtttgcgcagggggagcgagggggagccggacctaatccctcactcgccccctccccctcccgggccatttcctagaaagctgcatcggtgtggccacgctcagcgcagacacctcgggcggcttgtcagcagatgcaggggcgaggaagcgggtttttcctgcgtggccgctggccgcgggggaaccgctgggagccctgcccccggcctgcggcggccctagacgctgcaccgcgtcgccccacggcgcccgaagagcccccagaaacacgatggtttctgctcgaggatcacattctatccctccagagaagcaccccccttccttcctaatacccacctctccctccctcttcttcctctgcacacactctgcaggggggggcagaagggacgttgttctggtccctttaatcggggctttcgaaacagcttcgaagttatcaggaacacagacttcagggacatgacctttatctctgggtatgcgaggttgctattttctaaaatcaccccctcccttatttttcacttaagggacctatttctaaattgtctgaggtcaccccatcttcagataatctaccctacattcctggatcttaaatacaagggcaggaggattaggatccgttttgaagaagccaaagttggagggtcgtattttggc

SEQ ID NO: 29797 - DNA, 1697 bp, Homo sapiens; identical to SEQ ID NO: 26262
  chr12:4382915-4384612
  hyper

SEQ ID NO: 29798 - DNA, 665 bp, Homo sapiens
  chr12:4554361-4555026
  hypo
cgtcccgactggctgcagctggcactcactgtaggggttctcctcgtgggtcccgctgatccggccgtcggggagcacctggaggtgaaagccgatgcccacgttgcagtagagcctccgctgccgcttgatccccaccaaatagccactttcccagttcaccccggcaatctctccagctagcccggcgcgagacctggacagcagggtgccccagcccctcgagtccagcagcgtgttgttggcacgggtgcctgcaggcgagggcaccaccatgcccactaggatgcctaggaagacgagagcccacagcgtgccctgcagacgtcctgctccccgggacatagtgatgaacagtttctgtcccagggccatccaccttgcctctcaggcacgtggtcagaattaatggccctaaaaataccgcccttcttgtttttctccctccggcatggcggcaggggcttatttttggaaggcagatgaaggctgctgacatgaaaccaaagcctccatcgggcactcgggttgagagcagagggacccaggctgagccgcggccggtagagaccatggctcggggacgctctctagctcgcccgcttgctccgtccctagttgatgatatttgatttgacctatctttatagttgcttcagcagccc

SEQ ID NO: 29799 - DNA, 902 bp, Homo sapiens
  chr12:48398018-48398920
  binary
cggacatcctggccctgacaccgaaggacagcggcgacgagcagcgtcagcagcaccagcgtctggggagccccgaggcgaatcatggctcaccgcggggcctggctgagccgggcccgggcggagcgcagcgaaacggcaggagcacggcgcgggtccgggtctctaccgcgccctcatgcaggaggcccttggagcaggagggggaagcgggagacccggcagcccagcagcgctctgcgtcttctccccgccgcggcgcccgttatatgcgcccggcccctttcgaggctggcgaactcgcccaaaccgcgggccgccccctgccccccgctgggctgtaacctgaaccgcccgcccccggagcccgcctgggccctgccagtgcccgcacctgcccaagccggacccccctctctgggagtcacgcttcccgccctccacccctagtgcgccgagtggcctgatcgggcggggcgcagagatggcccctgccccccaaacccggggctgcggcgctgcccccctctgaccacaggcgggaagggtggcctccggcccctcccctcggagttctgccggagttggaggggagggggtgtttgcagaggcgcaggccgagagccctagaccaaggacggaaaagacatgggagggaggagggaaagcggtagaaaggagcagcggagggcgagggggcaccgcgtcaggcgtttgggagtggggacagggaggagcccacagagattcagagtcctaaatcttggagacaggctagctgagccagatctgaagggttaccccgacctatcttttagcccttccctgcagtacctggtccccagactcccacctggacgttcacagcgactgccctccacccctcccccatccagctctgc

SEQ ID NO: 29800 - DNA, 1216 bp, Homo sapiens; identical to SEQ ID NO: 26266
  chr12:48576803-48578019
  binary

SEQ ID NO: 29801 - DNA, 939 bp, Homo sapiens; identical to SEQ ID NO: 11060
  chr12:48591606-48592545
  hyper

SEQ ID NO: 29802 - DNA, 557 bp, Homo sapiens; identical to SEQ ID NO: 12247
  chr12:4920230-4920787
  binary

SEQ ID NO: 29803 - DNA, 381 bp, Homo sapiens; identical to SEQ ID NO: 12248
  chr12:49582713-49583094
  hyper

SEQ ID NO: 29804 - DNA, 1389 bp, Homo sapiens; identical to SEQ ID NO: 23870
  chr12:52400270-52401659
  binary

SEQ ID NO: 29805 - DNA, 357 bp, Homo sapiens
  chr12:5252231-5252588
  hypo
cgagaaatccacatcatccgtaatccaatcacctccacatcatccgtaatccgatcacctccacatcatccgtaatccgatcacctccacatcatccgtaatccgatcacctccacatcatccgtaatccgatcacctccacatcatccgtaatccgatcacctccacatcatcggtaatccgatcacctccgcatcatccgtaatccgatcacctccacatcatccgtaatccgatcacctccacatcatccgtaatccgatcacctccacatcatccgtaatccgatcacctccacatcatccgtaatccgatcacctccacatcatccgtaatccgatcacctccacatcatcc

SEQ ID NO: 29806 - DNA, 144 bp, Homo sapiens; identical to SEQ ID NO: 12252
  chr12:53007462-53007606
  hypo

SEQ ID NO: 29807 - DNA, 249 bp, Homo sapiens; identical to SEQ ID NO: 12253
  chr12:53045577-53045826
  hypo

SEQ ID NO: 29808 - DNA, 125 bp, Homo sapiens
  chr12:5323895-5324020
  hypo
cgttctattttcttgtggagtgatggcctggaaaatataatgtacgggagatgtaatggtgacccaccgacctggccgggatgccttgcttccccttcctcccacacctacacacacgtgcacac

SEQ ID NO: 29809 - DNA, 112 bp, Homo sapiens
  chr12:5335923-5336035
  hypo
cgcctgttaatagcacaagtgacacatcatagatcactcgctgacaggctgaactgggcgccatcttgaagaacgtaggctgcatgctaatgacgcccaggaggagctgcgc

SEQ ID NO: 29810 - DNA, 1176 bp, Homo sapiens; identical to SEQ ID NO: 25043
  chr12:54144782-54145958
  binary

SEQ ID NO: 29811 - DNA, 972 bp, Homo sapiens
  chr12:54378541-54379513
  hyper
cgggttgcctcgctctctccctctctcccgcatttcccccctctccgcccccttctccccaggagttacaggctggttactggataaacaaaccccactcttcctagaacccccacccccacccccacccccctccacccctctacctcccctgccgcccggggggcgcttcctttgttcgcggggaagggctccggtgcccctaccccgaggcagctgctagatggcgctgttactccactctgcgcgctccgcctgccgacaacttgaccccgctgacgtcacggccgtctgaatcatcaaggccattttcaaatcccattggtctagccgtcacatggtgagaaccgaatgcgcggataattacggagctgatatttccccccctccccttctttttcctccctcccctccaaccgcgccccccctcccggatggggaaaaaaaaagatgtcagctcctccgctgtagtattgctccttaaaaacccctctctctgaaaatgacatgccctcgcaatgtaactccgaactcgtacgcggagcccttggctgcgcccggcggaggagagcgctatagccggagcgcaggcatgtatatgcagtctgggagtgacttcaattgcggggtgatgaggggctgcgggctcgcgccctcgctctccaagagggacgagggcagcagccccagcctcgccctcaacacctatccgtcctacctctcgcagctggactcctggggcgaccccaaagccgcctatcgcctggaacaacctgttggcaggccgctgtcctcctgctcctacccacctagtgtcaaggaggagaatgtctgctgcatgtacagcgcagagaagcgggcgaaaagtggccccgaggcagctctctactcccaccccttgccggagtcctgccttggggagcacgaggtacccgtgcccagctactaccgcgccagcccgagctactccgc

SEQ ID NO: 29812 - DNA, 954 bp, Homo sapiens
  chr12:54447348-54448302
  hyper
cgacagtcccccaatgcccgggctttggaggggagccgggagcttcccatctccttttgcaggggagggttgtcagtctggcgggatgtgcactgggggcactccaacctctgctagctaaccccacatcaccacccacccccgcctcccagcaccaccaccaccacacacacaaaaaaattggatacattttgaataaagcgattcggttccttatccggggactgggttgctccgtgtgattggccggaggagtcacatggtgaaagtaactttacagggtcgctagctagtaggagggctttatggagcagaaaaacgacaaagcgagaaaaattattttccactccagaaattaatgatcatgagctcgtatttgatggactctaactacatcgatccgaaatttcctccatgcgaagaatattcgcaaaatagctacatccctgaacacagtccggaatattacggccggaccagggaatcgggattccagcatcaccaccaggagctgtacccaccaccgcctccgcgccctagctaccctgagcgccagtatagctgcaccagtctccaggggcccggcaattcgcgaggccacgggccggcccaggcgggccaccaccaccccgagaaatcacagtcgctctgcgagccggcgcctctctcaggcgcctccgcctccccgtccccagccccgccagcctgcagccagccagcccccgaccatccctccagcgccgccagcaagcaacccatagtctacccatggatgaaaaaaattcacgttagcacgggtaggcaactttgctttttgctccccccctccctcccttcttccctagcgctccccaccctcctcggccccctctggcccccgtcctcctttctctccttccccctctctctccaggagcgactctgggttagcacaattgaactggatttacgagc

SEQ ID NO: 29813 - DNA, 852 bp, Homo sapiens; identical to SEQ ID NO: 25049
  chr12:54520189-54521041
  hyper

SEQ ID NO: 29814 - DNA, 466 bp, Homo sapiens; identical to SEQ ID NO: 12258
  chr12:5603587-5604053
  hypo

SEQ ID NO: 29815 - DNA, 861 bp, Homo sapiens
  chr12:62584265-62585126
  binary
cgggagacatctaaccggaaagaaataaaaaaccattagtttcccgaagccattcttattctgaacgctgttcgttaagagaatcatttactaaagctctcttgtagtagcctttacaaaagctttatttcattcagtaagaaagcgccccgtcccaaatctaaataaaccttacatagatgaggctccggaaattatcagcttgattctttatgaagatagttagaggtggataaatcaatagactcgctgaaacacccaccttctgcaaacaggcctgagaattaactaatcagaagtggacaaaaagtagggatttcagaaagatgacctgacacatcccattgatcttccctggaatgcgacccccaactccttattaagagtccaaaatggttaccagccaggatgggtctgggtgaggaatcgaattacaacccacttcaatcctcgacctggtcgtttgctgttattaggagaaatggggcagagagggagggcaccgctcacggagcctcatttcgcatgctccgatcccctctcggcgtccctctactccgcccctaccctgaccgcccgcgagggagacgccggccgatggacccgcatctgccctcacctctcgccttccccgggcgatccctctacagtcccggacccccgagaaaggggaagggagacgtgtgcacacgggggcttccgggaccgcggtcctgcagttgccgctccggtccccagcgctggccggcgacccgaggcgcggctcgcacctacctgcagccccgcttcccggtggcggcaacacctagcgatgctcctgcagcttttgcgggccggcgccagccttatcgctctcgcatc

SEQ ID NO: 29816 - DNA, 712 bp, Homo sapiens; identical to SEQ ID NO: 27584
  chr12:66582719-66583431
  binary

SEQ ID NO: 29817 - DNA, 398 bp, Homo sapiens
  chr12:66629005-66629403
  binary
cgatagggcgtccggcagttgctgctgcccccggggttgccgctgctgctggggaagatcatcgctgcgggccgcggcggcgggcgcgggcgcggggcagcctgggcgcggggcagcctcgccgcgagggggaggacgcaaggagggggccggccgggccccgggccgaggcagctttgggaactccctctcgccgcgcggcggcggccggcgggggctgcagctccgcgctgacttcccctccgcactcgtctaaaagtgcggcgcggcgcggggcgagactcgagcagctcgggcagccgccgctctgcgtgccatggacgggagttcgcgcgcggagctggcggcgtcgccgactctcccggcggcagcggaggagcagcgccgccgcgtcctcc

SEQ ID NO: 29818 - DNA, 733 bp, Homo sapiens; identical to SEQ ID NO: 26285
  chr12:70760478-70761211
  hyper

SEQ ID NO: 29819 - DNA, 474 bp, Homo sapiens
  chr12:81102174-81102648
  hyper
cgggtgcttgcaataggcaggaaatgcgtacccggcccgaggaagcaggaaagccgccccccaccccaccccaaccccggaaccgatgtttctttcctaatctgccgctgccttggttttccctccagcttgagggtgcggatttcctgcgcacctgcagctcccagtggccaagtgtttccgatcattccagggggctcgtgataacggctaaggaaggtaaagtaaaagggctctgggccgcaccagagaaaatccgggaggtggataggatgcttgggccgagagggctcgaagcgagagcagggacgcgccctgcgaaaagggcgctctttgcgcgccgggaccaggcctttcctcgctgccaaagcggcctcgcgcggggcgcggagctgcttcgtgttccttctttgggtgctatgtttgtgtgttgttttttcgctcaggaggagcaagtattgattcgtcagcctc

SEQ ID NO: 29820 - DNA, 418 bp, Homo sapiens
  chr12:8123165-8123583
  binary
cgtctttatcttctaagccctccacatgcttttaaactgtcagtcttttcatttttatttcttcctcttggacgcatttacccaaattggcccgagggaggctgagacagcagatacgaaagaaaaatgtgtgtatgcgtgagtctttgggtggcgaagaaggaggaggaggaatgtagctcggggctcggcccccgtgctgggattccgagggcgggggacaggatgcgcgcgcggcgggtagcgtgccacacggcacgtcccggccgctgcaggaaggcggggctcaggtcccgccgactcccacatgctgggggacaccgggagcgcctcccactcccagcccgccggagagccttgcaattttcaggaatcggcgtcttctctggaaagccgccaaaggttttaagagggtttc

SEQ ID NO: 29821 - DNA, 448 bp, Homo sapiens
  chr12:8757680-8758128
  hypo
cggctccagaggtgaaccagaatccccgcccacttcttcccctcgagcttccccactaactcattcattccgcatcgcaatcccgaatgcgggctgctgcactgcgcctgcgcggaaggccctttcgcacctttgaaggtcatgatggctatttgcaccccggcgcggtgcagccgccgcagcccctcgggctcagccttgcggtcctcacagaagtagaggcgcgcggtgaagatcctcagactgaggttggggttccctcgcagaaagtcggccacatgtcgggcacagtcgtagcaggggctccaggaggtgaaccaggtgacgcggtagcagcggccagggtctaggtcccagtccgagatgtagcggaggaagagcaattccacgtggcagccgttctggagagacagagaggaccacgctaaaattcactgacttttattgc

SEQ ID NO: 29822 - DNA, 1638 bp, Homo sapiens
  chr12:8849750-8851388
  hyper
cgtagcaactaacttgtccaaggtttacgccggtttctagggggcagagctggcgctatccaccccgcctgtatctccaaacccgcttcagccaggaaatttatcatgtggttttaaatttgcctctcaatatacagaggtactgtctttactccagtcccggataaagaccttctaggtatgaatgatctttgtctccatatctttgcctaccggagggaggaaccaccgtaagcggagactccgggcggcggccggcggaagggctgggcgggaggcgtcgggatgccggcaggaccctgcgcccgagggggtagggggctcgtgtcggggttccaggcgcagattgatggggcctaagcagggaatgtgagggcggggagggcgtacaacggaagggactaatctcgcggtttcgagttgggagcaaacctcgccccccaccccccccatccgtttccctttctcagtgaagacggtttgggggcgggtggggaggcgcgtcctcggagcgccctcgcgctcccttttcgctccccgcgcgcgatccatcgcctctcttcccccgaggccagcgatggctcgggtgcgggcgaggagctgggagggcggctctcgacgcaggtgtcagatccgctcggcagtgctcggcgcgctggcccggcccccagctcctccggccgccgccccccgcccgccgcgccgcggcgccaggagggcggggccggggcgcgcgccgctcctcagcaagcgggcgggcggcgttcggtctgagggagcggggcggtctccgccggcgtcgcgcgcgctgtgtgtgagcggggtcgcgcgcgcgcgcggcaggcgagtgagggaacgaggagcggccgggtgtgagtgtgtgggagtgagagtgtgtgggagtggggtgagggagaagctgacgggacgcgaggctgtgagaaactgggcgagtgtgcgaggacgcccggccagcctgcgggagccgcagtcggcggaggagaaaggaggcggctcccggtatcccgaccccctccccctcctctccttcccccacttccagccgcccggcggcccgcgcttcctcgaaggccccagcccggctcagtcggccgagagcgagggaggagccccccgacccaggtgagcggtacgaccgctgttgccctcgggtgtagagcagtgaggcgaaggcgcgccctcccgagtgggcgagttcagcggaatggatcccccgattagcgggggctgggccggggaggggaccggcccgagcgcgcccggggtccggggctagttgaggccggtggtcgccgctccgcggagtcggtggggagcgaggcggggcccggccttcgcgcgtgtgccgggaggcgccggcccgtggcgtgtgcgtgcgaccgggcgagccgtgtcgagggggcggcgacttcgggcgtgtaaggagtatggtttccccgccggcgagggggtgtggtaaccccgggaacgccggctggagtcggacccgcgggctgctgacctgtcctcgggattgcggcgacactccccctccccccccttcccacaaattctatggagcgaccgcgggaggaggatcacgtggtgcggtcccgcagctactgtattcgattccac

SEQ ID NO: 29823 - DNA, 72 bp, Homo sapiens; identical to SEQ ID NO: 10269
  chr12:8906544-8906616
  hypo

SEQ ID NO: 29824 - DNA, 482 bp, Homo sapiens
  chr13:100630645-100631127
  hyper
cggtttgtagagaaataaagcacttctgagaagggacggcgacgtgactttgaacttggctcagctcttctgtgccctgcagagagaggagaactagagccgggaaagaatagccaggagcgcccaacccgtagggtctccggcgggaattaaggcgtccgccccaccgcccggccgcgcgcggcccctggaatccggcgcgagcgagcgcccagccgcgcgatccccaaacgcgggagcagcaaaggcgaaatcaaagcgaaagagagaatgggtcaaagaggagagggagggaggactggggagggggtaagacagtgggaaaggaggaaaacttcgaagtctgatggcctgaaagaaggaagggaagtgaggtctctgcatgtgcaggtctgctattctcataaccaatctccaagaaaacattttccttcggaaatatttttggagtaagcccttccaaatactctcctctcgtgctc

SEQ ID NO: 29825 - DNA, 803 bp, Homo sapiens
  chr13:100636869-100637672
  hyper
cgtggcgagagcaacttgttagaagctgcaaatccaagaagccctctagaaaggcaggcagggctaggagcttccccacattcctgagaaatttgaggagatggacgtcagcctggaagaaagtaaaatacgaaataaatgagcaggactgtcgggcgggaaggcggttaatttgatcttagttctgccgcagaggggatcggactggtttgagggacccagccccctcaggtccttctccctcgccgcggcccagccccctcgcagcctgagtgggggctctgcaggctctgggtgtctgcagccagcgccgatgtttgccgtccacaggggagaagccgttccagtgtgagtttgagggctgcgaccggcgcttcgccaacagcagcgacaggaagaagcacatgcacgtccacacctccgataagccctatctctgcaagatgtgcgacaagtcctacacgcaccccagctcgctgcggaagcacatgaaggtaccaccgcggcggccgggaggagggcgaggcaggccgaggcgccggtgcagcactggcccggaccacctcagccggcctgggagggtccccaggggccagggcggcggggggaacatttctgggggtgctctcccccaggggcccggccccacagcagctgcactcacacccagtcccctctggtcccccctcccggcttttgtcttgcaggtccatgagtcctccccgcagggctctgaatcctccccggccgccagctccggctatgagtcgtccacgcccccggggctggtgtcccccagcgcc

SEQ ID NO: 29826 - DNA, 617 bp, Homo sapiens; identical to SEQ ID NO: 12269
  chr13:106912373-106912990
  hypo

SEQ ID NO: 29827 - DNA, 2326 bp, Homo sapiens
  chr13:107186806-107189132
  binary
cgcctctctccagagcccaccagtccccgcgtgccggccagcctagattgtggccatgtccttcgtcctcgaaaacaggagagggtcaggtatcgccatcggacaccttcccggacttgacacccgagccgatagtagcttttagcgcctgggagcgttcgggggaggaaaggcggagagaccgtccgttccagcggggctcgggttggaaagccgagcgaggagtctccacctagtgaaatggggcgggggttgggggtgggggacggggaaccgaggttccagaaacaggctccgaggccccgcggactgacccctcctcccgcccggacggcgcggcggaccccggggcggggacatagggggatcgcggacgccacttacttggagttcgaggaattccaatagataggctctaaaactatcgatttggaaatcgcagttctgcataaaaccatcaaaacaccccagcagtacttccacacggagtcccttctcacagccatggcgaagccactcccagctccgcgcactccgggccaagaagggactgacgggacgcaggctgggacccccaatcctccggggcagactggcggggaagacggcgtgcgcccgcaggcagctccgaggcgcgctgcgcagctccagcggtcgccgggccaggtgcgctcgctctccggggccctcagggcgcggggcgggagcgcacgcgcggggcgcggcggcgcggcggactcggggttccggggcgccgcgccggacgcagctcggacggccgactcccgtgcggctccagggtgccgggccggccgcggctggcgggtgggcgcggggcgggtgcgggctgggacacaaagacccggagcggagacgaccggcgcgggcggcgggcgctgcgccccgagcggggccgcctgtgactatagatccagtgcagcgggcagcggcccgagcgcgcgggcgccgcgtcggcgcggttccatgtcccggagcacggagcggagtagggcgcctccgggcgcgcaggagccttctcagtccgcgcggctcccggcccccagggcaggaaagagggagctcggtccccgccgcgggctccggacgcgcgcgggcctttgtgtgcggggagggcgccgggacccgctgcgtgcgcagctcctcgctccggccggcgccgcggtccccgccgaggagagtcagcgcggccgccgcgctgtcagagcgctataaacgcggggccccgccccgccgcgcgaagcccattggcccgcggctccgcggccgcgcgctggttggacggccggtccgtccgtccgccatcccctcccgacattgggtgccgcgaggcggggctcgggctgacaggtgagccccgcccctggctcccgcgggcggcgggagcggagcagaagccgggcaggagaagcgctcagcgcgtgcacagggcgcccccggggcggcgagaggccttctgggcgcggtgcagacgtggaaacagcgacggccgagtagcgggccacctgtctccgcgcccgggggcgccttccccctcggcggaatcagagggcgcggctttccctcgagcagtgcggaaggcagcaggctccgctcggcgtcccttctccgcagatgcggcgctgccccgcgtgcaagacttgcactccgcgcgcacccttagagctcccggcttctgcgcgcttctcccgacgcctctcggcgagggcttctcacttgattttggtaccaatcgcctacggctcagtttcagtcagtggggccgggaattgcaagacgattcctgcgacgcggcgccggaatttgcagctctaatcagggcctgagcatcgtcgcctcccgccttctctgcgggcgtctcccttccctcctggccccccgggaaggtggcgcccctggagctttccccgcgtgtcgccggcacaggcacgacgcggggaccgtctcactagcctctaggagacacgcgcgcttcccaaagtgaccagagatttagagggtgtgagatggaaaagtcaaggcatgtgcttctcactcggcgtctgcaagaccccagagcagagctggcaggaactcctcgctactttcccggtcgagcgccggtgctgacgctcgtccgtgacttccacggagccacagcgcccactagcggccagctttgcttctccgcatctcgagcgctctgcggtccaccgacccggatccagcatactgcagcatctaatcaagtcacagttccaaggaaaatctttttatatgtccaacagtaggaagaacacggtagaaataaggcacagtgcaaatgtac

SEQ ID NO: 29828 - DNA, 318 bp, Homo sapiens
  chr13:112690683-112691001
  hypo
cgtgacggctccgcaccgacgcacccttctcagggcaagatcgacacagagtgctctccagggccacccggagatgcccagactcagaggcctgcctccagccctgcctgcctggacagcaggcctgagagccggacatgcttccgtgtggccgtcacatccccagagttgcacccgcgcaggccgtgtgtgcacgtgttcttgaatcctagggtgtacatcatgtccccaaccccaccccactcagcgccaagggagggaaggggagtccagctcccctcgcagggccggactgagcactctgcactcggccctgcc

SEQ ID NO: 29829 - DNA, 150 bp, Homo sapiens; identical to SEQ ID NO: 12275
  chr13:114616940-114617090
  hypo

SEQ ID NO: 29830 - DNA, 148 bp, Homo sapiens; identical to SEQ ID NO: 12276
  chr13:114617363-114617511
  hypo

SEQ ID NO: 29831 - DNA, 294 bp, Homo sapiens
  chr13:114769900-114770194
  hypo
cgtttttcagaagacaaatggccaacaagcatacgatataaagcccagcgtggctcatcacctgaggaatgagagccagagctgcctgtgaccccacctcacgccaggcagaacgaagccacctgcgaccccagctcacgccaggcagaatggagccgcctgaacccagctcacgccgggcagaatggctgggatcaaataaaacacggaaaaatgacagacgctgcagagctgtggaggacgtgagcgcttgcacgctgtggggaatggaaattagcgcttaaggaaacccac

SEQ ID NO: 29832 - DNA, 839 bp, Homo sapiens
  chr13:20735265-20736104
  binary
cgcgcgcttcccagcacgcacacctaccgcccccgcatccctaccctgtacgcgcagccacagcactcgcccgcgtccgcattccacaccctaccccgcgcgcacgtccatgcctagcgcctgcatccccatcccgcacctgcgcgggccctggggatgtggacgcgggggctcttccctgccgcctacgcactccggggcatgcccgcgcgggacgtgagaggagagccgagggctgttggggcgggcccgacccgcttgcggggcgcccaccgcacgcagatgcgccagcccgcgccccgctcgcgcctgtcctgggcttcgcaggcccggcgaggtagctgctctccgggcgctcccacggtcggaggcgcgtgggcgtcgggcacctaggtctcgcccgcctgcagccgcctggggacgcgggttccggacggctggcgcggggcggggcggggaccaccgagcaggaagtccccgcggaagcgccgccgggcacagcgtgggtgctgtcgaggagtggcgcccgggcggggcgggaggttataaatagcggccgccatcctgcttctcttcagacacacttaatttagccggcaggcacacggatgcttatttttaaaaaaagaacttgttttattgcgctcgaggtgaccgggaaggtgtccccgcgggtcactcgctccatctggtcctggagacgagatgccagggcgaggcctaacctgcctgctggcgcccaacgaagattttaacgttttctgttcccttcggggtggttttaccacgcttgagagggacgcctaccgcggaaggccgcggaccgagggcggcatcgc

SEQ ID NO: 29833 - DNA, 775 bp, Homo sapiens; identical to SEQ ID NO: 23900
  chr13:22243231-22244006
  binary

SEQ ID NO: 29834 - DNA, 979 bp, Homo sapiens; identical to SEQ ID NO: 26309
  chr13:28540416-28541395
  hyper

SEQ ID NO: 29835 - DNA, 705 bp, Homo sapiens; identical to SEQ ID NO: 26311
  chr13:28544184-28544889
  hyper

SEQ ID NO: 29836 - DNA, 1254 bp, Homo sapiens; identical to SEQ ID NO: 23903
  chr13:28673915-28675169
  binary

SEQ ID NO: 29837 - DNA, 578 bp, Homo sapiens
  chr13:36788459-36789037
  hypo
cgcgtcctggaaggggcccttcctgctattcgctccccacagttccccgacaatgagagctccccaggccgggctttgagggccgaggggaccaccgacctagggcccgcccgcgaggttataaacgcagctgcctccccttccacagcctcttacctggcccgagatctggcagtgctcctggcagataattgaggaagccatggccgctgcgcacgtgctgggtcctggggcagcctcccagcaggaggagctccacagccgctgcgtcccgggcccgccccctgcactaatggctcctggccgcagctgagggcgagcacgccccaggcgcccttaaagtggccctgtcgccagttctggcgcgtgggggagcagcaggccgctctgaggggtcaacgcggaacccgggtcgggggcctgcccgcgggggctactcaagctgtcctgggggcccttaggagaccgcgtcactagctgactgcgcactccaagtccccttcccagggcagctctcacgacactaagccccgcgtactcactcccactgcgccgcctggggaggcgggaggcaaggc

SEQ ID NO: 29838 - DNA, 347 bp, Homo sapiens; identical to SEQ ID NO: 12284
  chr13:37679456-37679803
  hypo

SEQ ID NO: 29839 - DNA, 511 bp, Homo sapiens
  chr13:45149906-45150417
  hyper
cgcctggcgcaagaggctgtgcctgcagctgagcctgcgaaaggaggttcaggctttgtggaggcggaggctgtggtcccgacgtagaagatgctgcagggggcggcggctgaagcagcgacggaggcggaaaatcctcggaagatgtggcattactaccgacgccggtacctgctgcattgagagcagaggcgctgccactaccgctgccccttcgagggaacattgccgggtgcgccatcttcctagcgctaatgtctgcagcggcggcggccgcggcggtggactcaggcggctggtgcattgtgttgggtaccgggggcgcggaggagacgagtgcaatttccttctgcaccgtaatctttgtattggagacgccggagaggaaaacgggacctgacgctccgcctggcgcgattcctccttctcctcctcctcagccaaaggcgccggtcgctcctgccttcgagagcgagcttcggaaaggaggatgaacgagggtgaacagggc

SEQ ID NO: 29840 - DNA, 393 bp, Homo sapiens
  chr13:68343652-68344045
  hypo
cgctgaccgaccagggttgctctcctcgctcggccctgcaggctgcactcgactcgtgccaccaacccagatcctgtgcctgctgtggctctgcactcagcccacgggctggaccaggcgtgccgccagcggcttccaccttgggcacccgcatctagatgagcggaagttggtggtgcctgaaaacagggatgccagcaaccgtgaagcctggggagtcctgagagctgagcccctaagaaatgttatggctgctgtagttcagcgagcagcagggaatggcgcccagtggctttttctctcctactgcttggcgagcgggagggcgtggtacccgcagcttggcgaatgggcgcgtgttacagctttcctgctcccgctgccccacagctc

SEQ ID NO: 29841 - DNA, 1090 bp, Homo sapiens
  chr13:77459256-77460346
  binary
cgggcaggagaaggactgggcgctggagtggcgagggggtctggggagctcactccctgcagaagacgtactcggtgtagctggtccagatcttgtcctcgctctggtcggtgctgctggcaaaggcgcaggtgcccgtggagctgcacgccaccatgtggaagcccgactcggacagcttgtcgaaggcctgctccaggaagttgaacttgaggtaatagcgcgaggtgtagcgctccgggggacggtcggggtcccggctttcgttcagggtgtccccaaacacctccttggccagcgacgtctttccgcaaacggtgatgcgcgccactcgccggaacttggcgtccgcctgcgcgtcccgcccgatggtgtaggagccgcggtagccgatggtgatgtagcccgagcgccggctgccgtccagcgactgggacggcgtgagcagcgggcccgccgcgcccccggacggactgcggctagccagctccagcgtgggcgacggcgccccggcagaggcgccctcctgctgttcgggctccgagtagccaagcggcagcagctcgtcacccagcgagccctccttgtgcaccccgcgccgcgagggcggcggccccgggccgggctgctggggcgccccgaggcggcgcacgagctctggcagctcgaagtactcggcctcgcgctgcagccggctgcgctcggggaagtagtcgggcagcacgagctgcaagtcccgcaggtaatccaggatgtagcggaagaggaagccgtcccggtccagaaagaagcggcctttgctgtcccgggccagctcctgcggctgctgctgcgtgaacatgcgccagagcagcgagtcgggcaccgacaccaccgtgcagcgccgggtcacgtacacctggccccccacgttcagctccacgatgtcggggaagagcggtggctccgcggaggacgacgaggagccactgccgcccccgccgccgcccccgttgggtaatccacgtgtgctgtccgccagagccatgacagagaggtggccgggccgggacagtggcaggaagccgcgctgcactcaggagctgcaacc

SEQ ID NO: 29842 - DNA, 1293 bp, Homo sapiens
  chr13:79175610-79176903
  binary
cgcaccacgttctttttgaggtccagtttctcggcgatggcggcgatcttctcggacgagggccggggctgcacggcgaagtaggcctcgagggagcgcttctcgggcgcggcgatggaagtccgcttgcgcttcttctcgccgccgttgaagagctcaggcttgttcattttctcgcgctgggcgccctcggcctcctcgagccacgcctgcaggatgggcttgagcgcgatcatgttgttgtgcgagagcgtgagcgactcgaacctgcagatggtgctctggctgagtgagcccacgcccgggatcttgaggttggccagcgccgagcccacgtcggcctgcgtcacgcccagcttgatgcgccgctgcttgaagcgctccgcgaacgcctcgagctcgcgcgggtccgtgtccgagtcgcagatggacgccaggcccgctgcgcccaccacggccgccgccgccgatgccgctgccacctgcccggccgccgccgccgccgctgccgctgccgcgccgtggtgcgccgccgccgccaccagcccggggtgcggcagcccggacggcatgttcatggcggccgccgccgcggggtgcgacaggtggcccaggctgtgcatatgcgggtgagggtgcgcggagccgcccaggagcccgccgcccgggccgccgccgccgccccccgggccgccaccgccgcctcccccggggccgccgcccgggccgccgccgccgcccgggccgccaccgccccccgggccgtcgtgggcgccgccgccgccggccgccgcgcccgcgccgcccgcgccggccatgagcgcgagcgacggcgaggagatgtggtccagcagatcgccgggttcgagcgcctggtggtggtggtggtggtggtggtggtgcgccagaggcaccgtggaagtggacgtgcacggcacgctgttcatcgtgtggtacgtggcgtccggcttgaaaggatggctcttgccctgggacacggcgatgtccacggccgccagcgcctcggcccgcgccagcagcgtctcgtccaggctggcgaagaggttgctctgcagctgcaggcgacacaaaccaaaccaaaaaaaccacaaaaccaaaagagcaaaacaaaacaacagaagaaacacacacacaggccggaaagcacagcatgcgaagggcaaacacaaagcaaccaaaataacaacgggtttgggggcagtggagagcgggaaagacggagagggggcacattgacgaccagggagggggcagacgagaagggatgggagc

SEQ ID NO: 29843 - DNA, 713 bp, Homo sapiens
  chr14:101349283-101349996
  hypo
cgcggtggagggacactcgtaaaaggtctcgctgtgatcactgtctccagcctgctgaagctcagagggctctgattcagaaagatcatcggatccgtctgagcttggctggtcggaagtctcatcatctgcttccttcgggttaaacacgtcggccaggtctgagtatgggtgtggcagtccgggtagcaggctcatgccgtgcctctctagggcaatgcatggcgggggcgggcggaagcagttcttcaggcagtagggagagtggaaggtgcagcggcctttgatccagtcgacttcgggggcgtggactcggagccagcggatgcctaggaccacagagaagttcggtgaaggtacgatgtcaaattcgatggactcctggtggttctggtggatacacaccaggggctccgtgtagagccagacaggctcgttgccaatcagcgagccgtccacggattggaccggctgtgggtacggcttctcgtagagctcgacgtagtgctcttgggcgaacttctcatccatgaagttgccgtcagctcccgaatccaccagggcctggaccgcgacgctgtggtaggggttcactctcaccatgagcagcaggaagaggtgggcgcgattgatgtccggatggacttcgctgggcaaccagctgctgaccatccacctctctggagcaggtgagtcgatccaggtcaggttcc

SEQ ID NO: 29844 - DNA, 415 bp, Homo sapiens; identical to SEQ ID NO: 12293
  chr14:101489771-101490186
  hypo

SEQ ID NO: 29845 - DNA, 266 bp, Homo sapiens
  chr14:104619100-104619366
  hypo
cgatgcacagggcaccgtgtgtagatcggggctcacgaggcagatggagtaggagggcccttgtggcagagcgagggcctgtgtggaggcctgggggtgtgaggcgtccatggacgtcgggcgggggaccggcagttgcaattgctggagatgcgttgcctgcccctgtggcaccctgggggcagagggacatgtgggtggctgtgaagagccgtgtttctgcctggtacactgtctagtcaccacacagcgaccagcacaagctc

SEQ ID NO: 29846 - DNA, 932 bp, Homo sapiens
  chr14:104622929-104623861
  hypo
cggccatgggttgggcagggtgagccggccatgggttgggcagggtgagccctccatggtggtgaggagggatactgtctgggatggcagggcctctgtctggagtgtccctcctgggtcccggggcggcttgttctgctgacgtgccgtgcctggcctctggcctgtgccacttgggacaccctgaggacgctgggccttccagaccagcccacgtcccctcagcacggggaccccagtcctctgctagcctgggtacaaaggacgcctcgggcagtggttatcgactggacacttggggccgaatgacgcttggcacctgggtgaccgtgacctgaccaggccacggtgcccaagggggtccttggagagcttggggcactgggcccttggggaaggggccggggcgaggggtggccaggctgaagcaggctgccttccctgccttgcctggggttgcatccccccacgccgcccaggaccaggtttggcctgagggttcggggtcccacgtgtctgggaatggaacgtgcggaggtggagctcacgtttgctgggctgtcccgggcgtttaattacgtttgtgcttcattatgaggaggcctccctttctgggatttatttgagctaatgagttggaaatgccagggtagtatttcagatgagggagcgccacacatcaccgtacgtggggcaattagtgttcctgccaaatagttatcgtggtttcttctctaattacgccgctgggtgctcccaggaggctcaggggtgagagggtggggggtctgtgtccatcggtcttgaccagtgtggtcgctgcgattctggagtttgatgggggagaggcggaaagtctggcttctggaccaccatctgcctccctctctgcctccaaggagtcctgctggggcagaccgcccacacacccc

SEQ ID NO: 29847 - DNA, 637 bp, Homo sapiens; identical to SEQ ID NO: 23928
  chr14:104640046-104640683
  hypo

SEQ ID NO: 29848 - DNA, 657 bp, Homo sapiens; identical to SEQ ID NO: 23929
  chr14:104641166-104641823
  hypo

SEQ ID NO: 29849 - DNA, 867 bp, Homo sapiens
  chr14:104643028-104643895
  hypo
cggatcccaccgctgcggaggggtgccaccacgctgggtgtgacaacgccagctgtgtcctggggagatgctcccacggaggtggtggcctgctcggggagcctgaaggcctcccccaccagcaagaagggtctggctcccaaggcgggcttcctcccgaggcccagtggggcggcccccccggccccacccacgcggaagtccagcctggagcagaggagcagcccggcctcggcccctccgcatgctgtgaacccggcgcgggtcggggctgctgctgtccttcgaggggaggaggagcccagacccagcagccgggctgaccactctgtccccagggccacgtccagcctgaaggcccgggccagcaaggtagaagcagcacaccgtcttgccggacacgcgtctctggagcggtacgaaggcctggcgcacagcagcagcaagggccgggaagcccctgggcggcctccccgggctgtacccaagctgggtgtgccaccctccagccccacacacggtccagctcccgcctgtaggagcggcgcagccaaggctgtgggggcccccaagccccctgttggtggaggcaagggccgtggcctagtggctggtgggtcgcgggctctggggccttcggtgaagctgtctacggcctctgtgacgggcaggagccctggcggccctgtggccggtcccagagcagccccacgggccgggcccagtgtcggggcgaaggctggccggggtaccgtcatgggcacaaagcaggcgctccgggctgctcacagccgcgtccatgagctgtcagccagtggagccccgggccgaggtggctcctcgtggggctcggcggactcagacagc

SEQ ID NO: 29850 - DNA, 258 bp, Homo sapiens
  chr14:104897593-104897851
  hypo
cgtcccactgcgggcgcagcaccatatctgttcattcatctcactgcggaggcagcaccatatccattcactaattccactgcggtggcagcaccctatccattcatcgtcccactgcgggctcatctgggtcttcgtggagccacggtcctgcttcagtagatccaattttccaaagctgctctgtggattttcagcccctcccaccgtgtgtgggggccactgccttctctgtcctaaagcggccctgccatcgcc

SEQ ID NO: 29851 - DNA, 312 bp, Homo sapiens
  chr14:24808635-24808947
  hyper
cggctggggtcaaccggggtcactcacgagtttacgatcttgaccgccacatcgtagccccacttcctatgttgcgcccggaacactgtgccgaacccgcctttgccgacgagctcctggttctccagttcctcgatggacaccaagggggcgggggcaccgctgggcctgagagaggggtgtcgcccactagccggccgtgccgtgcctcagcgctgctccccgcgcccctgtgactcggcgttctcactgcaatccccagcctccctcgccggcccccaccgtccccggactcaaagacgttctctgagc

SEQ ID NO: 29852 - DNA, 1497 bp, Homo sapiens
  chr14:36002777-36004274
  binary
cgccgacagcagccacagggcggtgcagtcagctgtccggccgctcggtcgcacttctcatcagctcaatacccgcagaggacgtgcaccggttccctcccggacacccaccccgtggtctccgccgcaccttctgcccaccgccccttccgctcggccgtccggcgcagagcgggagcttttcagccagacgccctcgcgttgggggcagccgggtcccggcccgagcggagggcgtcgtgaggtggccttttcgcccggctccccagtgggacgctccgcggaggcagccaaggcggggagtgtcgagctccctcacactctggaccttaccttctggcgtcttcgcccgggaggctgcagggggaggcggacccagccggccacaggggcaggttcgcggcgctgtgaggcggggctgggcgtgcgccgccgccgccgccagattcgtctactccagtgaatcggcacgggagaaagccccgcccccggcgcccgctcccactcctgattggccgggccagcccggggaggcccggcgggaccccggcccgcgtctcagctataaagatagccccggcatgacagccgcggcgaagctcttctagttcatctgctggccggctctcagtccccgtggcgccccctttcctcttgtcccagagcgctctcgactccaccatgccaaggggattcctggtgaagcgaactaaacggacaggcggcttgtaccgagttcgccttgcggagcgtgtcttccctctgctggggccccagggggcgccgcccttcttggaggaggctcccagcgcctccttgcccggcgcggagcgggcgacaccccccacccgagaggaaccaggaaaggggttgacggcggaggcggcccgggaacagtcggggtcgccatgtcgggcggctggggtgagcccggggacgggcgggcgggaaggcgcggagtggcgggcgggtggcagggaaggtcccgggcccagccccagccccagccccagtccagcgaagccggcaggcgcagagctgcgtcgggcgttcctggagcgctgcctcagctcgcccgtctccgccgagtctttccccgggggcgccgccgccgtggccgctttctcctgctccgtggcgccagcagccgcaccgaccccgggggagcagtttctgctgccgcttcgggcgccgttcccagagcccgcgcttcagccggaccctgcgcccctctcggccgcccttcagagtctgaagcgggcggccggcggcgagcgccgcggcaaggcacccacggactgcgcgtctggacccgcggccgcgggaatcaagaagccaaaggccatgaggaagttgagctttgccgatgaggtgaccacatcccctgtcctgggcctgaagatcaaggaggaggagcccggagcgccgtcccggggcttggggggcagccgcacgccactgggggagttcatctgccagctgtgcaaggagcagtac

SEQ ID NO: 29853 - DNA, 847 bp, Homo sapiens
  chr14:37050213-37051060
  hyper
cggcggctggaggggcgccgcacttctcctgggccgcggcggttcccacctcgccaccgccgccgccgccgcacggctgcccgtcgcgaacaagcaccggcaccaccacgcgacgcagcaggccgggcgcggcgtgcagctcggcggatgctgccaggtcaggcgactccgccgcccctggagcgcgagcgcgcttcagcttgtagcgatgattctggaaccagatcttgacctgcgtgggcgtgaggcgaagcaggctcgccagctgctcgcgctcgggcgcagacaggtaccgctgctgccggaagcgccgctccaactccagcgtctgcgccttggagaatagcacccgccgcttcttccttttctcggcgtccgagcccggagacgcgggcctagcggacggccgctgcgacgagtctggcgggctggtctccaggctgctctcgtccgaggctagggacagcaaaggagacacgggtgggtgagacgccggaccctacgagggcctgctgcccttctggcgcgggcgtggaggcactggccagagggcacgcccactagcccgagactttcgggatgaggccatttcctgagtccacatctggacatccacctctccgaatgcggtgacctcattcataccacagcggtcatcagcgggcctgagatcgtgccccgaaaaaacccaccccggggccctcttaacatgtccgcaccggtagttgcgctggccgaccagtttatcacaagctgggtcaccagcgccggcctcctccaggtcgactgcactgcagtgtgccgaggtttgcggagccctgagtgggaacggggtgggggtaaactc

SEQ ID NO: 29854 - DNA, 866 bp, Homo sapiens
  chr14:51027119-51027985
  binary
cgtccacggctgggagacgggccgtagccgagccgctccctgtttgggcggaggaaccatggccgagcggtacccgcgtcaccgaatcgcgctgtcggggtgagggctgcagcttcgcgcaggccgggcctccagctccttcttccccacccccctcccgcctcctcccagcatttggacagcacccaccaggcgcctccggggacttgtgggttccgccttagcgatcggttgggaggaaggctatgggggtgggcagggggctgttgttactcggccccagaggggcgaggggtcggggatctagagcaggccaagccccaacccccctccccgggagccgccaactcgctggctctgcagggcgcgggctcccggcggcgggcggcgggcggcgcgctggaacaatgaggcggagcgcgccgggtcccggacggacggtagcagaccgagcaactgggagaagggccaccctcttgggaattcctgagcactgcagtactcctcttaatttgggggttgggtgggggaattggggaagaaggagagcaaagttgtggtttccagccttctgccccaccccgacgtggtaccccattcagaccagccccaagggtggctttgttctttgattttaccttttggagacattgggctcatgattcagcaccaggccgaggggaggggaaaggagaggcgagacccagtatgttcacaccgcgagtgggtgggcggtgctcacgcaggcggagaagaacgggcgcagcgatgcggaagaaatcgcggccccgcccgccttgctgctccagacctagttctggacggttagtgtgggcaggctgggcgtctttttgtcgtaggttccc

SEQ ID NO: 29855 - DNA, 997 bp, Homo sapiens
  chr14:51560731-51561728
  binary
cgcccccactgggatgcgctgtgcgcaagagacggggaccgtctgctgcaaaaccggatgatcggagacgcagggagttaggagtgggttttcttaggactcaccttatgtagtttccacatggcccccagagccttgacttcgtggctggagtgtttgccctcctccaagcactggtagcacacgggcatcttgcattgcacgcagtacatgctgtggttctccagctcgtggtctgtgcaggtggagaccttgcgtgggctcagcctccggctcacacgaccctgggccgggggcaccaggcggtgcttggctaggggcccccggggcgggtggcagcgcaggcggcacggatcgcagtagaagacatcgcactgttcgcacatgacggtggcttccttgggcgccttctcgcagagctggcacttgagggccgcggctttgctctgctggtagcggtcaattaccccttccagtacgcgattcttggggaagccgcggagcccccggtcatccaggatgaggctgcggtgacactgggggcaggtgatacaggagttgcggggcaccggggccagggccggtgacaagtgggtggccggtggcggcatagccgggggaaacacgcggacgccgttgggggacttctggcacggggtagtgggggcgctggcgaaccccccgtaggagccatagccgctgtccgcctcgctgtataggctcatcttgtccaggtccagatagtcatagtcggagaccccggagcccgcggcccgatggctctggggggattcagactctggggtctgcaccaggatgttgcgggcgcacgcctgacacaaattgtgagagcagggcaggatgatgggctcccgatagaaggagccgcacacggggcatttcaactcctcttccatctcctccatggggaccggtctgggaggagacagcgacggctgcagcgggtgcctgagctggcgaggtggccgacgggccc

SEQ ID NO: 29856 - DNA, 939 bp, Homo sapiens
  chr14:52535424-52536363
  hyper
cgtgagaccgaccccagggaagaagctgcgggaaaagtgccaggagggggctgaacttacgtagaggttgctgaatcgggcttcgtagaagtgcaggggattcgccagcttcaccacggctgagctttcgtcgtcgccttcctgcaggagctggtccccccacgactccccgtgtgggaagagctcgtctgggtgcagcgccgcggcccgcaacattagcaacggcagcagcagtagcactggtaacgacgacagcaccggccgcccggccacccggtccccctccatgctcgctcggccgtgcgcttacccgctgcacaacgcgtcccgccccggcctccagcccactctccgcgccgcgccagcctcgaacctggatctccgcgggcgcctgggcggggcgggactccaggcccacccagcaagctaattggctgaggccctcggctggggaccaatcaccggctctgagaaagttcggcagtggccaccacatctggttctcgttaacttttctaaggcagcggccgctggagcagcggggctggcggggtaaaagctcctggccagggctgcctggagctgccccttccactccgcccccagggagctcccgggtcatcctctcatccgggctgccccgcggcccccaaggagccccacccccgggaccaaatggcccgcaaggtttggggcagcggcgttgcaggagatgagctcagcgcaaagggaaccccgcagcggcgagtgcggctgctggcctgcgcgctgtggccccaacaggctggcagggcgcgggcgggtggcggggttgcggtatgagctttgctccctgccctggggtcccgggcgctcctggctctggaggcctggccatcggtccgaaaagcaaagggacattgtcgtggtcccctcggccgcttcgctccacccagagac

SEQ ID NO: 29857 - DNA, 214 bp, Homo sapiens
  chr14:54423285-54423499
  hyper
cgggctcgccagcagcagctcctggggacctctgaacggttgcagtgaacctgggcgagggccggggactgtggcgctgcaggctcgagatagcttggacgggaatcccatcggggagacaagctagatactcagccggagcagcagcggcgtctcaggctcgcgtccctcagctcggatgccacactcacctagcttccgggccgggctccgc

SEQ ID NO: 29858 - DNA, 780 bp, Homo sapiens
  chr14:55595810-55596590
  hyper
cgcccctgcggcggcggctcggggtgtctggccggcgcggggctcgcccagcctggtccggggagaggactggctgggcaggggcgccgccccgcctcgggagaggcgggccgggcggggctgggagtatttgaggctcggagccaccgccccgccggcgcccgcagcacctcctcgccagcagccgtccggagccagccaacgagcggtgagctgcgcggggcgcgggggacgcggctccggccgggcaggggagagggcgcccgggcgctgcttggggcgcggtccggagagggttcggctccccgggaccgggccggggcgcgcgcggagagccccacagcctgtgctctgccctccaggagcggggcggcgggcagcgatctgggcccggggcagtcgcctttgattatcgagggcgctggcgttcggggaaggttggcagcaccttacgagacccacacacgtccccggggcggcacgggccaccttctgcggagcctcgtgggcttcgccgccgtcgcacctccgccgcctgcgctctgcggccccagagtaagccccatccggtgacgagccgcagtctggtcaccccagtcccaccaggtcccgctgcgaggggaggcggaggggctcgctcagcaaaccagacggccgctccagtttctctaattggggttggagccccgtcacccttccccagatcacggccgcgggggagcgaagggacttcccaggactgcatagggcgcctcccgggacccacagcttggctggccc

SEQ ID NO: 29859 - DNA, 454 bp, Homo sapiens; identical to SEQ ID NO: 25100
  chr14:60794412-60794866
  hyper

SEQ ID NO: 29860 - DNA, 1470 bp, Homo sapiens
  chr14:60981663-60983133
  binary
cggcggccgggcgctcggcgggacaatgcgcggggccgcggggttttgtcggcctgaatggctaataggtttgcctgtgagctgcgagggggcggtgtcggggaggaggcggcggcgaggggagaaggggtcattgtccgcgcgctggcccgggcgccgaggcgtgtccctgcctgcgccgcgcggctacccccgtgcccggcgccgccgacgggaaggcagcggcggggaggccccctggaggcctgctgggaaatggcggctggagcggcgggcgcgtgggtcccctcggggaggcgccccaagccacggtccgctcccaaagagaagcccagactgggcccacagtacccgggaaggtgagtccttactcgggggcccagatctccccacggaggccacagatctgggtccccgaggaaggagagccccccttttcgcgcacccaccttttccatccagcgccccgcgaactcgcggacgtgtaggcctcgagccactcctactgttgggctgcgtgactcagcggctcgaggagagaaacctctcaaaaccgggggaccgagacggggttcaatttaaacctaggtgggagaatgagcccacaagcgcgcgcccctgcagctgcggaggcgcgcgcccgcccaccctcgggcgcctgaagtcgcagcggttgcagagcctcgagcccgtggatgcggcgcgcgccgcggtctgggcctgcgcgagaggctgccgcccgcgtcgggcctgggcctacgcgtgtctggcctgggcctgccggtgcaacagcagttgtcgccaccggtcctaggccgcgccgagcgagtcgccgagaggggcgggaagaggggagaggtccgagaccagggagcgggacctaaagggggctttccgcgcccgacaggtccgccggggttagccttcgaggcggggagagggagcggggtccttcaaggaccgcatgttcgcgatagcacatttgagccctggcaggccacctgggccgccttctttcggaaaccttgcggggtttccaagcaaggtttacaatgggaaactttatttcccattgtaagctcttacaaatctcctctggctagatccttccttgcagctctctttgctaggatttatattcccaaacttcttcagacgtgccctaccgcgagggaacgaactggttttcttcccgttttcacctccttgtctggagacaaaggggtgtgagggcgatcccagagctgaacaagcagtttcacgcctccctgcccgctcatgctgtttccgcttgccctgtggtttgctctgcctggaacgccgccccctacctcaactgctaccctgtcattccacaaagcctaccccacctccactaagttttccgtgagccagtgagctccacacagataatgtgccaccaccttttttaatgctcccaccgcaccttatctaaacgtctgttttagc

SEQ ID NO: 29861 - DNA, 876 bp, Homo sapiens; identical to SEQ ID NO: 23944
  chr14:61104155-61105031
  hyper

SEQ ID NO: 29862 - DNA, 1314 bp, Homo sapiens
  chr14:61113933-61115247
  hyper
cggccctcgggcctggcttataggacggccgttttgtaactaaaggctaactgcaaccatacaatccctgttcctgtgttacttgctaactcttcagcccctcgtgtccccctctcaaacttcctaccaacacccaccccaacccatcctttctgggcaggggaaacttcgccgccccgcacaggctgccagcgggcgcggcgcgctggggcgtcagtccgggcactcggtaccggttaacttcaggatttcgcttccctcgccgcttccgccttccgagtgctcgtcagtcctcccgactcctagcgcctgtctgtctcctttctttccccttatcctcacagtctctgtctcccgacaagcccatttcagcagaatttatcctggctctggttttccaccaagacaagaaagggagcaagatcttcggcccctagtcttggaagcgaacaaaggaaaacctaaccggcccctgcgctcaggttttcccccaaactctttggcttcgcggagcgctctccccgccacagccacctccccaccgtccttctgaatctctgtccgaaacgctatagagaacagaaggagcctgcccaggtggccgaaggtgttgccccgaggtgggggaaagtagagaccaatttttaaaatattgccttgtgagctccagtgcgagagagggctgcgactggagaccctttcctcgtctgggcatgcggcgcggtcagccagaccgacgggctgcagtgccgggccacgcgcgagcgagcacggcgaggatcaaccctttcttaatttggggcgccggggagtaaatgcagcgccaactctccccaaagctctctttttgttgtatctttaaaagtctcctccatttgtccagctagtgagaaatgaagcaggctacctctaaaccaaaagactatcaagagagagctgtggagaaccaggcgggagtgggggcagagccaatgtctcaggccagcttcacccctctggggagcaagaggagagaggttcgcgaacctcagctcccaccaaacccctttccttgcgacaccaatcaacatttcactgcccgttgatttagaaactcactctccacccaccactcatagccgcggccagccagggaggcataaagaccaaatctagcgccaatatttcccgacactcacatcccagagaaacccacgcgcgggtgctcaaagcaaatgaggccccatccttagcaaggaacctcagagttcatgaactttcgctgcagcgccgcggagggcctgcgcgccgccccgtggacgggctccggccggc

SEQ ID NO: 29863 - DNA, 167 bp, Homo sapiens; identical to SEQ ID NO: 12315
  chr14:64805585-64805752
  hyper

SEQ ID NO: 29864 - DNA, 875 bp, Homo sapiens; identical to SEQ ID NO: 23947
  chr14:70654358-70655233
  binary

SEQ ID NO: 29865 - DNA, 185 bp, Homo sapiens
  chr14:74208160-74208345
  hyper
cgggcggctctgaagaggaaatctcaggccctagatgctacaggtcattgttagcaaccccagccgctcccaggaaaccagccagcagcagcggagggcagggctgggcgggcacagggtcccgactatacccagtttgcagttcggcccacccccagcaccaggaatgcccctcccaggctatc

SEQ ID NO: 29866 - DNA, 299 bp, Homo sapiens
  chr14:77228490-77228789
  hyper
cgcaggcggggaatgtgcgcgtcggcgcgcgccccctccccgctcccggccagctgcgagtcttggctcccggacttgtctcgtcgcgtcggagaaatcgccccccagcgccgctctcccgcccgggggtcttggttccgagctcgcgcggccgggagtcgcctcggtcttccttggggcgcgcgcagatgtgagcgtgcgagagttgtgtaggggattttgttccctccgaaactgagacccagggcgcccagtgggcacccgtgccttgactctgtcctttctgcagccgctggtcc

SEQ ID NO: 29867 - DNA, 835 bp, Homo sapiens
  chr14:77964834-77965669
  binary
cgcccggtgtccgggagcttccggccggccccggcccctctctccatcggggggtcgctgcctgtgtgtgtcccggtcccgctccccgcacggctggagccggcgggctggggaggtgggaccgacagcgcgctccgcagcccggtgccgccgccactcacctctgcgagcctcgtgaggctcccaggccgtggtccgcggagccgcggcttcttcacggggagccctagcgccgcctccagcagcgccgccagcagcagcacgcagaggaggagcccggctcggtcgcggagcgcacgcatcgtctcggttccgaggctgctctgcctgcacctctgcacgcggccgcgaacccagtcgcgccccgcctcgcctcctccgggggcgggacccggcgatcctgaggggcgcgcggggcacggggccgcgcggggcgggggcgcgcagctcgcacagcctctctggccccggctcctcgcgtgggcgcccgcacagctctagggtccgcgcacctggacgtcccccaccctcctccgaggggcccctcggcgctccccgacccgtcttgaccctgtgggcggctctctttgatctggccgcctccccgccctcagtccccgccgctgtcgccgtcgcagcccccagcgaattcctgttcgcgggaagctgcggcccggcgcgctccggccctgcgctgcgactcctgcggggccctgagggtccgacgccacctctgccctccccgaccgcgctccaactgcgacctggaccggcggtgccgcgcgggcgagggaggcgcagcccgacgggagagtggcgcgagtcttcggatgcc

SEQ ID NO: 29868 - DNA, 987 bp, Homo sapiens
  chr14:92789487-92790474
  binary
cgggaggcgccacggcctctcagacgctggcgcccgcagccgagaagccagagagaaagttcccggggagagctcgcccctgggagggccgacgtcgagcctgctcgccgcgagggtctcaggtaccgcgcgtccagccagccttcccgcggcgcgcactcggccgcccgggctcggctcgtcgggaagcaggggaacatcgccggctggcagccggggcggccgccgccaaacttggaggaggaggatgctgcgagtgggcgcggcggcgcggggcgcgggggcgcactgagtgctccctacggcgctgctgccagggctgtggccgggcgagccggccgaagcggagcgggcaggtagcggctctagcgccgggactgcgccagccctgcgagcccgggccgccagcgccaccgtgccggcgtcgcctcctcgccacggagccatggtgcgcgcagcgcgcacgcggcgcgcgggactctgagctccggccgcgtcgcgcgtccccaccttcccaaggggctcccccgccgacctcgccctcgggccatgaggctttggcccggagctcctcgcctctgagtcgcgcaccgcctgctccagccccagcgccgctcggccactgattgcactctggccgctgaagctccccatcctctcccagagacggcacccaggcgctccgggatggcgctccgcgggaccctccggccgctcaaagttcgcaggaggcgagagatgctgccgcagcaagtcggcttcgtgtgcgcggtgctggccctggtgtgctgtgcgtccggcctcttcggcagcttgggtgggtgctggtacgggtcccctcttcctggggagttgggggctttggctggggagtctcggggcggctgcgagatgttttcccctccttcctcatcaggttggtcccaagggttcatccagtcccctccccgccgggcaggtagagcgcgcccagaagagctgatggac

SEQ ID NO: 29869 - DNA, 329 bp, Homo sapiens; identical to SEQ ID NO: 12320
  chr14:94209931-94210260
  hypo

SEQ ID NO: 29870 - DNA, 111 bp, Homo sapiens
  chr14:97411551-97411662
  hypo
cgaatcctatatccaccctccagccacaccccgggacactctggatcgaagccacccagcgtcagagcttggacgatcaaggtggacctacccgctcagaaagacagtggc

SEQ ID NO: 29871 - DNA, 896 bp, Homo sapiens; identical to SEQ ID NO: 25108
  chr15:101459489-101460385
  binary

SEQ ID NO: 29872 - DNA, 203 bp, Homo sapiens; identical to SEQ ID NO: 12323
  chr15:26026151-26026354
  hypo

SEQ ID NO: 29873 - DNA, 144 bp, Homo sapiens; identical to SEQ ID NO: 12324
  chr15:26234718-26234862
  hypo

SEQ ID NO: 29874 - DNA, 137 bp, Homo sapiens
  chr15:29145339-29145476
  hypo
cgcctggactcaggcttcttcgggctcatcagacctgaacagcctggcagtgtggctgtgtgggaatgggtgacaggtgctgttctccccagtgcaaatcaccaatgctgggcaccgtgcatcagcgtcgtggtgac

SEQ ID NO: 29875 - DNA, 103 bp, Homo sapiens; identical to SEQ ID NO: 12325
  chr15:31188921-31189024
  hypo

SEQ ID NO: 29876 - DNA, 216 bp, Homo sapiens
  chr15:33954396-33954612
  hypo
cggttccattaccacacgctgaggctctacagcgcggtgtgcgccctgggaaacagccgcgtggcctacgccctgtgcagccacgtggacctctcccagctcttctatgccattgacaacaagtacctccccggcctccttcgatctggtttctatgacctgctcatcagcatccacctggccagcgccaaggagaggaagctgatgatgaagaac

SEQ ID NO: 29877 - DNA, 874 bp, Homo sapiens
  chr15:34728787-34729661
  binary
cgcgggcgttccccgcaccctccctccgcgtcggcccggagaaaaggaagttcgcccctagcctgggcttaccaaggcccgccgcccgacccatggagccctgcttggggaccgggggcctcgatgttctccttcaccatctgcggccagatctccctccagcagccttgccaggcagtgcctggcgtggagaaggggccctgcagaggcgcaggtccgcaccgtgcccccaacccggcgcctgcagcccaggggcaacaaggtgtggggtttttgagtttttccctctgggccttattatacagggaaagggaaggggcgaagatccgggctcgagttctcccagggaagtgaacccagaggcgatcccaaactcagtagttgccgcccggcacggggacttgatgccggcgccaagccgggcagcggaacgcaccagcggcccgaccagcccggcgagacgcgagcgggcggccccgccagacagcgccacttgccggcgccgagagtggcccctcgccgcggtgagcccctcccgggatgcgaaagccatcgcctagtccccgccgcacccgcccgcccatcgtgggaggaggatgggccggtccgagaggcgtaaggccgccgggctgcacccctagatcccagcggcggcctccccgcagccccgccgagtccggggggcagcgctcgggagctcttggcccgcagcttacgcgccgccccccacgcgtccgggtccccgcggcgccgcgggcggcccaaggctgccgccgccagcgagtcaggcagccgaggttccccagcttacctggccagggcgcggggctgccccggtccgccgccgtcctcgccgcgccgccgtcctcgccgc

SEQ ID NO: 29878 - DNA, 217 bp, Homo sapiens
  chr15:34729898-34730115
  binary
cgccgccgtcctcgccgcgccgctgccgggtctctcccgggggctgagctcccgcagagctcgcgcctagccgcacacctcgactgctgattagcccgacagctgaatagcggcgggagcctaccgcgagcggagtacggaaagcccgcagggccgcgccacatggcgcacgcgcactgagctgcatacctaggtgacaaacgtgcacgttttgcac

SEQ ID NO: 29879 - DNA, 455 bp, Homo sapiens
  chr15:40575352-40575807
  binary
cggcgcgggagctgccgcccgcctagatacctgactttatagccttgggggtctccatggcaatggctgtcctgggagcggactgcgccgtcagggcagagacggacggggcgggggagaccgctcctgacccccaccccttcgtgggccacgaagtaggggagcggttcctcctccgcgctcccctgggaatgcggcggcggttgcggggcgggggcgggggctgctcgccgggggccacatgcacccaaccgggccaatcccaaagtcgcagtcttctctccccgccctccgcccccaaccgagtcggtgccctcggctccttagaaactggcgggacctcggcctcgtcggggaagactgaaagctgcccccatcggtccagggtgaaaggaattgggaccccatgagcgcagaactggaccacgcgcgagctaggggtggcagcgaaaggc

SEQ ID NO: 29880 - DNA, 751 bp, Homo sapiens
  chr15:41805339-41806090
  hyper
cgcaggacgttaaggcgggtggaaataggatatgaaagaaagagagaaccccgcaacagctgcccttgcggtcgcggccacacccgtcacccggcccagccgcgctctcagcctggaagccactacccgactccggtcgcagaagccccgcgggtgcgcgctgataggtctgccagtttctctcctcgagcgcctttcccagtgaataacttaggggccgcaatgaatttggtcctgcagcctccccaatgctttcctcaacttagattggtggccccgccccaaggcggtgctgagaccccaaagaatgttcctccttcccaagctgcgtgatccagactctgggattcgcacgcacttggcgcttctcggcccgcactccagaagcacggaccggagaaatttggctgtgagagttcgaggcctctggaggaaccactgacacctggcctgttgaccggccacccccaagcctaggaaagtgcctcaggctggacggtcccctgaccgccagatagcacttacccgcggctccgaaccacaccagcagctgtccccagcagcccatccctgttgggtccacccggcaacaaaagcccttgcggtcgcggccacacccctgtcaacctaaagttgacagctcattttgccacggcagccctggccaccacttacaggggtgtgctgccgctggcgagacactccccggacctaaagctggtctggccacgcccacctcagaccccaggac

SEQ ID NO: 29881 - DNA, 1101 bp, Homo sapiens
  chr15:41952208-41953309
  hyper
cggagccccgtgtgggtggggctgggcgcggccggggcggagccggcgaggagccctagggaaagggtgaaaggcacagttgagaaaggcccgccgggcattggtttcacagtttccacgaaggcttcgtgtgcaagcctgaggagtttaggtgcctccctcctgcctcgcctttcttggttctagaaccttcagtaggcttttctgggttgcagggacccggaaaagcagcggcttccactcggggggcgggtcccaagggtcttgctgctgctctggggccgtttggactcctggtgttgggggaggggtcagggaggtgctgctcgcgtctccttttgcgcctgcgcggcgggctccgagcgggtaggagcgcgtgcgcggtgacgtggacgtccggtgcgcgcgcgcaggctcttcagctggagcggacacacggtgtgcgaaccgaacagaataacccgcccccagcgggatgtgaaggactccgggtgaggccggccacgccccgcacggtaactctcgggcctgggtggagggcatcgcttagtactggcccgattggagtttttcgagagtttgaagctcttgtgtatttgaacggcgtgagaaacgttccgctgagagagcttcgcacgccctcgccaggccgggccttgcgcagggccgcctttggcgcgcccctgtggtccctgagcgaggctgcgcatgtcacctcgcgcgcgtccccggcctcacttccgcgtcgctcagctacctaactgggaacatcgacgccagagagagcggccacgaggcgggaggggtgagaagcgcccatggctcggccctgccctcgcgtgtgtggggtgccgctccgcgtggtacggtccgcgtgacgacttctcgcccggcgccgggctctaggtcgagagccacgcttacgcgcttttcagtttagagcctaggtctcgtggttctagaactccaagggaaacggtgtcggcgtcgcttttctgagaacttggcgcagcgttttgacacctgtgcaaacgtcttttctaacaagtaatttccggccaaattgtttgaggcaggacgtcaagtttaataaaggagggc

SEQ ID NO: 29882 - DNA, 826 bp, Homo sapiens
  chr15:45421269-45422095
  hyper
cgtggaacctcacacgaagcgcccccgggggtgtgattaaagagggaaccaggtcccgacgttctgtgaacaaacgcgcgcccttactctcagtggggctcccgtccgacccccactcctctcctaactcacgtaaggacccggctgtgaccggacaaaccgggtctggggtgcttccagtcactcttcaagtcactcccaaacttctcagactgcacccgaggctctgcggcgccgcctccctctcccggcctggtacagagaagggctgggtgcgccaggacagtagtaccggggtctgccagctccgcagaggtccctccaatcccccctcctcctctgcgcccccccacccatgcccagcaatcccagcagctccagcgcaaacctagcgacgcagttccgggtctggcggggcgcgggcgcggctcgcagggcggtgggacccccaagacctcacgaggatccccggagggagacgtgactccggggtcttagaggggtttaggtcggatgggtgacttgctttgacgcctggcctggtctgtgggtggcaggtgatcgatggccttggacttggagcccagacccgacggtgtcgagaggatctgaggagagtctcccctccccataccctctccgcctcccaccctctccccagccccatgggacttgtgaaggcggacttgcttttttcgccgtccacacaaccgcactagccgggccttcggcaccgacggaacatctctacctgcgccccgggagccctcgccgtctcacctcgcgcgctgccgtccgctggaagcacctccgcgcctccccaggc

SEQ ID NO: 29883 - DNA, 1460 bp, Homo sapiens; identical to SEQ ID NO: 26386
  chr15:48936649-48938109
  binary

SEQ ID NO: 29884 - DNA, 1354 bp, Homo sapiens
  chr15:55879808-55881162
  binary
cgaacacaaagtcgggaggcgagggatccgcgcggatgtctcgggggccagcgggcgcccgggccgcgcgctcggatcgcagcctcggccccggggtgccggcgggacgcgggctgcgcggacttaggcccggacagagccccatggcctcccggcggccgggcacggggccccgcgcacctcactcaccccggttcccccaatccggcacccttctcggttacctcgaactctcttcagcgaaatgggatccttctcctgttctgctgacattacagaccgcaaagcatgactcccccccaggccgcgggaattcggtctctttgatgctgcggcggcggctcctcctcctcgcggggccgctgcggctgcgaggcaagcctcggagccgaggcacggccgagggcggtggggacgcgggccgactttgcaaagtttgggaggaggacgaggcctcggggcggcggggcggcggggcggcgtgcgggcaccggcggggctcagcggcggtggccgggagcgcggcctgggggcggccccccacccggggccggcatgtgctgagggcgagtgcgccgccgccgccgccgcctcctcccactccttcttcttcgccgccgcctcaggagccgctgacaggggaagcaggaggctcgcggcccggccctggcggcacactcacagcgccctctgaggaggaggtctgctctctcgccgctcccgagtcgcagacacaaaagcccccagactggagccgcctgtaaaacccgctctggggcgggcgagggacgtggcgcggccccgcggcttccccgccctgagctccccagccccgcgcggggacgggcttcggggggcgggggccgctgcctcgtcccgcggcgcctcccgccaccgccgccgcctcgcgctccgcctcggcccagcccccacggcccgcgcgcgcctcttgctccaagccggggctcgcgggcccgcggctcttgcagcccgggtgggcagcgcgcgcctaggggccgccccgccccgcgcccggcgctccctcgccgaccgccaggcccgagaacgcccgaccccgcggccgacgctaccgggcccagctttcgcaaggaaagggcatctccgaacttcgtcggaggccacagcagcaggcgtctcggcctcgcagctagggatcggaaagatgaacgtaccatgcgaggaaactttgtaagcgggagctggagagttctcggcgggcatgtggggatccagattccccgactccgtgtccgcgtggccgtggtgtggacacctgtctgtagaatgcctccacttggtattttaacgacttgactcttcaagaaagagcgac

SEQ ID NO: 29885 - DNA, 354 bp, Homo sapiens
  chr15:59729552-59729906
  hyper
cgtgtcccccgcaactccgctgaaatcctgcccaccgagaggaagcacaattatgagtgaatgggcttgtgcgtcctgatgagaatccaaaatcgagaggaaggtggaaagagccaggacgcgctgggaggggatgaagctgacgggagaagaaagggctgggaagaggaggggtgttcggggttcttcttctcgtcgtgtctgctgcgatgagacacgatcctgggtcccaactgcaggtgtcaaggcgattcagtaaatgacacatggcagccccggagggttcgttcacctgcacaggtggggcgtcaccgtggcctaatcaaataacttctccccaatttgaggtggggc

SEQ ID NO: 29886 - DNA, 960 bp, Homo sapiens
  chr15:60296734-60297694
  hyper
cggacccggacgctgcgcgcggagtgcgcgtcgagtgcgcgccgagagagaagcggcgcgcagcggcgtcctcccggatgcggacgcgcaacttgaagcaactttaaggtgagcagctctctgttccgtccctgccccctattctggccccagtaccgacttacttcccggctatcctcgcgccgttcgccggcttcccctcccgcgcccactaagcccgcaaagttgctggcgaaagagtccgggcgctggctgatcgagcgccgcaggccccacccccgacccccgaagtctgttactcggtctggctgaccccgccggtgtctctgtgcatccatgctacctttccctattacccacccccttcccagatccgagcagtccgccggcccgcgcggacccagagcaagaagagggcgaggaagaagatgcctcggcccggccgcaacacgtacagcgaccagaagccgccctactcgtacatctcgctgaccgctatggccatccagagctctcccgagaagatgctgccgctgagcgagatctacaagttcatcatggaccgcttcccctactacagggagaacacgcagcgctggcagaacagtctgcgccacaacctctccttcaacgactgcttcatcaagatcccgcggcggccggaccagccaggcaagggcagcttctgggcgctgcacccaagctgcggggacatgttcgagaacggcagcttcctgcggcgccgcaagcgcttcaaggtgcttaagtccgaccacctggcgcccagcaagccagccgacgcggcgcagtacctgcagcagcaggccaagctgcggctcagcgcgctggcggcctcgggcacgcacctgccacagatgcccgccgccgcctacaacttgggcggcgtggcgcagccctcgggcttcaagcaccccttcgccatcgagaacatcatcgcgc

SEQ ID NO: 29887 - DNA, 917 bp, Homo sapiens
  chr15:68115231-68116148
  binary
cggtctctggtgaccctactggttcccgagggccactctaggctccaccaccctggccctcgcctgcggccggaaagtgaagtactcctccctgcgcccgttcctcttgagtcccccttagccccatcacccggttttggcccagaccaaaactggctccttggccgggagcactgggccctccccacttcgttcttggggacaaactttatggccccagggcctttcctccctcctggcctctccagctagagcgggacgcaggtgcagggtgctggacgcaggtgtgcggccgcttacctggggcgtgcaggccttgggctgcggggaggcggcgggcgccgcgcgtggcccgcgggcgggcggacccggggagggcgctagcgactgcgcgggcggtgggtgtggcgccccggctctcagctgtcaggcgcgcctgccccgccactcgggctgtgaccgcgccgtccccgccgccgcgccatgcgctccaggcttcggcctcttcttccggccagtccccggcctcggggtcaacggctcagggttcgcatctccgcgcccggggtcccggcgccccgtgcccgctgagagcgggaggggccgcgggtgggagcgcggagaaccagggagcacggctgtgcgcgcgcgcggggaggggccgcgccgtcacccggagagcccggcggatcccggactcccgcccgccgctcctcccgccgcgcacctccgctcaccgctcgcccggctccagccgccgccgcactgtgagtacccacgtccggtagcccgccgcccccgcgctctgctcctgcagcttttttttcgtttagttctgatttgggctcctgtggctgttgtttttatgattatacctaaagacaccaccgcctcgctcccaccactgccagtctccc

SEQ ID NO: 29888 - DNA, 324 bp, Homo sapiens; identical to SEQ ID NO: 25116
  chr15:68260415-68260739
  hyper

SEQ ID NO: 29889 - DNA, 471 bp, Homo sapiens
  chr15:72612514-72612985
  hyper
cgagccccagcccccgtgcttggtgacgtcaggcagctggccgccgagtctacgcaaatgatttgcataatgaggaagcagccgccaatcagagtgggagttgactgggctcgccgggggcggggggggcggctgggctcacgcgctcctgctcgccatggcaaccggaccctcgaatgccctgtgtgtgtcgagtgtgtgcgggcgtggccgtggatcgcgcgtgtgcgccttgggccgcgtgaggggaagcagcttcgtcatgcgtgatggtgtctgccggagtcggggctaatccccaccgcacacacaggcacacacaggcaaacgcaggcacacgcaggcacacacacctccaaacgctggtgcgtttcctgcgggggtggatggggattcctcttctctattcccactatcgagccagtccctcggagccaatcccaccccgccccatcacacatctctgtcttc

SEQ ID NO: 29890 - DNA, 536 bp, Homo sapiens
  chr15:75248554-75249090
  binary
cggccggctcgccaggcgtctgaccctgcgtgggcccaggcgggaggctctgccacacctcgcgtacgctccggtagcgcagccgcgtgacctggtgcaggcccgccaggcggcgcttgaggatctcggcgcacgtgacggttttggtggtggcccggccgcagccgctgaagacgatggcgcgcgtggctggctgcgccatgctggcggtggcgaaggccatcaggttccggatcttgctgccttccttgacccgcatgtgcaccgcgcccggcgccaggtctgcgaaggggccggagcccgggccgcctccctcggccccgcaccccgctggcgcctcttcggagcgcaccttacggaagttctccatgcgccgtcgtcgccgggaccgccggctttgccatggggcggcctcagccccggggctgcatggccgccggtcgcgccttgcaagggccagcaggggtaagggcgccggagcagcgcagacgccggcgggcgggctgggacggcgcgatctcggccccacttctctc

SEQ ID NO: 29891 - DNA, 581 bp, Homo sapiens
  chr15:76627485-76628066
  hyper
cggaccggtgagaagactagacctcctaaaggtggaggcggagctcaaaagccggacgctactggacgaggcttaaagcgctcgccccagcgcggggccggtgaggaacgttcaccgtggaccatggtcgaataatgttagcgtgcactcggggcctcgccctagccttctgcaaagcctcggcctgcgccctcggctgcatccgtttcgacgccaaccaacctcatgctcttagtagaacggcagtagcgaccgcgccctcaggcccacaagcccgaaggtctgggcagggtctggaatggcggtggagacactttatccgcaggcgtttcacctcgcgccccacccaggcgcacaccaagttcttggtactccttttaatgggaaaacaagaacagacaccatggttggataaatgttatttataattcatgggccggtctttgaaccctttcaaacaaaacccacagcgatttctttgaaagaatgcctggactgtgctcagagctctcagattttctcaggaccaacgagccgccgcctcgcagataccactgtaaattacccagcgccttacgttc

SEQ ID NO: 29892 - DNA, 864 bp, Homo sapiens; identical to SEQ ID NO: 23092
  chr15:76628342-76629206
  hyper

SEQ ID NO: 29893 - DNA, 747 bp, Homo sapiens; identical to SEQ ID NO: 23975
  chr15:76630248-76630995
  hyper

SEQ ID NO: 29894 - DNA, 304 bp, Homo sapiens
  chr15:76639451-76639755
  hyper
cggccgacacttgcctccgtaccccggggccgctcgctgggcccgcggcagcccccgcctgggaggagcattgggggcgccaggggctacccctcggtctcgcaggcgcggaactcagcccggccctgcggctccgggagttgctgagcactcgcggccagcggctggagtcctgggtcccgctctctggtgcccggcggcggagtcgccacgcgaggctggaggggtggccctaaagcccgtccctctggcttggagctgcgggtccccgccctcgagccggagcgccgcgctggacacccgc

SEQ ID NO: 29895 - DNA, 530 bp, Homo sapiens
  chr15:82339684-82340214
  binary
cgggccggggcggtgcgcgctggtcctctccgcgcgcatccccctccgccgcccactagggcggacgccccttcgggccccgcgcgctctgctgtcctttgttccgggagccgccgggctcgccgcgccctttgcgtcccgctgcggatcgttccgcagagcggctgggcccgcggttcatagagtcgcccaagatcctcacagagggacgtcttcccaaaacaatgaggccatgcggccgcagccgcacacgggctgactggggagatctcgtggtgccgcggggcggtcccggggctcgaaggcagaggctcccctaggtgtgccctgcctgaccccggctacaggaacgagcgctgtgggcctcggtttctcacccgtaaaatgaagaaaataatccccgcctttaccacctcgtgggtcgttcggaagattaaatgcgacagtggatgggcgcgcgcttacaaatcagtagacagttccgcaagcgcctttacttttgagaacgcggtggtgcagctcccttcacc

SEQ ID NO: 29896 - DNA, 1105 bp, Homo sapiens; identical to SEQ ID NO: 27657
  chr15:83775836-83776941
  binary

SEQ ID NO: 29897 - DNA, 887 bp, Homo sapiens
  chr15:83953117-83954004
  binary
cggtccctcccgccgcgcctcggggccgcgctgccgcgcaggtagccagctggccctcgggaggtggccctcgggtacccacgggagccggagcccagcggcgtcccgggccgcctgctccgcgcacagagaatccccgcgcccgcggagggcgccgcgcttacctcggccatcctgcgaccgctgcggtgccggggctgccggcgcgtctcccgggcccgggccgccccgcgtccgccccggctcggcgggcgccgccgcatccacgctccggccgtcggggcgcgacccggcgaagtgggcggctccccaagcgcccaggctgcgcagcacgatggccgcccccgccgcgcaccgcgtgtgcccgcacgcccgccccctgcgccccggggacgcctctccgcccctccccctgcccctccgcccaccgcgcggtcgccccacgccgcgggcgctgcttcgccgcccgggaggccgcctcccgccccgggaccggataacgccctaaatcagcgcagctgaggcgaggccgtggcccccgcagaccgcggagacctcgccggcggccggcgcggaggtgtctgcccccgccgggcttgaaggcacttgttggtaaaagacacagacgtgtcggtgtttgcctctcccggggaagggcgaaacgctctgaagttctctggcgctcttctcaggagatgattcggcctcccctcctaccctggggcgccctcggggtctcactgccgcggaggaagaaggcagcgccgccctcgcctgcagaaacctcattcccgagaaagtgcgggacgagcgtcttgggatgtggaagaagggggtcgccaggaggttttcttaagaactcaaaacaagcgccccccaccgcacac

SEQ ID NO: 29898 - DNA, 878 bp, Homo sapiens; identical to SEQ ID NO: 26403
  chr15:89942592-89943470
  hyper

SEQ ID NO: 29899 - DNA, 696 bp, Homo sapiens
  chr15:91427360-91428056
  binary
cgcggacaccctgggcttccctgggcccagcatctgcctggggcctcgccctgggctccccctcctgacccccaccttgcgccccttcccggtgttcccggggcgctgccgggccctggggcctgcggggcgcgggcggctcttggctgggccattctttcccggccccctcctcccttccgtttccgtggccgtgcggccggctagaggctgcggcccagcgcggagcaggggggctggcaggcgtcggggcggtcgggccggtcccgcccgccccttcccctccacaggcccgccccggggcctgggccaactgaaaccgcgggaggaggaagcgcggaatcaggaactggccggggtccgcaccgggcctgagtcggtccgaggccgtcccaggagcagctgcccgtgcgggtacctctagccccggggcctggaggagcggtgggagctgggggcgcggcaggcaggggcagagcaggcgttccgagggccagagacccacccaggtgggggtaggggccgcggaagggcggggatggccgcaggggcagggctcaggctgtgggcgcctgaggcttcagctggggcaggcttggcctgtcgaggacctgggcaagggtgtccctgtaaggggtggtgggtggaagggcctggggagggaggctccaggttggctcctgttcccgaacgtgc

SEQ ID NO: 29900 - DNA, 773 bp, Homo sapiens
  chr15:93594856-93595629
  hypo
cgcagtggcctcgtggggccgctcagaatatgccaggttctggagtcacccgggcctggggcaaattctagctcagcattccagctgactacgcacttggggtgggaaggtcacttggcctcttagagcatcaggctccccatttgtgaagtggagctatgcctgccaggccgggctggctcgaggaaggagggaggaagctgagacccacccccttgggatgctcagggagggtgctcctgtgtccccgctccgctccgtcttcccccattcccaggcacccgaggccctctcagcctctcagtgtccacgcagggcagagacaaagggcagggctgtgccctacagccgccccctcccccttaccttgctggtggcagtggccgctgagccgggcagcacaggcgtgttggtgacctgcacgttcaggtaattattgtcgatgagcggccaggcgccctgcaccttgcaggtctggaagcggtcggtgaaagtcctgaggtgtgggtccccgaagaggccacagtgcgtgtagttgggggtggccgagtgcttgtgaaagctcttctcgtaatggcagatctcggggctgtccgagcgctcctggctgtctccggccggtgggagcgtgcgcaggcgtggctgcgaggtggggccatccttggagcagttgtgctggctcatgaggtcctctatgccatggacggccgagtggtaggccaggtcaccccggcaggtgcgggccgtccgccgcgtgcacagggcgtagctgc

SEQ ID NO: 29901 - DNA, 918 bp, Homo sapiens
  chr15:93631396-93632314
  hyper
cgagcaagtctaatacaattacattaataagacgcaatcccgaattgcacccgagcgtcccccacacccgccctcccattgaatacacctgtcccccatgcccgggcttgtaccctgggttgagctgcggcgcgagccggcgctgaatcgtcgccgtgccctcccgtccacttaggaaagccggggcggcttggcaatgggcatcctcggccctcaatccaaggtccgcaccttcccgtacgccggcgcgccgaggcaaagggccgccgggacgcgagcccacgcggtgcactgcgccgacatccccgagggcaggagatggccaggcagctccgcagccgggcgtcgagcgggaggcgggggcccgggcggcgcgggccaatgggggttcacggcgggacagtcgggtggccggctccgtccggggctccgcgagccgggctgagggaaggagctcccagcccgcacacggtgtaagggacgtgtgccgggtctgcccaaccacgcgcgctggcggctgcccgggggagagtattttaggaaaaaagaacaaacaccaaaccacaaaaactttcctgctgccaacagctaaagcgatagaggcgcagcaaagctccaaatgtgggcaagatgggagcaagatgagacgcggggctaaggaagaccaaagcagcgccgtggccccggcatgtgtcggcggcgcctcggagatgtcagagccgggtctgcccggctcccgacccgcgcttaccttggcggctgcatgagcccctgcggcccgcggggggtggcgctggcggggctgcgggagaagagggggtgtcggggcgccgctcgtctgccccggggcaaggtgggaggggctccgctggcgctggtccccgccgccccggccggctcagcagcggcccggggagc

SEQ ID NO: 29902 - DNA, 351 bp, Homo sapiens; identical to SEQ ID NO: 12343
  chr15:94048797-94049148
  hypo

SEQ ID NO: 29903 - DNA, 863 bp, Homo sapiens
  chr15:99192824-99193687
  binary
cggaggagggtccccgacctcgctgtgggggctcctgtttctctccgccgcgctctcgctctggccgacgagtggagaaagtgagtatgtgcccgccgcccgcggccactgcgggaacttttcctccgaggggctgcgccctgtttgcgaaacccgagttgccaccgtcgcagctgtcgggcccccgggctcgggagcggcggggtggggcgcagggcggctctgccgggagggaggctgcagcggacccgggacccgggctcgttcgtctggagccccgcgggccctggctccgcgcatccccgcgcgggaagggcttttctctttctccgtcctgacagcccagccgtgtttcccggctaggcgcgaggactcggtagggaagttggtgccggggcgggctccgcggttcccgggccccgcgacccgcacctcgccccttccatgcgcaagagcctctccgcacacagcgctgatcccctgcggcgcgcaggcagcagcgacagcaccctgggccgcaccgcgtctccgctgctggggctgaccgggcagtggggagcgggcagccgcccggcccgcggggtgcgagttgccctcgaggggggaggtgccctgcggagaggccccgaagccccaggacacgtctccaagcgcccgtcgctgcctcccgtcgcccaacgtgcttttgcccctcgggctcctcgggttcctggccttgcccgtcactttggcccgctcctcgttgggttacctgcccccggcgtcccggggctgggcggtggggtgaggggaagcgctctctgggcagccccccgggaagtgcgaggccgggagtcttcctcagcttgtctcttccggggagc

SEQ ID NO: 29904 - DNA, 231 bp, Homo sapiens
  chr15:99250303-99250534
  hypo
cggttctccagtgtagagtagattgattgccctgtgtccttcaggcagggtgcagtagtaagttattgatacttggctgctgagctgtcgttcaggccttggcaactgacgctctgcagaacggaccaggagtgtgcggtggtggagtccggctggcctgggttgcagatttaactttcgcctctgcctctgtgtgcctctgggctgtaagctttagtttgcacggttaac

SEQ ID NO: 29905 - DNA, 230 bp, Homo sapiens
  chr15:99254469-99254699
  hypo
cgaaaacattaagcacagaagaatcccattcaggtaatcttctgttggctggctgtagaactacggagaacatctggagaaacacgtcaagggtgtgtgtgaaatcgttgagcctactcgattttgtcgtgctgttgcgcggttttcacttggcactgtcctttaaactccttctgtgccgtgactctgcagtgtctggcagcgtagtagactctactccctctatggac

SEQ ID NO: 29906 - DNA, 225 bp, Homo sapiens; identical to SEQ ID NO: 12347
  chr15:99256133-99256358
  hypo

SEQ ID NO: 29907 - DNA, 182 bp, Homo sapiens; identical to SEQ ID NO: 12348
  chr15:99276224-99276406
  hypo

SEQ ID NO: 29908 - DNA, 191 bp, Homo sapiens; identical to SEQ ID NO: 12349
  chr15:99451886-99452077
  hypo

SEQ ID NO: 29909 - DNA, 91 bp, Homo sapiens
  chr15:99454579-99454670
  hypo
cgtcgaagaatcgcatcatcataacctggcaccggtaccggccccctgactacagggatctcatcagcttcaccgtttactacaaggaagc

SEQ ID NO: 29910 - DNA, 379 bp, Homo sapiens
  chr15:99459893-99460272
  hypo
cgagaagacaaaatccccatcaggaagtatgccgacggcaccatcgacattgaggaggtcacagagaaccccaagactgaggtgtgtggtggggagaaagggccttgctgcgcctgccccaaaactgaagccgagaagcaggccgagaaggaggaggctgaataccgcaaagtctttgagaatttcctgcacaactccatcttcgtgcccaggtacccagctcatgtgaaatttcagttggcaaaacccactgctcaggccggttctgttgcctttctccccaccaggtagtgtgtaagtcagcagctggggggtacaatacagtagccactgagacggagccgaaaaagatgacaggttcggtgaagtgagtccctgc

SEQ ID NO: 29911 - DNA, 209 bp, Homo sapiens; identical to SEQ ID NO: 12352
  chr15:99465447-99465656
  hypo

SEQ ID NO: 29912 - DNA, 284 bp, Homo sapiens
  chr15:99497074-99497358
  hypo
cgggaatcgagtgcttgagtgggacccagacagacaggaagggcgctcctgctcagttagccccagtaagctcactgaggcacacaggccccatgtccacagccgctcctggctgaggcgtggttcctaagacgacccttactgttgagggctgccaggagggagagacacattcagccccgcaggtcctctgggaatccggtgagcgtcggcaccgggctggggccgtgctgattcccggcagcgtgtgggaatgtgcgggtgcctcgtggcctgctgacatc

SEQ ID NO: 29913 - DNA, 362 bp, Homo sapiens
  chr15:99503996-99504358
  hypo
cgcaggagcagagtcccctccccctccaggctgccctctcaacttctccctcacctccttccctaggggtagacagagatgtaccaaaccttccggctggaaagcccagtggccggcgccgaggctcgtggcgtcacgccccccccgccagggctgtacctccgtctccctggtcctgctgctcacaggacagacggctcgctcccctcttccagcagctgctcttacaggcactgatgatttcgctgggaagtgtggcgggcagctttgcctaagcgtggatggctcctcggcaattccagcctaagtgaaggcgctcaggagcctcctgctggaacgcgacccatctctcccaggacccc

SEQ ID NO: 29914 - DNA, 130 bp, Homo sapiens; identical to SEQ ID NO: 12354
  chr15:99505061-99505191
  hypo

SEQ ID NO: 29915 - DNA, 136 bp, Homo sapiens
  chr15:99506062-99506198
  hypo
cggagttaaggcgaattgttcaagaacacaaactacatcgcactcgtcagttgtcagttctggggcatgactttagcgttttgtttctgcgagaacataacgatcactcatttttatgtcccacgtgtgtgtgtcc

SEQ ID NO: 29916 - DNA, 765 bp, Homo sapiens; identical to SEQ ID NO: 25128
  chr16:1428128-1428893
  hypo

SEQ ID NO: 29917 - DNA, 1782 bp, Homo sapiens
  chr16:2041061-2042843
  binary
cgggaaaggagcgaagggatgaggttgaggctggaggtcgtttcttggaaacacagggctgccccgtgcagcgctggttaaaatgactgcggtccccctcatgcctgtctcccggaactggtgggcaggaggcattgaggtttgacggaacctcagaggtcaacggtgtcatcttttcagcccaaacacttacaggtgatattaataatcagtcacgtgggggctgtcatccctcgggtacccaccacgtgcaggaagctgggtggacatgtctgtcccagcactgcatgagctgtgcccgtcaccctatttgcatgctagaaaacaggccagacagttcccaaccgcgcaggaagcaacagctccgctgcctccataccctccctcccgccccgctctgcctgctgcactctcacctccccttcgccgttccggctccagcctgggaatcgcgggcccaggtgaaggctcctgttcccacactcttgagtgggctctgaggggactccacgggcccacgcggtgcagagtacctggcttgaatcaaccccggcttttgtcagccatgtgatcccggacaagtcacttcacctgttggggtcccaatgtcccccgcatttataaagagaataagaacaatggcgatcccacggggactttctgaggatttggtgaggggacgcatgtaaagtggctgtttaacacaatgtctgggcatagtagatgctcactaaacggcccgtgttgtcaataattactaaatacgcgagggttcgggaaagaaagaggtgacaccgccccccacccagatacgggcctgggaacgcagggacaggcccaggggcgtgggcgctcgaggcgggctcgcagaggtcgggtcgccgcagggccctgagcgccgcgccgcacgcaggtgttctccatcgccgtcttcgggcccatcgtcaacgagggctacgtgaacaccgacagcggccccgagctgcgctgcgtgttcaacgggaacgcgggcgcctgccgcttcggcgtcgcgctgggcctcggagccttcctcgcctgcgccgccttcctgctgctcgatgtgcgcttccagcaaatcagcagcgtccgcgaccgccggcgcgcggtgttgctggacctgggcttctcaggtgggcggggccggggcggtgagcgcggagagccttccgggtgggcggggagggggcggggcctgggcggggaacaccgctggagtttccagctgggcgtggccgtgacgaggggcggggactgaggcagggagtgtcaatgggcctcccgggtgggcggggagggggcggagcctggacggggagcgccgcgggactttctaggtaggcggggcccgggtctgggcggagcctgggcgcggaacgggtctggcgctcccgggtgggcggggtcagcgcaggagagggaggcgggacctcgcgccacgcggcgagcccaggcgaggcgccccaagcctcgggcccaccgacctttcctcctccgggcgaggccgccgtgggccaccgcgtggagcgtcgccctgacgcgccgcactgttcgcaggactctggtccttcctgtggttcgtgggcttctgcttcctcaccaatcagtggcagcgcacggcgccagggccggccacgacgcaggcgggggacgcggcgcgggccgccatcgccttcagcttcttctccatcctcagctgggtgagtgcggggcccgggagggcggggcgaaggggcgggcgctcggctgatcccggctgacccc

SEQ ID NO: 29918 - DNA, 214 bp, Homo sapiens; identical to SEQ ID NO: 12358
  chr16:21531388-21531602
  hyper

SEQ ID NO: 29919 - DNA, 184 bp, Homo sapiens; identical to SEQ ID NO: 12359
  chr16:23193716-23193900
  binary

SEQ ID NO: 29920 - DNA, 1768 bp, Homo sapiens; identical to SEQ ID NO: 22807
  chr16:23846783-23848551
  binary

SEQ ID NO: 29921 - DNA, 364 bp, Homo sapiens; identical to SEQ ID NO: 25144
  chr16:2391749-2392113
  hyper

SEQ ID NO: 29922 - DNA, 1012 bp, Homo sapiens
  chr16:28891021-28892033
  hyper
cggggcgggctggcgcgcagcagcgggtgtgattcgcgtcctcctctctcctcccctgcaccccagaggcaggttttattttaagctttaagggtgttctcagccaaaacaccgaagctaagccaccctcgcggcttcaagagcttggagagctcgggttacccacccgaactccgggctccgggtcccgccgcgatgccggctgcggcgcggggggccactgccactcccggcatgcgccgggcggacggccgctccaccaatccccgcgcccgtcggcgcccctgccccgccctccccagcctcctgacgctgattggtcgaggggaggactcgctcctagtggcgggaaagcgcggcggtgtgatgatgactccaaggagcccggcgcccggtcagggagggcactggcatccctcattacccgcccagcctggccttagcccttccccgcgctccctaggcacccccacccccgcagggcatctccagggctctgcctcctctcccgccctgggggctactccccatcccgcggtccatctgcatgtcgcgggttcttccgcagcatgtgagcctcgctggggactctggaggcaacgaaagcctccctgtgccttggtctccgaacgcaggccccgtcgcgttaagcacaagctggcagggcctctcctctcccttctcagatttgctccttgacatttgcctgctgcctggcggtggcaacagctggggcggggcgcgcgcaggaggccccgtaaccctatccccgctccggctccctcgtgaaaccggagcttccctgccttggccgagggggagggctgcgggggccagaccgcctgcgaagaccacagggtttttcctctcgggttttggctcccgtgggatggatgtggctgtgcggggggttggcctgagcttcgcttctaagccagcagcttggtcagggaaacctgaaagcattcccagctaatcccccaagtggtgcaagtctgtgcgcgcccatccc

SEQ ID NO: 29923 - DNA, 533 bp, Homo sapiens; identical to SEQ ID NO: 12362
  chr16:29624651-29625184
  binary

SEQ ID NO: 29924 - DNA, 989 bp, Homo sapiens
  chr16:3221125-3222114
  hyper
cgctctccataaacgtcgatgccagctctaggagcgtggccgggagcccacgatcgcggcagcgagaagcccaaccagaggggaggagggagtccccggagtgggacagcgctcaggtctggggtggggttgatctagggcaaaatagggcgggcggcctgtggcgatgggcaggaccctctcgcccaccacacgcggaactcgctggatcctctccacatccaggccgcgtccactggctttccaacctgctcaggtccttaaagaaggattcaaaaggtgttgcggtattggcccaacaggatttgaccctgaggcccactctcaccctaatcataaccgcaaaaccacagcgcctggagagagagtgagagagaaacagaaacggagcgagtgtgtgtcgctgtgatgccctttgccgtcgctgctcatccccagtgacctcctggaactttttcagctcttgctgacagaggaagacacgggggcagagctaacgtctgagtcagggcagaggcgctgggctccatccgagggaggctatgggggcgcctctgggatggagccaaccaccggcgcagtcggatgaaaggtgggctggccgctcagccatcctcctagggcaaggccttgggtatgagtcagcagccccaggtgtgagcgcagacccggtaaccccggcgcaggggaaaatacagcggggagccccaggctgcaggcctgaccctgagcatcccctaccaagcccagtgtggatgggctctgtctccaaggggctggttcaccagggtctccccgcagcgaccccagaattctgccaatcacttggggacggcgatgagctctatccacttcggaatcagccgatttgtgccggattggtggcaggtgtctgaaatgtcagcggaaatacacgcacgggaggctcgttggtctaggggtatgattctcgcttcgggtgcgagaggtcccgggttcaaatcccggac

SEQ ID NO: 29925 - DNA, 937 bp, Homo sapiens; identical to SEQ ID NO: 22810
  chr16:3233501-3234438
  binary

SEQ ID NO: 29926 - DNA, 370 bp, Homo sapiens; identical to SEQ ID NO: 23096
  chr16:3237723-3238093
  hyper

SEQ ID NO: 29927 - DNA, 875 bp, Homo sapiens
  chr16:3238154-3239029
  hyper
cggacgagcccccttttccttctcttttttcccatttcgcattttcagcaaggacaggagactaggaaggcggagggaggctgctattggcagggcctcagtggagacctcccggggtcccgggacgcagacggacgggcctgaatcgctcgccttggtgaaatgggatccagcgctgccaactgcggcaactgcggttaaaggagacgaccccgtgcagcaggaggaggttatttagaataaggaagaatgcgccgggctcattggtcgctacaggggcataaattttttctaggattccagagtatggctgctccagtcccaggtgagccctcctccgcttaaaattccagtttattcggagaaggggagaataccggaagcgggggagaagggaggggagtgagtgagaggagggaggcggggaagaccgggcatccgcgggcagcacttcagtcggccctggcggggtgggggtctcggcccttgtccccacccccagaccccggggccttcccactgagagcgagggaattcgcggctttgatctggaggggacagggagccccttttagcccagatctgctggattctcgggagtcaggtgaaatctggatacagggaagggcagagtgacagtaaagggtgccccggaaccgatgcccgacgcctgctgccccacggccttcattcttgctcctcctcacgtcctggggactggaggtcccgccagctccccccagtgaagggcaagggggcgcatcgcagaatcgcccctggtgcgcagcgtagttggtggcctaagccgtcttctccgagagctcagccatcctgggcacttgaggccaggcaggcgctgcggggctggttcagtc

SEQ ID NO: 29928 - DNA, 1292 bp, Homo sapiens
  chr16:47176468-47177760
  binary
cgtaccctcgaaatttttaaaaaaagaacatgttacgacattacaaacacgtcagctttcaatttaaatcagcagggggaaaaagggaagtcctttactgagtggtggtgctgttttccctctggaaattgaaaagacgatttattcagtccgagtttcaggagcaactttgtatcccaatcctaattatctatgtatataaattttcatctaaattaccacctcctgggaaatgcaaagccggtggagtaggttttagagctctgtgctctggacaagccaactgttttaattcccagtacaacaaattagtaagaaccgaacaccagcggcggggaattctgagacctctggcggagcgcgaggagcgccgcgtcccgggaagcacccgagcagcagcgctccccgggggccgggacaagccgggtccgcggcgcccgcgcgccgcccccggagcccgcagtggtgccgcagcctccgtggccgcagcaggtgggacccggctggcccagcaggccccgttccccgccgcgaggtgcaggcgccgcggggctattcgaaaaccactgcacgacgtcacggccgcggcttttattgttctcgtggaattactttttgccatcacatctggagaaagagcggcctccgctccacgacaggaatctcacaactttgcaaagggatgcgcggaattctacggaagcggcgcgagggcgcagcccggagggccctgctgggcccaggggcctcctggccgccttcccgacccgatccctcttcccacacgcgccccgcgaacgtcggccggactcgcaggggtcggaagcggcgcgcccggagagccggcggagccgggcagggctcgcgccccgcggtccgctccgagtagccgcgagccccgccagacaaagaggcgcgtcgggtcccgggcgcgggtaagggacgcagaggcgcgggcagggcggcgcgccagcctcggcccgcagggggcgccgtccgtggccccagccccggtccttacctttgaggaccgagcagagccgctccagggccatgttcccgagctgcccggcgcttcgcgaagggctgaggtagcggcggcggtggctcggcgctcacggctcggcgcggcggcgacggccccactccgtccccatcgccggccagcagctgcctccccgctcccctgaggagagctcaggtcctgcggcccgccatgcccgagccccacagtgggctcccgcgcggcccgagcaccccgacgggcgccgcctcctgctccgcggcgcccc

SEQ ID NO: 29929 - DNA, 643 bp, Homo sapiens
  chr16:47177802-47178445
  binary
cgcgggaccggcaggcagctccgcccgcggccccggcgcgggatccactgaagtggcgggcgcggggcgcccaggctcatttaaggagggagcgcgagcgccgcgtgccggctgcgccgcctgtgcgcatgtgcccgccccgccccgccccgcgccgcgcctcgcgcgcccgccgcggcctcgcgccgtgggacggcgtcgctccccgccggctgccgttagggctgggagccggctgggcgcgggggtagtgagggtgcctctcgccgtggctgcgcggcggcctcgtccgagaggccggcgccggggcagtgaccggcccgtgcccagccgccgcgcagggcgcccggggcagctggccgagccctcgatgcctcccgtctgacggaggcgcccgggaagcgccgcccacctcggccccgcaccctcgccggcctgccgggtctccgccagccctagcagacagagaggggcgccggtccctagtcccccagacctccattcaaggtcaaaactttgcccagctcagccttgctcgaccctgggcagggaagcgcggacatcggcagagggagcccgaggctctccgtgcccttcgcgccggtgagttcccgacccgcggcgctgccggcgtttccctagc

SEQ ID NO: 29930 - DNA, 997 bp, Homo sapiens; identical to SEQ ID NO: 24015
  chr16:49315005-49316002
  binary

SEQ ID NO: 29931 - DNA, 1309 bp, Homo sapiens; identical to SEQ ID NO: 24016
  chr16:54966113-54967422
  hyper

SEQ ID NO: 29932 - DNA, 367 bp, Homo sapiens; identical to SEQ ID NO: 12366
  chr16:5703287-5703654
  hypo

SEQ ID NO: 29933 - DNA, 849 bp, Homo sapiens
  chr16:84650982-84651831
  binary
cgccatgcgccaggggcaccccatgtggccaccggttcctcccgggttcgctctggccggggctccccgggtgcagacaacctcccaacgaccgcgcatccgcccggcaggcgcgcctccctacctgtgcactgctggatgaagtgctggtactccgctccctgctcgccggggacgatggtggagccgtcatatttaaaagtcaccctttgggttgggagaagaaaaaaacacacacacacatcagcgctggtggccgcgcgacgcggcgcttgcagaggacaatctaacagacgcgctggccacggagaagcccgcgggggcctggcacgccgtcccggaataaggcgaggaagacagcgcgggaggcccgaatccgtcccgcctggaggccggctcggtgcacgaggccccgcgcgagcccggggagcggggcgtggagacgaatgaaaagttcctaccagatgacggccgagccgtcgtcgcgcaccaggttgtacgccgcccggcaagcctctttgtcgatcttggtggccatcgccgcggagccgcagcgggacactgtccggggcggccgagcgcgcccctggccggcggcggggatgggagcgcggcgggtacgcgccgagggcgcacgggctggcggcggtggcgacggctacgcggcgcctgcaagctgcgagcgcggcggcggcttccactgcggacggagagcgcgcggggaccccaggccgtggcccgccccgcccccccgcgcccattggccgcccaggcggcggcccgcctcttcattggccgtcgggctgcgggggcggagcgtcttgattctctggcggccaatcccagacc

SEQ ID NO: 29934 - DNA, 890 bp, Homo sapiens
  chr16:86542053-86542943
  binary
cgagaggcgggtaggctttgaacgcgccgcgccgcgggccgtgctgcgagcccggcacacgcctctcgccccagctcgcgctggggcttggcctctaggctcttcgcgatgacccgcgaaaacacccctcgcccccctcttctcaactcggaaccctggagggagaggccgcgcccggccagcagtcgctgcgagagcagcactcacctgggtctgtgcgcgccgcgatgcgccggggctcctgcgctgtcctgcgctccgctctcggcaccacctttcgtggctccaccgcccccagcccgcacccgagcgctgaggtggcaagggcaggtctgcgtgcgagccccctgcgggctggcagccaggtgcgcgagggccgcccttgccggcgctcccagcccgcgctgtctgctctcaggaacctggcctggcgcgcagtgtcagaggccccgcggcggcggcaggccgagcccacaggggcattaggccaactcccccctcccgccctgcgcacgcggaattctctattattattattaaagaatcccccagaacttgtttacgttaaaccctgtaaacttcctgccagggcctttgccatctctcgggaaatcggaacctgcgctttgaaaacggggccgcggggccaaataggcgggttttcagtgtgtgttgggggtgggggagggcaactgaactacgtgtgagttcagatccgagcgtggcgtgtgtacgcgtgagtgggagtgagtgcgaacttaagctcctgtgggccttaagcttccgtgtcaacgagtgcattagtgggtgcgcacatgcctgagcgccctctgcatatgagtgtgcacacacgcatgggtgtgtttacacgtctgtttgcgtaatttacc

SEQ ID NO: 29935 - DNA, 958 bp, Homo sapiens
  chr16:86543787-86544745
  binary
cggcgggggtagcttcctcacggccttcgcccgggctgccctcggcctcagctcggctcctttccttgtgggagggcgagaaagaaagagggaggagagaggtgggggaggcgggagttggagagagaggggctctgagccaaccgccggcggatccagcagctcctcggggagggcgggcgggagcgcgggggcgggcgcgccgcggctcgctcgggagaagtggccgccgatgacggcagaggtgcagccagccccgcgcgcgcagccccctccccttcgccctcctcccccccgtcgtcctcttcctcctcctcctcctcctcctcccggcccgtccgcggcgcagagcagcggcggcagcggcggcggcggcagcagccacccgatgtcttcggcgcccgagaagcagcagccaccgcacggcggcggcggcggcggcggcgggggaggcggcgcggccatggaccccgcgtcgtccggcccgtccaaggccaagaagaccaacgccggcatccggcgcccggagaagccgccctattcctacatcgcgctcatcgtcatggccatccagagttcacccaccaagcgcctgacgctgagcgagatctaccagttcctgcagagccgcttccccttcttccggggctcctaccagggctggaagaactccgtgcgccacaacctctcgctcaacgagtgcttcatcaagctacccaagggccttgggcggcccggcaagggccactactggaccatcgacccggccagcgagttcatgttcgaggagggctcctttcggcggcggccgcgcggcttccgaaggaaatgccaggcgctcaagcccatgtacagcatgatgaacgggctcggcttcaaccacctcccggacacctacggcttccagggctcggccggcggcctctcgtgcccgcccaacagcctggcgctggagggc

SEQ ID NO: 29936 - DNA, 981 bp, Homo sapiens
  chr16:87635912-87636893
  binary
cggggagcgcggggctgggggcgcggagggcggggcgcccggggtccccgcccgcgcgccgcgccctagcctgctgggccgcgcccctcttgggaccgccgcgctccgggggcgggggcgggggcgggggcggggggcggggggcggggggcgggcgggggcgcgcgggcgggcggggtgcgggcgcgcgccgcgcggcccgagcgcgcgagccgggcccggagcgcacgccgccgccgccaccgccgccgccgccgcccgagccgccgcattgctgctgctgctgccgccgccgccccgcgcccggcccgcggcccccaatatggtgcagccgccagcgccgccgcccgtgccgccgccgccgcccgcgggccccgccgccgccctcgggcgcccgcagcgcggcagccgcaggtggggggccgcggcccgggcctgagctgccccccgcccggcctcggcgcggcgccctccccgcggggctgccggcgaggggccctctcgccgctgaggtggagccgcgggccccgccgccgccgctcctgccccctccctccctcctcccctccccctcccctccggtcctgtctccagcgggagcgcgagacgctggtcaggctccgcggcgcagctcgaaaaggaataatcgcccccgattgactgaaattcctccggagccggcgccgcggccgcccgcgcccgagaccgcgctccggggccgcgtcctcctctcctccggaaaacgctcgcgacccagggccgccggcggccgcgactctgctgtgtcgatcgcctgagtccgttttcaccgtttgcgggatctggaaccgagttacatgcatgtccagtgggggcaggtttaattttgacgacggagggtcctactgtggaggctgggaggacggcaaggcgcacggccatggcgtctgcaccggccccaagggccaaggcgaatacaccggctcgtggagccacggcttc

SEQ ID NO: 29937 - DNA, 491 bp, Homo sapiens; identical to SEQ ID NO: 12372
  chr16:87902835-87903326
  binary

SEQ ID NO: 29938 - DNA, 225 bp, Homo sapiens; identical to SEQ ID NO: 12373
  chr16:88368380-88368605
  hypo

SEQ ID NO: 29939 - DNA, 369 bp, Homo sapiens
  chr16:88700843-88701212
  binary
cgttccgcatctccggaccagggtccgggggcgtggtctgctgggggcgggcccgggttgtggtttgagagccgctcggcctgtctgggcctccgcctccgggtcgccctccagccttcctgccgccgcttttccagtcttgcccaacccggtatttctgcgcttgcctcagccacccgcaggagcgcaggccgcccttcgtcctcccgtcctctgcgcccacaggaccccgggccccgcccagtccgcaggtcccgcaggtccccccgggcgtgtcttcctggccctgcgacccccgggacagcgctgagaacacgcggaaggtggggagacgcgcggcgctggccgggtccctggcgccgttctcgc

SEQ ID NO: 29940 - DNA, 301 bp, Homo sapiens
  chr16:88993093-88993394
  hypo
cgtgcgtgccagggtggggcctgctgagcctcagtttcctcggctgtaagacgggacggaggtgttcacagtgggggttgctgggaattcctcctctggattgggctggtgcctcggtgcaccgtgggctcccaggagctcacaaggccttccgtgcctgtcccttgtgccccacctcacagcgaggtccttgcagcagcagggcagccccgtccggcccccgctgcctccctgccctcatctcctttctctgagacaaggctcctcactggtcctggaggtggcggcacactcctgcctc

SEQ ID NO: 29941 - DNA, 1765 bp, Homo sapiens
  chr16:89006834-89008599
  binary
cggggcctgcccaacacagatggacgcttcccaaaggctgtgcgcgccatcgctgccacccggctgtgccgaggcccgcggccgtcaggaccccagggaccgcatgccaggcagggtccaggacccccagcgcggaccacctttagcctgcggggcagcgccggggacccgggcaggagggagaggagcaggagggagctctggacccccctccccagaccggccgccgccacctctgcctctcccagggccgccctcggcctccccactcccgggtctccgtcacgcgggccgcggggcctttgttaggaaaaccgggcggccccaggggagcccgcgagactcccagcgcccgggcgcgtcgttcccctcgaagtttcgccgcagcccccgcaggtcaggctctgctcacggggggctgcgctcagcccggatgggtgggcgctgggcgggttggctccaccctgccgtgggcaccaactttgaaaacggcccgtgcgctcggcgcggctgcggcgcagatccgggaacggcagccgcgggcggagtcggggtagagcggcggcggcgcgcggggcggacacggcacttacggtcggggggtccgggggatccggcgggcggcggacggcgcacactcgcgactcggtccgggagtcgctgctccttccagcttggtccccgcctccacgactcaggggcggctgcgcgctgtcttctggcgccgcaccgggctcaggcgcgcggcggggctggggcgcgcggggcggccgcctgggccatgccggggactcggctccggccaccccgcgcgggaacaaagcgcgcaccccgcccggggcggtctccggcctccgcggcccgcgccgggtccagccgccgcgcctgtggctccaacgccgcgcgctcgcccgagagtctcacggggccccgcggcccccgccccgcgcgctccgcctccgcctcctgccccccgccgccgccgctgcgccacctgcctcccgcccggcgcccatggcgctcagctccgccccggggcgccggcctggagaggggctccccgccgccgagagccgcccccaacgcctccgccaccggggcggcgccctaagaactggccgtgggggccggggctgtgcggagcgccgggagcagggagaggggagaggggcgcggggagggggcgacgggcgcgccgcctcctgcggggggcggcgcggggaggcgcaggcgggggcgagcgaagaggttgaggggtgcgggcgccgtggagggggcgcggctctggggggcggcccccgcctgcgcccaccctctccccctccgcaggccgcgcacacccacctcgcagcagtcggcggccgcgggcctcgcagctttagaaccgcggcttctggcggccgcgcgggaggctgaacgggagttggggggtgtggggggggtggggaggtggggagttgggggggaggtcgctccttcggccgccgcccccgccccctgccccgcgctcgcccccagcgcggcgcctggcccggcccggggccacctccgtgcgtggccggcaggggtcgcgctccccccgctcagcctcccgggcgggtccgatgcgaagccctcgcttcccgcgggtcccggggccaggtcatttgcatacactttgcattcatttgcatatcgtgcgtttcatgtccacctgcagaaacgccccgagccgctgctctgccctctccgcactttctctgccggcaggccccctcccccgccc

SEQ ID NO: 29942 - DNA, 152 bp, Homo sapiens; identical to SEQ ID NO: 12378
  chr16:89028925-89029077
  hypo

SEQ ID NO: 29943 - DNA, 335 bp, Homo sapiens; identical to SEQ ID NO: 24039
  chr16:89072478-89072813
  hypo

SEQ ID NO: 29944 - DNA, 380 bp, Homo sapiens
  chr16:89109400-89109780
  hypo
cgtcttggaactcatctaacccaggtggcaaacaggggccgcccgactgccagggagaattgacgagcagtggcgtcctggaattcccgtgaggtggcgggagaagattctatgattgatccgtcatgcctgccgtggctcaggatgggaccggcctctcaagctacagatcaagaaactgagaagggagtagcctaaagtcaccatgagagtggccaggtctgggccggcctggcctccaccccgcagagaccatctcagctctgctcgctcagcctcgtccccgcctctgacatccttccattcccgctcatggccctctctgtctgccaccaccctccccgccatgggtgcttaaagcccccggcagctgccctccc

SEQ ID NO: 29945 - DNA, 999 bp, Homo sapiens
  chr17:10101359-10102358
  binary
cgctgccccccaggagcgtggagctacaggtagcgccggcaagggctgccccccggggcgcccctccgaccgggacgctgcggcatccccggaacgggcaacaggtacgcgagcgcaccgaggaccgcagccccggctcctacagccccggccctcgccccttacctccagcaactgcacgtagctcgccgggaaccagccacggagcccgtcctccttctcgccttcccaccagccgccgtccgggacctgcagcagcgtgatcagctcgcccgcggcgaagcgcagcccctggccgtgccgctccccggagaaggggtacagggtccggcagcgagcgccggacatggccttggcgcccgggttcacagcgcagcctgcattcccgccgagccccacgggctgggcagcggctccgcggggtcccaggcgcccggcgctccgggctcccgcgctctgggcgcgcgccgtctctggggtgcgcgggggtcctcaggcaggcgggggacgcgcgctccgcgccgggaagcagagactcgttggcttcgcagagcgagcggcgacgcccccgggccgggcagctcgcggatcctagctctgggctggggggcggggctcagggggaggagacccaggcgccgcgggctccggagacaacttcccgggaacgcggaacgcgggctgccgccgcgagggctggccggggccggggccgggaccggggccggggccgccctggcgcgcggaaatgcgcagctcccccgggaggtgggacccggagcatcccccgcggcaggactccgcggcgggcggccgtggagaggagctggcggccgggtggccgggcgggggttagctcactggcgagggggcgggccggggcggggccagggcggccacgcccgcggagggctgcgcgctccctcgcagaggggcctgtcactggggagaggggctcccactcgcgcccccaccgccggggaccgcgggaatggaaac

SEQ ID NO: 29946 - DNA, 705 bp, Homo sapiens; identical to SEQ ID NO: 25213
  chr17:1958915-1959620
  binary

SEQ ID NO: 29947 - DNA, 897 bp, Homo sapiens; identical to SEQ ID NO: 25217
  chr17:27038294-27039191
  hyper

SEQ ID NO: 29948 - DNA, 548 bp, Homo sapiens
  chr17:27332307-27332855
  binary
cgaggtcccaaccccgggtccggccgccatccggccccgtctcccctcagtaagaacactagaggccctggaaccggcggcaaagtcgagcgaagtttggcgggcggcaggggaagcgggaccacgggccgccagctggaccgtcccgactcactgccttgcgccccccggcacgcgccccagcaccctgagatgcctagagtgtggcgaggtagcgcgcgggtgagcgcgtgtgtgcggggagtgggtggcgtgatgaattgcatcagagaaatcccattagatctggggagatgattaaagacgaggtctcggccgggcgcgaatggcgggagccgcggcagcttcccgcccgcgaagcccgcgccccgcccggcttggccggcgccgggggcagcgcagccggcggggcgcggtgcttggactgggcagccagatgcccgaagctgggcaccgggtctcccttcccacccctggggccccgctcccgcccccgtcctgccgccggatgccggggtcccttaccgtgagccaggagcgccagcagc

SEQ ID NO: 29949 - DNA, 847 bp, Homo sapiens; identical to SEQ ID NO: 25220
  chr17:27949429-27950276
  hyper

SEQ ID NO: 29950 - DNA, 632 bp, Homo sapiens; identical to SEQ ID NO: 27704
  chr17:28088027-28088659
  hyper

SEQ ID NO: 29951 - DNA, 975 bp, Homo sapiens
  chr17:29248950-29249925
  binary
cgccgcggccgggtccctctccacctgccgggcggagcgcacgggccatgggctgagccccgctgagcccgccgggccggccatgggcgatcgcgagcgcaacaagaagcggctgctggagctgctgcgggcgccggacacaggcaacgcgcactgcgccgactgcggggcggcaggtaagggcgcggcggcgcgggcagcgcgagacccccggccggaccccaggcccacccgactcctcccctcggccccaccgggtcccgccctcggccccctggacccagacgtggcacctgcgggccccgacccctcccacccacaccgtgaacctctcacccgagccccgagggccgtctccaccacaccctgccccggcccctacgagcccaggctctgctcccctcgcgggaccagatgcgcatcttcccacgtgcttggacccggacacgagagccggcagcctagagcccttccagtcccgctctcttccctggccaggcacccgaccgcccgagtccgggctctcgatgtctgcgcacccaggcgcgccccacgccctcggactcagacatcccagccagggctaaacgtcgggcccaggccgccgacagtcctgtgccccctgcccgctcccagacgccccccgaaggcctccccagcgccccacctcggggacgccgagggccccctaactcagcctccccacctgcagctccgcgccgagccccgcggtgcgccccccgcgccctcctctcggttccttctgagtcccttcacttccacgtcgcgcagcctcagactctctccccgggccctgaactgcctccaggatcttcaccccggtcgccgcgcagcggccggtgggctaaccagaaggtgccaggctggccgcttagttcgccttaggtgggagaaggggcgccccacctgccccagtgccccgagcccagccctggtttcttcaccgcgctttcc

SEQ ID NO: 29952 - DNA, 780 bp, Homo sapiens
  chr17:29297825-29298605
  hyper
cgggtttctagcagctcgcggcatgttggtttcccagggcaagaggccgccactgaaggtcagctctgtctttccagctgggcactggaggctctaagtctgttttcagcaggatcggaggaaggagacggggtggcgccaaggaaggaggagaaaaggcggccgagaaaaggaggagggcaaggggaagaggaagggcgagggaggagcctgaggagactcgcccggctcaaccccgacgtccgcgccccggccgcctgttggccatggcgggcctgggcctgggctccgccgttcccgtgtggctggccgaggacgacctcggctgcatcatctgccaggggctgctggactggcccgccacgctgccctgcggccacagcttctgccgccactgcctggaggccctgtggggcgcccgcgacgcccgccgctgggcctgccccacttgccgccagggcgccgcgcagcagccgcacctgcggaagaacacgctactgcaggacctggccgacaagtaccgccgcgccgcacgcgagatacaggcgggctccgaccctgcccactgcccctgcccgggctccagttccctctccagcgcggccgcgaggccccggcgccgcccggaactgcagcgggtagggaggccgggcccgcagctcccctggctcccccgggctgcccgccgcctgaccctttcccatgtggctcgaacccctttcctcagccgttctacttttacgttccttttctcagtctaaaagtcgagttccgctcttc

SEQ ID NO: 29953 - DNA, 411 bp, Homo sapiens
  chr17:29718115-29718526
  binary
cggaggtgaagaacggagtccagagccctccagagatggcagcgaatcccggccctgcctcttgccagctgtgtggcctagagtgagtccgacctctctgggcctcagcttcctccgggatgaatgcagtcacggaacgcgccaatgcaggaggcccccaggacatcctgagcgctcgggagacgccaggcgcggcagcgggcacggatagcggaaaggggcgcgaccccgcggaatcctccggcagggcagggcctttgggtggctccgggtgtccagaggaaggggtgggctcggggacgcggagggaaactggggacgcggagggaaactgaggtcgcggaggacgcggccgttggcagctcgctgcgcctgccggccccgcgtgggccgccccactcgggaggacgc

SEQ ID NO: 29954 - DNA, 544 bp, Homo sapiens
  chr17:29718746-29719290
  binary
cgggcggaggctgcgcggcgcagacccagacgggcggccccggagggcgcgcggcgatggcggcggcgggcaggcggcgggcgcggcgggcgaggggtccgggctgagctgcgggccggcccggatggcgggcggcgcgggctggtcgggcgcccccgcggctctgctgcgctccgtgcgccgcctgcgcgaggtgttcgaggtgtgcggccgcgaccccgacggcttcctgcgcgtggagcgcgtcgcggcgctcggactgcgcttcggccagggcgaggaggtaagctggcccgaccccagtcccggcccggggaccccagcccagccccgccgcccctcccccagctcccccgccgggtcacccgcgtggcccgaggcggtggcctccctcccaatcccctccctccgccggagcccaggacctcggccccccccgggtatccctggcccagccgggccctcgctttccgccccccggcgcccgtgccccgagcgtcacgcgtcacgcctagggtggcttctgcgcccaccttccttcctc

SEQ ID NO: 29955 - DNA, 256 bp, Homo sapiens; identical to SEQ ID NO: 27705
  chr17:30846472-30846728
  hyper

SEQ ID NO: 29956 - DNA, 1615 bp, Homo sapiens; identical to SEQ ID NO: 27707
  chr17:33700165-33701780
  hyper

SEQ ID NO: 29957 - DNA, 717 bp, Homo sapiens; identical to SEQ ID NO: 10364
  chr17:33814248-33814965
  binary

SEQ ID NO: 29958 - DNA, 531 bp, Homo sapiens; identical to SEQ ID NO: 25224
  chr17:35078547-35079078
  hyper

SEQ ID NO: 29959 - DNA, 972 bp, Homo sapiens
  chr17:35294869-35295841
  hyper
cgcggcgcgatgccggcagtttaggatccaaagcttctctgctccttttgttctttccttcccttttttaaaaaaagaggggggaaatcccagtggtgggcagcctggcacgcacacagtcgccctcataccccgacaaaagcagatgcactttgacttctgacagctctacctcaagccccggagaactcagcggcgctttcctcgcaacccgagctcggcgagtcgtcgtcttcttcttctccgtttttatttatttatttccgttcccgccgccgttctcgctgaccttcactcctccgcgggctctgagcagaagggtcgcattctctcccgcctgagacttcttttcctcgccccgggagctcaggcggcgccgctccagcccggggccccgggactccccggctgcacacttcactgagacgcccccccaggccccgatcagcctcgtttcctccaccctactttgatttcctggtgcgagttttggcttgcacggccgagtgtgtgtcctctttttggagagactggggagctcgtgccgattgtcttcaggagtcatcccctgggctctactttgcccctctctctctctgggcctcatcagaccaaaccaaagaccatggttcactgtgccggctgcaaaaggcccatcctggaccgctttctcttgaacgtgctggacagggcctggcacgtcaagtgcgtccagtgctgtgaatgtaaatgcaacctgaccgagaagtgcttctccagggaaggcaaactctactgcaagaacgacttcttccggtgagtactttcctcccacgcctctgctgctacctccccgcgggcccttcccggccagcttcggatcagaggttagcgtggcctcgctgcccagttaggaactgcttctagagagggcagccaagtcccgcgggcgcccgcctctccgccagctggcgcgctgggagcccgggacgc

SEQ ID NO: 29960 - DNA, 249 bp, Homo sapiens
  chr17:36729015-36729264
  hyper
cggccgcctccgcagccgcggccgccgccgccggtgccctttgctgcaatgcgagagccgccgcggccgccgccgtgccggcccgggccccagtcgccccggtaaccgcgactccacctggcgcggcgctgcgcgccgccgtgcacatcccctctcgcggccccctccctcggcgcggccccgccggcgcagccccgcagaggagcggcggaggctggtggctgcgtcgccgcggtcacccgatacgcc

SEQ ID NO: 29961 - DNA, 897 bp, Homo sapiens
  chr17:37761159-37762056
  binary
cgcaaaacgcggagactggaggttgggggtgagggcgttccaggcccgggctccggcgccctaacttctaccctcttcaagaaagagggagcgcctggctcctttttgcctcggcagctgggtgtctgtttttaaaataataatgagagggggaaacgcgttccattgctcagctgcccccttaccaacgccttgggcctgcagggaggagggggaggaggaaacctcagcgaagatattgggaatgggggaggggtgcctccagggagcccccggagagaggtccctggagaagcactccttgggagagaggaggagggaaccccttggggagagagaaggcgagtcccctgggggaagcgaggcccctgggacaggccacccacaggtaacaggactgcgctgccccaggagagcggcaggaccggtggcccgctccccgcgcccggcgccggggtaggatgggggtgtccctgcgctctgggggctggggacaggggggcgggcaaaggcaaaagaaaaagaagggagccggcgcgaagtctcagttatgaaaaaacgcattgagctcctcgtacatggggccccggtcgtggtgaaggtgcatatcgtaagacaagagattctccgagtggacgcccccgcgcacagccgacgagccgaagactagcccgtggcccgtgggccgcgaaccgggcagcgccgagtagtgcatagagtagtggtagcttttctcgtggtcgggcgaggagtcctgcttgagtgagaagttgccattgagacagagcggggggctgagcgggccctcgtactcggagctgttgtagtccgggctcgcgccgccaccgcctgccgccgcatacagcgtctcgtaggcggcgcagtagccgtgggtcc

SEQ ID NO: 29962 - DNA, 379 bp, Homo sapiens
  chr17:38478466-38478845
  hyper
cgtctgggcgggcaccttggagcagtgagggggattcctcaagcacaaaaggcaggggagaagtggcagggaagaggtggcaggggagaggtggcaggggctaggcacagttgggaccttgcttgcctggaggccagtagatgccggagatgaacctggaggctcaggacagggcaagagtggggcacgccggggctgggtcctctggctgttccctctccccacagagttacttgaggtcaggcagtctccatgtgtcactgtaccccgcaggcagtgtcaccgtgacccactcgctgtgtgtctgtgtgtacacacctaccttggagtggctttatcccggccctccccccggagcctctgtcccctgggtcctacc

SEQ ID NO: 29963 - DNA, 671 bp, Homo sapiens
  chr17:3866998-3867669
  binary
cggcaccttcctgggcgttttctggagccctcaggggagaccctggggccagctgggaggccgagcctgagtctccggccgtccctcgcccgccggtgtctgcgctgcacctgcaggatgccagcgggagcggcgcggcgttggggtggaatacggtccaggatggggtggaataacgcttccagggtggacggggccggagtggaggtgggaagtccgggaggaccgcgcagagggtgccaggcgtccggtctccccagctggaacccgctcccagcccccagcccccagccccggcgccggcgaaggtggccgcgcagccccgccgggtgccccaggagcatccgaagaggtttccggagccctcgcttcctgcccgcccagagccgggtggggaggcaggaggggaaactgagactgcggcgcgcgcggcccccgctccccggcccggcccggcccgcgcgctcaccgttggggccgtagcgctcccgcgcgccggtcacctgcgccgggctcaggccgccctcggctgtcaccgagaagtggcgcagcacgtcggcggccgggagcagatgcgccgcctccatgccgcccgcccggccgtctgcgccgtccgcaccgtcgaggccgcctctccgccggggggctacaaagcggggcgcgggggactc

SEQ ID NO: 29964 - DNA, 201 bp, Homo sapiens; identical to SEQ ID NO: 12397
  chr17:3867893-3868094
  binary

SEQ ID NO: 29965 - DNA, 85 bp, Homo sapiens; identical to SEQ ID NO: 24063
  chr17:3908060-3908145
  hyper

SEQ ID NO: 29966 - DNA, 508 bp, Homo sapiens; identical to SEQ ID NO: 12399
  chr17:39658629-39659137
  hypo

SEQ ID NO: 29967 - DNA, 104 bp, Homo sapiens; identical to SEQ ID NO: 12400
  chr17:39659216-39659320
  hypo

SEQ ID NO: 29968 - DNA, 442 bp, Homo sapiens; identical to SEQ ID NO: 25235
  chr17:40332770-40333212
  binary

SEQ ID NO: 29969 - DNA, 322 bp, Homo sapiens; identical to SEQ ID NO: 12402
  chr17:41995104-41995426
  hyper

SEQ ID NO: 29970 - DNA, 1685 bp, Homo sapiens
  chr17:42906461-42908146
  binary
cgatttcacatcgtcttgatgctaacaaaattaagcatgagcataatgaaatcggtatcactgccagttctcaatgaacaaaaagaaaaccaaattcgcccatttcgcaaaggaaaagtactcccaatcagacaatcgcaaaaaaaagaacaaaatctaaaccatacattcacgtacatcttttcaactcagagctccaaacgcagccgccaaccacacaactgcccacaatcacagcggtagcgcctactcttaattttgaagctagagacttaaggaaacacacacacacacaaaacagttctcaagtttgacaaagtgggggaaaagtcattttaagtaaagacaacgagttaatcaggaggcgatgagcccagtccttccgccccgctttcccgcttccagccctcgaacgaaccctcctctaacccccgggaggcaggagttccagcggggagatgcgggaagcctcagacgagcccgcacgccgccggagacgcagggatcgaggtcggggagacaaagagcagcccgcgaagagcccgggcggcgaggggcggcccggctccgccctgcgcccctaaccgcccgggtagttgtcggcaccgccggggcgccgccgagtgcgcgccgcttctgtccgggctccccgaccgtcgcccgacacctccgcggcccaggacacccccgagccgtttccctcccgatttgggagccgcgcgcctggggacaaagagggagggtgcgccggggacagtggcaggacgcgggccggcgacgcccctccggactcggcgggaacccctcggcggcgcccccctccttctcccgctctggccgcgctcctccccggacctccggaggttctcctcggcccctccccgggctccccaagagttctcccgcctccccctgggaccccgcccctggcccgcttctcctcagccggccctgcggccgcccctcacccggcggcgggttcccccggagccgcctcctccgccgggcctcggcccgtcccgccggtcgcggcctcatgtgccccgcgtcgccatcgccttcaccctcgcctctcctccacctcctccgccgctgccgccttcgcctcagtctccagccgaggcagaagccgctcccgccgctgccgccgccgccgccgcctcccgctcccgccgccgcgacccgcgggaaggcgcctgcgcactgcgcgctgcggtgggggcgggggcgtcccgccgcggcccgggagcggggggcgcgcggcacgtggcgctcgagtgggaggggggcgccccagaacgcgcgggaagcgacgcgagcgccaactttccgcggtcgagtcctcgccgctctctcggatagtccgggacgcggcggaggcgcggcgcgcgtgggagtcacccgcgtggagtctggaccccgggtgggcgcagacttcgctccggacagttcattcttccaagctgattttcgggcgagagtcccccgccagccgcgcctcagtttgagcgggccgctaacggcgccgtgggttctcgccttacctgggtatcctgggttggtttagcgggcccagagttgtcttctgcgcgctccgccgaggccttggtccattgtagcacgggatgctaatgtctcctcccaggttctgctctacaattcctcgaggatctggcgggccctgc

SEQ ID NO: 29971 - DNA, 522 bp, Homo sapiens; identical to SEQ ID NO: 27715
  chr17:43047449-43047971
  hyper

SEQ ID NO: 29972 - DNA, 1077 bp, Homo sapiens; identical to SEQ ID NO: 26484
  chr17:45810409-45811486
  binary

SEQ ID NO: 29973 - DNA, 928 bp, Homo sapiens
  chr17:46620299-46621227
  hyper
cgctaattcagtaatacctgaattttagcaaaacacataagtctatgcgactgagggtgggagaggctcgatttttccagtagacggccaaggagcgcgggggtcgaaaggaccgggaggaggaaacaggttagggaaactgcaggtcgatggcacagagcgtactggtgaaaaaatccagctcttcctcggaaaaagggaccgggctgtcgagagaaccctgtaggctaggggagaggcctccggatagctggagacaggagtcggccgcgaagaagttgaggtcgggaaggaaaggtgaatcctggcgccccgagaagacgtcttctggcaatggcccgggctccagcccgccggccccgcgcagcgcgcagccgggactcgacgcgcctgcgccctctaagcgaacggctaaaggccgggggtccgcgcttaaggcccccggcaccacctccggcgggtgacagcaggcttcccacgccgcccgcgaggcggaggggccgcccgggctggccgcgggttcctcggcagggtcgcagatgtcctccagggctcccgggcaggcaggctccccatccggcggctctcggtgctgcgtctgccgcttgtgcttcatgcgccggttctgaaaccagactttgacctgcctttcggtgaggtccagcaaggccgcgatctcgacgcggcgtggccggcacaggtacttattaaagtggaattccttctccagttccagcagctgcgtgttggtgtaagccgtgcgcagcctgcgcgccccgccgccaccagcctccggcagtcccaggccatctgcagggaaaacaggctcggcgtcatagcgggccgtgtactcagcccaacctcagttcggactaccccatcctccaaaaccagtatcacctctccccttcctcgccaccccaccccc

SEQ ID NO: 29974 - DNA, 784 bp, Homo sapiens; identical to SEQ ID NO: 25243
  chr17:46654966-46655750
  hyper

SEQ ID NO: 29975 - DNA, 1600 bp, Homo sapiens; identical to SEQ ID NO: 28699
  chr17:46687527-46689127
  binary

SEQ ID NO: 29976 - DNA, 772 bp, Homo sapiens
  chr17:46690282-46691054
  binary
cgctcgccctcacagggcgagggagcctttgcttaaatccttttctttccccccggcccccaagagaagggaaggagatccacggtagctcacacacagaagctattacgagatactaccactagcggggactggcgcggcgggggacgctgcggtgggaggcccggctcctggccccgctagcggggccagagctctctcgggcaggggcgcgcggcggcggcgcggccgggacccgcggacgtgcgggcggccgcggccctggcagtcccagctgaagcctacttcttgtcgcccttctgcgcgtcgccctcgtccgccgcctctggggcccgctccagcttctgtttctccagctcctcctgctcgcatttgctgctggggaacttgtctttgttgttctcttttttccacttcatcctccggttctggaaccagattttgacctgtctctctgtcagtcccagggcgtgcgatacctcgattcgccgcttacgagtcagatagggattaaataggaactccttctccagctccagggtctggtagcggctgtaggtctgtcggcctcgcctgcgtccggcggctgctgggaatgggggaaagggcgagacagaggggaggggagggtgggggagggggcagggacggagaaggttggaagattcgtgaacgagcctgggagaccattataataagggcaggggaccttctaccccgtgcgggggcggggggggcgcaagaaggccgcggtcggcggaggaggaggggc

SEQ ID NO: 29977 - DNA, 555 bp, Homo sapiens; identical to SEQ ID NO: 24068
  chr17:46710955-46711510
  hyper

SEQ ID NO: 29978 - DNA, 875 bp, Homo sapiens
  chr17:46800174-46801049
  hyper
cgggggcggtggagaccaccagcctggaacttcaagttcaatggcaaagtccctgaccctccccccaggctgggcgccagcattattctaggggcgattaaactcttttgctgccccctgtgcacctcccagttcgggggcagtttaggggaggagagaaggtaatggtggaattctttccctcactctcccccgaccacttcgtcccctccccctcatcccctctacacagaactaactggtagggagagaggaagaaaggctggcatcggttcctcattggatgttttaaatctgtctcaggcccaggccagtgcctggggggaggggcggggtgtcctgcttttgggctagaggcccggggccgctcccgagctttctcccctcttccctggagagcgactgttcgggagggtgagaatggtataaatttcaaaaacaacgaaaccttcttttgccccctccgcagcagtcgcctccgggctttattgcaagtttacggtaacgagttcatctatttaattcgcggttgcagctcggggatttctattagacaggacgggttggggccggggggcacagggtctcccctgaaggaaacccaattagagtgcagcacttagcaccttcaatataactttaatgaagggggggaggggagctgcagggaagagaagtttgctctaggttggggaaggaaagctggagctgctcccgagaactggggggcctggatgaggctttttcctgcttcgagggctttccagcttccggcccgggaactactatttggagtagggatcgcctgcagggaaggcggggcggattctcggctggcggcggcctcgcagggttcccggaagcgctagccagcc

SEQ ID NO: 29979 - DNA, 276 bp, Homo sapiens
  chr17:46811369-46811645
  hyper
cgttttacttcccttcctccgcccgccacacacgtttttcctttgcagcgctctcgcccagtttttccattgttcttctctgaagtctggaaagggcctgcggggctatagctctcagcggccggagcctgcgcttggcaggggacggcctggaggacggcctagtgtggctggtgggttcgcggagccctgccctggagctctgcctgaggctagaacagcacccgctggagatgaagggtgactccggcctttcgccctgaaacgaagtcaagc

SEQ ID NO: 29980 - DNA, 844 bp, Homo sapiens
  chr17:47653244-47654088
  binary
cgagagcggcgccgctggagccgaggggggcgccgagcgcagatctggagcagcagagccacggcgcagctggggcccttcgaggcgctcggggcgcacatctgggacctcgagcgggggccgtgccgcgcgcagctggaccaggggaggggggcggcggctgcacagctggaccgaagggggcggggtcggccctgggcgacccgctgaggggagggccgcgggccgccggggactggagcatgggacggcgcgcctgaaggagcaggaaggggaaggaggcctgggaccccgaaaagagaaggggagagcgaggggacgagagcggaggaggaagatgcaactgactcgctgctgcttcgtgttcctggtgcagggtagcctctatctggtgagtggtccgaggggagctgcgcagaggggcgggggcccggaggatcgggggagagcgcgggaagcttgcgagccctgaaactttctcccttcccccgacatcccggggatggcggggaagactggaggctgggggagagggcgggtccgaggccggagactggacagatagggttaataggggcggggagagggtgcttggctggcccacccactccgcagcgggtggctggaggtgcgaccagcgctcggaaaaaggcctggagccgggtcgccagggttaccctaccccttcccagagcctcaggaccgctgaagccgggggcgagtggggcgcgggtcgtggagctggtgacctgcaggcttttcccctgacctctgggactcagagagcctcgggttctgggtcccccagagcacagagccggtccaggcggggggcggcccccgc

SEQ ID NO: 29981 - DNA, 713 bp, Homo sapiens; identical to SEQ ID NO: 25258
  chr17:58498618-58499331
  hyper

SEQ ID NO: 29982 - DNA, 738 bp, Homo sapiens; identical to SEQ ID NO: 24077
  chr17:61777761-61778499
  binary

SEQ ID NO: 29983 - DNA, 523 bp, Homo sapiens; identical to SEQ ID NO: 24078
  chr17:61926187-61926710
  hyper

SEQ ID NO: 29984 - DNA, 765 bp, Homo sapiens
  chr17:62777091-62777856
  hyper
cgcccaccggagcgcagtgtctcgggctggataagaaggggacccggccacagctccttcgccaacctgcgggaacacagagaaggggagggattggtgggggccgagaggatccctggagcgcgagagcgcacccgtcgccaggaggtcccctgcgtccactgcccaggcgacgcaagctacagcggcgtcaacgcctgggtcggcgctaggggcctgggcctgctccccacccgcctccagagggagggcagcccttcgcctaccttctcctccccgtgggatgcggcccgagcagctcccgccccagcacggagacaaggggagcaggcgcgcggagctcccgggtgcggacccgccacctgccgcacccttccctccccaaccctgcccctttccccacccccaccccacctcccacctcaactcccgctcggcggcccactgcctgcccgggcacctcggggcgtccgctcgccggcctcgtctccacttgtcccggcaggcgcgcgtgggctcggcgtcccgcgctccctcctcgaccgcgcggctccggcgctgccaggtttcctgtatagcactataaccagtgaggcaccggcggagagcgcccggcagaacttcctcccggactggggctgggctgcggttgcgagagacaatccccggcgtcctggcttcctgtcgcctctgggccaggcccgcgcctgaagaggaaagatgccaccccctcccctgcatttcccgggatcctgggccactccc

SEQ ID NO: 29985 - DNA, 256 bp, Homo sapiens; identical to SEQ ID NO: 12413
  chr17:71431621-71431877
  hypo

SEQ ID NO: 29986 - DNA, 968 bp, Homo sapiens; identical to SEQ ID NO: 24081
  chr17:73584153-73585121
  binary

SEQ ID NO: 29987 - DNA, 858 bp, Homo sapiens
  chr17:74864600-74865458
  binary
cgggcgcgggttgccctcgtcgagagccatgggcgcggcgcggcgcggggctgaggatcggcgcggcccggaggcgctggggaccggggcgcgggcccggggccgcctttagccggcaccgagggcgcggggccggggatgagggcgcccgccgcggggagcccgtctgcgcgccgcggcaccttcccgcccagcgagcgagcccgagcaggcagacgcgcggccggcggtctgggggcgcgccgcctcccggtccccaaaatgtgaagcggggagggcggagacgcagagacggcccggccgggcgccctcgccgccctccggcagccgcgccgctccctccgctgcacgcccaggcctgagcagcgaggccaccgggccgcgcgctcccagcttcgctcggacgcggcttcggcccgcagagggttcgtggcccggacgcggcgagagctgggcccaggacggtgcgtccggcctcgcccgcggctgctcgcaccaacaagtttgaacaatgatcaccgtcaaccccgatgggaagataatggtcagaagatgcctggtcaccctgagaccctttcggtaaagttccctcctggttggttttttccccaggggggcgccgggtggaggtgggcgaggtcggttcctgcgaacgttcaagtcctggtggcagagggggcggttcacacttcaacccctggtgatgaccagtggggctgggctgggggaacggatggcgttggggttcggggtgcggatggggagggttgtgttattcggggacctgtcccgagttgggcagggttggagaggactcggggtgcagaggtaagaatgggggcagaaaacccccaggtc

SEQ ID NO: 29988 - DNA, 319 bp, Homo sapiens
  chr17:74908627-74908946
  hypo
cgcagatgttcacggcagatgtcctggccactgatggagcaacaaggctggacggatgagccggtcccgctctgctcctcgggtctcggtgtttcaattaactggctcactggagtgacgtttggggcaatgtgcaggatctacatctggctttgctgctgcaagatgcttccggggtgagggaggtggcacgagggagccgtgcgctctgtgatgagactgcagcaaggtgatgtcagccagtccccgcccgcgccccgccgtgtgcggagggaagaagccaaaccctagtgcctgcccagccgctgcatcctgagac

SEQ ID NO: 29989 - DNA, 805 bp, Homo sapiens
  chr17:75368688-75369493
  binary
cgtcgcccgtccctggcttctctgacagccgtgttccatccccgccctgtgccccttctcccggacagtgccttctccagggctcacccaggagggtgcagcggtggcccccggggcggtggtcgtggtgggggtgttagctgcaggggtgccctcggtgggtgggagttggtggcctctcgctggtgccatgggactcgcatgttcgccctgcgcccctcggctcttgagcccacaggccgggatcctgcctgccagccgcgtgcgctgccgtttaacccttgcaggcgcagagcgcgcggcggcggtgacagagaactttgtttggctgcccaaatacagcctcctgcagaaggaccctgcgcccggggaaggggaggaatctcttcccctctgggcgcccgccctcctcgccatggcccggcctccacatccgcccacatctggccgcagcggggcgcccggggggaggggctgaggccgcgtctctcgccgtcccctgggcgcgggccaggcggggaggaggggggcgctccggtcgtgtgcccaggactgtcccccagcggccactcgggccccagccccccaggcctggccttgacaggcgggcggagcagccagtgcgagacagggaggccggtgcgggtgcgggaacctgatccgcccgggaggcgggggcggggcgggggcgcagcgcgcggggaggggccggcgcccgccttcctcccccattcattcagctgagccagggggcctaggggctcctccggcggctagctctgcactgcaggagcgcgggcgcggc

SEQ ID NO: 29990 - DNA, 244 bp, Homo sapiens; identical to SEQ ID NO: 12420
  chr17:76851787-76852031
  hypo

SEQ ID NO: 29991 - DNA, 287 bp, Homo sapiens; identical to SEQ ID NO: 12421
  chr17:77113248-77113535
  hypo

SEQ ID NO: 29992 - DNA, 668 bp, Homo sapiens
  chr17:77126804-77127472
  hypo
cgataccgagcagtcttctgacacagtccctggaacgagtggagtgccctgtccttcagcccgggcttggtgcgggatggggcctgccatgctctaagctctggcctccctgcctggaggcgggacctggcccaagcctcaaagccgaagcacaaattcctcatcagtgaagatccagagccgccgtggtgctaggacacggtgcgcgggaatcagccccgcacctgcaaggcagcgtgctctgcgtgccctgcgtgtgccccatgtgtactgtgtgccccgtgtgtgagcatgtgtgccccatgtgtgctgtgcccccatgtacttgtgtgtaccgtgagccatgtgctgcgtgtcccgtgtgtgctgtgtgccccgtgtgtgcacatgtgcgccccgtgtgtgctgtgtgacccgtgtgcttgtgtgtaccgtgtgtgagccatgtgctgcgtgtgctgtatgctgtgtgctccgtgtgttctgtgcactgtgtgtgccctgcgtgtactgtgtgctctgtgcccatgtgtgctccgctcagtctccatgtgccctccgtgtgtattccatgtgccctccgtgtgctgtgctctgtgcacgctgggaacagcgctagagcgtctgtgcttctggacaggaaaacaagcccctcgtctaccttcacc

SEQ ID NO: 29993 - DNA, 1101 bp, Homo sapiens
  chr17:80186335-80187436
  binary
cgcaggccgcgggccgctcccctagccaggaagagccgccgtccgcaccgggaccggagaggaagcggaggtctgaagggggacaggtcggacgtggcctcagagagggaggatgtgggccccggagctgagccaggcggccggaaccccacgggacccgcgcgcacctccccaccaaaggggccccggcgttggggggcgaggggtcgctgccctggaggacgttgggacctgccgcgctgcgctccgaggcggggaaacggagggacggcggggcggaggggcgaagcgagcctggactccgggggaggcgaggccgggaagacccagtcccgaggagcagagggggcgggccagctccgggccgggggcgccgacggggccggttccggttgggggggtccctgggcccggcggggttgcgggacgcgccgtcggggagctgcggcccgggagcccgtccggaggcggcgcggggtccgggcggggcgcgcaggggcggcgccaggcggtgacgtgcgcgggggacgtgccgcgccagcgacccgagcacttaaagtcgcccccggcgcggagcggaccggcagaggcgggcagaggcggcgagaggcggcgagaggcgggctgaggcggcccagcggcggcaggtaggcgcggccgcgatgctcgcgcgcgggccggggcccaggagctcccccgtgccgggcaagggggcgacctcggggtccgcgctctcacccccaccccgcccactttgtccatcaggtccgggggcgcccggggcatggactagccttctcgaccccgagcgggccccaccgagggctcccgagagccagccgcgcccctccgcgccctcgcatacctggctgcccagtctcgtctcccccggtccggcccggcgcccacccgtcgggctgccctcaggggctgggctcgggccaggagatggctgcgccggcggccaagcccggtccgggtataaatagctcggtccgcggtggcggggggcgcgggctatatttggtggggctgctgcagccctccctgtatgggtggcctccccgagggagtggggagcacttgcgctcgggccgtggc

SEQ ID NO: 29994 - DNA, 806 bp, Homo sapiens
  chr17:81038567-81039373
  binary
cgcgaagcccagggcgccgagggcaccgcggccgaacccgccctgcgcgagcctcgcagtcgccagttccggggttcgcagatgcgcggggacccgagtgacgcgcgcctcccggagagccgtggccgggctggcccgggcctgggtcccgcttcccctcggcgcggcccccgcccccgcccccgcccccgccgcgggccgagtcacgcggtgatgtcgagcgaagctgttttccgagaaggtcggggcagagccggtgcggggcgggtggtgtccgcggggcgggcgcaggtctccccgcagccgcagcctccgttccgggtccccgcgaagccacagtcgccccccagcgcccccggcggagcctccccgggggaaggggcgtggcgctggggggcagagtcgccccgagggccgtgggcggtgcccggctgtcccgggagcggccgcctcccttctcggccgagcggggccgcgggcggatggaggtctggggggggtcggccgggaacgccggcgccgggagcctccgaggccgacggctcttctggggccgcccctgcccccgcggagtgattcagccccggctcgctgcctctgcccggcgggtcggtgcatccccgaaccgaggcccggggcgttccgctccagcagaccgaagccagaaacgccgcccccgccacccaggccgagtgtgtcgagaaggggccggcgcccttttcagggtgtcaggggactgtgtgcccggtaggagggggcgcctcccggagcccgaagggagggcgcggtaggcagccgagggtggc

SEQ ID NO: 29995 - DNA, 410 bp, Homo sapiens
  chr17:81050575-81050985
  hypo
cgaaggccctgggacatggccggactgagggtcttgctctcggacatgtgcccatcatggccgaggtgcaggtgcctttggtccaggtggggccgaggggtcccctgggtgagaccccgtcgtggtcgaggttgtgttttctgtctcccgtgctgccggcccctccagcacgtgccgccaactcacatttgaagtggcgttggtcacaaaggtgccttgacgtggacaccctccctgacttggctttgctgagtgtgagatcctttgacggtggtgggcggcgttccagagcctgtcccgtccaggctgcttcctgactctgcctttcttctccagcgccgtgccgtccctgcagtgacaccgaggtgctcctagccgtctgcaccagcgacttcggtgagtgtctgctc

SEQ ID NO: 29996 - DNA, 134 bp, Homo sapiens; identical to SEQ ID NO: 12431
  chr17:81080737-81080871
  hypo

SEQ ID NO: 29997 - DNA, 870 bp, Homo sapiens; identical to SEQ ID NO: 22816
  chr17:8868587-8869457
  binary

SEQ ID NO: 29998 - DNA, 539 bp, Homo sapiens; identical to SEQ ID NO: 12432
  chr17:951725-952264
  hypo

SEQ ID NO: 29999 - DNA, 652 bp, Homo sapiens
  chr18:12407715-12408367
  binary
cgagcgtcgcctcctacgcccgcggcatctgcagcaagcgcgcatcgcgcaccccagggtagcagcgcaggtctggggctgcgccacagccgcgcccgcagagctatttttagccgctgcagccagcctagccaccagacggggtgggcggcatccaagggcgccccgcccatcgaggccccgcccacgccgcgcccggagccgcgcggcccgaagcacccggcccggatcgcagagcccgcgccctgcgccggcggcaatgaagatctggagctcggagcacgtgtttgggtgaggccgggctgagggccgcggtggggccgtccagacgccggctcctgctcccgagcccggctggagcggtccaggaaaggccggacctcacagcgggcctcgcggagatccccgccccgcgccggccgttcccagaccgcaacttcggcgtcccggagagggcacgcgcgcttccccgggaccgcggtctgggcgaggctctgcgccgggtacggcctctcccccggcgtgcgcaggggcctggctgcaggcacagaggccccgctggtggtcgacagccagggcgggggcagccggagcgggggcggccggggcgggggcggccggagccgggggggcggccgggggcctggcgctc

SEQ ID NO: 30000 - DNA, 173 bp, Homo sapiens
  chr18:22804909-22805082
  hypo
cggcagtttccagtatcaagactcttactatgcgtgactttgtgttcagtaagagttaaaagggagggaaaccgctctccgcaaatagggcacatgtagtgtttgacagggcctaggtgggtctgcatatgttcccggaggccattttcggagaagaaggttcgagagcacac

SEQ ID NO: 30001 - DNA, 1928 bp, Homo sapiens
  chr18:22929412-22931340
  binary
cgaactaaaacttctgcgctttaggaaaaaagcaagcgttccaatctgcgaggccctcccccaccccgtcccttcccaggagaagaaagaaagggctttgtgtgtgcggtgagggctccgttcatcgagttcaaaaatgcacagcggccgggggccgggaggcgtggggcgccgggccctgcccaccccttttccccgggccggcggcgagtcgggaagctggtgcgggaaccggggccacggggcgccgcggcccggcagccaggaggaagaggatgctgcgccgccggggaccagagggcggggccgggccgcgcggacctcggcgggacccagcgggcccgggcgggcgcaccagccgccctttgtcctccgcctccgggtcgcgggggccgcggccgcctccagcgctggccccctggccctcgccccggttccccgtcctgcccgcgcgcccctcctccggccctcgcgctccgccgcccgccctccccgctctccgcctcggagcgccggacctcgcggctcccctcggccgcccgcccccgatttcctcggaaggaggctcgcgaaggtggaggaggcggccgaggaggaggaggaggccgccacgtgactctcctcgccacattccaacacagccatcagatcgataacttcagggacccccgcccccgccgcagccagctagtgcgcccccaaaatcccgcacgcacgccccgcaacttccctctccaacagggacgacggagagctggaccccaccgcgaaacgcaaaggactccaggggcggcggggagaagtaggggcgaggggcggtcaacttctgggaatggccaagaggggtgctctgaggcccgagccggggtccggtgcccgcggccggcggccggggtctgtttactccggcgacgtgcggagaggacccaagcaggacgcgggcgggcgggaggcggcggccgggaccccgggccacgtttgtcacgagcgggggctgctccccacctccgagatgacttttttcttcttccaaagaaaaggaaaaaagaagcaccgcacggttttgcatatttattctttgcgaaaacacacaacagaaactttttcctccagcccagatgtagatctcagacgggatatttttttttcctccctctccggataatttcgtttctttctctctctctctctttttttttttcggttgttgttgtcttttctcgcccactttctaccgccgccccattcggggatcctcctcccgtcttcgtctccccccaccccgacacctcaccctcactccacctaggggctcagcggggaggggagcgcgcgcgcccccgcactcacactcacactcacgcgcgcacacgcctcgcagccacgcagccctcgctccgctacccacagtgacactcgcggatgggggaaagcggggagcagggggttcctccttacctttgagggatctcggtttcgcttgcttgcggcgagacatcctaaaagcaaacagctgaagttgtttcaattcagccctgaaagaaactatacttcctcgtggccgcgcgcccctcgggccgcggcgcctcgcgccctccgctcggcctccctcgcgccctcgctccgcgctccgctcctcgctccggctccggctcgcgctcgcgcgcggggctcgcggctgcccgagctccgcgctctgcacgacggcggcggcggcggcggcggctgctgcaccaaactttcccagccttcgacccccacccccaatctccaagaaaaaaaaaaaaaaaggaaaaagaaaaaaggaaaggagggaaaaaaagctaaaaaaaaaaccccaaagacaatgtttgaagagccgtcagctacactaaaaagagaaaatccgttactatttccacctcaatcaaaattcacatagttcatgc

SEQ ID NO: 30002 - DNA, 1113 bp, Homo sapiens; identical to SEQ ID NO: 12436
  chr18:23806188-23807301
  binary

SEQ ID NO: 30003 - DNA, 907 bp, Homo sapiens
  chr18:24130266-24131173
  hyper
cgcatcaattgaaacccatccatcaatttgcattttttttttttaagaaagaatgaaagaccaggtctcagggcagtgtgggcttctgagtgggagttgacgatgtctttttctgcagcgaacgctgctggtcctccgcgtgcctgcccggccctggacgccacccgagcttcggggaaaccgcgccaggtgtgaaacaagttagagcaagtccctgcctcgcgggccgcctccggctccttagggaaacacaagacacacagacacacacacacacacacacacacacacacacacacacaccacgctctcatccgcccggctctccgcggagaaccgtccgggaatcgtccccgaggtgcggcgcgggaggtggccggctttgttcacaatgcactgcccgccgcacccgccctggacacgtgcagaaaggcgtgctcgtttctccgaggctgcggtgagcagctaagttagttgcacactgggacccccacatacgagctggcacacactagtcacacacggctaattccagagggctggccctttgtcctgggacgctcccaggttttcgggccgcggtgcggagaactcaggtgggtgcccggcaagttacctaccaggggctgttcccccgcgaccctcgccataagcgcagggacccgggggccgcgctggctccgggctgcgctcctggcttggcaggggaccaggcccacgctgcagcctgggagcggagccgccccccaggtctccccacctctgcgggcggcggggtccacccccctcccaccagctcccctccctactgggcgagctgctttgaattgctcgcagtttgccggaggcggtgtgctgggttggacgctccgggaaacaaagcaacccaaaacagctcccagttgac

SEQ ID NO: 30004 - DNA, 1955 bp, Homo sapiens
  chr18:2846449-2848404
  binary
cgccccccgcgtggcctcggaaactgtcagatggtgcctaaggcagagttgggcaaagaaagaaccagcgttcgtttcctcctggactctctaggtccatggagctggtgggggaacggccctgtcttgcccgaggaggaaattcgagtcgagcccccactcctctccccgcgggactgataaacatgtccctcattcgccccgggaggctggcacccaggcacgacgcgaggacggccagactcgccgacggcggccgcgtcccggggggccgggagcgagcctgtcggaaggtgggaggcggagtcgctcggcatctgggaagagaccaaaggaatgagtcattggaaatgctgtaacgtagacccttatcccaaaccctttcgcccctccaccccgagccccctgccgagaagcgaagggactggagacggggagacttggtggggggagagtcacgtttcggagagggaagtgaaataaagagggcggcacccggggggacctgtgcgtcattgagggaccggggagaagcgcagggcgcacggggctgcagaaggagaagtaggaacgagaagccggagggggcggccgcggagcactggttggagcgccgcgaagcgcccgagcctcttgccttcgcgggcggcgccctggccgccggcagccttgtggccggtgccccgatccgccgcgctccggacccgggcaggcggggcgcgcccgctgcgcgcgggatgtggcagcccagacggccctggccccgcgtgccctggcgctgggcgctggcgctgctggccctggttggcgcggggctgtgccacgccggcccgcagcccgggtatcccgcgcggcccagcgccaggaacaagtaagtgcgcgccccttggctggccccaaaccgcctacccctccccggcccccagttgagccccagagctgccctgccaaagacgacgagcggcagccgggggcctcccttggacttccccgggcggctccctctgcgggggaccgcgcgctccgcagccggcgcctcaggcagagctgactccgggggcgtgggcgcagagagcgtcccgcagacccgggcgatccgaaaacgactcccaggaattccatgagcccctgggaccatgggtgcttttctttcccgtcttggtcgggtccaggcgcgcgctctccagaggcgcacccgggcaccctccggcgtctgctcggtgaagctcccgcctccgcagagggcgacgggcccccccgaccctcgctcggtctggtgccgcagtcccctctcccctggcctcattgttctccgggtttaccccgtgcccctctccctctctctcctgcaccccaggaactggtgcgcctacatcgtgaacaagaatgtgagctgctccgtgctggagggaagtgagagttttattcaggctcagtacaactgtgcctggaaccagatgccctgtccgtcggcgctggtgtaagtcctggagccggggagcgggcggggcgcgcccgggccggggcggtgggggtggggtggggttgctgcgctgggctccagtccctccggtaaatcccttccagatccggtgaaaagcccgcagcggaaaagcgctccgagcgctcgcggggcaccggccacgctgggctatttagggagtgggtgctgcccgagtgagtggggaggatgcgcgcgcctcgggagtgtggggtcgcgggggcgtaggagaggatgaacaaagctcccactcccacttctgttttctccctttcaatgtttgtttgtaacataaggcagctgaatctaattggatccatattgtgtgttctggggcacacagaagattccaaaatgtatactgctaaagactattccgtataggattcgctgagaggtttggctaagtagtgttctaaaacgagtgagttctgtccgtatgtccccataaaac

SEQ ID NO: 30005 - DNA, 830 bp, Homo sapiens
  chr18:2905969-2906799
  binary
cgccgatttttgtcgggtcctaaacaaaaatcaaatgtgttgcgctttggaactctgggcatcgtgggcaccaggctgacgggggcggcggggatggcgtttcttggcgagcgggtccctcagccaggcccgggtattgtcaggcgtcccgtggacggtcgggaggggcttcctggagggctcgttccgggaacgagttcaaaggaggaaagggcggcagcttccggcgccttccccagagggccgggagacgcacgccaggagcttcctccgttggaagtcccttccgctggcgacgtgggcgctgtggccgcggccctcgtggagcctgagccctcctcacggcctccgcgcagccctggggccccccggcagggtccctcggcagcccgcgggagaggccgtggggccccggcaggagtgtggttcagagacggtgcgggggtcggtggcctcaggtccctttcagtcacttgcgacgcacccgcggtttccgcgtgctgtgaaatcgggaattgttgatgccggagccaagagtgaggccggtttggaaagtgcagccgtctgcgccggagaggctggaaacgccccggccccgggcaggggtccccggcggcgtccgggtggcccgcggcgtcctcggaagatgcgggcggacgcccgtgtgtcccgctggcctgacgtcgcaggggtggccgcagagtcctcacggggaccccgctcgccgggactcatggaggggaccctgacggggcagtcagggctgaggtttcctaatcccgtgtgtttctttctccccgacgcccggcagaggcgccctcgcccccgcc

SEQ ID NO: 30006 - DNA, 414 bp, Homo sapiens; identical to SEQ ID NO: 12440
  chr18:35249615-35250029
  hypo

SEQ ID NO: 30007 - DNA, 1197 bp, Homo sapiens; identical to SEQ ID NO: 22822
  chr18:44335955-44337152
  binary

SEQ ID NO: 30008 - DNA, 204 bp, Homo sapiens; identical to SEQ ID NO: 12442
  chr18:47813485-47813689
  binary

SEQ ID NO: 30009 - DNA, 307 bp, Homo sapiens
  chr18:5133043-5133350
  hypo
cgcctcgggttttggtaagctggtttggtgtccatgggggcctggctcttgagctgctccaggctgagagcagcgagctgcgggttcccgggaggcagcgaggcgggttgatggggccgccctcccgcctaagcctggccagctccaccaccaccgaccacgatggctgcgccccgggccgcgaggaagatggaacacagcttcttctccaggaccgagagcccagaatgtgtagaggggcagagggggcagaggatgagctggaagagggtcccaaggaggcagcggcagaggtgatggtggtggc

SEQ ID NO: 30010 - DNA, 1375 bp, Homo sapiens; identical to SEQ ID NO: 27754
  chr18:53254628-53256003
  binary

SEQ ID NO: 30011 - DNA, 294 bp, Homo sapiens
  chr18:54789027-54789321
  hyper
cgcttctgggagtgcatgtgcgttgctgagcgtggcctgagcccggtcagcggccgggcgccggtggcagcccccggtcccgcggcgaccccggcccaggaaggagcccggtagggggtgcgctttccctggcctcccgaggcgggatcggggccgggctccactcggtgagaggatcctgccagccagctgggtgaaagacccacagaaatcccgaactggctgcaagatgcattggtagctggcgcctttagtcgggttcctacagttttgcagagaagtctatgagtgatc

SEQ ID NO: 30012 - DNA, 639 bp, Homo sapiens
  chr18:74503879-74504518
  hypo
cgatcagacagatccgccagggaatcaaggagtgccacccagggaagcaagatggttgctagaagagcggcagattggatggagcagggagttcgggtgtgacaggatgactgtggtgtggtggtaggacttcgacgtgtggacccccaggtatttggaaatgtaggtccggggcgcacctgagggctcaggactggaagtgcacttggggagccacggatgcgctcccagaagtgcgcccaagaggaacagtgtggggcctgagcaggcgggaagcttgaggagtgcccacccgcagggaatgggaaggacagcgcagcagcttgaggagaggacgctcagagagtgagcttcagaggaacacccagggtgtgaggcgcgcaacccaggcgtggcacagctgcatggaaacccggggcaaagtggcatgagcagctgccaggaagtccagagggctccgtggtaggcagacgttctgtgacggagcccacggcaggtgcaagtgtgagctgagacctgagtctgctaaggagaagtgaggacgcccctgataaggttttgaagctgaaggcgccacaggagtcttgatgatggggcaaacagtcctgggggtgggcgaggagagcacactcagcatgc

SEQ ID NO: 30013 - DNA, 234 bp, Homo sapiens
  chr18:75229728-75229962
  hypo
cgtctgcggcggcttttctgtgtccacaaagagaccctcccacaggcacatgcatgatgctgcttcccagtgagaaacttcggagagaagacaggaggagacgtggaatgtttcggggctagaaatgtccatttcttgaggtgtgtcgcgtgcgcgttttgacctcggactgcacatgtgcgcctccacccagggctggtcttcaacgggcaggacctggagacggggcgcacc

SEQ ID NO: 30014 - DNA, 781 bp, Homo sapiens
  chr18:75230185-75230966
  hypo
cgacgccatccccgccgagagagccagggtcttgggaccagggcccggacagcccctgcaggggttccgctctgcagagtgggcccttcggcggtccttaaattctttgcagtgaatgacccaagggaaggagggcgagcggggaaccacgaggctcggagctgagtggtggcctcaaggacccttccagaatgcgaatgaatatttactggaaagagaccattaacccaaagcaaccagaacgctttgaagagacaagatggattttcctttccgtggagggaagaagggctcgccgaggcagatgagttagcacgaaaaagagggcgtcgtcctttcgaatacgtttgactgaagaaagtctcaggcttatcaggtccatatcacacatattcatagattccttaacttttacgtcagaagcgaatccactttccttctttatgtcctttattattgtgaaatcaaaggactccgaaaggaaatttactcctgtgtttaaaactgaagtctagctcgtgcttctgaaatgacgcataaataattcaagcttgagagggaagaactggccacactttggaggcgccgagctggggaacctggtgtccgaagccaagctctgctcgggcccaggaggacgcagggacatcgcactgtcccccacgcctggcctgtgctcctttaatcttggtcctaatgatcgaattaaagagggatacaaatctttgtaaagaatctctgttagatgtctacatggttcagagaagcttctcaagtgaac

SEQ ID NO: 30015 - DNA, 288 bp, Homo sapiens
  chr18:75339206-75339494
  hypo
cggggacacttgtagttttcctgtcctgtgagttgaggtccgttacatcccataacatgtgtgtccccattcacatctttccagctctctgaaaatcgccgggaaagttgggattgccccgcagcgtgggggtgatgccgctgcagcgcaggctgggacagagagcagcccggatgcgcggagcagacttggacttcagagcaccttcgctgaagccgagtgctgctgtgccaggtttgtggcggtcatggtggaaagtggtgagtgcctcgggatgggtgctcctgc

SEQ ID NO: 30016 - DNA, 241 bp, Homo sapiens; identical to SEQ ID NO: 8168
  chr18:75873544-75873785
  hypo

SEQ ID NO: 30017 - DNA, 337 bp, Homo sapiens
  chr18:76123588-76123925
  hypo
cgtgatccacagaaatgattgctacgttccctgcagaacggacggcagtcgctggacagggccccagagcgcctgggtgcggtcagctccgcggactccccccgggacacctgcccagctgcggccgaccccggggcgcacaccctccgggatgaagacggcacgcctgctgcgcacggtggctgtgctgtgctttccagagacaccaaagatccagcaagccccggtttgtgtcgagtgtcacgggaatggagatgccttaaggctccggcttggacggcctgttgttcgcgtgctgagtgcactctgtgggcccgagcgccgagggtcccatttc

SEQ ID NO: 30018 - DNA, 353 bp, Homo sapiens
  chr18:76129277-76129630
  hypo
cgcagtaacacacggcacagaccgcgtgcctttcctccatctgcttaccgagtcggcgcggccacttaccacccatggcagcacattgcaaggtttgtccgtataaaagaaagtgccggcagatcgtgacgtggaggcctcggacctgtacactctcccgtgactctgccacaggccaggctttgctgcgatcactaaaacctggttcgaaatgagccactttagccctccgcatggtggcctcctaggcatccaggcagagggaccctccccgacagcgctctgggggcagcccaggaaggctcagtgctgcggtaattcggggcctccaggtccaccttacgctcatccac

SEQ ID NO: 30019 - DNA, 441 bp, Homo sapiens; identical to SEQ ID NO: 12451
  chr18:76151089-76151530
  hypo

SEQ ID NO: 30020 - DNA, 466 bp, Homo sapiens
  chr18:76189679-76190145
  hypo
cgtgggacccatgacgcagagaggcaggtccctacccaccgggccgtgggccgctgagcacagagcgtggagccctgcggcggggtcgttcctgggccccgcgtgccatcctggggttgtgcatggtggcggcgaaggcacccagcgctgggaccccagcgaggcgacccggggccaccgggcaggcccaagagctccctgtctgcgggccccttgctttccgcagcagccggcctgtcggtcctcggcgggagcctctcgttccccagccacggggccttcccggggtgcggccgagtcaggcggagaccccctggggtgggtggcgggagcggggccgcagcaacagggcggcgtggagggggagaaacaccttacccagccggcggccccctccagcgtgcagctggaacgggaagctgtctgctcagccgtcagaaggatgcgagaaattacctagctcccc

SEQ ID NO: 30021 - DNA, 524 bp, Homo sapiens
  chr18:76435960-76436484
  hypo
cgttcactcaggaagccgaagcccagaagagtgaggtctcaaagttcacagcacgtggcctagaattcaggggtgcagagctcctgcttggtaactcatcccctgtgcggtgatgcttctgatcccacagcaatgcctgcttctgcgaggctggtccagggctggaacggagccctgtgccgtgatgcttccgatcccacagcaatgccacgctcctccagagctggagcagattccgatcccacagcaatgccacgctcctccagggctggagcagattctgatcccacagcaaggccgcgcttctccaaggctggagcagattctgatcccaccgcaatgccgcgcttctccaagactggagcacattctgatcccaccgcaatgccgcatttctccaaggctggagcagattccgatcccaccgcaatgccgcatttctccagggctggagcagattccaatcccacagcaaggccgcgcttctctaagactggagcagattctgatcccaccgcaatgcc

SEQ ID NO: 30022 - DNA, 148 bp, Homo sapiens; identical to SEQ ID NO: 12455
  chr18:76480528-76480676
  hypo

SEQ ID NO: 30023 - DNA, 586 bp, Homo sapiens
  chr18:76486313-76486899
  hypo
cgagtgatggcgcaaagcaggccggtgaagcctcggcgctgggcccggcctggcactgcgcatccttggccttcgggacccgggctcccgcccccgtgcccagcctcacggagcccgcccaggcctgctgtcccccgagctccaggcccactgcccgccagaaccttctggtcttgcctcgcttcccgcctgcacttttctttcccggcctggcagagacatctataccagtgggaaaggcgagccactccggcagcgctgccaggttgcactccagcacctcacactcgcttctcccgggacttaaatttaaactcctcgagcgtcatgtccccatggctgtctggggccatcattgccacctcgtactcctctcttcactgccacaagaccaagagacagatgcgtcccggggtccttccacagcgttcccaggggaggaggagggcgcctggagccctggggaaggcgagcccgagccagcgcacgtggagactccctcggagacctctgcgcacatggagacccgcgcgcacgtggagactcgcgcgcaaaaggagaccccagtgcacatggagacttccac

SEQ ID NO: 30024 - DNA, 432 bp, Homo sapiens; identical to SEQ ID NO: 12457
  chr18:76495838-76496270
  hypo

SEQ ID NO: 30025 - DNA, 284 bp, Homo sapiens; identical to SEQ ID NO: 12458
  chr18:76534718-76535002
  hypo

SEQ ID NO: 30026 - DNA, 178 bp, Homo sapiens; identical to SEQ ID NO: 12459
  chr18:76552775-76552953
  hypo

SEQ ID NO: 30027 - DNA, 209 bp, Homo sapiens
  chr18:76626259-76626468
  hypo
cgcggctgaacatgccaagctggctagagggagggtgacagccgcagccgaacctcagagctggctagagggagggtgacagccgcggacaaacctgcagacctggctagagggagggtgacagccgcggccgaacctgcagtgctggctagagggagggtgacagccgcagccgaacctcagagctggctagagggagggtgacagcc

SEQ ID NO: 30028 - DNA, 289 bp, Homo sapiens
  chr18:76653387-76653676
  hypo
cgcaccacatgactctatctacgggaaacacccagcagccagtcaccgaaggctacacaccgcacaactccgtctacgtgaaacgcccagcgcaggcgtgccggcacatggggtgatgagcgtgctctaaaggtgatcgcggtgacagactgcataaatctaggattctgccaataccctgaattgtatactttcagtgggtgggccgtacggtgtgctaatttcgtctcaataaagctgttataaaaaacaaggaaggcgccctgctccttttcattccagccttgac

SEQ ID NO: 30029 - DNA, 1028 bp, Homo sapiens; identical to SEQ ID NO: 25309
  chr18:76685353-76686381
  hypo

SEQ ID NO: 30030 - DNA, 904 bp, Homo sapiens
  chr18:77159824-77160728
  binary
cgtcgggctgaaatcggggttcctagcgttggcggcctcgggctgggacctccccactcccggggctccgcagggcgcgcacgtggcgctcgggggtcaccgttgcagccgctttcccgaggaggcccggattgaaaacttctttaaaaaaaaaacttaaaaaaaaaattccgtcgccctgggcgcagccttaggtacctggtgccgctcgtggggtcccgacgcccctacccccgggtccggaggagcctgcgccgggccgggacccccagggcacaagaggccgggggacccctgcggtcgcgcgcgcgcgagggggcgggggcgggggggacacgagtttatttaaaaactcgtgtccggggagtttatttaaaactcggaagccggcggccgcgagccggttgtttatgtaaacccggaaacgccccggggggcgggggcggggcggggacggggggaggggcgggggtcacgttacgcggaggacgcgcgggcagcgccgggagaaccgaacccctggcggccgcgaccccggctcccgccccggccccggcccgacccgccatgacggggctggaggaccaggagttcgacttcgagttcctcttcgagtttaaccagcgcgacgagggcgccgccgcggccgccccaggtgggtcagtcccggagggcgcggggggcgcggggccaggtcggggtttgggggcgcccaggccccctccgcgtcctcgtcgctccccggggaccccaggagtccccggcgcgcccgggaccgaggggctacggcgggggacgctgcagtgcggggcgtcctgggctcggatgcggttcctccgagcgctcgcggcggggtcctgggggaagagcgcagcccggacacgggcgtggacgaagtggtccc

SEQ ID NO: 30031 - DNA, 799 bp, Homo sapiens
  chr18:77307943-77308742
  hypo
cgaaggcctccagggccctctgttggctgctgacccagggccttctctagagcacctgactcgggcacacggaggctgctggaggagtgagagagtgagtggggggaggaattgcaaccaaattcagaatccgcccggccctgaggccgccccttgcctgccacccacccgggtgggggctttatttcgactcaggcacaggcgcacctgccggacccccggtgtctctgcgactccttctccgcactggcctgggcccgggctcccagccctccgctctgtctcgctggggcaaggcgtccctcactggccagttctgacattggtcccgggggagccgccttccacctgctggccctgctggccctgagtgtgactcagccgtgcccggcaggaccacgagacgtccgctgagcacgatgtctacctggcattcaaggtaagtcatcaagcgccccccggttaggctggacgtgtctgtgagggttccggatgagcctggcattgggatgagccaggccggctgcggtttgactcagtgagggaagaggcctggcttgggacaggaggaagctgcgttccagcctcaggggagcctccttcccctggccgcctccttccgcaccctcaacgcaacaaaaaggtgatttcagaattgtaattactaaagaaaacattaccaagaacgactctgcagcacccctcgttcacgtccccactcagcatctccacgcgggggccacgcgtccgtgtttgctgccggcagccatcagcatccgcaggggtcccccgtctccgc

SEQ ID NO: 30032 - DNA, 122 bp, Homo sapiens; identical to SEQ ID NO: 12469
  chr18:77334284-77334406
  hypo

SEQ ID NO: 30033 - DNA, 403 bp, Homo sapiens
  chr18:77338977-77339380
  hypo
cgcgccgagtgtcctaacacagttgccacacggctccatgtcctgtgcacaggccaggggttcgagtgggcatcagcaatgctcacttcagagcccctccgccacgacgtggccatgtgcacacagctccgtggccagcgctggaaactgcgtctcctgcctccagctgcgttacttggagaagcaggaacctctccatcctcactttccatccgcacatccagggccgcccacgtgcacccacaccgtgcgctcactgtgtggcctgtcgagaacacagtgtcctctgcccctgatttcccaggagagtcgcacgtctgtgatggtggtctcccaggcacgcatggccatggagcacgggaacgtgtgcgcctgctgggagcacatgggaagactgcacgcc

SEQ ID NO: 30034 - DNA, 1455 bp, Homo sapiens
  chr18:77557780-77559235
  binary
cgtgctccctccgagtggacttggccccggctccaaacccagccgagggtcggctcgctcctggggacccgcggatgtcgcgagggggcgccgcgccactgaaggctgggacgggggcggtgcgcggggcggcgccggagtccgggatgccggctccagagacgccgcgctccgccccgaggaggccgccggccgggtaagcggagcccggagctcgcggagtctggaccgcaggtaaagttgagcgcgccgtggggccgggggtggggggtccgcggcgaaggagccggggccgcagtgggcggtggggcggggggcgcgggctcctgtctgatggttccgcgcgcagcttcttctccgggtgcgcggtgcgcgcgggcgcgggagggtcgaaggggaccttggaatccccctgttcgggccaagggggcgggggcggctcggggccgggcggggctggtgcctccccctcccgctcagcgcccagagtccgggagtcgaggggggcgtcgggccggaggcgctcgccggtctggccgcgccgcgcgcgtggatggaggtctcggccgcggatcgccccgtctattcgcgctggtcctgcgggagcccgggtgagccgaaggcgaggaaggggcgcgggtctcgggaaaacccgactctcccggcgcccgccccggttcggttgggggcgcacccggctcgcgcggagagcgggcggggtgtgggcgaatgctcggcgcgctgcgcctttcccggtcccccttctccccggagatgaacgccccactcccgctcggacacacggccgcacccctactctgcctcctccgaccagccggggcgcggcccgaattgggggagagaagacccagctcccgcagccgcgaattctgcaaacccggagcccatgcgccccgtcctccggcccggggagctcccagccttgcccgccgagcgcagcccgggtccggactgtggtcactggggacgagaagggtccctcctgcggggctcccgggttcggatggacggagggggcgtccggcaggtgaactgggcccgctccgcgtcccgaacgttcccctaaacccacaagtcccggagaccctggggcattctgcgatttcggagtgaccggtggagcccccgcccgcgcgcctggctcccggggtctccccacacagcaggggctgcggggaccccctctgtcacctcctccaaagggtctgggagcaattcgacctgcctggagaattccaggaagtcctttccctgcgggagcctcatgggtccccccttctctgcctgcagagacctctggcttccgcgtgcgctcaaagtgagcgccgggcagattgtaaataatggattttgacccagctgggagatctcagagtgattaagtggagaggctgttccaccctcagccctgcccaggcagctgggtgaccccgc

SEQ ID NO: 30035 - DNA, 798 bp, Homo sapiens
  chr18:907707-908505
  hyper
cgatggctcggagccgccgggcgcagggagccccgcctccgcgccgcgcgccgccgccgcctggtaccgcccggccgggagaaggtgagattcgcgcggcctcgcgcacacccgcggctgggagctcgggactgcggtgacgggaggggcagtgtggtgacccacccaggatttttttttttttcccgtgaaagtcctcaagcctgtcctctccctggcccgatcctattgcagcgacagaaaatcagcagcgggcgggtctgtgtggacctgagggccgcgtggggaccgaggggggctgtggcccaaagagtggcagtgagtggcgtcaaggaacccacactccgcatctgccactcctagagccgggactagctcccgatcctagcagttgctctcgagatcatcccgggagttattggcgagttctgggcctctggaggtttccctgtcagcctccccggccgccgagggggcgcgcgcccaacaagggggtctctagcggccacctggggacagaaacagtgaccctgggcgcgcactttgcctccccgttagagatgtcgcccacgggatccttaacgaggcctaccgcaaagtgctggaccagctgtccgccgggaagcacctgcagtcgctcgtggcccggggcgtggggtaagagtttgtggaaggattaacctgcgcgcgccggggtgggtgcctgtgcggggcgcgcggggcgggcggcggtgggtgcccgtgggggccagggtgagtctgcgcccctgggtctggggtgggcatccgccacgggtc

SEQ ID NO: 30036 - DNA, 668 bp, Homo sapiens
  chr18:9707859-9708527
  binary
cgtgggacccagaatgtcgcttgaggatgggacccccgcagacctccacgcgctgccacgcaaacggcctcggccgagagcattcgctttccagatgagaatggcatcttcagggacccgctggtagtggggccaggtctccacagggccggtccagtccttcctacccacccgggccctgcggccaggcggggccgggaggggcggatgccggagggcgctgggggaggccgacccgcgcggggctggtccgagggcggaggcaatccgccggcgacgccgcaggtcccgggtggctgacgccgtccgggggcgttcctgggagctgggggccggcgaggctggacccgacgcgcccgggaggagccggccggcggccacgtgacccaccgcggcggggccggcggcccagaaatagcagcggcggcggttccgcccgcgggcggcgcgagcgaggggcagaggcgagagacgccggcggggcgcgggcgcggcggccccggaggatgctgctgagccccggcactgcctggctgcgagcacatgatggcgatacgggagctcaaagtgtgccttctcggggtgagtcctggccgccacccgccggcggaccccggcccgcgctctcgcgccccttcgctcccctattccctgcgcgctcagtcccc

SEQ ID NO: 30037 - DNA, 877 bp, Homo sapiens
  chr18:9708731-9709608
  binary
cgggtccgagcctgccccgggcttactccgctctttcctcccggcccgcgagtccccggatccgcggcgacctcgcggggacccccagcggggacggggcagtggcggcgagtctggggccccgagggctttctcctccgcttttgatagtttccttccggcagaaagtttaagttgctcagccaagtcgctgagtgctcttttgcctcctgggggcaattgatttactcacgtaaaacagaaaaataaaaccaaaagcgaacccagccaagggggtgaaagccgagggcgcggccggggtggaaggtgaggcagtgacctgtgcggagcgcgccctgcaaacttccctgctgcgggtgaaagaagctgcctgggaaagtcctccccaccatcactcccctaaagtggggttttctccgcccgaagaagccttaaagcagccagaaacaaaaaagcagtcaatccgtgcggcccggggactgcagacaggggacccggcgaggacgcagggagccgctggcgaaccgcccctgggaattcagataaacgtagggtcgcttcctttcgggggcccactccgcattccagaattccttcttctaaaagaagagccggttctaagggcgttttcagcagccattagcatctggtgtacccgcccgtgtcattggcaaagctggtctcatgaaaaccatttcctaaaaaagggcagcgaaagggtcgcattcttgtgcgaactgatctgtcaagatgggggtacaagaactgtagaaagaggaaatgatttcggtgaggactgaattgtgccagcgtctctaggcttcctctaggctcttgtggaacctccggcaggctcccatcatcggctcccatcacc

SEQ ID NO: 30038 - DNA, 1317 bp, Homo sapiens
  chr19:10400300-10401617
  binary
cggggctcggagtccagcttattatcatggcatctcagccagggctggggtaggggtttgggaagggcaacccagcatcccccgatcccagagtcgcggccggggatgacgcgagagagcgtggtcgcccccagaaggccctgggccatcatgccggcctccacgtagaccccaggggtcgctcactcctgccagctcgccttcaccaaggccaggagcttagcgcacgctcgcctcccgcccccccgccgcctctgccgccgccccctccttggaaaccaagttaccaacgttaaaccaatccccaagcgcaactctgcctcccccacaccccacccgccgcgccgcgcggagccgtcctctagcccagctcctcggctcgcgctctcctcgcctcctgtgctttccccgccgcggcgatgccagggccttcgccagggctgcgccgggcgctactcggcctctgggctgctctgggcctggggctcttcggcctctcaggtaagagccccgctctggttcggggtggacagggcgggggcggagtccctggacctgagaaacggcctcctgtccctcccagctctgccctcgcctcgctcccacgcctctgcccccacctcgagcctgagtcttctccccttccccctcctccccaacacacacccgagccccagcttcctgactcctcgatagcccctacccgcttcgagatcctaggtgttcttccgcacccaacccttcgccctggagacccagtgtctctcctgtccgctccccgggtacctccttacgctgtgctgtgcaccatggtccacggactggcatcttccccactcgcggtccgcgaagactccatctctccaactaccctgactcagaggcgctgttcccgctccacccagagccctggcaaccgggtccctcagctgttcccgcggttccttccatgagcccagccttgcgtcccggctccgtgttcttcaccgggtgtagggtccttcctgatccttgacccagcctcgtctctcctttgcccttgccgcaaacgcactctcctcgtatcccggcattctgccaggaccctgagaactggttcatcccccatcccccatcccgggtccccttctctcagccttgctgtgttcatccaagaacccacctttcctctcctctacgccctccccccatgctttcccgccgctccatcggcgctttggagaccatggctctctgctaccacgtcccagagacaccctcgaggtttagactctgggagtgcgcctttaaaccggaggcctgggcaggacgcgggac

SEQ ID NO: 30039 - DNA, 988 bp, Homo sapiens
  chr19:10529649-10530637
  binary
cggtttttgctcggcgttcgcccacgccgggagccccctctggcggggagaaaagtggctgtgggggttgaagaccggcagtcttttttttttttttttttttttttcaaataaggagaagggcgcggggggagggcggtggcaaacggcatcgcgtgccctggggagcccgtgacagggggcgcacgggggcaggggtctggtccccgggtcccgcagcagagcagtttcgcgttcgagctcttatcggcgtggggggggggggcggtgggacacgcgggcgcgtgcactccccccgcccagcagccatccttgggggggttgagggggatgggggcgcactcggatcccgctcgctctctgcttgctcgctcggcgcggcgctgggggaggcgggagcgtgagtcacggcgactcccgatttaggtgccggaaggggggctctgctggcgggggccgcagggaggaggctcgcctgtttactcgcctgaaaagggcacgggggtgcgctccgcggctacctgggaccttcctcagtttacctctggcagaagcgctttagaagaggcagcgatgtatagagcggtgggccggcagctgcggtatccgccacagggtgtcttcctggagccacaagggaaccaatgggacacaccccagaaacaccccagaggccccaggccgaccacacacatacactcacgcacacgcacacactaacatacatagacgtcctccgacactacagtcagacgacagaggccgaatcgcgtgcacaactccgcaagcacacaccgaccacaaacgcatccaagcgcttgagaacacattcacagtccccaggccacctgaaaaaagaccacgtagggatgcacatcctccaaataggtagcacatgtgcgcacacatccttcacccacagacacacacagttatacacacagccaaatccagagaaacgggcagacaacagcagccaaccacgtgc

SEQ ID NO: 30040 - DNA, 1478 bp, Homo sapiens; identical to SEQ ID NO: 26548
  chr19:10530654-10532132
  binary

SEQ ID NO: 30041 - DNA, 903 bp, Homo sapiens
  chr19:11532739-11533642
  hyper
cgagggaggccattgtgggatggcctcctgaagaaatggccctctgctgcgggcaggataggtcttctgtctcgggctgctccagaactgcagataggtctccgagcttttcggggacagggtgggacttctttcccttggaggcggagcttgagacgggacagggtctctgacgtcttgggcttccttggggagtgagagcttccccagggaggtggggcggggactctgaggaatggggtggggcttcccctgtgggcggggcctctgacgtccgggacagaggatgtggcaggccacgttccctcgggcaagctggtgtggcaggaaccccgcttcgtggctgcgcctctgcggtcccaggagggcctgtcggggcttcccctgggcggggcctaccacagtgatgtggatcagcttgctggccaggtgctccaggctgtccttggccacttgcatcgcccgcaaggcgcgctccagctggtccttggcctcggcgtgccgccgctcctccttcttgagacgctcctgcgcctcggcttgcagtttctgctggctgcagggagccgggaggtcaccccgggggctcagcccgccccgccgccctccccagagccccggtgcctcacctcaccagcgtggcctcccccgagtacttgaggtcttccagctcccgctgcagttgttgcttctcctgcttcagcctcaccaacgtctgctcgttctcgctcttgagcgtctccaactgcgcgaaggtgtcgccctgggccaggaaccgccgcaccaacgactgcgggccacccagccccagtcagagccagggcctagggagcgtaggggcgctccacctcctctcccccaccctgcgaaccctcgcacgcaggacaggtggcctgagctggc

SEQ ID NO: 30042 - DNA, 1038 bp, Homo sapiens
  chr19:11592604-11593642
  binary
cgtgattggtcctcctgactgtggagtcatgctcgctctctgctagggggaacctggcctctctctaaggcgttgggggtggcgcagcctcctttggtgcgcgggcgccggtgcatgtttacgtcggggcgcgggaactagcacacactggggcggggtcgccagggcgtgaggcttcagcaccacagacagcaatccgacagtccggtcgagggcgctgccggcgaggtagcccagaccccctaactggagagcggcagtccccacccaatcctcgttcctgcacgccctttaggctccagactgtcagagagcgccaccagcgaggagagcctaatttgcccaatcaggggcggcccttgagataaccagttactggaagatgccctagagatcgagccaatgggagtgcgcgcaccaggggatgctgccacgcctggaaagggcaggccaatcgcagtggcccgcgcaataggggcggtggcggtgcagatccccgggtggcccctcttgggctcgccggggcgacctggctgcgggcgctaggggccccaagcgatggtctgttccccaccccgtgttcctcccggtttccgtcatcggaaactgagctaggaggggggctgctcctgggcgcgcggaccccgctgcggttcccatggaaacctgccggctccggcagtgcggggagagtggaggggacctgcctcgcggggggagggagctcgcgggggcggccccagcggccggactcgctcatccttgccgattcttctgtccccggctggggtagccccccggtccgcagcaggaactgaggcatagctggggccccgcctcatcccccgaactggtgaggaaccggcggggccaatctgcgcgtggcgccacagggctcccccgggcacgtgcctgagctcgcggctgcggtccccagggtcacgtggctgcggccaccagggcctacgcgcctcgcacgccacctagcggccgcgcctcgctccccgcccctctctctagcggcccgcaggaggcggc

SEQ ID NO: 30043 - DNA, 617 bp, Homo sapiens; identical to SEQ ID NO: 23130
  chr19:12075748-12076365
  hyper

SEQ ID NO: 30044 - DNA, 644 bp, Homo sapiens; identical to SEQ ID NO: 23132
  chr19:12203028-12203672
  hyper

SEQ ID NO: 30045 - DNA, 1052 bp, Homo sapiens; identical to SEQ ID NO: 24130
  chr19:12995814-12996866
  binary

SEQ ID NO: 30046 - DNA, 889 bp, Homo sapiens
  chr19:1467195-1468084
  binary
cggcctgccccgagcgcggcgggggcgccgggggcgccggcctccactttgcagggcaccggcggcgggaggaggggccggcgcccacgggttctcgccctcgcggcgccgcggaccaggagctggaactgctgcgggagtgcctgggagccgccgtgcctgcccggctgcgcaaggtggcctccgcgctggtgccaggtcgccgcgcactccccgtgcccgtctacatgttggtgcccgccccggccccggcccaggaggacgactcctgcactgactccgcggagggcacgccggtcaacttctctagcgccgcctcgctcagcgacgagacgctgcagggaccccccagggaccagcccgggggaccagcgggcaggcaaagacccaccggccgccccacctctgccagacaggccatggggcaccggcacaaggcgggaggcgccggccgcagcgcggagcagtctcggggcgcgggcaagaacagagcagggctggagctgcccctgggccggcccccgagcgcccccgcagacaaggacggctcaaagcccggccggacccgcggggacggggcgctccagtcgctgtgcctcacgacgcccactgaggaggccgtgtactgcttctacggcaacgactcggacgaggagcccccggcggccgcgcccacgccaacccaccggcgcacatcggccatccctcgcgcttttacgcgggagcgtccgcagggccggaaggaggcccctgccccgtccaaggctgcaccagctgccccgccgcccgcccggacccagcccagcctcattgctgacgagaccccgccctgctactccctgagctcctccgccagctccctcagcgagcccgagccctcggagccgcc

SEQ ID NO: 30047 - DNA, 719 bp, Homo sapiens; identical to SEQ ID NO: 27768
  chr19:17392397-17393116
  binary

SEQ ID NO: 30048 - DNA, 589 bp, Homo sapiens
  chr19:17501186-17501775
  binary
cgttcaggacgtctccagggtctaaagctgagtgtcgcatccagcgtgggggtgcctctatacacgtccccgcagaccccccccccatatgtgtcctccaggccgacgcccccttccggcagggggccgactcaccctcgtgcgcgccgcgccggccgccggcagcccccggagggtccggagcgagagcgcgagcgagggctgggccggggtcgggaccccgagcggggacgcggccggggcactctgcgctgtgggctcatctcggcttccaggacgttactgccgggaagggggaagggggctgtcagcctctggacccctgtccccagacatcgccagccctcatccgccagagcgtccctttgctgggaactccatccccagagatccccatctcccagggtttcccgctccccaggatccggcatccgttctcgacccccagccattcccgggacgcctccctagagactcccagctacatccccagaagctctgtccccctaccaccagcctctccctcgatactcccttttccttgctcccttctcttccgttccccgtccctctcggggctcccaccgac

SEQ ID NO: 30049 - DNA, 1006 bp, Homo sapiens
  chr19:17716524-17717530
  binary
cggtaccagagccccgggatgtggcctcctccatagggacgaggtttcccccatcccagctcaaaatgccccctaggtgctgggggcgtggcctcaagttggggatgtggctccttccttcgtcgcgcccttgggcgtggcctcccgagagggcggggcatcctccattcctaattccccaaaagggaaagctgagtcaagggcgtaggcgcagcccacccttggcgtggagccccccgagccccgcccctggggaggtcccaccaaggcgcaagccccgtccctccccgcccagcgccctccgcgcaggcgcagtgccgctcggccgaccgcccgcgctaaggcgcaggcgcggcaccgccctcctcggcggagcgcgtgtccgacttgagcttcacgaactccttggccacctcgtcgttgctgcgctgcgagaggattcgcagcaccgtgaggcccgtgtcgtccatgtggatgcggcggccgagcggcagccagcaggcggcgctcccgcgctgggccagctcacgcagctgcagcacggccagccccaccgtgcggtcctcgcgcgcgaagcagtagtccttgacgcacacctgcagctcatagcactcgggacccgcgtcggcgctcagcgtgctgcgtggggaggggcggaacgtgagacaggccacacctactgtgatgccccgcccacggccccgtccccaccgcatttgcgggccacgcccacaccggggtgcccacacctgtcacctcccacgctacgctagccccgcccctgccccgttacttgacctacaaccctgtgcttggccgcgcccacagcagctgaccccgagctgggccacgcccacgcctgttcttcccatttttccacccaccgaaaaatgaccgcatagttttacatccagctcccgcccctcagacaccgccctgcaaggccatgctcccaccctgagatacccgcgcctgtgccctctgccggctgaactgctgcccgcac

SEQ ID NO: 30050 - DNA, 618 bp, Homo sapiens; identical to SEQ ID NO: 25345
  chr19:17958343-17958961
  hyper

SEQ ID NO: 30051 - DNA, 677 bp, Homo sapiens
  chr19:18899037-18899714
  hyper
cgtccccgtcggcatccggatcgcaggcgtctccgatgccatcgcggtccacatcctcctgccctgagttgggcacagtcacgcagttgtcctgggggcgggcacagaaggtgtgaggggcgcggtcatgaagtcccgccctccctcctgcccaagcccgccccgctccgcccccacccaccttacggcactggcgctccgggcagcgcagcttctcgtccgggaagccgtctaggtcagtgtcgcgaccacagaggatcccgttgccggcccagccaacggcacactgtgggagagtgtaagtgggtgccctggagtggccgccacccaaccccgcctcaagcccagcccgcccgcactcaccacgcacgaccgcgagccatcgcgctctaggacgcagtctgcatgctcgtggcactcgctgggcgagccgtcggggcagaagcgctgtgcgcgccgctggcagccggacgcctggtcgcccacgaagccgggctggcacgggccgcactggaaggagccctgcgccggagccgccggaggtcagcgcaggccgcccgccgctcgccccacctcccgcgatcctttcttcctccccagcgggccttacccgggtgttgatgcacacggagttggggacgcagttatgttgcccggtctcacactcgttgatgtcc

SEQ ID NO: 30052 - DNA, 571 bp, Homo sapiens; identical to SEQ ID NO: 25352
  chr19:19729161-19729732
  binary

SEQ ID NO: 30053 - DNA, 1103 bp, Homo sapiens
  chr19:19738572-19739675
  binary
cgagggggcggtgccgaggcgtggaggtgatcggagtggacagagaggcggccccagaagttagtcggcgggatttgggcgcgagtgcttcccaagcgggcggggcaataggctgttccgggtgggacggaggacactggcggtctccgggacaaagacagcggttggggaagggatggatggccgggcctccaggcgtctccagactggggaaggggtagggggttaagggatcagagggcggcgtcctggccccgcaggcacgtgccgcgcccttcccccgggcccaggcccgcacccgcccgcctcccgtccgtgcaggcctcacctgggcctccagtcacgccgcagacaaggcgggctcgcgggggttcggggcgggctcgaggcccatggcccggcgactgcggcgggagcggtagagcgtccgggtgcgccctgtgcgggttgctgagagggcgcgggaggcggggtctccccggcgccccgcccccaccacctgggggagccctgccccgccccgccacctgggggagccccgcctccacggccgcgtcgggggcggtgtcgcccggaaccgcagcccccctgtttcctccccgcctcgcggcccctcagtcgcccctatttccggcgcgggacccccaccccggtacctgcacacctcatgcgcccgcagtttcgagcctgcggggctgagtcactcggcgacccgaaaattcccgccgtgaccccgcgctgcccgggcggagctccaggtggtcttgggtccgcgcccccgctccggacccccaaccctcccagccccaccccgctctcttcttcgtgtccaatcggccgccgagttacaagccactccctgatccgacttggctcccaccgcccggacccccgcccagcttcggctttgccagctcgcagtatcagcgagccgcggcctcctgtgcgaggcccacctctgcggccccagctgatcatcgggcgcacgctagggttttgcaatcccgcccccgtacccctcaccctgggacagcgctgccccctgcaaagcccggccctgccctgccctgccctgtggcttcctccctcggcctccctgcggc

SEQ ID NO: 30054 - DNA, 776 bp, Homo sapiens; identical to SEQ ID NO: 22827
  chr19:19843315-19844091
  binary

SEQ ID NO: 30055 - DNA, 291 bp, Homo sapiens; identical to SEQ ID NO: 23137
  chr19:20011910-20012201
  hyper

SEQ ID NO: 30056 - DNA, 630 bp, Homo sapiens; identical to SEQ ID NO: 26596
  chr19:22034394-22035024
  hyper

SEQ ID NO: 30057 - DNA, 196 bp, Homo sapiens; identical to SEQ ID NO: 12497
  chr19:22799568-22799764
  hypo

SEQ ID NO: 30058 - DNA, 930 bp, Homo sapiens
  chr19:2289696-2290626
  binary
cgggttggtagacgggagcccatccccccatccttgcagcccgcacccccaccccccagctcagccaccatagcagggacaggaagacgggttgaaatctttagaaaacgcttgagaaactgcaaaaaagacgcatgctgatgaaaaacagtcctgcggttgggcgtctacaaaaaaaggggaagttctgcctggggagcgccgtgcagccgtccccttcccctccgggaaatgcataggtggacacgcgagcggccggcccgcgggggaggggaggggagggtccgccctggggacccctcagatcatcttcatgttgaacttgcgcgcgcctccctggcccgccgcggcggccggcccatccaccttgcggaaggagtactccaccgagaagttgtttttgtgctgcccgcggccgcggctccacacgaacagcagcacgaagcagaagaggaccacgcccaggaaggtgatgcagcccatggcggtggacaccaggatggtggtgaggtcgagcggcgcgcgcagggccgccagcgtctcgttgtgggcctcgcccggggtccggttggcggccggctcggggcgcacggtcagcgtggcgaagtaggtgtcgttgccgcccgcgttgctggccacgcacgtgtaggtgccgctgtcctgcggccgcgcgtcctggatctccagcgtccccccggggagcacgcgcgcccggcccgcgctggtggccgtcaccggccggtgctggggggtcacccaggccacggtgggcgccggctcgccctcggcgcggcagaggaagcggacgtcttcgcccgcggtggccgtgacgcgctgcagccgccgctcccggatcttgggtttgcggcacacgaagtactcgaacagcacggagtccggcaggtttcgcagcgcgtcgccgcgcacctc

SEQ ID NO: 30059 - DNA, 522 bp, Homo sapiens
  chr19:267137-267659
  hyper
cgcgccgtcccgatggcgccgctcgcgttgctcctttctcggcgccaggatctctccccaggaaccagcgcagatccggaggccacgctgcgctgcgctgcgctgcgctgcgctgtcaggacgcgcagttcccgccccgctgaagggacaccgttttacaacacgccgcgtagaccgtgacagggaagtaaggcccacggcagcgctccctcctcagcactcgcggccgcggacaggacgccttttcctcctcctctcacctggtgaccgggtgtcccgaaccgcggccgctcccgggcgggtcctgaagagaccgtggctccgtcttcccggtcgacgccccggggcgacgagtgcggatccgccgcggttcccgcgcgtgctccaggttgggcgggagccgggcgccccctcgcggcagtcctggggagtctctgaaaatcagcgttcggatgactgcaggccgtgatttcggaaatgtcaactgaaatcgaggccaccatcccgtgccttgatcggaac

SEQ ID NO: 30060 - DNA, 296 bp, Homo sapiens; identical to SEQ ID NO: 12499
  chr19:30936361-30936657
  hypo

SEQ ID NO: 30061 - DNA, 1142 bp, Homo sapiens
  chr19:31767664-31768806
  hypo
cggtggacagtttggataagtcccgtagccggaagcctaagtgtgactctaggtgactgatgtacgtggaaggagtcctgatttgggacgcacaatcgttacaaaagaagacggggtggccagtgtccaagtttttgaggaactttgttccacctgtccttcgaagctggtatttcacgttggccagccagtggctgatggtggtcatggacagcccggtgaacctggagatatgcatccgctcctgggggctcaggtctgacatgatgtacttcccttctgaggtctgccggaggctggcggcaaactgggcctggaggatcaggaggtgctgggggttccagtttgactggcggcccttcctcttctgggcgggcgtcgactcctcagcctcctccagagtggccccgtcaatgtcagacttctcggagatgctggaaggagtggaggattttgacgtgtggctctctgtcaagttcttcagcatatcggatatatctgacaaggcattctcgcgtagcggcgagtttgacatgaatgatacgacggcagatgtctttgccgttgtcaccgtggatgaggaggttgccggggctgtggacgtgggtgacagaagcactgaacccaaggagcagcctttgtcactcttcccttttgtcaagtctatgggctggtcgttgttgacgtggtagaaatagcggtcgaggtggtctgccttcttggactgcaggggcggcggggtggccacagcagccttctccgccaggctgttgctcatcttgaaaagcatgctcatggggtccagggcaggcagggagggcttggcggccttgcccaggtgaatgttcatgactgactgcagggcgctcaaagggttaacaaaaggctgttcaggcgggtggtcggtgatgatggccgtgctgccactcaaactgctggctaggggcttcaccagctccttgccattctccaccggctcagcgagggggctcccatccttgcacccatcccgcggggggctggggctgttctcctggctgcggaagcccccatcgctggatgcctccatcttgatgggttccccgacttcgctgctacatggggagggagtggcccgcttgggcggggaaagcttcccatcc

SEQ ID NO: 30062 - DNA, 760 bp, Homo sapiens
  chr19:31769887-31770647
  hypo
cgtcttccttcccttccatttccagcaaggagcgtttgcgaggcttggaccagcgcttggggttgttgttatcggtctcatggttgtcgtcgcggtaatgccccgtctcgttcatgtgcaccgtcaactccaccagggtgtcgtaggcagcgctgcagtccttacagcggaacttgctggcccccgtgaagatggagccatagagcttgctgctctgccggtacagctgcacggtgctgaagaggctgggctccgggagcatgcggctctgtgacacctgctgcagcgtcttagccatggcgctctggtgccagtcgaagctcccgctgccacagctgctgctgctgctactgctgctgctgctgctgccgttgttcttctccgaggagggctggtgcaggttgaggttgaggttggaccagtaggagttggagaggaagttgttgtacacggccttcatctgctccaggctatccgacacagtcgtgtcttccagtgggaccgtgacctccttggtctcctcttcgttcttgatggagccgctttcaaagtcagccattcggtcactggtctcactgatgtgtgactcgctgtccatttcatggcaggaaaactcggcggccggggagttctggtagctggggcaggccctggcgagctccttctccgggcacatgtacttggccgagggctctccatctgccgtatgctcctctgggtctaaaccttcgtccaccagggcagcagcctttaactcttc

SEQ ID NO: 30063 - DNA, 931 bp, Homo sapiens
  chr19:31839508-31840439
  binary
cgccagcatctaacatggacttgacagtcatctgacaatacccagaccctgtgcgctccgggttccaccgctgtgcccagtttgggcccaagaaatgaggaatcaatcgtgttagtactaaggtggccgaggggaccggctcgctcactcgttcgcgctccctggctcggcggacaccaggcagtcccccggcggtcggccgctcggaggacgcggaagatgtcccggggaactcaggtgaccccgcccgccacccacagaaagagccaggccggggttgcttcccattccctctgcagccggagagctgaggaggtagggacctggcgcggctcagcgcgctccgcgagcggctccccaaatgggtgcgagagggaagagggcagagcgcggcggggcgtccggggggcgcccggtacccgaggcgggcgcacgcacccaaacaggagagcggcgcccggagttactcagtgcgggcagaagagcggggcgaggagcggggtcgcgcccgctggaggcgcggggcgagcggaggaagaggaggaggagagcagaaggaaggggaagcggctcgtacctgctgcgcgccggggcgcctgctgcttcctcctcggcatgatgcttctccggcgactgccactgccgccgccgccgccgctgccgggctgaggacagggagggagggggcggcgggcccgcgggggggcgaggcgggcctgctctcagcctcccccccggagagcggccgcccgcaggatgctgctgcgcccaggctctccgcgtcccccccgcgccgcgctccgccgcgaaccccgaacgtgcggagggaagaaggagggcgggcgagggaggctcggggagggaggagcacgggggggaggaggaggcagaggaggaggaggtggaggaggaggaggaggaccgcgctgcc

SEQ ID NO: 30064 - DNA, 932 bp, Homo sapiens
  chr19:31841941-31842873
  hyper
cgagggcgggcgccccgcgctccagcaccggctgcctgagcgctcctggagcagcaaaccccagacttcttcctccttctctccttccttccttccccctccccttatctttttctttttttagtctctttctccctctttttctgccctgtgtcctttttattttttctctacgactgtttttgcaagtttgtttcaaaagttcacagcatgctttcttttcttttagaccgggagacagtgatctcacccacacggtaagatcaaaagtctccgctcgcccagcctgcgggcttgggctgggtccagacgtctcccaggatgcagatgcgccgccgctggcctccccggctataaagccgcctccagcgcctttccgcgcgcaggagcgctcggagttgtggggtacggaccccaggcggggcagggagtccgaggcgggctgcggcggggctctcgggctggcggactcgggggctgaggcgccgtgcgcgttgggtgcccgcggccgcagaggccagaaccgctactcctccaggccggggagacgcggccgtggagcgtgaaacgcttcttgcaagcgaggaaacggtgagttggccgacaccgccggcggcctcaccattctggtggccgcgctgagctcctgtcgcctggaggcgggttgcgccgcacggggtcagctcccgccggctcccagctcaccttcgaagctcccacttaggcgcgcccggtgcggcgtgtgcacagcgcggggcgccgcacacggaagcgtgtagttctccctggtcgcgcttttctcctcctttccatcccctcgctgttcttgcaaacctctgttccttcggccccctcccactgcgggccgcggcctgaactcgggtctccgcgtagccggccgccgccgctgggtcgctgcctggccctccccc

SEQ ID NO: 30065 - DNA, 237 bp, Homo sapiens
  chr19:36478129-36478366
  binary
cgttcgcgctgagctgcgcgctacctggccacatgcgcgggtgacagccctgccgggagcgctgagtatgcggccagggcttcccgctgagcggcgcctctgagtgcccgcagccgaatgcggctgcttccttgcaggcggacacccaccgctgggcaccgtctggtaccctgcccctgcggcccccgcccccgcgctccgcccctgtgctctcccttgctggcccgcaccattccc

SEQ ID NO: 30066 - DNA, 1161 bp, Homo sapiens
  chr19:3785511-3786672
  binary
cgaccgctagtggctgggaagtgggcggtgctggggggtgagtctcggcccctccaagatgcgcctcccatgaaatcctccagtcccacgtgtactcacacgcatacggatgcatgcacacgcacagaaacacacagggctcggacacagctgcgcgcagacaagcaaaggaccacgtccacgtggaaacaggtgtgcgcacacgtccccgcgcatccgcgcgcacaagcgctccacacctgggaacgtgcgcacctgtcccccgcccccggcacacacacagccgccccacactggaacacctgggcgccagcgccgggccactcgggcacgcagggcgctacgcagggccgcgcacacgcttttcggccacacgcgcacagccctccacgtggacgcgcgggtacacacgcccggggctcgtagccgcgcacacccgcacccaggaaaccccagccaccaccacgcggggtccgatcgcctctgagcaccctccgccccagccgcgcacccgctgcgcgcccgggacgcgcacactcgcgcacacaccggcccttcctgcgcacgtcccgggcccacccccgcctagagccctcggggtttccccccaccccggcctcggggtctctccacgtctccccgccgacgtgctcacctgctcagggggcgcccccgagccgcgccccgcgcccgcccccaggagggcctccgcgagccggctgcacaccccgaggcggtcccggctgcacaacttggagcgagttgctccgtttcctcattttgggggcgaagaagggtcggggagtgggggaaagcgggaggcgccgcggcctgggaggcccccgcgggtcctagcgccggccgcactgcggtctcctccgcgcgccgccgccgccgccggcccctccccgccccgcctccgcggcccccggcgcctcccgcgcgccccgggcggggtcccggggcgcacgcgggctccacgcctggccctgacctggccctgtcgggcgtgcaccccccacccaccctgggaagcggggttcttggagcgtggaacgggcgccgccagtgcgcgcggcggggaccgggggtgagggagagtgagctgcccgtccggggagataagcaaggcgccaagcccggactcccagaggacacttc

SEQ ID NO: 30067 - DNA, 717 bp, Homo sapiens
  chr19:38042137-38042854
  hyper
cgggccgcagccagcacggcctccaccgttttcctatgggccctgagagccctgacgttgcggcagcgccagccgggcacgcgaatgcgcatgcgccaggcgcgcgtcaccaggcgcgacggctgagccggggctcgcgtcacagtgacagccaccgttgcctggggacgggccctagcggcttggcggagctggagccctccctggcagtgcgtcggcgctgggctatggccccctcctctccgggggatcgtcgccttggtcccccgaccctaggagtcgggcagggcagaaccaggctaaagaaacgtccagcgtagcttcaaggatgcaccgcgtgatccctatcggatctccccgacgcgtcaggcctgcctagacggtgctgggagcgcgtctccttgaacgttgtcccgcctgggattgcgaggtaggtaccgcctgcctgtgtgtaccggggctgctgtctccggggaggggcttctggcggacaggagaaccaagcagcctcaggagctgcctgggtgtgtgtgtttctgtgcgagtgttgcatatctctgtgtgtgtttctgtgcaagtgttgcatgtctgtgtgtgtggggggggtggtgtctggtgaaaagaatgtgtctcgtgcggtggagcgccgtttctctgtagtccgcgggctctcttatgcgccctcttgtggtcccaagtgtgcttttcttgtttttc

SEQ ID NO: 30068 - DNA, 740 bp, Homo sapiens; identical to SEQ ID NO: 22835
  chr19:38182720-38183460
  binary

SEQ ID NO: 30069 - DNA, 792 bp, Homo sapiens; identical to SEQ ID NO: 26640
  chr19:38719834-38720626
  binary

SEQ ID NO: 30070 - DNA, 636 bp, Homo sapiens
  chr19:38754883-38755519
  binary
cgcgtgtctgccgccccctcctcccaccctgaggccagtcctagagcgaaggccctcctccgacgtcgtcaccaagcccaagggaagggtggcaggtgctcagcgggcagacgccccgccccgccccgccaggttctgttgggggcgaggcccgcgcaagccccgcctcttccccggcaccaggggcgggcccaggtgcgcccagggccggggagcggccgcgcaggtgcctgccctttgcgcctgcgcccagctcgccctgcctagccaggtgcgccccgccccctgcctgcccggccaccttcgggagccgcttccaataggcgttcgccattggctctggcgacctccgcgcgttgggaggtgtagcgcggctctgaacgcgctgagggccgttgagtgtcgcaggcggcgagggcgcgagtgaggagcagacccaggcatcgcgcgccgagaaggccgggcgtccccacactgaaggtccggaaaggcgacttccgggggctttggcacctggcggaccctcccggagcgtcggcacctgaacgcgaggcgctccattgcgcgtgcgcgttgaggggcttcccgcacctgatcgcgagaccccaacggctggtggcgtcgcctgcgcgtctc

SEQ ID NO: 30071 - DNA, 698 bp, Homo sapiens
  chr19:38852786-38853484
  binary
cgcttgcctggaggctctcgccccgctgcccaatcccttcacggtgccgggcgatccctgcagccgtacgcggacccggtgcacgaccccacctggcgctggtgggcgaacaacaaacaagaccaggtaggcggagcggattgggagccgggaaaggggcggcgcccggacacccctcaccgtgccccacccccggcgctgactctgccccgcgcatccggtaccccaggattactacttcttcttggcgagcaattggcgaagcgcgggcggcgtgtccatagaaatggacagctacgaaaagatctacaacctcgagtccgcgtacgagctgccggagcgcattttcctggacaagggcactgagtacagcttcgccatcttcctgtcggcgcagggccactcgttccggacgcagtcagaactcggtctgcgcgggaccagagtggagcccgaagggcggggcgagggctaccagaatctgggagcctggggggcggggacaccatcggaggggcggggcctgtctgtgagggaggccttaaccccgtttactgcccggagcaggcaccgccttccagctgcatagccaggtggacgtgggcgtggtgctggccgaccccggctgcatcgaggcctcggtgaagcaggaggtcctgattaatcgcaactcggtgctattttcggtgaggcccccc

SEQ ID NO: 30072 - DNA, 351 bp, Homo sapiens; identical to SEQ ID NO: 27792
  chr19:3966587-3966938
  hypo

SEQ ID NO: 30073 - DNA, 441 bp, Homo sapiens; identical to SEQ ID NO: 22838
  chr19:42028298-42028739
  binary

SEQ ID NO: 30074 - DNA, 793 bp, Homo sapiens
  chr19:42927599-42928392
  binary
cgaccgtggctccttgagccctctttggcattcttcgaggccggggccatagcggcctcggcgggctccgttcccccggccaactccatcaattccccgcggtcctcccgcgggggccaattccagccgcgaggccctgcccggagggccaatcctcgctacacactactgtcgggcccccctattacccaatcccgagcttgctcttctctgggtccagctccctaaccaattctggtctccctccgctgccgtgctccgcccccaaccgccagaatttaagatctggctccgccccctaccgcgcattaaagggctcgcggccaacaaaaaggcaaccccgggggtggcgaaaagcgtccttcgggcaggactagtgcggagccccgcggggagcaccccagcagggaagtcccgatcttcccacgtgctgggaagcctcccatgtgctggctcagtctcgccatcccactcaccttcccagggagggatgccctagcacgcggcccggcccgccttttgaagggggaaagtggggcgcctctgagcctctgcctggggtgggggcgggccaggtcctctgccaactcaaagacgaggcggggcgccagcgctggaggcgtggctgtgcctgagagccgttggaggagggagccccgctttccctctcctgtctcctagttctcctattgcgcttttcctgggggatctttctccctctgtctccgccccctaatccatgctcccgataatgagggtgggggatggtggtaggagaacgctcggcgcctgc

SEQ ID NO: 30075 - DNA, 288 bp, Homo sapiens
  chr19:4304429-4304717
  binary
cggcagggccaggggtcgagccccttgtcttctcatccaaggctctctccagctcacatatcaccaccaacaccgcccagtgagccccaggcgctggatgtgagggctctgggcgaggccagcgcggaactacatttcccaggcggccgcggcgggtgcgcctgcgcaatgcgcgcggtgatggagcgctaaccgggggcgcggcggcggcgagggctcggcgggccattggctaccggccgcggcaaaggcagcttggggacccagcgtgcgcggggcccgcgggcc

SEQ ID NO: 30076 - DNA, 867 bp, Homo sapiens
  chr19:44222791-44223658
  hypo
cgcacagcctttgagtcgggtgacctcccccaggccgcctctcacctccaggagctgctggcctccacggaaagcatccgcctggaggtgggcgtcacgggcgagtcgggcgcgggcaagtcctccctcatcaatgccctgcgtggcctggaggccgaggaccctggcgcggctctcacgggcgtcatggagaccacgatgcaaccgtcgccctatccacacccacagttccctgacgtgaccctctgggacctgccaggagccggctctccaggctgcccggctgacaagtacctaaagcaggtagacttcagccgctatgacttcttcctgctggtctccccccgccgctgcggggccgtcgagacccgcctggccgctgagatcctgtgccagggcaagaagttctactttgtgcgcaccaaggtggacgaggacctggcggccacgcgcacccagcggccgtcgggcttcagagaggccgctgtcctgcaggagatccgagaccactgtgccgagcggctgcgggaggccggcgtggctgaccctcgcatcttcctggtgtccaacctctcgccggcccgctacgactttcccacgctggtgtccacctgggagcacgacctgccctcccaccggcgccacgctggcctgctgtcgctccccgacatctcgctggaggccttgcagaagaagaaggccatgcttcaagagcaagtcctcaagaccgccctggtgttgggcgtcatccaggccctgccggtcccagggctggcggccgcctacgatgatgcgttgctcatccactcactgcgtggctaccaccgcagctttggtctggacgacgactcgctggccaagctggcc

SEQ ID NO: 30077 - DNA, 225 bp, Homo sapiens; identical to SEQ ID NO: 12521
  chr19:44273529-44273754
  hypo

SEQ ID NO: 30078 - DNA, 1283 bp, Homo sapiens; identical to SEQ ID NO: 27799
  chr19:45655296-45656579
  hyper

SEQ ID NO: 30079 - DNA, 951 bp, Homo sapiens; identical to SEQ ID NO: 24174
  chr19:46001734-46002685
  binary

SEQ ID NO: 30080 - DNA, 836 bp, Homo sapiens; identical to SEQ ID NO: 24175
  chr19:46519167-46520003
  binary

SEQ ID NO: 30081 - DNA, 203 bp, Homo sapiens; identical to SEQ ID NO: 12526
  chr19:47137324-47137527
  hyper

SEQ ID NO: 30082 - DNA, 654 bp, Homo sapiens
  chr19:47776511-47777165
  hyper
cgaactggatgagagacgtggctagacgggggaggggtgctgggccgggggggaggtgggaagactgctcccctccgctgactcagccccttctctcctcagaggcaggccccgaaggccaggagacggcggagatcaccgacttccagagggtgcgtttctgcaaggtggtggcggcccctccgctgccgggggccgctcgctgaccgcgcccgccggaccgcggcctccgcgctctgcactaacctcccaccgcctcgctcctctgtcctctgcttctgccacactccagccaggagagggttaaatctaaggggggaggagccagggtctgcgagccgggcggggccagggcagtagtcgggtgcaggccccaccaacgggggacgtcacggcactgggacggctgggacgcttccgcgttagtctcccatggaggccctgggcggctcgagccagtcttcaggccgaatctcccgcctccaggattgcatccgaggcctggcagccggtgacacttccgaagggcttgaattactcgggcgccagccctgtcgtattaaacgcagtgcttccgctcacccttgaactgtgtttctggagggggcaggctgggtcgctgtgcttggcgggcttttctgtggcggaagaggc

SEQ ID NO: 30083 - DNA, 632 bp, Homo sapiens
  chr19:48901504-48902136
  binary
cggcgcctgtccctcgctgcatctcctcctctgtgcgtctctttatctcgtctccctgtccctgcgtctcccgtctgtgcctccctctcctccccgtctctcccggcccgggcgctcagaggccgcccggcggggcccgcaggcgatgcgcggcgccggtggcccccgcggccctcggggccccgctaagatgctgctgctgctggcgctggcctgcgccagcccgttcccggaggaggcgccggggccgggcggggccggtgggcccggcggcggcctcggcggggcgcggccgctcaacgtggcgctcgtgttctcggggcccgcgtacgcggccgaggcggcacgcctgggcccggccgtggcggcggcggtgcgcagcccgggcctagacgtgcggcccgtggcgctggtgctcaacggctcggacccgcgcagcctcgtgctgcagctctgcgacctgctgtcggggttgcgcgtgcacggcgtggtcttcgaagacgactcgcgcgcgcccgccgtcgcgcccatcctcgacttcctgtcggcgcagacctcgctgcccatcgtggccgtgcacggcggcgccgcgctcgtgctcacgcccaaggtgcgcgcgaccggggcggggc

SEQ ID NO: 30084 - DNA, 702 bp, Homo sapiens
  chr19:50393295-50393997
  hyper
cgcccaacgcttgacgacgccggtgccgtcccagagctggcgcacgacaggcccgtgcaatgccgccacgtcgtcgagcgccaagcgcaacgcctcttcccggctcaagccggcgaacgctgccgccgcgtccgaccacgtgtacgaggccagcagcagcgcgccctcgcgcggcggcgggtagaaaatcatgcgcgacgggcgatcggtgtttgagtggccgccttcaatgtgctcctcgcgccagaagggcctgcggaagcttaggaacaccttggtggccggcacgtagtgcagcctccgcagcgcctcctgcatgtggcggggcagcggcggcgagaaggtgatgcgcttcaccgccggtccgctcgccgtcagcagcaccacgtcggccttcagcaccttcagattccgcgccgggggagaggtctcgatctgcacgtgcacatcgtgcggtccctgggtcatcgccaccacgggcgcgttcaacagcacaagcccggacagcgagctcagcagcgcgcgcggcagcaggtcccagccacccacgatgcggctgtacctgcaggcggggcggggcggggtgggggcgtgacctgggctctgcggccctgcccctctgccttgccccacccaccccggcagctggcccttatgggcaccggcccgctcccccgtcatccacctctcccgaccccgccc

SEQ ID NO: 30085 - DNA, 712 bp, Homo sapiens; identical to SEQ ID NO: 22840
  chr19:50553779-50554491
  binary

SEQ ID NO: 30086 - DNA, 603 bp, Homo sapiens; identical to SEQ ID NO: 25409
  chr19:50833813-50834416
  binary

SEQ ID NO: 30087 - DNA, 1265 bp, Homo sapiens
  chr19:51227617-51228882
  binary
cgctgcatctccaggctccccctccagcatgatccctgtctgtccgcagtgggccgcctggccggcctggacgcaggcctgcaccagctgcacgtccgtctgcacgcgttggacacccgcgtggtcgagctgacccaggggctgcggcagctgcggaacgcggcaggcgacacccgcgatgccgtgcaagccctgcaggaggcgcagggtcgcgccgagcgcgagcacggccgcttggagggtgagtccgcggcgcgcggggtggaaaaaaatgagactatctgggccaggaatgggactggttgagaaggtgaccctaggtgtccggggcgggagagttcgggagagctgctgtgtgctagcggacggggttagagagctgggaggctgaatgcagggagcgggtgggcactccagacccgcgcggacccgactggggcagcaccacgccccctacagtccagctcccaccgcctggccccgcccctggcggaccagactctccacctcctggctcccgcggttctgaccacgcctcctcccagccctccccatgagttcctggccccgcctccctccacccccggatgttttgtcctcgcccccttccagactctgaatgcatgaccccgcctccttctctacccggccccgcccacaggctgcctgaaggggctgcgcctgggccacaagtgcttcctgctctcgcgcgacttcgaagctcaggcggcggcgcaggcgcggtgcacggcgcggggcgggagcctggcgcagccggcagaccgccagcagatggaggcgctcactcggtacctgcgcgcggcgctcgctccctacaactggcccgtgtggctgggcgtgcacgatcggcgcgccgagggcctctacctcttcgaaaacggccagcgcgtgtccttcttcgcctggcatcgctcaccccgccccgagctcggcgcccagcccagcgcctcgccgcatccgctcagcccggaccagcccaacggtggcacgctcgagaactgcgtggcgcaggcctctgacgacggctcctggtgggaccacgactgccagcggcgtctctactacgtctgcgagttccccttctagcggggccggtaccccgcctccctgcccatcccaccacccggcctttccctgcgccgtgcccaccctcctccggaatctcccttcccttcctggccacgaatggcagcgtcctccccgacccccagtctgggcgcttctgggagggctcttgcggtgcc

SEQ ID NO: 30088 - DNA, 261 bp, Homo sapiens
  chr19:52058107-52058368
  hypo
cgacatcagtgaaggcctctctgggcaacttccggttcacattggcgtccaggcgtgatttcttcagcatgtccattgacgcgcatgttcaatatcacttttggagctatgctctgcagatagttatcatggtgtaacgcggtggagggcgtgtccgttatttccattgtaaacttttcttcagcggctttgtcaggagaacaacatggtcgtgcccagatagagttggtcactggaggacgccatcttcaaaagatggtc

SEQ ID NO: 30089 - DNA, 566 bp, Homo sapiens; identical to SEQ ID NO: 12534
  chr19:52342906-52343472
  hypo

SEQ ID NO: 30090 - DNA, 675 bp, Homo sapiens; identical to SEQ ID NO: 23162
  chr19:52839404-52840079
  hyper

SEQ ID NO: 30091 - DNA, 892 bp, Homo sapiens; identical to SEQ ID NO: 23165
  chr19:53140914-53141806
  hyper

SEQ ID NO: 30092 - DNA, 854 bp, Homo sapiens
  chr19:53193139-53193993
  hyper
cgggcacctccccaacgcgggctcaggagaagcggtgactgcggaggagagacctggggagcagcagggcccggcacgaggagggaggtggggggcgacggcgcctgaggacaagggtggggtctgcaggatcccaggactaggcagaggacacggcctccccgggacaggggccgcggcgctgcgcttcagaggccgacaagggcaaggctgggaggtgcccacggcgggaatccacttcgcgggtgaggacgttaaaaagcgcggggcgggaggagtctgaaaatgattttgagaaaaaaaaaaaaaaaacaacaacaactacgcgataggaagtgtatacattgccctagagcagaaagacaggggatgggaccaacctcagggcgactttagacccaaaaggaagcgacttccagactctcacggggatgtctctatttgctctgggtgaagacgggagagaagttccagatctgtggggaccctaggtccgagggacagaaacgctgaggacctgggaaatgcagacttaatacaaaacagcgaaactcaccgccgcggtgtgaccgtcactccacgcgatccgcttccagatttgcgagaatctgcgcgcgcaggacagaagccaggcctcggcgggccccgcgaggtggtgggcggggcctgggccgggtggcggcggggcgcgaagcagagagactttgcggtttagaaccggcagagggcggggccggggcgggacctgtgtgtctcacatcctggctcccagcgcctctgtttttcgggtttgggaggcgacagcggccaggaagtatgaggcatgattcaaaagccctggaattttctggaac

SEQ ID NO: 30093 - DNA, 143 bp, Homo sapiens; identical to SEQ ID NO: 12537
  chr19:53806012-53806155
  hypo

SEQ ID NO: 30094 - DNA, 422 bp, Homo sapiens
  chr19:54109766-54110188
  hypo
cggcaaggggttctcgggacatatcaggtagtaggggcactatgagggtgagcgccgctgagacaccaaaataggccaagaagcagatgaagatcgaggtcacagtgcccaaggggatggagcggtgagggtggaggcggtgagggtggagggcttcttctcctgcgggacaggtatatgcaccgggcggtgagggtggagggcttcttctcctgcgggacaggtatatgcaccgggcggtgagggtggagggcttcttctcctgcaggacaggtatacgcactgggccaggaaaatgcacggaagtgaaggtacaaaaccctcttccctcttccccatctgagaacagggtagcctttaatgaaacctgtgcccagcggcagcccaaacagtgcccaaacccccgatgagacagaatgacc

SEQ ID NO: 30095 - DNA, 809 bp, Homo sapiens; identical to SEQ ID NO: 24190
  chr19:55690531-55691340
  hyper

SEQ ID NO: 30096 - DNA, 778 bp, Homo sapiens
  chr19:56538418-56539196
  hypo
cggtggggcttccggcctcgcacggtggttctgcacggaaagtcaggaattgggaaatcggctctagccagaaggatcgtgctgtgctgggcgcaaggtggactctaccagggaatgttctcctacgtcttcttcctccccgttagagagatgcagcggaagaaggagagcagtgtcacagagttcatctccagggagtggccagactcccaggctccggtgacggagatcatgtcccgaccagaaaggctgttgttcatcattgacggtttcgatgacctgggctctgtcctcaacaatgacacaaagctctgcaaagactgggctgagaagcagcctccgttcaccctcatacgcagtctgctgaggaaggtcctgctccctgagtccttcctgatcgtcaccgtcagagacgtgggcacagagaagctcaagtcagaggtcgtgtctccccgttacctgttagttagaggaatctccggggaacaaagaatccacttgctccttgagcgcgggattggtgagcatcagaagacacaagggttgcgtgcgatcatgaacaaccgtgagctgctcgaccagtgccaggtgcccgccgtgggctctctcatctgcgtggccctgcagctgcaggacgtggtgggggagagcgtcgcccccttcaaccaaacgctcacaggcctgcacgccgcttttgtgtttcatcagctcacccctcgaggcgtggtccggcgctgtctcaatctggaggaaagagttgtcctgaagcgcttctgcc

SEQ ID NO: 30097 - DNA, 706 bp, Homo sapiens; identical to SEQ ID NO: 22850
  chr19:58038572-58039278
  binary

SEQ ID NO: 30098 - DNA, 781 bp, Homo sapiens
  chr19:58545115-58545896
  hyper
cggttgcgtgtctggaatgccgtcgttttgccccgcggccccatcgtacatgcgcatccccgcagccgccaccgtctccactttccgcagcagcgtccctgacgctgcgcgacccgttgccaaggcgactggaaccgcggcccgaggtaactggagggcacggcgggggcggggcgctcatcccaggcggcttctgattggcctcggccgcctcgtgcgtcacagccccgcccctgcccgggagtcccgcagcggtgacttgtcaccgacgcccggcgtgatccagcggaccaatggcggccgcccgcggcgcgcagggtgcggggatggggtccgcccgcggcgttgggcgcgctcgccagcccaggggtcgccatgaccgagtggcccaggcccgagcgaagcccgcgcgcggtgagtccgccgcggcccatccgtccctccgcccgccagagcgtccatcgggacgcccacccgggagggtctcggcgccgcgtcggcgggagctggcccgggatcgcggtccaggggcgcgcgtcgggggaggcgggcccgggcccgggagggggcgggccgggccggggttccagagcccatcgggagtcctgaggtcgccgtaggggagggaaggggaaggctagaggccacgcggggcggggactgggggggctggggccgccccttccgcagggaccccgacccctgttggcatccgcctgtccgtttgaggccgaagcccctctacgtacccccattgcccgcccaaacaccgctcggccgc

SEQ ID NO: 30099 - DNA, 121 bp, Homo sapiens; identical to SEQ ID NO: 12544
  chr19:58556965-58557086
  hypo

SEQ ID NO: 30100 - DNA, 553 bp, Homo sapiens; identical to SEQ ID NO: 25419
  chr19:59049750-59050303
  hyper

SEQ ID NO: 30101 - DNA, 284 bp, Homo sapiens
  chr19:7795528-7795812
  hyper
cgtcagggtcaggacggggtgcatgatcggggtcgggggtcagcactcaggacggggtcggggtcgggggacgcggccagggctcagggccggggtcgcgtcgggccctcaccgcgctcacgcagttcccgcagggcgctctcctgctccatcagcttcgcctgcgcctccccaagctccgcgcgcgtggtctgcagctgcgcctgcgtccccgagcctgggagccgcagggtgagaggggcgagggcggcgaggatggggcgggacttcggagaccagccccc

SEQ ID NO: 30102 - DNA, 424 bp, Homo sapiens
  chr19:8115163-8115587
  binary
cgtgaaggctgccggcgggacaaacagtgaggggtgaggcagggagggagactcacgttggggacctcccccaagtctgggtaacaccgtcttggccgcggcccgcgggttgggaaggtagggggcagtgagccgtagcggagaggctggccccagcccgccacgccgcttccccacgctcgcagccacgcggagccgcgtcctggtccagcctcacccacccagagcaagaggcggaggaactggaacagcgccccggcccgtgggctgccactggccgcagcaacgggacgggtgagagcacctgcccccgacgcgtcttaactgctctggtggggcggggctgaccgtgcaagccccgccccagtctaagcccctcctacaaagcccggccccttaccataagcgccatctgtcaggctcc

SEQ ID NO: 30103 - DNA, 314 bp, Homo sapiens; identical to SEQ ID NO: 24206
  chr19:9129007-9129321
  hypo

SEQ ID NO: 30104 - DNA, 1245 bp, Homo sapiens; identical to SEQ ID NO: 26723
  chr2:105468467-105469712
  binary

SEQ ID NO: 30105 - DNA, 1466 bp, Homo sapiens; identical to SEQ ID NO: 26724
  chr2:105469747-105471213
  binary

SEQ ID NO: 30106 - DNA, 745 bp, Homo sapiens
  chr2:105473224-105473969
  hyper
cgcgctggagagccacttcctcaagtgccccaagccctccgcgcaggagatcaccaacctggccgacagcctgcagctcgagaaggaggtggtgcgggtctggttctgcaatcggcgccaaaaggagaagcgcatgacgccgcccgggatccaacagcagacgcccgacgacgtctactcgcaggtgggcaccgtgagcgccgacacgccgccgcctcaccacgggctgcagacgagcgttcagtgaagccagggcgcagagcgaagagggccgccgccgccgccgcctccgcagccgccgtcagcaccgccgccgcccctgccgccgccgccgccgccgccgccgccgctgccgccgccgcgccgaccctgcacctgggccgctccgggctccagcccaggcccatccgccgccctcccctccacccagagacaggcatgcccgcccttggaggagaaaacgcgggagaaacggaccaaggaggcatttttgcagtccaaggaaggaggggccaaaaaataaaaagcataataaacacccagactgttttgtatacatatataacaaacaaaaccggaagagaaaaagggggcgatcatgagatctcgttcatactgtggtggtgtttcgtttttgtttttgtttttaaagaagggtgaagatgcctgacgcacgaaaactgcactcgtgaggtttttccaccctgagatgacctacacggcagcggtggacagcacctgcctc

SEQ ID NO: 30107 - DNA, 156 bp, Homo sapiens; identical to SEQ ID NO: 12553
  chr2:108085842-108085998
  hypo

SEQ ID NO: 30108 - DNA, 765 bp, Homo sapiens
  chr2:108160861-108161626
  hypo
cggacgtgaaaccgagtggagatggaaggagacgcggtgcactgagaagcggatgtgaaactgagtggagatggaaggagacctggtgcactgagaggcggatgtgaaactgaggggagatggaaggagacctggcgcactgagaggcggatgtgaaactcaagagagatagaaggagacgtggcgcactgagagccggatgtgaaactgagggaagatggaaggagacctgacgcactgagagccggatgtgaaactgaggggagatggaaggagacgcggcgcactgagagccggatgtgaaactcaggggagatggaaggagacctggtgcactgagaggcggatgtgaaactgaggggagatggaaggagactgggcacactgagagacggatgtgaaactcaggagagatggaaggagacgtggtgcactgagagccggatgtgaaactgagggaagatggaaggggacctggcgcactgagaggcggatgtgaaactcaggagagatggaaggagacgtggcgcactgagagccggatgtgaaactgagtggagatggaaggagactgggcacactgagagacggatgtgaaactcaggagagatggaaggacacatggcgcactgagagccggatgtgaaagtgagtggagatggaggcggggcgcactgagaggcggctgtgaaactcaggagagatggaaggagacgtggcacactgagagccggatgtgaaagtgagtggagatggagacggagc

SEQ ID NO: 30109 - DNA, 639 bp, Homo sapiens
  chr2:111876426-111877065
  hyper
cgggaggacctcccgacggcgcgggagaaggctgtaagggctcttggcccccgacgcggcctgggtctcgggggacgcatgaacccgccacctctggccggcttccttttagtgccccaaatagcagcgcttagcccgttgcttcccccgactcttgtttttcaaagtgttcacagggtcgcgagagcgagcgacgcgggggcggcgaggctgcaaggctgcacaggaacagacgacaagaaatagggctttcttctgcgtggttcttttccggtccctgtctgagtcgcccgaccccgcggggagcgcggagcattgcggcgtgcggcgggcttcgggctctcagcccgcgcagcaagttgtgttgcttttccccgggtgcgacgcgggacggccgcgaagagcaaagttcgtccgcggtaggaacttcgaggcccggttaggaccgatctccggcctccgagtctacttagccgtgtccacgctcgtgccttttccctcttgcagcgaaataactgggcggggcccgacgcgcgtcctccagcgactccgggaacccaaggcctccttcacctcgctcaaaattcacccgaaaatgcgctgagactttggcatggggctgcgctgtgtcccactgac

SEQ ID NO: 30110 - DNA, 1446 bp, Homo sapiens; identical to SEQ ID NO: 23182
  chr2:118981062-118982508
  hyper

SEQ ID NO: 30111 - DNA, 690 bp, Homo sapiens
  chr2:119067626-119068316
  hyper
cggcttagcccgcttaatgatgccacttgtggcactccgaaggcagcggagaagtctataaactacttccattaaaatgcaaatcgggcccgctgagaaaacaagtgacacaaaaagtgggcgccgcgcggccgccgcccgcgatggcgccgatggctgatgccgcgattacgccggcgggggcggcccgcgcgccacgaacgtgcccgacaagccgcgccgcttaatttctgaagagatttatattttttttgttgtcaggaaatgaacaaatacttatcaatgtaaaaactgctatctccgatctccccgccgggtttttcatactgatattctttgcaccccgtaacacaggaaatgaaaatcttctccgcctctcacgtcgccgctgcgccttcaaatcctctgcgagcagactggcctccccccaccggccccctcccgggctcccctccccggtaaacagaaaagaaaacttctgtgggcgaaggagggagaaattccaaggctctggctttccccagccgacttgggtttcggggcagcgcgggctcccttctttccagcgcaggaagaaggggtgagggaggaggggccggggtgctggcactcaacggtaacatctgttttacttaagcagctcgatttcgttttaggatgaaaaagtattccctttcagcatgaggaatc

SEQ ID NO: 30112 - DNA, 759 bp, Homo sapiens
  chr2:122042333-122043092
  hyper
cggcaggtgcgcgccctgcaccctctctgccgcctgggaggagccctcgcagacatagggctctgcgcgctcgcctccccagcgggcccccaactccgcacgtcgggtcccgccggcgtccatctgtcagtccctaggcgggacgctgggcgggtctctcagtccccagagggcggacagcggggaggccagggcccagcaggggcgccccctctccgcccctggacgtccaacggcgcccggcccgccggcccggcccgagacccgcggggaccgcgcgcggcccttaccgcaggtagctgccggagttgtgctggttgtagtgctcgggctgcgtgtgccagaagagcatggctggaactcccagcgcgccgaccggggcgcggcagcaagcgcagacgcggggcgcgccgaggacccagcggcggcttcgcgctccgaacccgcggtgccggccggctcggcgcatttatcggcggcccaggggcgggacagcggtgagacccgccccccaggaagcgcggcccggagggcggctccccgcggcagccgcacctggctgactcccgcgcgtgcctttccggcgagcgagcgcgcctccggggcggccagaccagagggctctagggccggccgggtgctctccccaaactccgatgtggggctcaggtgacccttgccgcccccaacccgctccacacggcccctctggcctctgctccccactctacgcccagggccggtctccagagcggctcc

SEQ ID NO: 30113 - DNA, 321 bp, Homo sapiens
  chr2:127435214-127435535
  hypo
cgggcaacaccccgagagccacactcagtgctgctttgtatgtgttgcctgccgtaatccttcgctagggatgagcacacgagggtccgggaggggtgcttggagttgggacccagagcaccaggacttactgtcaaatctctctggcaccaaaacgcatgctccctatgccacctatcaggatgcacccttaaagcacttttaagatgctttttggaaagagccatttgttggtgtgcatttgtcttcaccactgccccaaacatagctgtccaatattcaggtgaaaatgtcccccatcggccgggtgcagcggctcac

SEQ ID NO: 30114 - DNA, 147 bp, Homo sapiens; identical to SEQ ID NO: 12560
  chr2:1282750-1282897
  hypo

SEQ ID NO: 30115 - DNA, 154 bp, Homo sapiens; identical to SEQ ID NO: 12561
  chr2:130512142-130512296
  hypo

SEQ ID NO: 30116 - DNA, 3442 bp, Homo sapiens; identical to SEQ ID NO: 26740
  chr2:136873862-136877304
  binary

SEQ ID NO: 30117 - DNA, 1005 bp, Homo sapiens; identical to SEQ ID NO: 27848
  chr2:144694306-144695311
  binary

SEQ ID NO: 30118 - DNA, 2271 bp, Homo sapiens
  chr2:145273332-145275603
  binary
cgcacacacacgcgtacacacacacaaaacctagagagagagagagagagagagaaaagcatcatttgtctctaatcaaaattctctcgtctttgtgttttgctccttccagcacctcacactgcgcccccagccgccccctccccgcgccgcgcagctctggggcaggccgggggcgcgcacaattgtcttctctagaggaaagttgctccaagtgggcccgggcggtccccgcgaggcgcgggctggggctgcggaggccgggaggccgggtgggcgctgcgtcccagcgcctgcctcgggagcgtctacgcggccccgcgccgggtgatcgggctgagagcgaggggagcgagaagtttcctttccgagtctgggctggcgctcgttcgcttgtttgttttcgggggttggtttctttctttttaaactcagttatcctccgtcagctcccccacccccccccggcaccctcgctagtccccagccctctcccctcccccaggcgccttccgcgctcttgccaatcacttttctcttttattcccacgattttgtttggggtaatacctagggggtctctctctcactctcttcctctctctctgtttctctctgtccccccgcgtcccttctctggctgtctccaaaacggacctaccaaactctcacccccccctttaatatcccacctctgatctgcgtgtgcccctcgaacccccatctcctttctccttcctccttcctgactcagcctggataacgggctcctccagaccatgtagaaactgccgggaaaagtctcgctgcgccctgcgactccttcagtccccggcctgggggcagagcctgctggagaggagtcatccgtccccgagccatcatcgaccccaccggaccccgcgcggggccggccgactccctcccaccccggggtctgggcgcgatgggccgggccccgctgcccgcggaccgttacttggcgcaccgagaagcggccgggcgactccggcaagaaactttaagcctcgctgaggcgcagacccggttcccctctcctgccttcgcagtctctctgccacccccgcccccgccccgggatcctgcgcgatccagcgcctgggcccccgccctgccccaggcggacgctcccgaagcccggccggagacccggcgggccgggcgcgagcggagcgggaggcggaggcggagggagggcggaggcaggggctcgaggggggcagcggggctgggggcgcggggccccggccggacccccgcgctcggacccccgggtgcctgacgctcactttgcccggcacttccccaacaccccccggtccagccgccgcgcgcgccgggctccggcgccggccgcggagggaggctcgccctagagccctgggcgccgccgccgccgccgcctcggttccttttccctttccccctccttctccctgggtctcgagccgcgtagtggcccggaaaagtttggttcgggctgcttcttaccgtttttcctcctgggattggcttgtttgcgcctcttgcaccgggggccatccgccatgatcggctgcttcattgataagagcggatcagatggcagttcgcatggactcggcgccctgcttcggcagcacgcaggctcgatctagcaaccaaacacagcgacaatgtgggcatcgcccgcgcccattgaaacgcgcgcgggccgcccaggggagccgggccagggccccggcgagcacccatccgcgccccccaacgccaaagcgaaacttcggcggccccctccccgccccccacccccagccttggccccgaggcgctttgtgtttgttactgtttggtgtgttgcacccgcgaggggatcagagagacaagaattacatcttcaaaatgagtcataactcctgaccgtatgagggaatgcacacggcggtacagtaagaccgcttgactcagggctaggcggaccctttccttcgaaaagtcctcagcccccggctcgggaacttggggtgaggcgaggttttcttttcgttctcatcttttctcatccccccaccccccaattcccagaggaaacaaacaaacaaacaacgcgaaacagcccctggatgaagcacactcgggcaaattgataatagtaattataggaagcccactcgcccagcgccccctcccctccccttttggagtttatcgaggcactgtctcttcctccccccaccctcgcccccaaattaagatttcccgttttacgcc

SEQ ID NO: 30119 - DNA, 428 bp, Homo sapiens
  chr2:145277508-145277936
  hyper
cgaagtcttgtttgtagttttggccagaaatggtgagaagaaaaagcatgaagaagccgcgaagtgtgggggagaaaaaggtggaagcgaagaaacagctcccggagcaaactgtacaaaaacctcgccaagagtgtcgggaggcaggaccgttattcctgcagagcaggttagaactgatctctttcggccactccaggaaacacaaacctggggacggactgacgtgttacgcctcttctaatgacatttttttctttttcttttctgtaggagagagacgagagaccctgaaacacgcgccacctatctttgtggggagggataattgaagcgccctgagcgtgagcatcatgtgaaaacgtgatcgccaagtttctctctgggaaaggatctgggatagattataccttgaagtctccgcaaac

SEQ ID NO: 30120 - DNA, 1051 bp, Homo sapiens; identical to SEQ ID NO: 25433
  chr2:145281217-145282268
  binary

SEQ ID NO: 30121 - DNA, 189 bp, Homo sapiens; identical to SEQ ID NO: 12566
  chr2:147344896-147345085
  hypo

SEQ ID NO: 30122 - DNA, 230 bp, Homo sapiens; identical to SEQ ID NO: 12567
  chr2:1488408-1488638
  hypo

SEQ ID NO: 30123 - DNA, 1289 bp, Homo sapiens
  chr2:149632592-149633881
  binary
cggttccggcttgggcagccagaccggacttgcaggctcttggaggtcgcatcctgtccttcccccggcaggtagagtgactacaagtcccgggatgcgcagcgctcggagtcgggcgggggccgggcggacctctacggtgacgtcaccgtcccggggcgggccaggggagggcggggcggaggggcgggtctcaaggcggcagagcgcgctggtgctgatgcaggatggctgagcgcgcaggagcccgggaggtctgagccgggcgaggctcgctccctgcgcatcgcctcctccgcccgccgcgtggtcgcgggcaggtgggccggggggcgctgggcaggggcggggcagggccagggcaggccggtctgcagccggaggggccggagcggagaagctgcccaccttcccgggctcggagcggccggggctgctcagccggccgggctcgcgatgacctgctgagaagcgtcgtcggaggctgcaggaggcggcctagctgtgggcggtgcagctcgcggcctcctccctcgtcgttcccggccccggccccccacccatccccgtgccccctccctaccgccggccgagatggcggatccagccgaatgcagcatcaaagtgatgtgccggttccggcccctcaacgaagcggagatcctccgcggggacaaattcatccccaaatttaaaggcgatgagaccgtggtgatcggggtaagtggctggggcgtctgccttccctgctgctccgcgccgcagctgggcgccccgacgccccagacgcagcggaggtgtttaggccgccccctcggacattcccgcggggctggcctctcgggtggacctgaccagagacccctcgccccgcgcactatggttccctcccgggcgggtggagaggcggccgggagcggcgggccgggcgggggtggcgggggtggggatggggggcgaagacgggctcggcgccgccattgttcgccgggtgggggcccgggtgggcccattgttccccacgctcgcctcgccgcgtgggtagtgtgttcgggtgaccctcaagccgggtgcccaggccccctttaaagtgtgagctctgcaacccgcaaatgcttctgggcatcaatcaattcgatttaccaaacgccttgcctcttcttctcacgaccctagcaaaaaagaaagaaaaaggggtacaggaaaatttctagtcgcgtctcggagctcccgcggcagtgtagacgcggctccccgcggtgttacacctggctccgcgcgcggaaggc

SEQ ID NO: 30124 - DNA, 91 bp, Homo sapiens; identical to SEQ ID NO: 12569
  chr2:1520228-1520319
  hypo

SEQ ID NO: 30125 - DNA, 741 bp, Homo sapiens
  chr2:160760627-160761368
  binary
cgggaatcgtggggaatccttggcgctgtgggtggaggctcctcttggccctgtggccaaggtgaccaagggccgaaggaaaagcgagaacgggagggacgggacgcaagagggcagatggggaaccccatactccagcaacattatataagagaggcgacgatggagcagcgcacccggccaaaaaagcctccgtgcgcctactctacggtgcaccgcgtcccctctgcaccagaagggccctgtcctcccacatccaccgcgccctcctccgggcccccgagggcactggggcgcttcctctgccagacctcccctgcgactcactcttccggctccagagcccccccgccccaacagcaaagcagccgtgacctgccccaggggcgcagccctgccccaggctggaaggcagcagagctgtggcgtcgaggcacccagcggactgcggggctggcgtgcccgcggttacctgcgcggccagagggctccgcgagatcgaagaaccagaagagcagcatgaggagccccgccgggcggcgaggggtcgcccagcctgtcctcatcctgagctggcgcaagccttccggccgggtcctcgggcgcacgcggctcccgccccgcctgctgagcgcggcctgccccgcccgcacctctgtctaggcctctgggggcgccccggccccgcccccgccgccctcggccaatcagacgtgcgtctcctcggccccggggcggagc

SEQ ID NO: 30126 - DNA, 782 bp, Homo sapiens
  chr2:161264043-161264825
  binary
cgctgcgggcggcggcggcgggtgcgggcgcgggcgcgggcgcggggcagcctcgccgcgagggggagggcgcaaggaggtggccggccgggcccggggccgcggcagctctgggaactccctctcgccgcgcggcggcggccggcgggggctgcagctccgcgctgacttcccctccgccttcgacctccgcactcgcctaaaagtacggcgcggcagcgggcgagactcgagcagctcgggcagccgccgccctgcgtgccatggacgggagttcgcgcgcggagctggcggcgtcgccgactctcccggcggcagcggaggagcagcgccgccgcgtccccacctaccgcggcctcaaccaccgccctgagagcgcgccggccgggggcggggaggcggcagcgcaccgcctcgcgccgcgcccaggcccacccgcgcctccccgcccgcccgctgggcgcggcgcctgccgccccatcgcccgcccggcccccgcgctctccctcccgggatcggggccggagccggggccgggcggcccggggagcagccggcgcccccgctctggtgcaatggttgggtctggctccccgcatgccgcacattcctcggagtagccaacccccctcctctgttctttttccccctcggttctttcctaagcaccagcggcagctttgcaccccggctcgaagccccttttaaggtcgtcgcttcggggaccactctggcacctcggtcttccctctcttcttcacctttcgaactaggccccccgc

SEQ ID NO: 30127 - DNA, 238 bp, Homo sapiens; identical to SEQ ID NO: 12572
  chr2:1647077-1647315
  hypo

SEQ ID NO: 30128 - DNA, 237 bp, Homo sapiens; identical to SEQ ID NO: 12573
  chr2:1651995-1652232
  hypo

SEQ ID NO: 30129 - DNA, 211 bp, Homo sapiens; identical to SEQ ID NO: 12574
  chr2:1709564-1709775
  hypo

SEQ ID NO: 30130 - DNA, 1821 bp, Homo sapiens
  chr2:172948905-172950726
  hyper
cgtggggctggcgggatggggaaccaacatccacttacagccagggtggtgtacgccacaccgcgagggactggctgtattggtagtagtggcgatggggtgggggctcttgtgcacttttttgtacctagcaccccagaagacagaaggagcagcggcagatcttgcctccactagccctgccccctaggcctggtggcgcgcgctttggccactggaggtgaggaagatcctgggtggcaacgagagacgtctacacatagataagggagcctaccacaggcctgggtttgctgcgggtttcggtgtcccccagggactcctaaactctggaagtcgcgctagacctcaggaggccggaaaatgaccacctggcgtcggtggctccagcagatctgagcccctaggccccctgggctccacgctgagccgcgctctcggggcgagtgagcccggggctctccgcgcatggggagtggagaagggagggggaggaggaggaaggctgggagggaaagaggatgtgtgtgttgggggagggggcggtgcagccgcctttcctgggaggagaagcgcgggttcctggctctccacgcgcactgctttaatcagacccgtgcagcctcgagctggagtggccagctgggcctggagcaatgcgagcgggccccagggagcgacagcggcgttggcgcagcggccgagtgagtgagttcgcagggagggcccctaagccccgactccagggatgcggcagagcgtaccggggaggcgcggccggataggcgctgcgctaggcacaaggctcttaggagaacctctgtctgttggccgcctcgggcgcccccagtgcgcgactccgcgctccagaggcagaggtcagtctcctcctgagccgccctagctctgcgccgaactgagtggcagcgacgagaagcggtcccgggtgtccggtgttagggaccgctgaagggtggggacagtggtaggggggcggcggcgcggagccgctggttggttcctggggaggaaagcgcgcgagggaggcgggaggccgatgagccgcgggccgcaggggccccggcgcagacgccgcagcccattgtgcttcctgcccggcgcgctctgttgcagaggagccccggccgggaagtgtggatgcgtcttacccgaggccgggccgcctcgcccgctctagtccagcggagcccgagcgcctcggaccaatccccagtgattatgcaagacagcggaccaatcagctccgccagctcatgaatatttatgaccttcgctgagtcaaagctttgaaccgagtttggggagctcagcagcatcatgcttagacttttcaaagagacaaactccattttcttatgaatggaaagtgaaaacccctgttccgcttaaattgggttccttcctgtcctgagaaacatagagacccccaaaagggaagcagaggagagaaagtcccacacccagaccccgcgagaagagatgaccatgaccaccatgccagaaagtctcaacagccccgtgtcgggcaaggcggtgtttatggagtttgggccgcccaaccagcaaatgtctccttctcccatgtcccacgggcactactccatgcactgtttacactcggcgggccattcgcagcccgacggcgcctacagctcagcctcgtccttctcccgaccgctgggctacccctacgtcaactcggtcagcagccacgcatccagcccctacatcagttcggtgcagtcctacccgggcagcgccagcctcgcccagagccgcctggaggacccaggtacgtgc

SEQ ID NO: 30131 - DNA, 1763 bp, Homo sapiens
  chr2:172965462-172967225
  hyper
cgagctgccggcgccgctgccgccactgcccggaccaccgccgcccgccatccgctgcggcacaccaaagtcccaggaggccggcgctgagactggcggcgaagcacaaggtggagaagcgctggccccagggtgctgctccgaggggatctcaccacttttccacatcttcttgaacttggaccggcggttctggaaccagattttgacctttgaggaaaaagacctgagcattagtggaggaacctagtcttggggcagtaggggttcgaagaggagaaaaaagaaggcagagaaaaaccgctggctagcggtgggcagcgagcgccctggggagataagaggatcacgggcggcggccttcgaggctctgccggttcctgctccctggggaggtaattgccaaaaggccaggactgctggtgtacgtgcactgtgatgatggtgacagcgggagggtgaggagggccagttatttcacccgcttaatcagtagcgagaggtacgggatttctgtccacccggtccctttccttccctcccacggcggccccttgggggtttccagctttgggcctagaagcttacttagggccgctcgaggcgcaggcctggaaatccttaaaagtacttaaaatgaactttaaaaagcattgtcctaaacccgcctgcttcccagccatctcaggcccgcgctctcctcgcccctgcagggcgcgagccccacctgagtctgggtgaggcccagagaggccgccagctcggctcgctccggcaaggccaagtattgagtcttttggaaacgccgctgaagagccgccagctggaaactggagtagatggtgcggggtttccggactttctttggcttcccgttcactatccgaatttcaggctcaaggtcctccttctctgcaacgataaagaatcgtaagaacagcgcaacccaggggtcctggagttcccgccctcctagagggcccggcgggggggacttggcttgagcaaagaggtgggtgcactgaactgtggcgccacgggcaggcgcaacttcgcagcgtgcgatcggagccgccaccgaccccgggagctgtaccctccagggaagggggagacaagtgcacacccaagagaaagaagctggtggcaaggagatgcccttatgaggcaggcagagcacgcccacttggctcttgaggccaccaggtcctaccaaaggagagagggacgtaaccggcgacctgcggcagattggaggctggggagggtaaagggcacaagcgggcggtgagcaggcagcgtgaaaatccagagctttcgaaggccccccgccccaaacacgtttacccatccatcccattaactagaccgactcggcactcttgacttcagcgttatgcataccaggctcgttgttggctggggacgaactggttccatagggagcgtaggaggtgtaggcggcggtgtagcccaggtcatagctgctcttggcggagtaagggacgttgttgaggccgctggcttggtactggtaggaacccatgtgcgcgtagggcgagcccccgccgccgccgccgcccgccgggtgctgctggttggtgtagtagctgctgtcggtggcggtggacaccggaagggtgggcgactcctggggcttgtggaggctgctgctgctgctgctgttgccacccgggccggcgccgccgccgctcgggggctgctggtgctggtggtacgtgctggaggcggcgatctgggtc

SEQ ID NO: 30132 - DNA, 1194 bp, Homo sapiens
  chr2:174219173-174220367
  hyper
cgcacgcagcaatgaaagtgctaaacgccatggtgcgtgacccgcgccaccctcacgctgctctcctttaccccccagactccacttttcctccgccaccacgaaaattcttgcaaatcagacagctaaccccggggcaatacgaaccattttcgcgccactcgctcaggaccgcgcagctgcacaaggagagtggtccccgtagcccctaaagcccccctttctcaaaggggattttaggagtgcccaaggctatcctttgaggtcagaatatataggggggtcgtgttttttccagggggccacctagtcttgcgccatgtctggccgttaccacagcttgcaggacctgtgtcccaacgcgggaaagacagcccgagccccgcccctccgggcccgggtcggcgcgcccagcctgccagccgcgctgctgctgctcctcctgctgtgggaccgctgaccgcgcggctgctccgctctccccgctccaagcgccgatctgggcacccgccaccagcatggacgctcgccgcgtgccggtgagggctgggcgggcgaacccgaggggcgggcgcggtgggtgctggacgcaggcgggcgcgggccgaccctctccaactccgcagcctagcgctgccttaactggtggcctgcctaggcgttgcccgcttgggcaagcccctgattttgtgcacctgggataactgagggccatggggacgttcctgcgtggcgtgcgcacccgaagtgcgggcggcgtggagacttgagtcgtttgcaggatggctagcagcgctggaaagccctaggcacgtgcgtccgccaaaggccggacagcggccgggagcgctggccggtcccgattttgcctgccaggcagagccagcctgcctgccccctgggaggttgtcccgcagcggcccagccctttcccgcacacaactcggagccagtgcgtggctcgccgcgtctatacccgcgctcagtgggtggcccttgggcgcgcaccccgcccggcaagagacgcgtccgcttctaaccgctgagggccagcgcgtctgaggtttaaggtcttgcgaaccggtctcctagaacttgggctgcgcacgcagtgtgaagcgaccgtagtcccgggcggtggttaagtgcatttaaagggcttggtgggtcaaagcgttcgccgaccatttgctc

SEQ ID NO: 30133 - DNA, 1355 bp, Homo sapiens; identical to SEQ ID NO: 25439
  chr2:175190730-175192085
  hyper

SEQ ID NO: 30134 - DNA, 801 bp, Homo sapiens
  chr2:175196982-175197783
  hyper
cgaaaaaaatctggacttcctccgaaagatttccttggggccccaccttagagttgaagtggcccgggtgtttgcctgcgttcgtttggaagatttccctaacttttattgtgatgcagacgcgtgtatctaaaggaatatgcgagtgcccacgtctagagtctgacagctggaactacggggaaaacggcgggagggggaggggaggggatccgaggggaggaggagaagaggaaggcgagcagggcgccggagcccgaggtgtctgcgagaactgttttaaatggttggcttgaaaatgtcactagtgctaagtggcttttcggattgtcttatttattactttgtcaggtttccttaaggagagggtgtgttgggggtgggggaggaggtggactggggaaacctctgcgtttctcctcctcggctgcacagggtgagtaggaaacgcctcgctgccacttaacaatccctctattagtaaatctacgcggagactctatgggaagccgagaaccagtgtcttcttccagggcagaagtcacctgttgggaacggcccccgggtccccctgctgggctttccggctcttctaggcggcctgatttctcctcagccctccacccagcgtccctcagggacttttcacacctccccacccccatttccactacagtctcccagggcacagcacttcattgacagccacacgagccttctcgttctcttctcctctgttccttctctttctcttctcctctgttccttctctttctctgtcataatttccttggtgctttc

SEQ ID NO: 30135 - DNA, 958 bp, Homo sapiens
  chr2:175199348-175200306
  hyper
cggggtggtttgtgtgtgggggggtgcttgtggctcggtttcattggtacttaaacctggcttggtgcgtgagtgtaaatttttaattgcactgtaatttcttcagtccccagcccgccctcgccccccccccgcaagtatcccccactactcccccccacccccgcggccctagctagctgacttgactggcacgcgccgggagcccgggctcgggcccctcggagcgtctgattggctgcggggcagctccggtctgctctgcctgcgccctcattgggcgagaggcgcagccagcggcacttcaaagcgggtgctcctcgcacttaggctgagtttagccggcgggagcctggagtccgctcggcacgagcgcggggacgcgggagccgcgcgggacccaagcagtttttccgagcagccgccaggctcagccccgctcccagcctcgctgcgcagccagagacctgctatggccacgtctatactcggggtaagtcgcaagcgcggcaacgcatttgcttgttttaaccggagtaatttttcgttatggcttctggggtctgcggctccggagaaactgttgctgctagactgcagcttcagcttctattagcactttccacatttctgggactgatttttccccaagtttttggaacccagaaagatgcctttgcaagaaaaggccttcttaatcaagtcctttttcatttggtttcaaaaaaaagctagaggtttcttttcttcccctcgtgatttataccccatcccccgcattgctttggggattttgttgcaattatgcgacaatggtgtttccagaaaacagtcttaatcgttttgcagtccatctagtcacgctaataaacatttacatttccgcggctccccaattcgcccatgactttgaaatctgtctctggccgcttatcctcggattattgttttcataatc

SEQ ID NO: 30136 - DNA, 1856 bp, Homo sapiens
  chr2:175200841-175202697
  binary
cgcgcttcggaacgaccccgttggccatgctggcggcgacctgcaacaagatcggcaacacgagcccgctgacgacgctgccagagtcgagcgccttcgccaaaggcggctttcacccctggaagcgctcctcgtccagctgcaacctcggctccagcctctcgggcttcgcggtggccaccgggggccgtggctcgggcggcctggcgggcggctcgggcgccgccaacagcgccttctgcctggcctccacgtcgcccacgtcgtccgccttcagcagcgactacggcggcctcttctccaactcggcggctgccgcggcggcagcggccggggtgtccccgcaggaggcgggtggccagtcggccttcatttccaaggtgcacacgacggcagccgacgggctgtacccgcgcgtgggcatggcgcacccgtacgagtcctggtacaagtcgggcttccattcgacgctggcggccggcgaggtgaccaacggcgcggcgtcgtcgtggtgggacgtgcacagcagcccgggctcgtggctggaagtgcagaaccccgctggggggctccagagctcgctgcactcgggcgccccccaggcctcgctgcactcgcagctgggcacctacaaccccgacttcagctcgctcacgcactccgccttcagctccacgggcctcggctcctccgccgccgccgcctcccacctgctctccaccagccagcacctgctggcccaggacggcttcaagccggtgttgccctcctattcggactccagcgccgccgtggcagccgccgccgccagcgccatgatatcgggcgccgcggctgccgccgccggggggagctcggcacgctctgcccgccgctactcgggccgcgccacctgcgactgccccaactgccaggaggcggagcggctgggcccggccggggcgagcctgcggcgcaagggcctgcacagctgccacattccgggctgcggcaaggtgtacgggaagacgtcgcacctgaaggcgcacctgcgctggcacacgggcgagcggcccttcgtgtgcaactggctcttctgcggcaagcgcttcacgcgctcggacgagctgcagcggcatctgcggactcacacgggcgagaagcgcttcgcctgtccggtgtgcaacaagcgcttcatgcgcagcgaccacctgagcaaacacattaagacgcacaacgggggcggcgggggcaaaaagggcagcgacagtgacacggacgccagcaacctggagacgccccgttccgaatcccccgacctcatcctgcatgactccggcgtcagtgccgcccgggcggcggcagcggcggcggcggcagcggcggcggcggcggcggcggcctccgcgggaggcaaggaagcagcgtctggccccaacgactcttagaggccgggcgagaggcgcgagcacacaagcgagtagagacaccgagaacgaacgagaggttcggagggcgagcgagcgggaggcgggagggcaggggcttcagtgacgcccccagggcccgggctgggcgcgaggtggagccgctcagggctcccgggctgcggttcgcccgctgtgcgaggagctcccctctgccttccgcgcccggataagaatcgaacgcgtggtccggaaacaaaagcgaaccatcctccgacacaaacactttaaaaactgtactcccagacgtacacatacaccggagacctacaaccacaagcacgcacactcgcgcgcgcacacacataccactcgcccaaacttctcgagcgaagagcaatacatagaaaggctccctctttgcccactctccacctccctccaacaccc

SEQ ID NO: 30137 - DNA, 236 bp, Homo sapiens
  chr2:175204013-175204249
  hyper
cgttttaaaaagcccccaaactaagcacttgatttgataactaggctttttaatgttatggaagacaactgctcctttccttttcaaagacggctgatctatgcaaatagtgaattggaaatgcctaggtccccgcgccgtcaaatggccctcgcaggttatttgaatatcagtggcgctgcttctgaaaaggttcaaggatgctctctgacttctttgtgattactcagtgcggc

SEQ ID NO: 30138 - DNA, 914 bp, Homo sapiens; identical to SEQ ID NO: 25440
  chr2:175547140-175548054
  hyper

SEQ ID NO: 30139 - DNA, 1478 bp, Homo sapiens
  chr2:176944646-176946124
  binary
cgccaggcttttgcgcctgctccttctcccccaattcggagcaggttcccttcggcctcccgcgccccggggcgccccctggcggcagcggcagcagcgggcaacgcgcggagggctcagggggcgcacaggggactcccgggcacactcagagaggcgggcgcggccccctggcggtggcgacgtagttatctggtgagcggagcctcgtccctctggtccggcgggctcacggccgtcttactaagcaccgcggccgagtagggcaggaagccgctctcggaacgcggcgccgccgcgctgcagccgaagtccgagcctcccccggccccggcgcccccgccgccgccgccaccaccaccaccgccgccgccaccgccaccccgggaacccagggctgcggcagctgctgccgcggctgccgccgccgactgactgctgtggcaactgaggcacgagcagggtgcagagccgccgctggggggcgcgccggccgccgccgccgaggaggccgcagccgctgcggctgccgcggctgccgcggcagaggccgcgctgttgagccccgcggcggccgcgggagcctggtagagaccagggtggcggaagctacacagcagctccggccgagagtaggggtgcgagagggcgcggaaggtgtccagtggccggatggaagtagcgaagggcgacgaagccgcggccgccgcgcctgaggctgcagccgcggccgccgccgccgtgacgcccacgtgcgggtagtagtgcagcggcacgtgcgagtggaaggggtagggcaggcttccggtggcggccgcgtgcgtcatcatgtaggtgtagaagctggggtcggctgggtgcggccaggacatggccaggcgctgccgcttgtccttcatgcgccggttctggaaccacacctgcggggagagacgcgccgcagcctgggttagggagcgccccgtgttcccagctcctgtcccaggacctctgccccttccggacctctgaatggcttggtctacttctctccgaccaagcccaaccccgagtaccctgtggtctcccagctgggaaagtgtggacggcagtgtgtggaccgccgtgggcacaccgtcctcaacgaagagggtcctctcccccgcgtccggctgctgctgctcctcaggcttttattcccttacttcttgctgcacttttttgtcccaatccaacctttcctctccctcccgccacccaccagtgccggtctcgctgagcacccgtctctcaatcccaggatttgtacggggattctgggcagcctttgaagagaggctgccgctcagcttttctgagaggtcgccgcgcgaagtcttgagccctccgaactgcaaggacctgcccctaggggcacgggtccgattttgatattgaagggatgattttgttggaatcgtttgccttaaatgagtgggtagagcaatgtctccataaac

SEQ ID NO: 30140 - DNA, 1375 bp, Homo sapiens
  chr2:176957256-176958631
  binary
cggagtgggtgggtccagccaggcctgggccgggagccaggctcccccgcgttcctacccccacgtggccgcgcgcagccaatggcacgcccccggcgggggccctcggggcgggaggcggccccccgaccggcccaggccccctcccaacctgaacttcgtttttataaacgtcccgcgatgagctaacctgttggagggcaggcgggccggaggcgggaggctcacagagggagagagggctagaggaagagggcgggagcgagcgaaccagagagaaaggagaggagggaggaggcgcgccgcgccatggtgtcctgcgcggggccagggccagggccggggccgggccaggccgggccatgagccgcgccgggagctgggacatggacgggctgcgggcagacggcgggggcgccggtggcgccccggcctcttcctcctcctcatcggtggcggcggcggcggcgtcaggccagtgccgcggctttctctccgcgcctgtgttcgccgggacgcattcggggcgggcggcggcggcggcagcggcggctgcggcggcggcggcggcagcctccggctttgcgtaccccgggacctctgagcgcacgggctcttcctcgtcgtcgtcctcttctgccgttgtagcggcgcgcccggaggctcccccagccaaagagtgcccagcacccacgcctgcagcggccgctgcagcgcccccgagcgctccagcgctgggctacggctaccacttcggcaacggctactacagctgccgtatgtcgcacggcgtgggcttacagcagaatgcgctcaagtcatcgccgcacgcctcgctgggaggctttcccgtggagaagtacatggacgtgtcaggcctggcgagcagcagcgtaccggccaacgaggtgccagcgcgagccaaggaggtatccttctaccagggctatacgagcccttaccagcacgtgcccggctatatcgacatggtgtccactttcggctccggggagcctcggcacgaggcctacatctccatggaggggtaccagtcctggacgctggctaacgggtggaacagccaggtgtactgcaccaaggaccagccacaggggtcccacttttggaaatcttcctttccaggtaggggcgatggagaaaagggaccgacacgagggagggggagagagaaggagaaaagaaaggactaagagtatgcgcccctacttgggagtgggagttgtgcctgtgctccacacgtgaccagggttaacccagtggaaatttgtccagttcgtgtgaaatctgtaaattcctcctctgatttcaactgcctccgtcactgccctttctttcctgtgtgcagcgcagacac

SEQ ID NO: 30141 - DNA, 1243 bp, Homo sapiens
  chr2:176994486-176995729
  hyper
cgaaaatgcctcgccggtgcgcaccgggtcggcagcctcggcggcgggggcgagattggcgggaggggggcgcggggggggcgcggtaagaggtggcggcgggcagagggtgttttttttcttttccctccagagccggggtttgtaaaccgaggccagagtgtccccgtgggccgagcgcacttttttcttgtccgggtgcgctcagtcactggtgcctgagaggaaacagtggaggcagcggggcaggtcgcctggggcgtcggcgattatattgcggccgagccggggcgcgccgggaaaggccgggagggcggcggcgcgcgggggctgggcgaggccccgcgacccgcgagggaggcggcgcgaagccgaggcggcgggcgcaagagccgggcatgagcgcccagtagctgagcgcccgcggctgcctggcctcagaagcgacgcgcgagcgcgggcgggcggcagcagcgacgtagcccggcggtcccggcggcgagagcagccgccccacaggcccccgcggcagtgcggccgagtcgaggctcgctctctggctgcttagcgccgcccgcccgcccggggccgccgccgctgacgccccaatgagttcgtacttcgtgaacccgctgtactccaagtacaaggcggcggctgcggcggcggcggcggcgggcgaggccatcaatcccacttactacgactgtcacttcgcgcccgaggtcggcggccgtcacgccgccgccgcagcagccctgcagctctatggcaacagcgccgccggcttcccgcacgcgcccccgcaggcgcacgcgcacccgcacccgtccccgccgccctccgggactgggtgcggcggtagggaaggccggggccaggagtacttccaccccggcgggggcagcccggccgctgcctaccaggccgccccccctcctcctccgcatcctccgcctccgccgccacctcccccctgcggcgggattgcctgtcacggggagcccgcgaagttttacggatacgataacttacagagacagccgatttttacgacccagcaagaggccgagctggtacaatatcctgactgtaaatcgtccagtggtaatattggcgaggacccagaccacttaaatcagagctcgtctccttctcaaatgtttccgtggatgagaccacaaggttgggatgcattttttttttaagaagggagagggggagaaatctgctttcatctcac

SEQ ID NO: 30142 - DNA, 953 bp, Homo sapiens; identical to SEQ ID NO: 25441
  chr2:177001081-177002034
  hyper

SEQ ID NO: 30143 - DNA, 1050 bp, Homo sapiens
  chr2:177042492-177043542
  binary
cgtggttggtgaggaggctgggagaaggcctttttgatggctccattgttcacagcgctgccctacaaataccatatccgtccccacctcctctgcaagggtcgagcggaagagtaggtctggtgagctgagctctagggagctggtaccatcttccctcaatccccctcggttaccccttggggcagcaacgacgccatcccagccccttccagagaacacacaaaggaagccccacccgtccttagacctgaggacacgctcgggagcgggctgacgtggaccccgtttcagggcgccccgggcccctgcggggaacaatagccgccgcctcctgggcggtctggcgggcgcgcggcacaaacgtccgcgccgccacgtgatgcgcgcgctcgttccgcgctctccgcgcctcagcgagcggccaggctgcgggcggggtgggctggcgctcctgatccacctggaacacttttgcaaagacagacggtgagttaatcaccctaccggctggcggccgcgtcccctctcgcccgcgaggaggactggagaaggggctggggtggaggttttctctgtgtgtgtctagggttgggggcaggagaggttagttctattaagagttcatcaatcacccggtgtgcacttttcgctcgacagcggttcctcctacttcagagcaagtctgggccagctgggatccgaccagaaatcgcaagcggaggagacgcagtagcgcaggctgagcgctaactgaaggcgcgacctgagcccggcgcctgctggggagctgcgcagccaggacagcggtcggcagcacagggcctgggcgcagggcccgccgtcaccacctcacgtcggaagccagcactgctgcccgccagccctgccgcctgccctcggacttcccagggcgcccagggtcctcccaacgcgcctgcacccacacccgcccctgagccacagtgaccttgcattccccgccccctgccacacctcctgcgtgcccgagtgtcacccttaaataccgctctacacccagagagggac

SEQ ID NO: 30144 - DNA, 1371 bp, Homo sapiens
  chr2:177052978-177054349
  binary
cgcgcgtcacgctcccatttaaccttttccatgccgcgacgcccacactccgccctcgagggactagccccccccacgatccagagcagaagcggctcgccccgctgcatccacgggccctcacccaagcgtccagtcctgcctttctccccccacctcgcccaatacctgtccgagagcaggcgttctgccctctcgccccgcccttgcccaggcagcccccggtcgcgacggctctcctcggggctcgggggcgctgggcggcggccctgggctgctttggctaacttggctgcggggcaggcgcgaggagcggcgcgccgaccgggccgagcggagaggccgcccattggccggccagcgccacgtggccgcccccgccggtatattaggccactatttacctccggctcactcgccatgggttggagagggcagctcgggtagagagggctggcggagcggcgcagacggcggcagtcctgctcagcctctgcccggctccgtactccggccccggcctgcgccctcagaaaggtggggcccgaaccatgagctcctacctggagtacgtgtcatgcagcagcagcggcggggtcggcggcgacgtgctcagcttggcacccaagttctgccgctccgacgcccggcccgtggctctgcagcccgccttccctctgggcaacggcgacggcgccttcgtcagctgtctgcccctggccgccgcccgaccctcgccttcgcccccggccgcccccgcgcggccgtccgtaccgcctccggccgcgccccagtacgcgcagtgcaccctggagggggcctacgaacctggtgccgcacctgccgcggcagctgggggcgcggactacggcttcctggggtccgggccggcgtacgacttcccgggcgtgctggggcgggcggccgacgacggcgggtctcacgtccactacgccacctcggccgtcttctcgggcggcggctctttcctcctcagcggccaggtggattacgcggccttcggcgaacccggcccttttccggcttgtctcaaagcgtcagccgacggccaccctggtgctttccagaccgcatccccggccccaggcacctaccccaagtccgtctctcccgcctccggcctccctgccgccttcagcacgttcgagtggatgaaagtgaagaggaatgcctctaagaaaggtaagtccgcgggccttggatggggccacctggggttggggacggagcctcccccgcggaaatgcgctgggagcgtggtgtcgctgcctttccagacagcggtttgggttttgtggaggagacgcgttcccgggcgaattccatggagtctgcctcgagtacagattc

SEQ ID NO: 30145 - DNA, 279 bp, Homo sapiens; identical to SEQ ID NO: 12585
  chr2:1771840-1772119
  hypo

SEQ ID NO: 30146 - DNA, 1776 bp, Homo sapiens; identical to SEQ ID NO: 22868
  chr2:182321353-182323129
  binary

SEQ ID NO: 30147 - DNA, 605 bp, Homo sapiens; identical to SEQ ID NO: 12587
  chr2:1863600-1864205
  hypo

SEQ ID NO: 30148 - DNA, 444 bp, Homo sapiens; identical to SEQ ID NO: 12588
  chr2:1895697-1896141
  hypo

SEQ ID NO: 30149 - DNA, 590 bp, Homo sapiens
  chr2:1940969-1941559
  hypo
cgactcccctgacccccacatcgactctgcctcagggcggcctccatgccttgcccagagcagctgcagccatcatttcgcacatcaagaagttcctaacgtccgcggccatcagatcgcacatcaagaaggtcctaatgtctgcagccatcagatcgcacagcgagaaggccctaatgtccgcggccatcagatcgcacagcgagaaagccctaacgtctgcggccatcagatcgtacatcgagaaggccctaacgtccgcagccatcagatcgtacgtcgagaaggccctaacgtccgcggccatcagattgcacatcgagaaggccctaatgtccgcagccatcagatcgcacagtgagaaggccctaatgtccacagccatcagatcgcaagtcgagaaggccctaatgtccacagccatcagatcgcacactgagaaggccctaacatccgcggccatcagatcgcacatcgagaaggccctaatgtccacagccatcagatcacaagtcgagaaggccctaacgtccacagccatcagatggcaagtcgagaaggccctaatgtccgcggccatcagatcgcac

SEQ ID NO: 30150 - DNA, 1354 bp, Homo sapiens
  chr2:200326720-200328074
  hyper
cgggcgcgggacttcggctctcgcctgggccatcccgggctctgagggcccggcatccatccccaaggtccatggctttcaagttcggtcacccaggcagagagaccctgccttttaaagagccctggaaagttgcgccgcgttttccctcaaccctggaacacgcagggaaaactatgggaatcgcccgcgtcaaaagctttcgacggcttctaggaacccaagcgggcctgcctcttcccctggagcttgccctcctgggggcgggaggagggcgggagggaatcatttctttcaaatgaagcccacgccagctctgaagccaatttccgccgcggactgtccgtggagagttggcgaccaacactttctcggacggcataaccgcgaggggcttagactggaaatcagatgcgccaagaggacaagagccaggggccagaataccccagtgggggacgcgccttggaggacggttcgcccagggtgggcttcagccctttcccagagtgctccgggcgtctggggactgaccggagcgcagggcgggggacacttacttcgttatccgcacgccttcctcgttggcatcagagccggacaaatcccaacccgcgccaggcaaagataaatgactcctggctcccccggcagctcagggggtctgggcgggggcggagagggaaggaagccgtcggccgccggaggtagagactgtggaggtcctcctcccggccccaagcgaatgagcccctgcggcccgagcagagagatacgcctcagagggacgactgatggggaaggatggtgggcaacgagtctgcgctaggcggtgagcctagcaccccagaggcccgagggtctggggctagtggggccgaccgttcaggagccgggtgggcgggaagggaattgccaaggtcggcccaggagctgcctcaggcgaggacggggagctttctgcactgggcttcccggggtaggagatgggcgtcgggtgtgggcactgcctgccctgggggaagaaagcgaggagataggtttcagagctgggggagtcgttggtgggagatctggtgtcccttcggcggccgcgggccgggggaccggggaagacggagggtcctgcggcctggagcaccaccctaccacaccaggcaacgccccccggggcgcccttcattcttttgcagagcccagaacttaataggtgggtccccttctgcaaccacgctgcgagagaatgactgccctgctaatctagtttacttgtagaaatcgactgtaaaccgggacaacaaggcaagggtgggggaagaaaaggaagcgccgaaggagccgccgctgcgtcccc

SEQ ID NO: 30151 - DNA, 1281 bp, Homo sapiens; identical to SEQ ID NO: 24240
  chr2:207139040-207140321
  binary

SEQ ID NO: 30152 - DNA, 938 bp, Homo sapiens; identical to SEQ ID NO: 27861
  chr2:207307880-207308818
  binary

SEQ ID NO: 30153 - DNA, 118 bp, Homo sapiens; identical to SEQ ID NO: 12594
  chr2:208688685-208688803
  hypo

SEQ ID NO: 30154 - DNA, 863 bp, Homo sapiens; identical to SEQ ID NO: 12595
  chr2:223183542-223184405
  binary

SEQ ID NO: 30155 - DNA, 795 bp, Homo sapiens
  chr2:230578412-230579207
  binary
cgcacaccctttacacacacagggtccagccggacgtggagcgtggaccacctggacattgaacacctcgccggggacgctcggagccggctcctccgcgctgccaaggcgggcaccgctcaagtggttcttggctcggcccggcctggaggggcgcgccactcagtggccaaccggagcgtctagagccccgcgcgagaagtgccgagccccggagcggcacaccccgagagcccggctggccccgcccgggaaccagggcgggtaagggaatcagggtcggcccgggggtccgcgtccacgcgggccaagagactggatccatcttcttcccaaagtgggaaagcctgtgtcaggcgtgcccattgtcgggcagcagcagcagggccggcgggaagaggctgctggtcccggaccagcgccccgcaccgcgcccgccgcttccactcacctggcagttggcgccggagatcccggcggggcaggtgcagctgtagccaggctcgccggcgggggccgggtgctgcgggtccggctcagggcgcgaggtgcacacacccccattccggcagggctgcgcggcgcacggcccgggcgcagacaggggcgcggcgggcaccgggttggccagggagctgcctcggggccccgctccgagcagcagcagcagcagggccagcgcgggcagcagctgcgcaccgggcgcctgggcgcggcggggctgcatggccggccgggagggcgcgggagccggagccaggacgcagtgacggcggcggcggtggcagtggcgac

SEQ ID NO: 30156 - DNA, 615 bp, Homo sapiens
  chr2:238280432-238281047
  hypo
cgtgatgggcgtcagcagtttctgctccaggctgggcagctcccggaaggtgctcaccgagaacacatattcggggctcagcgagatcttcaccagctcctcctggtctgcgttcctggcgatcgtgaaaggggccacgccaaactgcttgagctccaccgccgggtcgtccacctcatcgtcagactttccagacgagatgaggaccaggaactgcgggacgccctcttcaatgcggctccccaggggcctcttgaagatgttcctggacacgtactccagggcattgcccacgttgatctgccgccctcccttgggcctcagccgctgcaccgcgttctgcacttcatccttgctggaatgggcgttcagcaggaactccaccttggggtcatcgctgaactggatgacagccacccgggtggtgtcaaagcccacgtccaggtagtcaaccagcctctctatgagggtgcgaacgtactggaactcaggcccggcactttgggacccatcgatgagaaagaccacgtccctcttgccaccaacacctgcgaaacaaatgtgagcatggcttcaccttcatcgtcaccaaattcttagcgttcatgagccacc

SEQ ID NO: 30157 - DNA, 451 bp, Homo sapiens
  chr2:239888414-239888865
  hypo
cgtggctccccgtccctccggtgaccaggtgggcactggctcctgatggttcgaagccccggtcagcccccgccatccctaaactagtgacttccacttgcgttctcccccagggtcttcggggcaccccacgggagagagcacctgcaaggaccataacacgtgaggctgtgctgagtcctacgacaggcaggaacttgtacttggcccccggcgacccgggcgatttgcgggtcttcctcttggtttaacgaaggctctagcccggttccggagcccaccaagacgctgaagccatcagttcttggcttgcatttctagagccacccgtgtagttgcgagacagtgagaaagttcgcccgagttgcaatcctgcccgtgcctctgtctaggagcgactgtggcttcgggttaagcctctgtctttacctgtagtgggagatgtctgctc

SEQ ID NO: 30158 - DNA, 155 bp, Homo sapiens; identical to SEQ ID NO: 12600
  chr2:240567524-240567679
  hypo

SEQ ID NO: 30159 - DNA, 107 bp, Homo sapiens; identical to SEQ ID NO: 12601
  chr2:240672200-240672307
  hypo

SEQ ID NO: 30160 - DNA, 186 bp, Homo sapiens
  chr2:240690358-240690544
  hypo
cggtggctcggcaaagtcagtccctcacacatcctcgatccaggtcccgcacgtgccccggctctgaggtttagcctgttggctgatggggggaaaggtgtatggggcctttgtcgacagcacatatgccgggctgtggagtggggcccagggtgcctgcgagtgtctgcactccccaagcatcgc

SEQ ID NO: 30161 - DNA, 225 bp, Homo sapiens; identical to SEQ ID NO: 12603
  chr2:240725299-240725524
  hypo

SEQ ID NO: 30162 - DNA, 417 bp, Homo sapiens
  chr2:240809318-240809735
  hypo
cggagtgtccgcctttctggaggaaagacgacatgcctctgagcagcccaggctcactgaaaacacacttgcaggatatgcatcaccttcagggcagcacgcagcctcacccgggacacctgtcacttcgacggagaatcctggacatgcagcctcacccgggacacctgtcactccgatggagaatcctggacacgcagcctcacctgggacacctgtcactccgacggagaatcctggacaggcagcctcacccgggacacctgtcattccgaaggagaatcctggacatgcagcctcacctgggacacctgtcactccgatggagaatcctggacacgcagcctcacctgggacacctgtcactccgatggagaatcctggacacgcagcctcacctgggacacctgtcactcc

SEQ ID NO: 30163 - DNA, 540 bp, Homo sapiens; identical to SEQ ID NO: 25461
  chr2:241771598-241772138
  hyper

SEQ ID NO: 30164 - DNA, 213 bp, Homo sapiens
  chr2:25142472-25142685
  hyper
cgggctccgatccggcccccttcccacgctcggggcgctgtcttcccccccggaagcctggccctgcccctgcgtttacctgtgcgggaactcggccaccgcgtgctccgggacggtccccgcgcgggctggggcgggagagctcggcgcgcccgagggctgctccccgcagagccgcgccgccccggcagcgcctcggggcccggccggagc

SEQ ID NO: 30165 - DNA, 747 bp, Homo sapiens
  chr2:25391009-25391756
  binary
cgaaactccgtctcaaaaaaaaaaaaaaagaccgggttgtcccaagacctcctagcaagctctcggagcctccggaccgccgcgagcccctgggggagaggaggccgccggctccctggagacagcgcctgcagcttcgcggccgtccgcccaggggccggacgtgggccctccagctcagctactggcggcttctcatgccgcagtcggcgcagaaagtttgtcgagaactcgggaccgcggagagccagaggcgcccaggtccgccttcggagccggagccggccgactgcatcgcgaggacggggacaggggatcccggggaaagagcacgggtcccccacgctgcgcccttacctgtctcgggaggctgctctctgagggcggggacgctcggcggcctctctcggtcgcggctcttcttcccctccttcgccgccgcttggtcccgcgctcctctgtccttatatacttgccgagctctcctggtgggcgcgggactttgaccttcccggcagcacaaggagcagctccccgggccaggggaaggggggccgcggggcgtgggaggggggcttccagacgggggacgagcgcggggagacgcgctggaaaggggctggaattagcactgtcctgccgaaggcgcacctggccgctcgccctcaggaagaacttaattatggatggcgttgggtctccgcttagaacgggcgggaggcttagcacccccgtgtggggcaggcc

SEQ ID NO: 30166 - DNA, 570 bp, Homo sapiens; identical to SEQ ID NO: 25466
  chr2:25438799-25439369
  binary

SEQ ID NO: 30167 - DNA, 569 bp, Homo sapiens
  chr2:263894-264463
  binary
cgccggttttcccgtcctcctcctcccaccaccgcccagctcttgagaggggagggtgctgccggacaggtgggtccccgggtactcactgctgcccgcccggccgcggcgccccgtcccgaggctgcccaggaagaggaaggcgcgctgccccgccccgcggacaaggaggccccagcgagggcgtacctgcggcaggtgacgaaggaggcggcgcaaaacacccgccgtgtacgtttcgcgggacaaaaaccacgcgcccgccgggccgcgctcaggccttcgccctcagggacttcggaaccgccccgtcctcaagatcgaaaagcccagagccccgcggcggctccaagcacggtgttgggggtgggggtctcagggagcgcccaggcccaaggccgccctggtccggcgtggaccccgcggggctcaaggcaggttccccgcgtgacccgcccagcccctctatgcgaactcgaacgacaggcaccacagcccgccacgtgcgcgagactcgcgctgtgccccaacccaggtgggcggcccgcggagccgcgaggcctgagccc

SEQ ID NO: 30168 - DNA, 205 bp, Homo sapiens
  chr2:26395416-26395621
  binary
cgagctttgggcggcggagcaggacagggcgcgggtgggcgcggcctccgggaggccagcacgagggggagcggcggggcccggacacacccagccagaaggaggaggccgaccccgcgccgactccgcagatgccgctcgggacttcgttgtccctccaggcgcccgccctggggtcctccatcacccgccgtcacctgggcgc

SEQ ID NO: 30169 - DNA, 176 bp, Homo sapiens; identical to SEQ ID NO: 12609
  chr2:2696901-2697077
  hypo

SEQ ID NO: 30170 - DNA, 110 bp, Homo sapiens; identical to SEQ ID NO: 12610
  chr2:2705311-2705421
  hypo

SEQ ID NO: 30171 - DNA, 249 bp, Homo sapiens; identical to SEQ ID NO: 12611
  chr2:2737154-2737403
  hypo

SEQ ID NO: 30172 - DNA, 353 bp, Homo sapiens; identical to SEQ ID NO: 25472
  chr2:27938267-27938620
  binary

SEQ ID NO: 30173 - DNA, 442 bp, Homo sapiens; identical to SEQ ID NO: 12613
  chr2:2797217-2797659
  hypo

SEQ ID NO: 30174 - DNA, 178 bp, Homo sapiens
  chr2:2799315-2799493
  hypo
cggctcctgacaccccgggatggtgcgggcggctcctgacaccccgggatggtgcgggcggctcctgacaccctgggatggtgtgggcagctcctgcactccctcttttcctctcgaggacttaatggctacagcgaaagcagaggcctgctgtggggagcggggggagccgggcagc

SEQ ID NO: 30175 - DNA, 379 bp, Homo sapiens
  chr2:2854244-2854623
  hypo
cggggaagccttcctcagggtttctgcagaagccctgcccactgccccctgcagagagccatcctgccacagagatgcgccccagatgcgtcctggatggatcaagtcactgcgtgtcagggaacggctcctctgctgctcctgatgcctggccacccgtcccggtccacccctcgcgaggaaggccaggcctccgctcctctgcggagcctttcaggaacatgaggccgcctgtgtcagccatcagggtacccaccggcgctgctcatccacctgccacccccacctgccacttactcctagcacaagcaggtgccccatgaatcccgcggaatgagttatttcaggatccgcggaacacacgtaaccagaccccccc

SEQ ID NO: 30176 - DNA, 392 bp, Homo sapiens; identical to SEQ ID NO: 12616
  chr2:2893376-2893768
  hypo

SEQ ID NO: 30177 - DNA, 725 bp, Homo sapiens
  chr2:29033285-29034010
  binary
cgtattcacacgttgtgcttttctcagttcaagcggcctcttccttttgagtaaccagggtaaccacgctgtgcccgcgtgtgccgggcggggaggggaggccgcagccccagccccgggggcctggttgtctaatcgaagggaagtaaacggccccaacgcaagcctgactgcgagacgtgcccaagggaggtaggtcgaatgaagagggttgtgtgagttttgcgcgggcaggcgggataacggaggagggaggcccgcggccgaggctcgggcgggcggggggcagggaggggcggggttcgccggcgcgcactcccaggcaggccccgccccctcggccggctgtgcgcgctgattggcccctgccggcctcgcgctccctcgctccgggttggcgggagaccttagagcgggtaccgctgctggctagcgaccgacgagcaaccgtctgaggccaggagcgctgcgacggagccttgaccgccgttgcccggccctctcccgcgcagccccgggcttccgcaggtacctgtgctcgcccccgggaaggggcctcgcaggcgaatctccagtttcgagtgtgcccggtccctgggttcgctcgccggcgaccccaccgcccgccttagatgagaaggcagcgctccagcctcgtcctcacgccgcctcccgtgggcgccctcagctgccttcgcggcgacgacacacgcgctccccgcagc

SEQ ID NO: 30178 - DNA, 855 bp, Homo sapiens; identical to SEQ ID NO: 24259
  chr2:30453530-30454385
  binary

SEQ ID NO: 30179 - DNA, 1272 bp, Homo sapiens
  chr2:31360488-31361760
  binary
cgcccggagaccgccagcccctgggccgcccgtccgcagagccccctccgccccgggaccctcgcgcgcagctcaagttgggagccccgctccgcaggcgagcgcgcgcccaccacccacacccactgccactcatgcacaccgcgggtccggagatgcccccgagcgttttaaaatccagaaacatcacatggtagccacatccggcggctgttacctgctcgcagcacccagaccctcgccctggtttcccgggagcccgcaaacccggcacgcgggctgcgcgccctcccgcaagccaccgctcagcgccagcgcgccggcaagccgcctaccttaggggtctgcacttcaggtcccgtcggcacctccaacttcctcttggttacccagaagaacagcagcaccgtgatccagagcaccccgaagactggcagaaccagccgacgagtcaggcgccgcatggtcccctttgccgcttcctctccgcggcgctacgtcccgggggcaccccccggcggtcagggttggcggggcaggagtcctggcgagcgcctcgctctggggagctctagacccaggatccggttggaggggcggcaggatcctgcaaggcgcccttcccgcttcgaagagaagcgagcctgggtggggggtgcagggcgacccgaaacgtggcagggaaggaccgagggcagccaagctggacgcccgctccagcgggagaagcgcggtggctgccgagatgttccccacgccgccaccgcggctgccgccgccgccgccgccgccttgcccgctgccgccgatagggaaactgactcgagcagcgagagggaggaatccgaggctgtgccaagcaccccgggaggagcacgagggcggagggagtgagcggggagggcgggcccgacagacaggccgactcggagcgagcccaggtgggagtgagcggggctctgagagggggcgctaccgccgcccgccgaccgaaacgctcggtgctgttgcggggccgccagcgccaagccctgggcgcagctcccagaccatcgtgggttggggcaaggcggggcggggcgggagcggtgcactcgggatgcccgccacccccagctgccagctgggacccaagggccggccctcgccaggcggcgctgtgcctgggaggactttcccgctcatcgcgggggctgcacgtggcgctgaagccggggtcccacccccaatgtgctcgtcctaccacagccaaggctgggattccagggcgcc

SEQ ID NO: 30180 - DNA, 295 bp, Homo sapiens; identical to SEQ ID NO: 12622
  chr2:364121-364416
  hypo

SEQ ID NO: 30181 - DNA, 1341 bp, Homo sapiens
  chr2:42720186-42721527
  binary
cgcctggagggagccgcctcggccccgccggggcgcgcctcgtcgcggcccagcacgcccggctcgtcggccgagtagaaggtgtaggtgtcggacatgcggtcgtcgaggcggcgctggcagcagtactcgaggtgcgcgccctccaggccccagtagatcatctcgttgtagaaggagagctcgcacatccgcggcgcgaagcgcagcttgccgtggccgcgcacgtagagcaggatgaagccgaaggcctccgagtgccggtcgaagaagtactcgttgcgctcgcggtcgtagtcgtcgcacacctcgagcacgtcgcgctcggagcggcagccgtgcagccggctcacgcggcgcagcgggaagtccttcagcagctcccgggacagcgaataccgggcgccgcccacgttcagcaccaccgaggccgccccgctgcgcccgaaggtcatggctggccgcccgggggactttcggcccgagggccccgctgcagccccccaccccaagccgccacgcggggcctgcctgcccgtggctgacgggggagcgcgccgtcggggcccgcgctccctcggggctccgctcctgccctccgctggcccgggggtccctgggctcgagtatctccggcgctgctagtagcgcgccctccgcccggcggtacctgcgggtggccggggagtcctcgccggcgccagcgctgagccccaccggctgggaacgcggctgtgtccgcgccgccgaccctcgcgcccgagggctgcgcacaccgaggccgcggtgccctctcccaagccgcggggccgaccccctgagggctgcgggcgccgaatggagccgccggggcggaatagctccccgtctccggcgctccctgcggccgcgaatccggcggccgccccgccgccgtccagaggcgagaggcaaagtgagcgggttcggaggcggcgaagagccggctcgcggcggcgggggcggggcctctgtgcagtcctcctcctcgcccgccggctccgcgcgcgccgctcacctccctccgcgccgccctccgcttcccgcccgcgcccgcacctccccggcttgctcgggctgggattcccgggcgccccgccctggacctcgggctccccgcctcgtgacgccgtcctccccctccgctccggcccgtagtggcggggaggggtccgcagggcgggggagcggggagcccagcgccgggatgcctgctcccgcgtcctgccctgggccatcgggatgaattgggcagtccccagggccccttttaacagccctggttcaaagcccagtgtggactcgggtgcggggacagacggc

SEQ ID NO: 30182 - DNA, 999 bp, Homo sapiens
  chr2:45159503-45160502
  hyper
cgcaggcactgtggcttttgtctgcatctggacaacagggtgtgcacccgtgtattcaaataattatgcctgtgggcacttctttattcctcaaattcctgttagtgttcctttaattctcccgtagtgttcctttaattctcccatgtgtattcggtacgattgcctgtacgttccaggcatagtcaggtgactcagcttgagtctgagctcaaacgtgcgcgaccccctgggtctgcatggggagaaggaggtgtgcacgtgcaaacgcgggactttgggtggagtgtgaggttgatagggctttcggccccagggccctctaggcctcttttaaataccttcatctgcccaatttcttaacctttcaggacaaggagggagaccctccgcgatcctgcgccttgccaccctttgggaaggataggaccatcatctagggcgtctctcggtggactgtggctgggccgggctgaatgggcgggcggaggtctcgaggtcgtctcctggctctcgattgctcccatcacccaagccacctcgaggtcgagtgcgccctggggctatgtctggggaggtcatggcgtctcggggcgaatgatatgcacgttttggggcaaaactctcctaggcctcgcaggagcagctgtatttgtaacttggaattggcctgggcccgcctcccttggcccctcctccagctcctacctcaacacgcagcgctcagcgggctgccagagtgagcttcccggaccacccccaagcaccctggggcctcaccatccttcagggtccctggggcatcctagaggcctggatctggaagaatgggggccaacaagagtggccagggctctcctggggcggttttgcgatgtattcctccgctagaattagcctttcgggcctgcgcgcctacaggtttcagaggccagcgggaacggtggcctcgggtgtgtgggggtgaggggtgtggtgtgtgtgcacgtgttcacgcgc

SEQ ID NO: 30183 - DNA, 913 bp, Homo sapiens
  chr2:45169299-45170212
  hyper
cgccgattctcaccaccgctccatacttctggcgagtagcggcggcgggaacggtgcgggaggcggcggcggcgcgggaggcggcagcggcggcgggaacggtgcgggaggcggcggtgctggcggagcaggcggcggcggcggcggcggctccagggcccccccggaagagttgtccatgttccagctgcccaccctcaacttctcgccggagcaggtggccagcgtctgtgagacgctggaggagacgggcgacatcgagcggctgggccgcttcctctggtcgctgcccgtggcccccggggcgtgcgaggccatcaacaaacacgagtcgatcctgcgcgcgcgcgccgtggtcgccttccacacgggcaacttccgcgacctctaccacatccttgagaaccacaagttcaccaaggagtctcacggcaagctgcaggccatgtggctcgaggcgcactaccaggaggccgagaagctgcgcggccgcccactcggcccggtggacaagtaccgcgtgcgcaagaagttcccgctgccacgcaccatctgggacggcgagcagaagacgcattgcttcaaggagcggactcggagcctgttgcgggagtggtacctacaggacccctaccccaaccccagcaagaaacgcgaactggcgcaggccaccggcctcactcccacacaagtaggcaactggtttaagaaccggcggcagcgcgaccgcgccgcggcggccaagaacaggttagtggcggggcccgcggcctggctacagcctcagaggcctgggaaggggagaggggttgagatggggctagcggagcggccgctgagagccagggaagccgtgactcctggccagtcggagaaagtttccgcttgtccgggacgcgcggaagagggggcc

SEQ ID NO: 30184 - DNA, 986 bp, Homo sapiens
  chr2:45235490-45236476
  hyper
cgctttagacaaatccctgctcgccgggtctccggcatagaaaggcctaagcatcgtccaagtcaggccgggctgccgctgggctgtggccgggcctgggggcccagtttaggcctctccgggggaccggcagaagccctgcgaacccctcccttgggccccggggagctggcgccgaagaaggtctacttactcgtacctttccttggcctcggccgcccggtcgcgctgccgccggttcttgaaccagttgctgacctgtgtggtggtgaggcccgtggcctccgccagctcacgcttctcgcggggtgaagggtaggggttgtgcgcgtaccactcgcgcagcacgctgcgactcttttccttgaagcagtagctggtctcctcgccgtcccagatggagcgcggcagcgggaatttgcggcgcacgcggtatttgcccacggcgcccaggggtcggccgcgcagcttctccgcctcgatgtagtgtgccttgagccacagctgctgcagcttggcgtggttgtgcggcgagaactggtggctctccaggatcttgtagagctcgcggaagttgccgcggtggaaggccaccacggccttggccttgagcacgctttcattcttgtgaaggtgctcgcaggcgggcagcgaccacaggaagcggcccagccgctcgatgttgccgccctgctgcagcacctcgcacacgcacgccacttgctcctgcgtgaagccgaaggtgggcagcatggacatggtgccggctgcgtccccgcccgcccgcgcgcgccctcaccgggccgcgcggtcccgcatgggagcttcctcgccgggccgtccgggccgagacgcgggcggggctggccccctggcccggcactggcccccggtgagccccgagtcactgccgtacgtccccgcgccggccgcgggtcccacgaagctccgaaccccaacggcccgcgcgcctggcccaagccctc

SEQ ID NO: 30185 - DNA, 766 bp, Homo sapiens
  chr2:45237177-45237943
  hyper
cgggcacattctaccccggcgcaggccagtgggatgggagagtttggacgtgctcgggtgccgcccaaagacttggctttttctgctgacagcgccccacccccatcctagaaactctggactcagcggtcctcgagggaaaaggggagggagtagacgaaagaaatggggaagatttggcagtggccgcaggcggacgccggagaatcgacttcccggaggatcccgcctttcctccctctcctagccccgccggctgcctggcggcctgtaccgccccaactctgcgctctctgctcctcgccgggcggggactcagacttaaccccacgggtcccacagcccgaggagcgccaggcagttccgtgtggcctctatggaagctgactccggccggcagctgcgacgcagaaccccggacggcgcagacccgcagtctgcccaccggggcgggggagaggggcgacggcagggactctaggacggtggtggggcttccccggtgggtggtcggggaggagaacggaggcaagattcccagtcctcccgcttcgccgctggggatcggctcggctcctggccactccagcctgggaaccggctcgctgagctccgggatgaggtgctttaaaagggggtcctgttttttgcttctttgtcagggtgccaatggaaacatgtggtgctggtcctgtgggagaagggctcgcacaaaggtgggagaactgaggatgggtgtgttcttgctctacgttttgaaaagccc

SEQ ID NO: 30186 - DNA, 774 bp, Homo sapiens
  chr2:47747991-47748765
  binary
cgcccggcggccccgcggcctggagagggtccccggcgcgggcggacgggcggtctacctggaggcgctggtctcggccagccggttgttcatgatgcccagcgcgcccacgccgcccgagaagccgttctggcgcgtgttgacgcacacgctgcgcgggtagccgttggccgtctccgacagctgcttctgcagcagcgccagcgacaccttgttggaggccgtgaggtcgcgcatggagatgagctcgcccgagaggcggcggccctcggcgtcgctgtcgcgggccgcggggtcggcaccgagcgcggccaggcggcggcgcagccgggagcctggggtgatggcattgcgccgggccaggggcgcgccaggagccgggcagcagcgcgcgcagcagcggcagctcagcttgcgcagcatccagttgagcacctgcttgatgaggatggagatgacgttgaagagcgagtaaatgcagcacacgccgagcaggatgaagaggaagttgcccaggcggtagagcccctggttccggtaggcggcgtgctggctgctcaccaggtccccgaagccgatggtgctgaaggtgacgaagcagaagtagagcgagtccacgtagtcccagccctccacgctggtgtacatggccgaggcgcagcaggacagcagcacggcgaacaggcccaggatgagcagcacgtggtacaccgagggcttccagcccgccaggctgtcggcctccgagagcgcggagccgcggcggaaggtggc

SEQ ID NO: 30187 - DNA, 349 bp, Homo sapiens
  chr2:502892-503241
  hypo
cggtgggcaggaggcccttgccactgtggcgccaggagactgggtaaggcgcccaccacagggctggggatctcaggggcgtctgaagaggaagagctggctcggggcgctcggggtagcacagccacacatccaaccacggcgcgagaatcaaggtgccagaatcacaggacgcgggaatcacgggacgcaggaatcacgggacgcgggaatcacgggacgcgggaatcacgggacgcgggaatcacgggacgcgggaatcacgggacgcgggaatcacagggtgccggaatcaagggacgccagaatcacggggcgcgggaatcaagcttctccataaatgactgac

SEQ ID NO: 30188 - DNA, 993 bp, Homo sapiens
  chr2:63278430-63279423
  hyper
cggccccggcagctgagggcaggtaaggagaaagccgcggggccaccccggactccgggagcgcgttggttacccttatctccccctcctcaaatggatcccggcttccccggtccccagcaggtggtcggggctgtgggagcggcctggctcccctcttggtgagccgaggaccccggggcgctgtcgcggcccgcagccccctcccccgcctcctccgaagtaaccaagctgaagtgctaagtttggagaaagtctttgaaaactcacgctgcagcttcgcaaagccgtcgcagctttgagtcccattttccttcggccctagagccctggctgcttcccttccggtccccttcctacaagctggactccctcagcccaggtcttgggtcccagaagacgggggcgggaacggggctggggggagcttctttagctctaacttctctccttgaacgtcctagcccgagtccctggcttgcttcacagcgatcccgctaagcggggtgtagcgatggccccccagggccccaggcccagtttccagcgcccctccctgacccctgagagtggcaccccgggttcccggcagcggcgggggcgaggcttcgacctcccagctcgggtctgcgtgggctacgccgctgaggcctagttctctgttctcgaccgtgtcctggggccgcgggttcagctacaaggatggcagcacgcgacttgctgccctccggcttcacaaatccccgagaccctttgaggtgctaggccagtcacccttcaccccctgctgggaccctgcggtccgcagcccagactgggcagagagaaggccgggtgcgcgctggcaacgaaggacgctggccgcagctgaggcgctcccgacctcaggccgcatcttggggtcgcccccctctacagtggccccttcggcgtcctctggccctctgcgaagcctgggcccgttactgcggttgaggtgcggtgggatttcgc

SEQ ID NO: 30189 - DNA, 670 bp, Homo sapiens; identical to SEQ ID NO: 24273
  chr2:63280967-63281637
  hyper

SEQ ID NO: 30190 - DNA, 445 bp, Homo sapiens
  chr2:63282552-63282997
  hyper
cgggagttgggtccgcggggcggtggagcaacaagctcccctagctccctttgacccactctcccccatccggcccactgcaggtctggttcaagaaccgccgcgccaaatgccgccagcagcagcagagcgggagcggaaccaagagccgcccagccaagaagaagtcctctccagtgcgggagagctcgggctccgaaagcagtggccaattcacgccgccagctgtgtccagctctgcctcgtcctctagctcggcgtccagctcttccgccaacccagcggctgcagcggctgcgggactaggtgggaacccggtggcggccgcgtcgtcgctgagtacaccagctgcctcatctatctggagcccggcctccatctcgccaggctcagcgcccgcgtccgtgtcggtgccggagccattggccgcgcctagcaacacctc

SEQ ID NO: 30191 - DNA, 371 bp, Homo sapiens
  chr2:63283794-63284165
  hyper
cggaggctctgcgctctgatccgctgtttgagcccaacactttaatttattctttctggacactggagtcactaactggcgtgtttctgcccattggagcacccgcacactactccaaatcaaaaccactaagagttcctcccgcgcagactgctgccccttcagctgccctcgattttgctccacgcctgccggccagagcctcccggcgtttcttccgccccagcggagtgcgctggggcgcgccagggctaggcccgccggaggagcgcgtccccagccttccgcgcacagagccgcatcccgccccgccctgcgctggactggttcaagcttccgcctcggcgggaacgctgtacatagtcaggtcc

SEQ ID NO: 30192 - DNA, 992 bp, Homo sapiens
  chr2:63285949-63286941
  hyper
cggggttcggagaacgacccctcccgcgttccgcgcccagcggggtcgcagggctgcgagcccggctgtagcaaagctttctcggccgcgtcctccctccggattcggtaggccaggctcgggcgcgcccttcccacaccaacaaaccatctttcccgactcagcagaggcccacaggggcgcagccgctgtccctccgcccttggcccagcggcgccgccctggtacgccaggcctgaaggcagggccggcccgcgccacgcagggtctcccttaggcggcgccttagggtgaaatgcggggccaagcctgacctgccggggtgccccgtggcatctctggtgcggaccccgcacgtgccggggagaactggcaggcggccagggcgaggaggcttccagcttgcgccgcactggcctgggcacccgggctgcagggccttttgggccctcccctcagtgaccctgcctgtagcggccccagggccgctttggctcaggcagcagctgccaatgccgctcgaggcccgcggctccctgaggcgagctctgcggggcccagcagtcctcttggctgctaaatggaacgaaaccaggagacccggctttgcactcgtttggacaactgtgtggcctccggagcaaggtacccaaacccttgggcctcagtttcgtcgcagttgttatttgaacccactcggcctgggacgtgccagagcttcacactttaggtcgcggctgcgggcgggaggggcagatgcgacccctgggccggcccctcgggggcgtctagaagcttcggcacctgcatactaaggccggagggggctggcagccaggcacaccgaggcccggccggagttcccgcccggggaacgaggcttcgaaaagaggcacgtgcttctcccagggcctcccgccaggtgctgaaaccccacggcactgagtggaaaccggaagagggaaggcgcccagggcctgccgggccgcggc

SEQ ID NO: 30193 - DNA, 1118 bp, Homo sapiens; identical to SEQ ID NO: 27891
  chr2:68546231-68547349
  binary

SEQ ID NO: 30194 - DNA, 993 bp, Homo sapiens
  chr2:73144900-73145893
  hyper
cgccgctccgcgcctggctcgcccgcgggggccgagcgcgagcgggcgggcgggggaggtgaggggtgcgggcgggtgtgcatgtgcctggctgggtgcacaccccgcaaggcggcggcgccaggacgcggagcgctccccagagcccggctgcctcgcacagctcccgcggctgcgaccatgttccagcccgcggccaagcgcggctttaccatagagtccttggtggccaaggacggcggcaccggcgggggcactggcggcgggggcgcgggctcccatctcctggcggcggccgcctccgaggaaccgctccggcccacggcgctcaactaccctcaccccagcgcggccgaggcggccttcgtgagtggcttccctgccgcggccgccgcgggcgcgggccgctcgctctacggtgggcccgagctcgtgttccccgaggccatgaaccaccccgcgctgaccgtgcatccggcgcaccagctgggcgcctccccgctgcagcccccgcactccttcttcggcgcccagcaccgggaccctctccatttctacccctgggtcctgcggaaccgcttcttcggccaccgcttccagggtgagtgtccacgctgtgcccgccgaggcggccggccggcgcccgtgctgcggcgatgcgggggaggctcgggggcgcgcggggctgtttagaagttactgccgggaaggctgcaggtccgcggaggtagattcccaggcagggaagagctgtgcggcatccacccgcgccttcgccgcgtaggtctccctcccaggaaagcaggtggagacctccaggcttttctagaaaatataccagttcggacgcaagcccaggcgcgtcctcggagcctgtgctggccctcgccacagcctgcccaattctctctcccagctgagccagtctcagaccagagtacaactcctcccgctctccctccgcccggcttaacctcgcaccacgcttctctc

SEQ ID NO: 30195 - DNA, 1230 bp, Homo sapiens; identical to SEQ ID NO: 24279
  chr2:73147029-73148259
  hyper

SEQ ID NO: 30196 - DNA, 814 bp, Homo sapiens; identical to SEQ ID NO: 26803
  chr2:73518220-73519034
  hyper

SEQ ID NO: 30197 - DNA, 998 bp, Homo sapiens
  chr2:74425444-74426442
  binary
cggccttcggtgacactagcggcgtcaggcaggagtttgacttcctcagcctatcatggcacgttgccgaggcttcagcgccttacaggacctcgctccaggctcttctggctccaatcaaaagcagggctctttcggacttcgcttacgtttaataaagaaaaccggttggccccttcggctccacctggctcaacagacagccagtggcatgcggcagggaccaatgggtggcggagggaggcggggcctgccacgaggccgcagtataaccgcgtggcccgcgcgcgcgcttccctcccggcgcagtcaccggcgcggtctatggctgcgacttctctaatgtctgctttggctgcccggctgctgcagcccgcgcacagctgctcccttcgccttcgccctttccacctcgcggcagttcggtaagagggtcacagagctcggtcagcgcggaaagctgaggggaacggagggcgaggggcacgccgggcccccgagggacaccgagggaagtccttcccgaacatctccgccccggcggtggtggccgctgaggggtgtggcggggcgacgtggcaccgagcgccgccgcagctctcgactggggcgcttcctcggcgcggagggctggtacccgaagcccgcctttcggagggagccgctctcctgcgactcggggcgtcgccggggcccgtggccagtcggcgggcgggacgggggtggcgtgcggaacgcgaaggcatcagtttacgcggagccttccgacagcgccggccgcctctggctgggatgctgagagtcgtctgggggagaacaggcgagggttccaaaagagcagccctcggcgagttgtccttgcggggaccctagcggcggagggcgctgctgcagctgatgaaatcgcggagccgacttgctcggggtccccgcgccgccctcctccctccgccggtgggagtggcccgcgctgcctccgctctgccaggaacatgaac

SEQ ID NO: 30198 - DNA, 1884 bp, Homo sapiens
  chr2:75060920-75062804
  binary
cgccccacaccccgggtccgcgatcacgctccccccacccatagccgagcctgacgcggcggtggctcatgcgcctttccgtcccagcctttagccacggaccacacgtcccatctcaggcgccccgcccctcccccgccccccgcccccggcgcgcctccccaggctgccggctccggtgtctgagcggccgcgcccgcgagccgtgagcgatgattggctgcgccacggcggcgggcggtccgtgggcgcacacaccctccccgcgcagccaatgggcgtgcgcacgtcactgatccggaggcccgcgggccggcagcccctcaataagccacattgttgcatgaaactccggcgcaggagtcccgggctgccgctggcaacatcgtgtcacccagctaagaaaatccgcgggcccgagccacgcgcctgtgaatcggagaggtcccactgcccgagtggagccgggctgagattcttctcaagttgagcctcagtgatcctgtggccgaagttagcgccttgacgtgggacaaccggacacgtcgccaggagagaactgaggcgccttctagcagttgtgacgccaaaatcacgtctccggagacccgcgccctccgccagccgggcgcaccctcgccggtagccttctttgtgcgccgtccggactcccagctcccggcccggcagccgagccccagcacaaagcagtcggaccgcgccgcccgcctcccctctcgcgtctccgcctcggtttcccaactctgcgccgtcgggccgcggcaggatgattgcctcgcatctgcttgcctacttcttcacggagctcaaccatgaccaagtgcagaaggtaagtcagcgcgggcggggcggcaggctgggctctggcaaagtggtctggcctccatcagtctcttcctcgaccctgcggggacccgcttcctccctactccgggcctgggagcggaaaaagtttgggcagccgggacactcctgggcgccaggagccacgtccgctaagcacagccggcgagtgcgcgcgggcggggagccgaggtcgcgctccgccgggcgccctccctccctgagctccggcacgcgctcacgctctctcccccagtccctttttccctgttactggaggggcgggtcaccccgcaggtagtcagggattgctgcgcccacgtgggagggagcccccttctgcagcgcgagttccggcgagagcacgtggagagaatcgtggctgcgggaggctgctccgctgccgcgtggggccgccgggggccgtccgcgctcgcggaccgcgtgtaggagacgagcggttcccttctccttccccgcggccctgcgggggtgggctcgaggagaagctgacccgggaaggagtaggaaaggggcagaggaactccgcccgccgcgccccctccccggaactgtggcgcccggaactgaggctcggcgaggggcgtcccccattaacccccgcccctccaaatcagcctcgggaccgcccagcctcgtgtcctcaggatctgcctctgagtaaggggaggactttggttgttactttctggtttgccctaaaagttactcggagaggccaacgcgccgcgttcctggattacttgagattcttgagatttatgtccttccgaaaacgagcttttttttccttaagcctcgacctgtctgttcccacctggctccgcagctccctatggctgagcgctcaccgcggccgggtcatttacataagaaagagcctcaggccaagccgggaagctctcattccccgcctcggggtatgggggtggggatggggccggggccggggacgggcagggccaggggcgcgctcagaattgagtttctgaaatgccc

SEQ ID NO: 30199 - DNA, 161 bp, Homo sapiens; identical to SEQ ID NO: 12639
  chr2:817641-817802
  hypo

SEQ ID NO: 30200 - DNA, 1054 bp, Homo sapiens
  chr2:87017505-87018559
  binary
cgagcagaaatagtagccctcgttctctcggcggaagtcgctcagggtgaggacgaaggtgtcccccaacctcttgcccgagaaccgctgggtgtccagcccctcggccgccttgggcttgttttgggagaggtataggaggaaggtgggactggcggcggcgccgcgcggctggaagagccacgagcagcccgacgtcgggttggacagcagcacctggcacttcagctccactgtctcgcccaggttccaggtccgatccagcggcgacacccggaactggctcggcctggcggcgtctgcaggcggcaagcagcgaggctgagcccgcagtcccgcgccccccgccccccgcccgccccatcccctgccttcccgggcgtctcaaactcacggagcagcaaggccagcggcaggagcaaggcggtcactggtaaggccatgacgcgctccccaggacgctgcttggctcgaagctcgggcgcgaggggaggcgcgcgggagccggtggggcgccgaggggggaaagttgcgcccttcggccggcccggagcctgatttcgcatttggaggatgtgatgtcacccgaagcccccgccgaggagagtcaccctccttttcgcggttgtcgccttccagcccggcgaggaggctggggcccgtgaatagggccgtcgaggcagcctggccaggcaactgggggcagctgaaaactgcgggtttggggatgaggaaaagggcttggaaatagtccttggaaatggttgtcttgtgagagtgacagagtgggtgaagggagaccaaagatttcaagaagtgagggcgagagtaggcagcaaaggaggggagtgtcccttcctttgccttcactaaaggcgtctcttgtactgtcaccttgggactttttattggcaaaatgggcactgagggctgaaaaggaagaggaactagcgacctgcccgcttctgaggaactcgctagagcagccccagttttcaccgaggaaggaccctctcccttcccccaggagatttccatgagagcggcagcagcc

SEQ ID NO: 30201 - DNA, 464 bp, Homo sapiens
  chr2:87088698-87089162
  hyper
cgtccaggcttttgaggggaggtggcctcagtccaggggctctccggtcccccggggtaatgcgatatgggggtattttatttccacccttagggaccgtgcctgccaagctgcctcccgggcgccccgccaccgcgggctcgacgctgcaccctgccaggaccagggccaggacagccacttatcacctccccgctcaggccccgggagcgcagacccttgggtagcccgcgcgccgccgccttacctgtcagctgcgcggccaagaggagccacagccgcggccgcatcgtggcgcgcccgggacacctggccccgggggctcggcggagacagtcgcggctggggtgggtgaggagctggccgggcggggcgcctgggtcggggagctgggggggcagtggggagggcgggaccgggcgcggtggcggcgggagtctggtgttggggaccgcgaggtctcc

SEQ ID NO: 30202 - DNA, 152 bp, Homo sapiens
  chr2:875867-876019
  hypo
cgaggccggtttcccgtcgggctgcaaacggcagagcacgcggccctgtcccgggcaggctcggctccaggtggaacccgggacacgtgtacgtcctcagtggggcctccgcattccacactcgagcacatttgaaccccggacacctttac

SEQ ID NO: 30203 - DNA, 1347 bp, Homo sapiens
  chr2:88751675-88753022
  binary
cgggccccgcgggcgcggcgggcgaggcgggcgcggcgggcgcgggctgcgcgaagggccgctgagagcagccgaagtgccggcggcaggcggtggctgcagaaagggcccggccgcggccccggggggcggcggcggcggcggagcgcccaggtacgcggcggcggctgcggcggcggcggagggcgggcctcccacgccgggcccgttgagccacaggtaggggttggcggcggcggccggcggcgcggcgtagtcggccagcccgtaaggcgccctggctgccgggggggcgcccggggcggcggcggtggcggcgggcgggggcaggccgggctgcgaatacactccgaagttgtcgccgcagtagagggccatgtcggcggccgtgggcggctgcggcgcggccgcggcgaggggcgagcggggctggtctcgccgctcgggcgagagcatccctttgggggccaaccctgcggctccgccttcacccgcgctgggcgcccggtgctccgggccggggtcgggcgggtgctagcggagcgcctgctagccggcctcttataaccgagcccggcgcggctcctcctgggccggcccggagcggggcggtggccgcgggcctgggctctccacgcccccgccacgccccacctgcccgcgcgcccaaacccggagcccgcccgccccgcccctaccgcccctctgcccgggcccgggagcgtctgggaggccggcgcctccaggtttcgggcaaaaagcagcaccccattcctagcccacgtttcttaacatcataataagtaaagccacgaatattaaagagaagataacccgaacagtacgaatgatttctaaaaagttaacttggggtggccgctcgggccacctgcctagtcatccttttggcttttctacctctttcctcctaaccttttgtgatcgagtcgcggaattcacgtccagtctcaaccgatcggcttccagtcgaaaataatcgatgtgatttacaacgctttggggtatacggtagaggttattaacaggcccgcttggcgtgtccccttctcctcggggattctgtgattggaggaacggaaatcagtgttgagtttttctaaccaaactgtaggttcgctcacattcgggaagcatttattcgttttctgtgcggtttgtacgggctttcgttgtgatttgttatcttcaaaaacataaaggtgaatgttttcaaagacatttaaataagtaccttcggaattagcattttaaacccgaaagtttcaaagttttaagtaatttaaactgtgcaagaagcgctcatttacaaaaacagcctcatctaac

SEQ ID NO: 30204 - DNA, 348 bp, Homo sapiens; identical to SEQ ID NO: 12643
  chr2:9078588-9078936
  hypo

SEQ ID NO: 30205 - DNA, 211 bp, Homo sapiens; identical to SEQ ID NO: 12644
  chr2:9143655-9143866
  binary

SEQ ID NO: 30206 - DNA, 960 bp, Homo sapiens
  chr2:95691155-95692115
  binary
cgagatgctggtcacctacgaagggagaaaggcacgaggagcgcctgaccaaagtggttttgccctgcttcccgcaagaggtggcacccacggctggaacgcaggagtcagacccacagtccccagctctggacgcccgcagcggggcctcgaagaggttcagggcggtgcccgcggcgctcgggccgggtctcccggggcgtggggcggggggcggggttgggcggcggccggggctcctccctcttctgccccgggctcccctgctcttaacccgcgcgcgggggcgcccaggccactgggctccgcggagccagcgagaggtctgcgcggagtctgagcggcgctcgtcccgtcccaaggccgacgccagcacgccgtcatggcccccgcagcggcgacggggggcagcaccctgcccagtggcttctcggtcttcaccaccttgcccgacttgctcttcatctttgagtttgtgagtggctcctggccggggaagggacggggtgggctgagccgtgcgctctctcgggcgcccagcacagctgtcggacgggatccgctagctgcgcaggttctgggagcatcggggcagcaggcgcagggcggggactaagccagggaagtcccctcccacctccggtcctttgtgcccttctagaccaacagaatgaggggaacagtctacaggactatggaggaaaaactgggttcccaactggggtcagatgtaggcagcggggcagggggggacggctcttggttcgctggtcccaaagctgcgcgcggggcccacttgacgcgcgcagcgccaccgaagctcccgccgcgctttgcgcggttgggtagaagtgcgcagcttttacaagggagaaggtttcgttaaaaaagaaaaaaaaatcagcaagagaaacattagtattaccaaccgagatttggagatgagagggagctgaatcc

SEQ ID NO: 30207 - DNA, 486 bp, Homo sapiens; identical to SEQ ID NO: 24290
  chr2:96990889-96991375
  hyper

SEQ ID NO: 30208 - DNA, 608 bp, Homo sapiens; identical to SEQ ID NO: 25497
  chr2:97193030-97193638
  hyper

SEQ ID NO: 30209 - DNA, 250 bp, Homo sapiens
  chr2:97203334-97203584
  binary
cggtctgcagaagggacggggtggcggctggggagcgtcaggggaagagggcaagagcgtgggctacgagcttgcaggcgatgcccggcttcgcgctcggcgggagctgcgggccaacccgggcccgcgctccgtccctccgcggtgtctaggggtcgcccgggctggggtcgcgtcaccctccgcccagcgccggcgtggtggggcttgcgcggtgcaggacccccgagggcccagggggtcccaaggc

SEQ ID NO: 30210 - DNA, 791 bp, Homo sapiens
  chr2:98703022-98703813
  hyper
cgcccacgtccagtggctgagctacaacgaactgccccacctcttttaaagcgtctttctctgaactgtgcaaggaagagagcatcgcctgacagtggtgaggtgaaaattaaaactacacaggggtcaatgctctgctgaaaagtatgaaaagaagttcgtttgtagcgtttcccgcagtctcctcgcctctcctcggcctctggcgccttcctcccctgtctgctcgcaccctatatttctaccccagctcatcagtgtatttgtttgttaattcattcattctttcattcatattctccgctgttgttaattttcccattgacagtaggcgcaaggggcaacgccactcgccctgtccctctagcgtggcctctgtttgggggtctggggtggaggtcgtcccggcccgggtggttccggacgccggctttccgcacctggctcggtgacggcctcggcgccccgccctcttggccacggtccgcagccatcgccccagtgagggcgcggtctgtgggcggggccggctccaggagccgcgctgtgattggccgtgtccaggcaaccgcggagacgccgtcgtcaacagaccgcgctcggaaccagaggcgcgggtcacagagacctagaacagctggaatccttcgcccccggcgcgcagccttcgcccgccggaatcgctgccttatccaccagcgggatgcttacctcgcccgccctctcgggtcaggcgggcccgggaggatgggagggtggctgctgagcgggagccgccacgtcttccaccc

SEQ ID NO: 30211 - DNA, 662 bp, Homo sapiens; identical to SEQ ID NO: 24291
  chr2:99438949-99439611
  hyper

SEQ ID NO: 30212 - DNA, 836 bp, Homo sapiens; identical to SEQ ID NO: 25503
  chr20:1783711-1784547
  binary

SEQ ID NO: 30213 - DNA, 1395 bp, Homo sapiens
  chr20:19192506-19193901
  binary
cgggaggcccgcgagaagaggcgaggccagaggctgggcgcgggcagccaagcgcactcgcggcgccccgactccaggtagcacgtagagaggaggctgaagagcccctcggttttccgaaagtttccagcgaatccttcttggtgaagatcggcctctgggaggcagcgtgtgtgcttcccgagagggggccccctgcgccgtccctcttcccctggcacagaagggttgaaggactgcacacagggatccctccccagcccagtctcctcccagcgcgccccctccccgccatgccggccagcgccgggctgtgtcccaggcactgccccccgccaaccctggcccgaccagcctcgccgctgcaggctgccgggagctgcgctagctcatgctcccagctcgctcggtgctccctgttcgctccggcccggccccggcccccatcgcgccgaccatggaataggcgggcggccccgcgaggcgctcctgcagccggcgaggccagagccagtccggggtggctttgccaaccggcggagttggccagcggcgggccctcctaccgtcggtccttccccgctcctcctcctctgccccctccgcccccgcctcccggccgcccccgccgcccccgccgcgccgccgccccaggccgagcgcgggcgcggagcgtgggagccatggcgcgcgaggaggagcgggaccccgagcgccgggaggcggcggcgcgggcgagcggcgaggaggaggaggagggaggggaggagggactgggcgatagcgacgaggagggcgacgacgaggagacgggcagcggcgaggaggaggaagaggaggcggaggcggcggccgggtgggagcgcagcgaggacgcgcggctgctgcgcgcagggctgcctcctgccgctgtccccgccgcggccgcccgcgacaggagcggccgccgcccgccgaggccgccgcccggccgcccgaggatgcggccgtccggcgacgaggaccgcgcgcgtcgccgccgccgccgccgccgccggagggaccttctgctgagccagctctgcttcctggcctcggtggcgctgctgctctggtcgctgtcgagcctgcgagagcagaagggtgagtgcacgctgcctgccccgagtgggcgctgcggctccggcggctcggggctcccggggctgggcgcggggctccttcgggcggcccggccggagccccaggataagcgggctgggttggcggggggagtgggatgccaggcacgaggactccccctgccccacgcagaggcatggaggtggggaccctgagcgccagcagccagcaggcttaggcgtctggccgccctgggaacatttacctgtgcccgcctgtgcgctgcttactcgc

SEQ ID NO: 30214 - DNA, 143 bp, Homo sapiens; identical to SEQ ID NO: 12653
  chr20:19497049-19497192
  hypo

SEQ ID NO: 30215 - DNA, 1975 bp, Homo sapiens
  chr20:20348052-20350027
  binary
cggggaacccttttgcttggcctcttgggtccagcggcccatccgtccaaggtccgggcggaggccgtccggaccctgctgctctctcggattcttgtttatttcccaaacaccacgcggagccactgcgcctccgcaacgatctcccccgcaccgccccggcgcgcccccgcccccacccaatcagcgcgcacaacttccccctcggctccggctcgcggattgaaccctcctgacatatttggggccattcttctcctttgttgctattttgctagcgacccgcgggtaatccccgcgcgggaggggggcgtgcattgtcgcgctgatggacgggcccatttggcggctccgcgccccccggaggagagacacaaagcccaggcacgtgcgcctccccatagagaagcagcagaccgtgaagggaggcggggccgggcgtgtgcctggaccgggcggggcggcggcgccgggcggggcgaccaggggcgcgcgcgggggccccgcgccctcaggtacatctgccgcacctaccgggcgacccccgagtcccggcccccttttggccgccccatcgccctcccaccctgccaggctgaggagctgcggacgcgctgattggctccaggggaagcgggaggcgagaacaatggccccctccccccgttaaaagggagcggctgccgggcccggggacagggacgcgcgtgcagggcgcagagctgggccgagccgtcgccggcgccacgcgagtcccgcagccgccgcgcccgggcaatgggccgggggcactgagggccgccggggccgagcgcggaggggggaccgagccagtgccgtgccctcgggccgcgccaacatgccccgcggcttcctggtgaagcgcagcaagaagtccacgcccgtttcctaccgggtccgcggcggcgaggacggcgaccgcgcactgctgctctcgcccagctgcgggggcgcccgcgccgagcccccggcgccgagcccggtccccgggccgctgccgccgccgccgcccgcggagcgcgcccatgcagcgctcgccgccgcgcttgcctgcgcgcctgggccgcagccacccccgcagggcccgcgggccgcgcacttcggcaaccccgaggctgcgcaccccgcgccgctctacagtcccacgcggcccgtgagccgcgagcacgagaagcacaagtacttcgaacgcagcttcaacctgggctcgccggtctcggccgagtccttccccacgcccgccgcgctgctcggagggggcggcggcggcggcgcgagcggagctggcggaggcggcacctgcggcggcgacccgctgctcttcgcgcccgccgagctcaagatgggcacggcgttctcggctggcgccgaggcggcccgcggcccgggccccggccccccactgccccctgccgccgccctgcggcccccgggaaagcggcccccgccccctaccgccgcggagccgcccgccaaggcagtcaaggccccgggcgccaagaagcccaaggccatccgcaagctgcacttcgaggacgaggtgaccacgtcgcccgtgctggggctcaagatcaaggagggcccggtggaggcgccgcggggccgcgcggggggcgcggcgcggccgctgggcgagttcatctgccagctgtgcaaggaggagtacgccgacccgttcgcgctggcgcagcacaaatgctcgcgcatcgtgcgtgtggagtaccgctgtcccgagtgcgccaaggtcttcagctgcccggccaacctggcctcgcaccgccgctggcacaaaccgcggcccgcgcccgccgccgcccgcgcgccggagccagaagcagcagccagggctgaggcgcgggaggcacccggcggcggcagcgaccgggacacgccgagccccggcggcgtgtccgagtcgggctccgaggacgggctctacgagtgccatcactgc

SEQ ID NO: 30216 - DNA, 2331 bp, Homo sapiens; identical to SEQ ID NO: 25505
  chr20:21080357-21082688
  hyper

SEQ ID NO: 30217 - DNA, 635 bp, Homo sapiens; identical to SEQ ID NO: 24296
  chr20:21372082-21372717
  hyper

SEQ ID NO: 30218 - DNA, 976 bp, Homo sapiens; identical to SEQ ID NO: 24297
  chr20:21377197-21378173
  hyper

SEQ ID NO: 30219 - DNA, 253 bp, Homo sapiens
  chr20:24523866-24524119
  hypo
cgccccagtaccagagccaccgggtgggggccagcacagtgccggccagcctggacagcagcaggagtgagccgatgcagcagctgctggaccccaacaccctgcagcagtcagtggagtcccgctaccggcccaacatcatcctctattcagagggcgtgctgcgctcctggggggacggtgtggccgccgactgctgcgagaccaccttcatcgaggaccggtcgcccaccaaagacagcctcgagtaccc

SEQ ID NO: 30220 - DNA, 189 bp, Homo sapiens
  chr20:24570974-24571163
  hypo
cggggccaacaggggcagaccccgagactctttaggctgtgaccgagcggggcttccactttgggataagaagcctcgggggtttgagcggaggagaagcccctgtggccacatgctcccgggagccttcagagaacagggcggagggggaggcgcagggcgacgacggcagtggtcaaacgcagaacc

SEQ ID NO: 30221 - DNA, 766 bp, Homo sapiens
  chr20:2780877-2781643
  hyper
cgcgcgcgtgtgtgcgcgtgagtgcgagtgtgcgtgcggggtgagtgtgcatgactgtgagtgtgcgtgggtgtgcgtgtgcccgcgtgttagggagggatcgccccacggggcaggagagccgggcagtcggcttgcgggggagcggaccgtcggtcggggaactcaccgttagctgtctccgccggcggctgtgccgggctgctatgcagggccggggtcgagcctgggaccttggtggtcccgggctgcgcgaggcccagcaccgagttcctgggcgcccccagagccgggccgacggccggcgcgaaggcggccagggcgagcaggagcccccacatggcggggattgagtgccaggggcgcgcgggctacggcgggtggcgggtcggtctcttcctgccgagtgcgccgagccccccgccccttcctgccccccgcccctccgcagcctcctgcccgcccacagcccgctgcccgcctcggacctcggagaggaggagagggccgggaggagcgagcggggctgacctccaaggggccgccccaagtctcaggaccgccgactctgcccttcctctccgccgtctggggccaacccgcctcgttggcgcgctgcgcctttatagtctgcaaagccacactgaagagaccagagatcacctggtggccatcaagtcgaccaacaggaggcaaagccccttatctgagcaattcagaatgacacttccctattgtctaaagccacatctggtaccaagcttcc

SEQ ID NO: 30222 - DNA, 313 bp, Homo sapiens; identical to SEQ ID NO: 23210
  chr20:291046-291359
  hyper

SEQ ID NO: 30223 - DNA, 131 bp, Homo sapiens
  chr20:29873920-29874051
  hypo
cgtacaccgttgagtttccccgcttctgcacgaaccacagcattggcaacacctgctctgtggggctatcacacacaaaccccacagaggcctggtacacttcgatggcttcccccagggactgctgcgcc

SEQ ID NO: 30224 - DNA, 1247 bp, Homo sapiens
  chr20:30555404-30556651
  binary
cgaagacaataagaaaaggggacccctcaagatcaaaggaggggatggaacaatatgtgagcactcaggaaactggaaatgagcgttagcatggagtgactgctaaagggttactggggggcccgcccaagtcccccagctcctttcttccaagtcccccacccacccccccgtcagacccaggccactggaggtgaacacaggagaaaaacgaagtggagagaatgggaagggggaggcgataaacaaaaaagaaggaagtgcagtccgaggggagatgagagacagaaagcatggggttggagccccgcgcctccgaggaaggagggagagggtgacctggggtgcgccccgcctcccctgcttccgcattcccgggggctgcccccccttcggccgcagctcaggcgggtgggggcggggcggggcggcgccgaggagaatgaataattgaagtggaggggaggaggaagaagaggagaaggaggaagaggagccgcccgcgcagggtcctccccacgccgcacccccctccgccgcccggaagtcgctccccgcctccctctccgccaacatggccgcgaagtcggatggagcggcggcctcggccagcccggacccggagggggctgccggtggagcccggggcagtgccggcgggcgcggggaggcggcggcggcggccgggcccccgggggtcgtcggggcgggcggcccggggccgcgctacgagctgcgggactgctgctgggtgctgtgcgcgctgctcgtgttcttctccgacggtgccacggacctgtggctggcggcctcctactacctgcagaatcaacacacctacttcagcctcaccttgctgttcgtgctcctgccctcgctggtcgtgcagttactgagcttccgctggttcgtctacgactactcggagcccgcagggtccccgggacccgccgtcagcaccaaggacagcgtagccggcggagccgccatcagcaccaaggacagcgccggcgccttccggaccaaagaaggcagccccgagccgggtccccagcctgcgccctcctcggccagcgcctaccgccgccgctgctgccgcctctgcatctggctgctgcagaccctcgtccacctcctgcagctcggccaggtctggaggtaggagaagcgcaggtggagggacctgagcccgaggagtgggggtggcgaagggctacctgacgtcccagccctgatctgacctttcc

SEQ ID NO: 30225 - DNA, 485 bp, Homo sapiens
  chr20:30777843-30778328
  hyper
cgtcccggacccggccattttccaggctcggagtagtcgccgtggaggccgcttccccgcgcccaggggaagggaaggcggtcccggggcccgctgcggggtggagggacccgcgccccccagcttctcgggcccgggccgcggggaccgtgcgcgcgtccccctcccgggcaaggccgggcggcgggcgcgccgcggcttctggggtccccgccctcttgtccgccatcgcctgcgggagcctctggcctggaggggctcggggcgcgctggcgactgcgggctcggcgacaggggcggctggtggcgggaggacagtgggaggaaggctccgccccacgcgcccccctctcggatgtgattcgccggggtctcccgcagccggggcgagcggcttggaagcccggaggaggggtacggaactgcccgatggggatgcgaccgcgggcgccagacgaactgtccccacattcgttggcgctggc

SEQ ID NO: 30226 - DNA, 675 bp, Homo sapiens; identical to SEQ ID NO: 25514
  chr20:3229128-3229803
  binary

SEQ ID NO: 30227 - DNA, 1281 bp, Homo sapiens
  chr20:34188865-34190146
  hyper
cgtgttggaggggagcgtggggagggcgagtgctggtaaatctctgcacctcaccctgatctcctccaagtattcgggggtgagggcaggggaggggggctaagccgctctgaaacggaagaagttggccagcagctgcggacgcgccgctgtggaacacgacctggggcgcctccaaaacagctcagcgccccaaggagctggaaatcgcgggagcccggcctcgggggacgcagcctgagccctgggggcggggtcgggattggggcggagctacgggcgatcggccaggcctgggggtcggggaaaggagtggaccggcagtgtcagcgtgtgcacagctgtagaagggtgggactgggctggttactggacaggcggttgtggtcagaattttgccaacggagccaaaccgatggtggggttcacagtctgggggcggcttgaagcagtttgttttgcgggcggaccagccctcctaggcggagcggggtcgcgaggatggggcttgcggttgggaatgggccctatggagccctatggaccgaggcgagtgaggccagatttgccgcggccagaagcgctcacccgcgcggcccggatgggagatccgcctcaggtccggcacgtgcgtagcgagtgccgcgtcgaccaggggcgcgtcgtcccgcagctgcaggcggaggctgcgcgtcagcggcgggaagagctccacgaagctcagctgctcgttccattcgggcgccgccgcctcggcgctcaccgacgtctcgccctgaaggtggcgttaaagacaggagaagggagatcagcgcggagtcggggccggagccgcggcgccgtgggccccggagggacttacctcctgccccaggaaagacacccgcacatagggctccaccaggacgcgctggtcgtgcagggcgcggaccaggctgcccagcagccccaggcgcagcgcgggaagcccctcggcgcggtacaggcgcacgcggagccgcgcccatggcctctcggcgggcaccccgcgcggcaggagcaggttcctaggggagggggcaccgagcggggggggagaaactgggatctcggcccctccccttatccgcgccccacggccacccccggatccatgtcctcctccccacctcaccccggctcacttctcgatgtccgaacagtgccctggggccgggggtagcattggagggggcaggtccccgcgcgccctcacggacaaggtgaccttaatgaaacccttggtcccggcgcgggtgtctc

SEQ ID NO: 30228 - DNA, 790 bp, Homo sapiens; identical to SEQ ID NO: 22883
  chr20:37302417-37303207
  binary

SEQ ID NO: 30229 - DNA, 2195 bp, Homo sapiens; identical to SEQ ID NO: 25521
  chr20:37433723-37435918
  binary

SEQ ID NO: 30230 - DNA, 1301 bp, Homo sapiens
  chr20:39994545-39995846
  binary
cgaccgctgtggacggctgtgccacagcacaggcccggagccaggagcccgctctggctctgcagcccggccacgctggggctcccatggggttgctggggccaggctgactgcgagagggcagcggccgcccggatgcgcagctctatctcctacctggccgggccaggggagagaagggaggcccggggcgggggagccccgcgtgctcagcgcgcggaccgcctttcctcctctccctccacctggtccgctcgcccggagtctgcacacagcgcagctggaaaatgttacttcgctggaaaggtttccgctggcactgccaggatcccaagccgccgcgccaggccccctcggttcctttttcctcgccagccccgcaacctcccggagcgtagggcgctcgcctgggcaggggctcggccccgggcgccgccccctctgtgcagcggcctcggggtgcccggggcctcgacgccccccgcgggtgcgggcaggtgggagcggcgacgcgcgcgggcccatccctccctcttcccgcccgccgcccgcccgcgcttacttgtgcggccccgggcgcagccgcgggcgccatcccgtcgtgtagagactgtagcgggaggcaccgggcggcgcaggccgcgccaggagcggggtgcccctggcctgcgcccccgagagcagcgccgcgacggcgcacagccagacgagcaggcggcggcggcccatagcggcccccgcgcctctgcccggccccgcgcggtgccccccgccgggtgtccgcctgcagcgccgcgccgcccccgccgctggtcggcccgggtcccgccccgagggtcccggggtccccttcggcccccgagctcgctggcccggccgcctggcgcttcgcggcggctgcgtcccgcggagtggccggcgctgctagcggctggggccgcggaggggaggcgggaggcgggctctttgcggattagcataaacttggggccgcgccgctcgccgccgccagcccctcgccccagctccgagcggacggccgaggagccgcctgcgaacaggaggttccaaagggagcagccccaggtggcaggggcgcaggccgccgcgccctgggaggccccccgagcacaccagccactctgtcgcctgcgggcacggggcgagacgcagagaagcggacccctgaggccagcctgggcgtggactttccaggagtcgtccaccctcaggatacgcttgtcttcagagtccgtgtgaacccgggaactgctctccagggctctggagccgagatggcc

SEQ ID NO: 30231 - DNA, 1925 bp, Homo sapiens
  chr20:42543097-42545022
  hyper
cgcacccacgccgcggggcggggactagcgccgcctcaaatatttagggcaagggagtgtcccacttctggggaggggtgccgttcgggcttctctcctcaccgtgggtggcgaaaggcgggacggaaaagcgccgtctggacaggcgcgcccccctcagggatgcagggccgggcgggggacccggcggcggcccagcccggaggaaggacctccacgccccggcccgggcccccgggcccccggccctaggcagcgcccgaggccggaacaatagcgcgcgcgggcggggcgggggcgggggcggggcgctcctctgggcaccgcccccggcccgccccccgcgctcgcagtcccgctcgcacactggctcccacccgccgcccgcccaggcactgcccgcgggagccgccgccgccgccgccgcgcccgccatggacgtccgcctgtacccctcggcgcccgcggtgggcgcgcggcccggggccgagccggccggcctggcgcacctggactattaccacggcggcaaggtaggcgggggcgggcgggggtccccggcgggcggggccggagtcacctggcagctcgggactcaggcgctcccggggtcacacggggccgcgcacatcagccccgccgacgggcacgggcggctcacatcgatcccctcgcggccacgctcacgccctgagttgttgggatcgcgggcagaagtcatcccgacagccacccgtgcgacgacacagtggcccctcactcgcgtccccctgacagcctcgcagtcattcacaagccgtcacagtgacccacagccacacgcaggcggccaggcactgcttacacggtcccgccgtcccacgcaagtcaccctgacagtcacttatacacaacgacacgcaaccactcacccgcaaacagcctcaccgccacagacgagtcacccacagacgctccgatgccccacacaccgtgacatgcccccacccgctgtcacacccaggcacaacgggggacagtcacacaaagaagtcgcccgacagtcacactctcgcagccacaacgcctcacccaggcgcacgctgtcacacacagccacccccctggacggtgagcctcagacacagatcgtcctgacggccacacagtcacacgcggtcacacccagggacggccacacctcggtcatccacactcgcgcgtcgaggtttaacttctcagcgccgcagcacactaattgggcagtttactaattggccgtcactgcctggcggggcctcggattccgagtaggctgcggccaatcgaggcctgtgtcctcccgggagcggtgagccggcgtccctccaggctggggctgtagtgccggacaccctccctcctccatgtttccaggatctatccccccaccccagccaggtcccagctgcgctgcgccgggcgcattcccagtgatggaggcttgcgtgcctggaaccccgaacccgaggcgtcaggtcccactgccgggtctggcccagcctggatgggttgggtgcctctaagcagtccgcgtccccttcggtcgccggagagggaactttcaaacttagttaggaagccagactgtccgcgcgtccgccagtcggtgcgtcggtcccgggccggctggagccaagcgcgggttttcgtcactcggagcccggattgaacagcgcgcgtgggtttcccgcagccctggcgcagacgcgtgggctccgtggcgatgcggggtgagtgcgcgtccagtggctggatcggcgccccccagggtctctccccaacctcgcaggcttttcgtcaggcccctggtagtggggatgaggcaggagagaggcgtcccggcgcggatcccggggcctcccgggctgggcctccctgagtgcgccctcaggccccaggggagc

SEQ ID NO: 30232 - DNA, 323 bp, Homo sapiens
  chr20:43017186-43017509
  hyper
cgagctgtgattggtgatcgaaccgagcaggcctcctctggatttggagagacatagtgcgtctgggcctgtgattggcgggattgctgtgattggtgaagtccctaaggctatctaagtttctgaacaccagttcctgcgttggccacgaggaggagcccaggaagcgcaaagcgcagcactgcggagagtcttggccgcctcctccgggacgccctccggcccagcgcggtgcctgccctgccctgcgccctggggcaaccgcgggatgaggtggggcggcaaagggtgtcagggctcccagctgcggcccgggtggccac

SEQ ID NO: 30233 - DNA, 746 bp, Homo sapiens
  chr20:43438799-43439545
  binary
cgggccgcgcgcttacctgcgtcctcgtcgtcgaaggagttcatgcacgggaagtagatggcgagcgcctcgaaggaggcggacagactgaggcggctctgcgagcgctccatgcccgcgccggcgccgggcgcctcggccgcggcggcggcggcggcggcgggcggcttgggcagcttggccgccccattcttgacgcggagtacggcgcgcggcgtggtggcggcggcccggggccgggccgaggctccgctgcggggctggcgggcgcggcggggccggcgggcgggccaggagctggcggcgcgcggagcccgaggcgcgctgtgctgctggcggcggcggcggcggcggcggtggcggcggcggtggcggcgcagcgcgctctggtccgcggcgccccccgccggcagcgcgaggcgggcttggagcggcgccgcagccaatccgtgccgccgggggagggggcgccgctgcggggcgtgggagcccggagggcgcgggctgcggcctcttctagcagcccccgggcccggcaggtgcgcgcggggaggcaggcgccgggcgaggttgtctgggccctggtccgagggctgttcccgaccccgcctcggcccccaccctcagccggccgacttgcggagaggccggcgtccagtccctcacccagacaggcctctcccagagacactggcgcgctcggaggggatgcgctcaaagggtcccgcccaggcgggtcggcactc

SEQ ID NO: 30234 - DNA, 923 bp, Homo sapiens
  chr20:44936786-44937709
  binary
cgccgcctgcccggccgctcccgccggccagggggctccctccctgccgggcagcctcccctcggcggcgatccggccgctcctcccgcggcaccccgcgctcttacctcggggagcggcccggggctccccctagtcctgccgcctcgggacgctgcgtggggcgggagccccggcgcgggcagcgggcgagtccggagccccgcggccgcccgcaggagccggagggagagcgggagcgagagggggagccgcggcggcgtgtgcgcgcgtgtgtgtgagcgagagagcgagagagcgagagagcgagggagtgagcgagcgagcgggagcgagggagtgtgcgtgtctgactggggggaagtgtgcaagggacggatcccttccttcctcccgcagcctctggtggagactcggagaatgcagggcccgccgggcaggagccgcgcagcgccaagccgcaggcggccgccggcccggacccccgcagccggggaaccccagcccccgccccccggatcgcgcccctcctacaccaggaggggacagcctttccctctctcgggcggcccagtcccaggaaaccccccaggggacagtgcccctccctcctccaaccccagatccgcgcgaagggagcgcccccaggagggggaccatctacctcctcgcctggcagctccccaggtggccgcagtttgagaccagagcctatttccccacctgattttactgcgaatagggcttcccatttccgccccctgactactgcgggaggccgccttcagaggagcaggggcgcaggccagggtaggagcaggcttctcgaacagtggccgccccggcttgctgcccagaaaggcaccttgcacagaccagatctgccagttcagaaacagtcactgtgcattgaggtggacacc

SEQ ID NO: 30235 - DNA, 1409 bp, Homo sapiens; identical to SEQ ID NO: 27933
  chr20:4803013-4804422
  binary

SEQ ID NO: 30236 - DNA, 827 bp, Homo sapiens
  chr20:50720375-50721202
  hyper
cgagcaagctttattttaacatataagctattcgtttagtggaggcttcattaaactactcccctccaccaccacctcgggaagttgtggtcaaaacccaccagaccgactgtggtggaagttgatgcggaagctggagagcccgcggctctggaggggtgagccgccccggagaggggacccatcctcctttccgcgcccggaaagagcgggggagaagaggaagtccagttacaactcctttcctcagccccttaaaggaaaggtatcagctaaccacggggagctggcagcctaagagaaagtaggaacctacaatctcttaatctaagcacaagataagcaaaaagggaagcgccttagaaatgcagattccccaaccccacccctgagattccagtggaggcgggggatggggggatccctaacttgcaggaagaatttggcgagcgagaaaaggtcccctcccgcaggctcttctgaagcggaggatcccgggacgagaaatgctgcccggggggcttaaggtagccgacgatctccttgctacatcctgtgtccacgtggcagccgaggagggggtgtgggggccgcctgttaagtgcgacagcatcactgctctatccccaccacggctcccacttcgctcagataaaatgcagagctcttaccaaggctcacggccgtcccccgccccccaccgtctgcccccatcacctctcgggcctccggtgacctctcgggctacagcagcgctgacgccctgggtccctgcgcttctgttccctcggcctggaatgctcttcccccgggtacctgcacagctc

SEQ ID NO: 30237 - DNA, 415 bp, Homo sapiens
  chr20:57767480-57767895
  hypo
cgtgcgctccacctggacgcccccagacaagtctcggcccctcttcttccactccgtccccactcagctctccaccaccgtggaatgtgtccccgtcaccaggagcaactcgctgcccttcgtcgagggctccaggacgtggctggagcccagggagccccgggacccctggtccaggacgcagaagcctctgagccccaggcccggcccagcccgcctgggctgccgctcgggactaagctcgactgacgttcccagtgggcatccccgggccctggtcagacaggccgcggtggaggacctgccaggcacccccattggcgatgccctggtgcccgcagaggacacagacgcaaagagaactgctgcgcgggaggccatggccggcaagggcagagcgggcggcaggaagtgc

SEQ ID NO: 30238 - DNA, 211 bp, Homo sapiens; identical to SEQ ID NO: 12669
  chr20:60094644-60094855
  hypo

SEQ ID NO: 30239 - DNA, 146 bp, Homo sapiens; identical to SEQ ID NO: 12670
  chr20:60173821-60173967
  hypo

SEQ ID NO: 30240 - DNA, 428 bp, Homo sapiens; identical to SEQ ID NO: 12671
  chr20:60226081-60226509
  hypo

SEQ ID NO: 30241 - DNA, 349 bp, Homo sapiens
  chr20:60235344-60235693
  hypo
cgcccgcaaggcatctgttctcttcttatcaaacaaagagtgtttaataactataattaattcactttggtgctcctatgaatcagacatattagacagaagtcagtgaatgttagcagtaaaatgcctcgaagtgttcatcatcgaaggcaggtgacgccgggactcgcttgcacctcactcttggttctgctttcccccaagtcctgcgtgtatccattttcaaacatcagccgtggcaagtctgttacatgtgggtgcgcctgactgtttgaatatggattgtgtttgcagctcaggaggcagaggggtggacggggcggtcgttcccggcaggacctgtgggttc

SEQ ID NO: 30242 - DNA, 738 bp, Homo sapiens
  chr20:60238306-60239044
  hypo
cgagggcttggcgcccacgacaaatgagtccacgcaggaaaggagtggcacccgcaggaggcctgtgctgcggagctcctgggagggtgacgctggggcaggggctgctgcggacaagcgttgggaggcctctctgaggaggcagtgtttgcgctgaaacctagaaaaagagctgcgtaaaagacaataattctgaaggctctgggtcgggggcatttcaggcgagggtcctagaaatgccaatgctggggatgccgccgagtgggtcagaggggccggaggaaggtgaacagggcagggggcagtggggctggattttatcccaagtgagtcgggagctgctgggacggcaggaccgggtgtgtgtgtccaagagaccatcttggctgcccaggggaagcggggactcgaggagagcagggagtgctgtcttcccggcgggagctggcggtactgaggaaggacgtgcagaaccaggcagggctgacagacgcggggtcgggggaagatcaggagctcccggtgtccaggctgcacaatgtgggcaccactgaacacggggtaaaccaatcaccagtcactcccacgctgggtcttccagctccctcgaggccgccctggccctccacactcccaccgctggcgccagcatctgtgcccgcggcagtttagagtgacactgtcctctgtccagcaccggtccacgttgaggtgtctgtgtgccaccgggacccttcc

SEQ ID NO: 30243 - DNA, 508 bp, Homo sapiens
  chr20:60272973-60273481
  hypo
cggagtaagtgcctccctgcagagccagggctgggcagcagaagtcagagatggagccaggagaagagggttctggcctggccggccattccttggctgttttgctcaggctcatcactgagctggcaccatcttgggcctgtctcacactgccacactgcccgagacagcagccattagccgcacgttgctggacagcacagacctggcacgtgtcgtccaccctcggaggggtccccttgcacgggctccactccggacggtccctgagactctcccgccctcacgcctgctctctaagccaagcacaaagccaagtgcagcccccactgaccattccagcccatgccggcgtctgccccaggccccagatccgtcctgctggtgcgattgagggcacagagtcgagccttcaagtaggtcttctaatatggctccattcatgcagaaacctcccagtggggctgtgccaggcacttggaaagtgggagccgcagccctgccgtcc

SEQ ID NO: 30244 - DNA, 546 bp, Homo sapiens; identical to SEQ ID NO: 12674
  chr20:60275663-60276209
  hypo

SEQ ID NO: 30245 - DNA, 489 bp, Homo sapiens; identical to SEQ ID NO: 24319
  chr20:60281418-60281907
  hypo

SEQ ID NO: 30246 - DNA, 249 bp, Homo sapiens; identical to SEQ ID NO: 12675
  chr20:60313847-60314096
  hypo

SEQ ID NO: 30247 - DNA, 383 bp, Homo sapiens
  chr20:60352666-60353049
  hypo
cgcacacacgtgcatacaaaaacacacgtctacacacgcacacacgtgcatacaaagacacacacccatacgcgcacacacgtgcatacaaaaacacacacccacatgcgtgcacacgtgcatacaaaaacacacacccacatgcgcacacacgtgcatacaaaaacacacatccacatgcgcacacacgtgcatacaaaaacacacatccacatgcgcacgcacttgcatacaaaaacacatccacatgcgcacgcacgtgcatactatacacacatgcacacacgtgcatgcaatacacacatccacatgtgcatacacgtgcatactatacacacatgcacacacgtgcatactatacacacatccacatgcacacacac

SEQ ID NO: 30248 - DNA, 350 bp, Homo sapiens; identical to SEQ ID NO: 12677
  chr20:60373188-60373538
  hypo

SEQ ID NO: 30249 - DNA, 410 bp, Homo sapiens; identical to SEQ ID NO: 24320
  chr20:60448652-60449062
  hypo

SEQ ID NO: 30250 - DNA, 653 bp, Homo sapiens
  chr20:60485014-60485667
  hypo
cgtggctgcagggctgacgcacctgccgggcaggtctgcacgcctgcttcagtggggccccggcagccgtgctatgaggcgtgcactcccgtgcacccctgagcagcctgtcttctctgattcctgatctgggcgtggctgacacggtgtgttctgtttgtgaacactcgttgagctgggctgacacggtgtgctctgtttgtgaacactccttgagctgggctgacatggtgtgttctgtttgtgaacactccttgagctgggccgacacgttgtgttctgtttgtgaacactcgttgagctgggctgacacggtgtgttctgtttgtgaacactcgagctgggctgacacggtgtgttctgtttgtgaacactcgttgagctgcacatatgctacgtgcacttctctgtgcatatttacacttaacacgggtttgtgacattctttccttccattttgcagtttgcaggggaggtccccgaaaaccgcgtggagaccgtggtcgcaaacctcacggtgatggaccgagatcagccccactctccaaactggaatgccgtttaccgcatcatcagtggggatccatccgggcacttcagcgtccgcacagaccccgtaaccaacgagggcatggtcaccgtggtgaaggtgc

SEQ ID NO: 30251 - DNA, 347 bp, Homo sapiens
  chr20:60494919-60495266
  hypo
cgcggtgattgcatggaagcttgtgattgtgtggaagcatggtatcgtgattatgtggaagcgtggtgtcacggtgattgcgtggaagcgtgttgtgattgtgtggaagcgtggtatcgcggtgattgcatggaagtgtggtgtcacagtgattgcgtggaagcgtgtcgtgattgtgtggaagcatggtatcgtgattgtgtggaagcgtggtgtcacggtgattgcgtggaagcatgttgtgattggaagcgtgtcacggtgattgcgtggaagcgtggttttgtgattgcatggaagcatggcgtcacagtgactgcgtggaagcgtggtgtcatggtgactgc

SEQ ID NO: 30252 - DNA, 442 bp, Homo sapiens
  chr20:60992542-60992984
  hypo
cgtctgtcccgtccacgcagcccccccagtcatctgcacgctcctctgtgacgtctgtcccgtccacgcaacgcccccccagtcatctgcacgctcctctgtgacgtctgttccgtccacgcaccaccccccccagtcatctgcacgctcctctgtgacgtctgtcccgtccacgcaccccccccagtcatctgcacgctcctctgtgatgtctgtcctgtccacgcaacgcccccccagtcatctgcacgctcctctgtgacgtctgtcctgtccacacaccacccccccggtcatctgcacgctcctctgtgacgtctgtcctgtccacgcaacgcccccccagtcatctgcacgctcctctgtcacgtctgtcctgtccacgcaacgcccccccagtcatctgcacgctcctctgtgacgtctgtcctgtccacgcaac

SEQ ID NO: 30253 - DNA, 991 bp, Homo sapiens
  chr20:61637169-61638160
  binary
cgcgagttcccgggcgcagagtccagcgtccggctctcgagctcaatcccgcgccccgacggccttggcgcttcccgctgcgctaaactgtccaccgcgcacaggctggaagcgaagtcgggccccctcctcctggtctgcagggtccctccaggcctttcctgtccgggcagagagacagtcacaggggcgatcggaggacgcgtgcgggagggccgggggcccgcgcggtcacggcttctcgtgacagtgtttgcaaagcgcggagggcgtcccggagaaggcggcgcacttgtcagggcagggccccagggcggcgcctgcggagaaggggcacacagtggcctggccgaagggcgtcaagggcgcggcgtttacgggcgcggccaggccctggccctggttgaggaaggccaccaggcgccgcatctcgtccagggcctgcgcctgcatgaggatatagttcttggcgagcagcagcgtggcgatcttggagagcttgcgcaccgacgggctgtgcgcgtaggggatgacggctcgcagcccgtccagcgcgtcgtttaggtcgtgcatgcgccgccgctcgcgcgcgttgatgctgagccgcagagaccgctgctctcgcggccgccgccgcccgtccgccgcgctccctggcccgcgccgccgccgccgctgctcgaaggcgtcgtcctcgtccccgctctgttcgccgctgctctccgccgcctgagctggggcgcgaggtgcaggcgccgcggggaggtcgccgcccgggcccggagtgccgtagccgcgggccgcttcgggttctcgcgccgccccgtaggcgagacccgcagccgccgccgcgtagccgtggcttagtgccaggtacgcgtcccccgacagcgacttgagctcggccatggccgcgccgcctgggctcgggggctcgccgggtgggcggatgctcatgtgggtgagcagcccccgaggccggcccgagccc

SEQ ID NO: 30254 - DNA, 167 bp, Homo sapiens
  chr20:61665877-61666044
  hypo
cgcagagtgcgtgtgccctgccaggacagacgtcattgctgtgcggtgcttgagtgccatcaataagccacagaagagaaatccggaaacaagggacgcgcagcgtgattccgtgccacggcgtcaggagcggcatgtagcatcttttggtttgagagtaaaattcc

SEQ ID NO: 30255 - DNA, 894 bp, Homo sapiens
  chr20:61674884-61675778
  hypo
cgatgcgcatcatggtcggggctgttttggggccgtttccaacaccagcagcgtcgtggctccacagcagcaaggcttcctgaaggaagaagggggcttcgcagtatagttcgagtcgggctctgtttctttccatcccaaacacatagagacgaccaaggccctgatcccaaaagaagaacccaggctgccggcgatcctggggacaacgatgttaactcagggacaggcgcagtctctggaccaggccaggtcgtggtgcacacactcgatctctgcagcgtttcccacatgggcactgcggaccgggaatgtcaggggaacgcgggcaccgtggaccgggaatgccaggggatcgtgggcaccgccgaccgggaatgtcaggggaacacgggcactgccgaccgggaatgtcaggggaacgggggcactgcagaccgggaatgtcaggggaacgtgggcactgcggaccgggaatgtcaggggaacgtgggcacggctgaccgggaatgtcaggggaacgcgggcacggccgaccgggaatgtcaggggaacgtgggcactgtggaccgggaatgtcaggggaacgcgggcacggctgaccgggaatgccaggggaacgcgggcactgcggaccgggaatgccaggggaacacgggcactgccgaccgggaatgtcaggggaacgtgggcacggccgaccgggaatgccaggggaacacgggcactgtggaccgggaatgtcaggggatcatgggcactgtggactgggaatgccaggggaacacgggcacggcggaccgggaatgtcaggggaacgcaggcacggctgaccgggaatgtcaggggatcgcgggcactgccgaccgggaatgtcgggaacgcaggcactgc

SEQ ID NO: 30256 - DNA, 311 bp, Homo sapiens
  chr20:61695613-61695924
  hypo
cgggtgttggtgtggacctcggcacggcccccactgacctgcatgggccgaggtcctgcaagagaacgggctccatttgcgtctgagggccaggatgcctgcactggggatcacgctgtgcttcggatggagcctccaatctcggggatgccattttaccctggaggccatcgggcttcatgccccacgggcattgtatcggcttccgtgtggccccgagagcagggcaatccgagggcaaggccaagggagtggtgagcgtggcctgcagggcggagccaggcgaagtggggtggggctggaggccgccc

SEQ ID NO: 30257 - DNA, 988 bp, Homo sapiens
  chr20:61809599-61810587
  binary
cgggcgccccagctccaggaacgcccggagggacgcacttgggggcccactctctgccgcggaaaggggagaagtgtgggctcctccgagtcgggggcggactgggacagcacagtcggctgagcgcagcgcccccgccctgcccgccacgcggcgaagacgcctgagcgttcgcgcccctcgggcgaggaccccacgcaagcccgagccggtcccgaccctggccccgacgctcgccgcccgccccagccctgagggcccctctgcgtgttcacagcggaccttgatttaatgtctatacaattaaggcacgcggtgaatgccaagagaggcgcctccgccgctcctttctcatggaaatggcccgcgagcccgtccggcccagcgcccctcccgcgggaggaaggcgagcccggcccccggcggccattcgcgccgcggacaaatccggcgaacaatgcgcccgcccagagtgcggcccagctgccgggccggggatctggccgcgggacacaaaggggcccgcacgcctctggcgtcgcggggcgggtgggggcggccgagggcggccgaggggggagcctgcggccggggccaggctgcggccagccggcccccggccacgtgtgtccgcagcgcggagcgcccaggcgcccgcagagggcggcggggcccgggagacaaagggagggtccacggggagcggcgggcgggtgcgtggggcggcgggctagggtgcggcgctgtccgcggtgctggcggcggggcggcccccgcgggacgggagggcggccaagtgcggccctcgcccccacagcgggcgccctggacagttgccacggcaacgtgggaggaggtggggcagggtctgaggtcaccgctaagtctgcccttcctcgggccgctgcgccgcggggcggggcggaggcggcgctcgctgtggccccagagcagcccccgcagcccaggaccaggcttgcatggggac

SEQ ID NO: 30258 - DNA, 612 bp, Homo sapiens; identical to SEQ ID NO: 25549
  chr20:62031127-62031739
  hypo

SEQ ID NO: 30259 - DNA, 655 bp, Homo sapiens
  chr20:62461248-62461903
  binary
cgatacaattaaaatgcccgtgagttctcggcgcacaggtgtctgcgcccaggccgcgcgctaaacacgtttctaattagcatttctttaaacaatgctgatcacaatcttgccaccgtaatccactccaaatgcatcgttgagattgcagcacggaaagcgagagaggaaattcgctgcgaatctcaaactttcttttgtttatatttcttcgctgtcagaaaatatccgttcttcgccccatctggtctgtaccctggctcctcggtccagccctattgtgtgtgcttcgttaaacctacaaacagtgaatctgtcagcggggccaggggaaccccaactagcaggagccctccctctggcgcagagaattccccgtttgccttagggattgagttgtcagacaccggctcgcgctcccccgcgaaactgacatgtctatttacagagaaacaaagacgcggctcgcagcggaccccgcttcctccgcgcgccccgtccgccccgcgcgccccgagccctccgcgccccgagccgccccgccccgaggcccctgcgccccggttcggccggcgattaagatggagaccaggccggcgcccggcgtccggggagacaatgaccccccggcctcagggcgccgggacccgcccgc

SEQ ID NO: 30260 - DNA, 660 bp, Homo sapiens
  chr21:26934174-26934834
  hyper
cggcgcggtgcaggaaagtacacggcgtgtgttgagagaaaaaaaatacacacacgcaatgacccacgagaaagggaaaggggaaaacaccaactacccgggcgctgggctttttcgacttttcctttaaaaagaaaaaagtttttcaagctgtaggttccaagaacaggcaggaggggggagaagggggggggggttgcagaaaaggcgcctggtcggttatgagtcacaagtgagttataaaagggtcgcacgttcgcaggcgcgggcttcctgtgcgcggccgagcccgggcccagcgccgcctgcagcctcgggaagggagcggatagcggagccccgagccgcccgcagagcaagcgcggggaaccaaggagacgctcctggcactgcaggtacgccgacttcagtctcgcgctcccgcccgcctttcctctcttgaacgtggcagggacgccgggggacttcggtgcgagggtcaccgccgggttaactggcgaggcaaggcgggggcagcgcgcacgtggccgtggagcccggcctggtcccgcgcgcgcctgcgggtgccccctggggactcagtggtgtcgcctcgcccgggaccagagattgcgctggatggattcccgcgggcagaggcagggggaaggaggggtgttc

SEQ ID NO: 30261 - DNA, 619 bp, Homo sapiens
  chr21:40032971-40033590
  binary
cggaggagcagaggctgggacggccggaggagagagtccggccccagcaggaaaggaacccagcacgcgactactggaggggcgaggagcaagggaaggaccagaggggaggagagggggtcaggggagggaaagtgtgggagggggagccgcgggggtgcgcgctcctcctaactcggggtcgcttttagcgagaagtgatatttttccagcctcattgaaaaccgttgcaaacattgaaaatagtaaaagtgaaaacggttgcgacactaagacgtttataaaatgaccgcggactgccctcgatgctgatgagaactgggacgacgtcgcgcagagcgtccggagggagaggcgcggtgcccgggacctcggtcgtggggaggagccggatacagccgccgggacgcggggatgccgagggcaccgcggcctggtctgaccgacgcacgcggtgacagccgcccttgggagacgacggcgtctgcaaccagcagcctccaaagggtgcagccaggaggctcagcttgtccgcctccggggctcggggctaagccccttccagaagttttcgtttctacgcgaattccgaccgcaaaatccagcttacctgagcgcc

SEQ ID NO: 30262 - DNA, 151 bp, Homo sapiens; identical to SEQ ID NO: 12694
  chr21:42593821-42593972
  hypo

SEQ ID NO: 30263 - DNA, 210 bp, Homo sapiens
  chr21:46035068-46035278
  hypo
cggcgcatgtacgtaagcggcactgtttgttaccatgaaaaattagaaacaacctaaatatccatccacgagggaatggaggcgaatggagccagcgccgcaccacggggaggccctgcacgagggccgtgcgctcacccgacccgcacacacgcaggagcgcgagtgcccaggctgcggaagagagtccaggccgcacaggtgccaagc

SEQ ID NO: 30264 - DNA, 428 bp, Homo sapiens
  chr21:47026394-47026822
  hypo
cgctgcacgggcgtctggctacacaaatgccaccgcgttacagtcgcctgcagtattcagtgcagtcacacgctgcacgggtgtttagatacacaaatgccaccccgttacagtcgcctggagtattcagtgcagtcacactctgcacgggcgtttagctacacaaatgccacggcgtcacagtcgcctgcagtattcagtgcagtcacgctctgcacgggcatttagctacacaaatgccaccccgttacagtcgcctggagtattcagtgcagtcacactctgcacgggcgtttagctacacaaatgccatggcgtcacagtcgcctgcagtattcagtgcagtcacatgctgcacgggcgtttacacaaatgccaccgcgttacagttgcctgcagtattcagtgcagtcacacgctgcacgggc

SEQ ID NO: 30265 - DNA, 1174 bp, Homo sapiens; identical to SEQ ID NO: 22888
  chr21:47063290-47064464
  binary

SEQ ID NO: 30266 - DNA, 831 bp, Homo sapiens
  chr21:48087442-48088273
  binary
cggggttgccgggtgtctgcctctcacttaggtattaggaaccgtggcacaaatctgtaggttttcctctgggggtgggcggaggctccaaaccggacggttttctcctggaggactgtgttcagacagatactggtttccttatccgcaggtgtgcgcggcgctcgcaagtggtcagcataacgccgggcgaattcggaaagcccgtgcgtccgtggacgacccacttggaaggagttgggagaagtccttgttcccacgcgcggacgcttccctccgtgtgtccttcgagccacaaaaagcccagaccctaacccgctcctttctcccgccgcgtccatgcagaactccgccgttcctgggaggggaagcccgcgaggcgtcgggagaggcacgtcctccgtgagcaaagagctcctccgagcgcgcggcggggacgctgggccgacaggggaccgcgggggcagggcggagaggacccgccctcgagtcggcccagccctaacactcaggaccgcctccagccggaggtctgcgcccttctgaggaccctgcctgggggagcttattgcggttcttttgcaaatacccgctgcgcttggacggaggaagcgcccacgcgtcgaccccggaaacgaaggcctccctgatgggaacgcatgcgtccaggagcctttatttactcttaattctgcccgatgcttgtacgtgtgtgaaatgcttcagatgcttttgggagcgaggtgttacataaatcatggaaatgcctcctggtctcaccacacccagggtgacagctgagatgcggcttctccagggtggagcctcctc

SEQ ID NO: 30267 - DNA, 995 bp, Homo sapiens
  chr22:17082231-17083226
  hyper
cggtgaggtcagcggcggcggcgcgtccgcgggcggcgggagcttcgcatgcgcggagcgaggcccgtgagtggcagcggcggcgcgcggggggcgggcgaggggccgagagtgggggagcgggcgggggccgtcgaggaggcgttgtgtgggcgcgacggctgcgagttggggaggtctgtggtgcgggtcgccccgggggatccccggcgcgggcctcgcgcgacggccacggtcgcgcggcgtgtgtggggggtccacgcacacccgcaaaacttcctcctcccctgctccgggagagcgagcgagcgtgtgtgagagcgagtgtgaggagcgagccgcggcccgacgcccagcgccgccgctggagcagctgtcaaaacttcgccgccgcccgggccccgcggcccgccctccccgcgccgggcccctttctcttcctgctgcgggcggcccgggggaggggccgcgggcggagaccccggaggccggcgcccctcacgccgcccgcccgcccgctccccgcccggcccctgcgcgcgtgcgtgtcctgctcgctccatgttgccgcctctcccggtacctgctgctgctcccggggcttcgggaaatgcgagagtctgagccggggaggaggaacccgagcagcggcggcggcggccgcggcggcgggagccccccaagaggaggaccgggatccatgtgtctttcctggtgactaggatgtcgtcggaggagaacaagtgcgtggagcagccgcagccaccaccccccgaggagcctggagccccggccccgagccccccagccgcagacaaaagacctcggggccggcctcgcaaggcgcttcccctttccagagagccagaaagaagtaagttgagtgcgagggagccaggccgggagccagcggcggcgccgggccggagctgccaccgggcgcccgccccgcggcctccacgccttggcgccccccggcgggatgggggcggggc

SEQ ID NO: 30268 - DNA, 821 bp, Homo sapiens
  chr22:19510756-19511577
  hyper
cgcccctccgaagtcagcaggagcctctgggaagtaaggcagcagccaagacccccagcgtcttggaggggaagcgaaatcctcagtctgacacccgctctgcctatggaaacagcgccgcgcacagaaaaggaaacttcattccgtctgttaagggcagggccgggctagtggcaggagaaggtcagctgcgggcgcaggcaggagcggatccaggagccgcgtcggggcgcagagccggacgttccgaggagcctgcgcgccgcgctacccggcggaagccgcggtccatgcggggctccccaggcttatccaacgcctcgcaggcgtggctggcaggaggggcccggccgtgcccagcgccctcagacgtagttcttcttgtcgtagtcgccggtggccgtgggccgccgcggcgctgagtacttcacggggaagctgaggtcgggacggccggtgcagacccaggcgccgcagcacaagaggcagccgcctaccatgagcagcgcggtggccgcccagccgatgtacagcgctgcgcccagctcgtacttctgcgacacgggcacagacgggtcgtaaaactcgcggacgacaatgttggcgaaccagcagagtggcacgagcgccagcagcccgcaaaacaggtagagcacgcctcccgtgagggccacacgcgccttggccgggcccggggccacgcaggtggtgcactgcgcgcccgccagggtcacgaagagcgcaacgaacgccagcagcacggcgctcacggtgagcgcccgcgccgcctgcacctcggtgctcagagccagcaccgagtc

SEQ ID NO: 30269 - DNA, 557 bp, Homo sapiens; identical to SEQ ID NO: 26875
  chr22:21368234-21368791
  hyper

SEQ ID NO: 30270 - DNA, 328 bp, Homo sapiens; identical to SEQ ID NO: 12699
  chr22:22012017-22012345
  hyper

SEQ ID NO: 30271 - DNA, 821 bp, Homo sapiens; identical to SEQ ID NO: 22889
  chr22:22862472-22863293
  binary

SEQ ID NO: 30272 - DNA, 878 bp, Homo sapiens
  chr22:24180526-24181404
  hyper
cgggaaggatacggtcataaggacgcccccgaagagaaacatgaagacgaagtcggccgtgcggccgcggaaggagccctcttccagcatgcggcagtagcggaacctacggcgtcggtataggaagtgccaccaggcggggcctcagtttccccgtcccggcctctctcccagcccggccggcctgccctccacccagcccgtgtccgcagggcgcaggatacacgaagagcatgttgaagaagaagctgaatcccaggggcccgaagaagaggaagttggtgacgagcctccagacctacgggggacgggcggtcaggtgcggggtgggtgggtcgggcccacaggtgcgcggcgcggggcggcctcacctggaacttccggaacacaaggtgcgggttgaagtagagttgaaaggggctgaggagctccagctgctgtggaaccaggggccagtcaagagctgcccgggagccacgccgtaaccatggcgaccctcacccctcccgccagaggctgtaaccaaggcgacgtccggtccgcccggccgcttaccaccgcggcggtggtgaggacacaggctgcggtgtaagcccgcgtcaccgccggcacctgcaggaactcggccgctagtccctgccacgccattgaaccttctcaagcacgcgtggcccagccagcaacgcgctctttaacccgcctcccagccccgccttcggccaatccgcatccgaggcgctgcgcgccccaggctgaaaagagagcccctgagcccgacagccaatggaaggaagaagagggaaattaggggcggaaagggagagtgggcgggtagaggctggtggccaatgggcaggcgccaaggttgagcacgtggc

SEQ ID NO: 30273 - DNA, 1160 bp, Homo sapiens
  chr22:27053098-27054258
  hyper
cgcccctggtccgcggtcgcgcgcagcccccgcgcctctccagccctgagctctctgcggcctaatgtggacgggcaagcgttgccatgacagcgccgcgggtggggatgcgggaggctgagcgcaccggccagctagcccctttgtgcggcgggggctgcggagtgctccctccaagaccggttgcaccccgctttcctggccaggactctgggcgcgggtaaggaggggttgggtgtgaggttgtaggggcgcaaggaggcgggaggagggtggaggtgagggccgggggtggggcgcctccgcccgccagccgctcccgcattaaaatttcatgggcgctgcagcagctacaaagacgacgccggctgcgctcgcgggaccagagggagggaggctgcggacgagtgcggggaggagtttgagatgggaggcgcttgcaggggctcccccagttctgcgctgtgagccggggcacaaagagccctctgcactagcgccgcaggaccgcggacccgaggtaagacgtcgccccatcctagaagccttccttcccaagtgtccttgtcccctaacggggaacagcctaattccccaaggctggggtcgagggtaggtcccagagtcccagggctgggttcagggatgcaacgccgcctgaagtgtcccgcattggatggatgaagaggctttacagcctgtaattctcaaacacagccaagactctggctgggatggggggtgaggtcaggcaaggggaggatgctttaggagtccagtgcgaatggggatcttgcaatcatgattatgagggggaacaaagaccctttccttccgacgacacaagacacaatttgggaggtggacccgcggaccttctcggtccaccaggttagcaattaactggccaagccacgggcagagccagagggtctcggaactggaggtgggggtggggcggtggggcagggtccttgagctccccttccctcatactcagcccgcccccgacccaaccccccgagcctgccattccttcacttcccagatgtccggcgtcaaatttggctccaaaaggatggagagggctggtaggtaacccaccctcgttgaaaacaacagtgacatcagtttatggagaggttactctacgcagggac

SEQ ID NO: 30274 - DNA, 181 bp, Homo sapiens; identical to SEQ ID NO: 24381
  chr22:39877241-39877422
  hypo

SEQ ID NO: 30275 - DNA, 450 bp, Homo sapiens; identical to SEQ ID NO: 23217
  chr22:42353588-42354038
  hyper

SEQ ID NO: 30276 - DNA, 524 bp, Homo sapiens
  chr22:43115852-43116376
  hyper
cgcggaacaatcactcgacgttggcggaggggaggaagccgcagagagggtgtcgtgagggaaaggtgggtgcaggggaaatggcgctttaacccactcagggccagaggctcagccgagactatccaggtgggaacttgtccctccggatgacaggtgatgaaactgagggaaggggactcgccctggcagtgaaacgggatgggcgctgggaccaggtgccccggcagatcctctcccaagcccagttccgctcccgctcagtcctcaaccttccccagctggagaggagggaggggcgcctgcggatccgaggcgagcgcggaggccgggcgactccaaccggctcgccccgtgcccagctcgtacccaggccgtttcccgcacggggagggcccttcccgcttctgggcaggtccaaatcctcaccctccctaaggccggcgccgacgctgccagcccggcagagccccctcctgccggccgctctccatccccgtccccggtcgcatccgctccggggc

SEQ ID NO: 30277 - DNA, 597 bp, Homo sapiens
  chr22:45277185-45277782
  hypo
cggcagctacccctcccgggtccaacctttcagatcctcccattacactgttaaaacatgtaactcaatccatccgcgaagaaaaccaaaccaacagaaaaggaagctgaagacatggacatcgcaagccacgcggtaatgcatacttggcacagagtagccaatatagaagacgtgtgcctcacacggttcactttgttcatcaataaaagaatataaaaatcttgttcacccagtggtaagtgtattaaaatagatctgtatcatacagcacagtttctcccggagtcgtgagaatgacaggagggaccgtggcagctgcgggatttgccggcctcctcgctctgcacctctgcgtgtgtgcatgcgtgtctgtggtcgtggccgcgtgcgatgcacacacgcgtgttcagtgcaattcggcaccatgtgatatgctcggggtgggagcccgtggctcctggacgcttatcctgttgtgctgagtccctcaggactgggatgtgggaatcgggcaagggtgacaagctgccactgcccaccctggatgcagaagcccttggcagcaagtctggtccccgaaggccggaacctccc

SEQ ID NO: 30278 - DNA, 2877 bp, Homo sapiens
  chr22:45403686-45406563
  binary
cgggctctggcggcggcatctgttcgtggtgctgaaaccccgagcgctgagctcagcgcaactaagtcacaatggacaacttttcctccccggagggggcccggaggggggggagcggtcgcgcctccgacgcgtgggagcttctcaggtgtccccaactacacctaacgcccggagcccaaagttggagcagaactggggagtcccgggggcgcgtttcttttgttccccgggagctggcgtcaggttccaagaataaaaagtgaagctagggaagtggaaggtggtgggggggagggagcctcgaggaacgatttcaaaacgaggtttgccacggaacccagaaatcgcttccaacgagtttggtgtccaggcccccacggccgcccccctccgcccccatggccgcctcagcgcaaagcgggggactccgagccgggagaaatcgccacgttccaaaaacatgtccaccacctcaaaatggacgccgggccgcgcgctgccttttaagtgagctcctctcttcggcccccgcagggcccggctctccctgccgcctccgagaacccggctctttctttccaggaaaggggaggggtggggaactttgagaactggagacagacccctctgggagtctgagcgtgcgtcgcccaggctggcactttttagggcgccgccaaagtgcccagccaccctcccgccccatcccagggggggccgcgatcccatcgcttacttgtttgtcgctgagcgcggcgatccgcggctgcctttcgtggagctgcttcttgaggtcgccgttctgcggaaacacggaggagcgggctcaggcaggccacccggggtcaggtgcaccccagcaccgcgggccgcggcaccccccgcccggagccccacgggcggggccggccgcagcgcaccccaagtttcccgggccgcgtcctgcacgcgcggcggccgggcagtgccgcgcggggccgcttacctgtggctgccgcctcatcggggcagctcgcggggcggggcgggggccgaggccacccggcggcgcgccccgagccgtgcaagtttgcaggccggggtgcgtgtgcgagtgagtgtgagtgtgagtgtgtgccgggggaggggggaggaacaaagagccaagtaaacacggcgagtccgtgtcgagcaaagctcataaatattcaagtcgcgtcctaatctccccaacacacacacgcgcacgccgagccccgctcaggctccggccgccacgccgccgctcgccagcagcgatcgccaaaactacttctgcacaccgggcaggttcgcccggggcgcgggggcccgaggggaggccggaagggggcctattcgcactcccctccccgggaccggctcacgaaggggccccctccaggcaccctcccagtcatgcagaccctacatcgcttaagagaagactccaggctcgggtcccacgcgtcctcgatcccgcaaactgtgcaggacagcgccaggggcaggcggaggggagcccagaagggggtccgcgcgtgtgctcactccctcgccccccgcccccgggcaggctccagcctggaagacccagagacccggaagagaggatgctgggctcgggtcccccgaccccctcaccccgcaacacactccccggccccgggcccggcccccggccacctacctggtggcgcgcgagttccacggcgagcgcctcgggccggctctgcagctccatcccggcaacttgggcagcactttgcgctcactttggcccgggctcccgggaagttgcgcggctccgcgggggccagagcgggcgcgggcggacgcggcctccgggctgggttgggggggacacgagccccctcccccacggccgaaagggaagggggctggcgaaggggaagacaggcttccgggcgccgcggcgccgagccctcggctgccccaactcctcaggctgcccggcaagttgcgccgggtccccgggctgccggcgcggcccggagcatggcccccccggcgccgggagccccgcgcagccccgcgcgcgcccgcccagccgccgccgccgccgcctcctcccgcgcgagcctcccgcgggcagggactatatttcctccggcgcgcgcgcctggatctcgttgggcctcggcaaagttgtgcctcggcacgatgctaattcggcagtgcccggatggagcgggccggggcggcggggggcggtgccgggaccctcagcccgccgcgccccgcccccgccccgcccgcgcctgcgcactgccgccccgccgcggcccggcaccccgagcggagaacaaaagtggcggtggacggggacgcacggtcgccggctccggggactgctcgggccgggcgctcggagaggacgactgcggagtcatcctctccgtccccgggccaacccggggaacgcggcgcccccaccccctgcgccgtgtaacgccgggatcaggacactttccgctgggaggctgcgagtccgtgtttccatttctcctcaccctggtcctcggctccctcctttcccccctcctccgcctccctctgatattttatttaaattcttccgtcccctcctgtccataccagcgccgcgacttgggggattaaattagtcgcgtcgccacattcccccgccgcctgatggcctccgtgttgtttaaacagcaagaaaattgatctcttggctcttcctttaatgatttttttttacacgattaaactctcaacagatgtcactggacattttaagactcttgttaagagtcgtaaacaggcccggtcaatgcgacctaaaacaattataattacagctgcggaggtcgcgtttcagaacccccagcc

SEQ ID NO: 30279 - DNA, 951 bp, Homo sapiens
  chr22:46367544-46368495
  hyper
cgggcgctgtccggtgaagcgcggcgtgcacgtgcatgccggtgtttgcacgagggagcgggtgtgtgagtgcggctctcccaagtgtggcatggtattgcgcgccgcgtgggttaatatggggaggggtcccccgctggtccaggactctgctgggacgcgcagggaatctcggcgccgctcgcgtgcccgcgggccctcgcgctgggcgtgcacagcctgctctactcccgcagtcgagccgctctcaggccatcctttctttgaccccagagccaggacttctcactgccgtagctgcccgccaagtgctccacctcggcagcttaggctggcgaggcgacctaaagtcccccggctcccgcgcgcgacggtcacccggtgccccgcccaggggcctcgctgccgcgttccctgcccgcccggttccagcgctggaggcccggggggagcccacccgcccaccccgcacgccgcccgcggcactcacaagtagctgccgctggacaggaggagaaagatctgcgggcaatagacggagacgagcgcgctgcgcggcgacagtagaagcatggtgggccggcgtgcctggcggggctgaacaggctccgcgggccgggcgcctgggccagctgaggccggggtccccgcggagctccccgatgcagggcggcggcgctgggcgctaggggccgggtctcgtgggcccgggcgcagttgtcgcccgtgccccgccgctagggccgcgcatggcgctgggtctggggcagcggcgggagctggggctggagtgcggggcggggacccggccgggggcagcgggcgcgccttggctgcggtctggacctccgtccgtctgtcggtgcgaaccggctctgtcgctcgctctggctcacttctccaagtctcccgaggcgcgcagctgccattggacgggccgcccctacatcc

SEQ ID NO: 30280 - DNA, 435 bp, Homo sapiens; identical to SEQ ID NO: 25611
  chr22:48027392-48027827
  hypo

SEQ ID NO: 30281 - DNA, 110 bp, Homo sapiens; identical to SEQ ID NO: 12713
  chr22:48280063-48280173
  hypo

SEQ ID NO: 30282 - DNA, 302 bp, Homo sapiens; identical to SEQ ID NO: 12714
  chr22:49042371-49042673
  hypo

SEQ ID NO: 30283 - DNA, 274 bp, Homo sapiens
  chr22:49146962-49147236
  hypo
cgtacaatatcttgaacatgcttcttccaatgggttttgtttcccatttcctgcccctttcgccactcacggaccttgaggccagttgacggcccttctccccacgcctgtgtccccgcgttctgagaagtcctctgtcttcgtgtcactaggtccagaaagtcgcgccgggcagaggcgcaggcggggccggcagggccgaggaataagcgacaattctggtttttctcccctggccgtcgttcgccagcctccttcattttcctgagttccc

SEQ ID NO: 30284 - DNA, 465 bp, Homo sapiens
  chr22:49637423-49637888
  hypo
cgcgactccagctccttccgaggaggtcactgagctttgcacgatgccggctccttctcaggaggtcaccagagcttctcgtgactccagccccttcccaggaggtcactgagcttcacacgacgctagctctgtccaagtcggggtccctgtgcccctaggtttccggtcaccgggagagctgtctgtcgcgccataagctggaggtgcgcaggaggatagaaatagaaactcctcatccagccgggccagggcactgacagccacagcgatgtccacggtgtaatggtcacggactccgtccccaaattagcccattttttacaaagacgataatggggggcggttctctgtgaaatggagccctccatttcggccgctcccgcgtcaggcccaaaataggtgcctgctggtcatcacttctgcgatcatgctttcatctccactcaattacgtcgcctccgc

SEQ ID NO: 30285 - DNA, 279 bp, Homo sapiens; identical to SEQ ID NO: 12718
  chr22:49693555-49693834
  hypo

SEQ ID NO: 30286 - DNA, 298 bp, Homo sapiens; identical to SEQ ID NO: 12719
  chr22:49729101-49729399
  hypo

SEQ ID NO: 30287 - DNA, 291 bp, Homo sapiens; identical to SEQ ID NO: 25612
  chr22:49967872-49968163
  hypo

SEQ ID NO: 30288 - DNA, 506 bp, Homo sapiens
  chr22:49980101-49980607
  hypo
cgcaggctctcgtgtcagggcgcacagccatgtgatgactccacattcactcagtgctcagcacagagtcactgcgaggcggcgtgagtctgtgtgacatcagcgtgtttagtgcatgacatcagcatgtttagcacagagtcactgggagacagtgtgagtctgtgtgacatcagcgtgcttagtgtatgacatcagcgtgtttagtgcatgacatcagcgtgcttggcacagagtcactggaaggtggcatgagtctgcgtgacgtcagcatgtttgcactcagaaaggttctctcggtgtttgtgctgctctgtgtgatctgctgattggttaatgtgaacaggatgtgcctgaatgctgcaggggcagcaaggtgagccctgggctctgtcctctctgctaatgggagacctgaggaggaagcacccactccagccagaggcaacactcactggcccggggacgcgggcagggccagaaatgcaggtgcacccactgctctc

SEQ ID NO: 30289 - DNA, 167 bp, Homo sapiens
  chr22:50001649-50001816
  hypo
cgtgattattgttaccatgattaatgtcgtgcgcaggcctctcctgggtgccggggattcagctgcgatgaacaggacaaagtccagatctcatgggaccggcatgggggtgatctcagggaggacaacagagaaaatggaagccaagaaccgggaacagggattcc

SEQ ID NO: 30290 - DNA, 791 bp, Homo sapiens
  chr22:50002477-50003268
  hypo
cgtccagatggagccgagggtgctggtctgcccggcgcccacacatgctccagttagaggacaaggcgcaagctcccccgatgacacgggaagctggagacattctcgtgttcacggtcacagctctgctcctttgagaaataagcggcacgatgtttttctagtgggtttgcctttttctcagtgatggtaaaagtgctgtgtatgttaaggtgagtgactcaggaccaaggtgagtcttgactcctcttggctttgcgctgagagcacctgggagagtcaagggagcacacaggacagtccctgcttcggctccccaggaacacgcggccaagtgcacgcagccggtgtcctcgggagccggtggtggggctccctgaaggtcctagaaatccggcggcacagggacgtgcaggcggatgagctggagggagattctgcttttctcagttcctagtgagaagtcagagcccctctgaaagacagacagtcatctaggtcccatctcaggagaaagtggaaccgcccgggccgtgcctgctagaatcaagtgcagttttcacaagaccttgctggaaactgggaagatggaccccgcgcctttcctgggaagagaagagtgtgttttacacacgtgctcccgccaggggagagcagaggggaggcaagccaggcacaaagctggcacgtgggatgagtgaatcagacacagctgcatttgtgttctcggttcctccaaacacgagacgcttggaacagggtctctgaggggtggacacaaaacagggacc

SEQ ID NO: 30291 - DNA, 949 bp, Homo sapiens
  chr22:50008762-50009711
  hypo
cggcgctgcgctccacaatttgaacataatccaggctgatggaggtggtttaagacaggaaaccacaccccagggctgcgggatgcaggcgagaacgggagccccttccccacaggctgcgtcctgcaaggtccacggagctctttcctctcccccctgcagtgacctatacacagagacaccatcttcatggacacggacatgacacgcgctctgggcagcctggctagagctctgcccacggcacgtcagcccctccacttccgtctgaaaggtgccggccgcgtgtgtcacgcgagaccagtcctgcacgtggatctggacggggcaactgcgcgaagggtcatgaatcccgccggccagggaggatcgtctcctgtgcagaatgaggtgcggtcagaacacggcagaagctgggagctcccacccggctgcccgagacacctcccctcaagattcaccaaacaccacgacgtgcaaagaagaaagtccacgcctccgcggaaaacactgcggctcggcaggtcaatccaaacctggaaacacctcggcgcggcctgtcagtctgaacccggaaacacctcgacgcggccggtcaatctgaatccccagaaaacaccgcggcgcggcaggtcagtccgaacccggaaacaccgcggcgcggcctgtcaatctgaacccggaaacaccgcagcgtggcctgtcagtctgaacccggaaacacctcgacgcggccggtcaatctgaatccccggaaaacactgcggcgcggcaggtcaatccaaacccgggacatcattgctaccagggcggaggagaatacacgcaaaatataccagggcggaggggaatacacggaaaatataccagggcggaggggaatacacggaaaatataccagggcggaggggaatacacgcaaaatataccagggcggaggggaatacac

SEQ ID NO: 30292 - DNA, 688 bp, Homo sapiens; identical to SEQ ID NO: 25613
  chr22:50010096-50010784
  hypo

SEQ ID NO: 30293 - DNA, 652 bp, Homo sapiens
  chr22:51042115-51042767
  hyper
cgctatgctcacccgccccggaggccctcagaggtgaggggtggtgggcccgcggggcgcggggaagcgggggaggagggcagggaggatggactggctgctggaagaggcctgggtggtgcagagagggtgaccccacctccctgcccagcagagctcccgggccccctccctgccacggacaccgggcccggcggggcgcagtcgccagtgcgcccgggttgcgactgcgaagggaaccggcctgcggaaccccctgcgccaggggggacttcgccctcctcagatcccggcatcgaggctgacctgagaagccgctcgagcggcggccgcgggggacgtcgcagcagccaggagctgtcctcgcccggctccgactcggaggacgcgggcggcgccgcctggggcgcatgatctcgtccatctcggagacggagctggagctgagcagcgatggcggaagcagcagcagcggccgctcctcgcacctcaccaactccatcgaggaggcctcgtcgcccgcctcggagccggagcccccgcgcgaacccccgcgccgccccgccttcctgcccgtgggccccgacgacaccaacagcgagtacgagtcggggtcggagtcggagccggacctcagcgaggacgcggactc

SEQ ID NO: 30294 - DNA, 465 bp, Homo sapiens
  chr3:101497830-101498295
  binary
cgtccgaagttcacgaggagttgggtcgtgagaggggccagacctcgatccgcggggcgacagctgcagtgtcgcgtcgcgagcaggagcttggcggcgtagagcgccagggtgccaacttcgcttccaggcctgtgggttccgcccggcgcgtgctgctgtcagtcaacgccctcggcccgcccccgccgaagctccaccaatcgtagccgggggtcggaggtgaggagacgtcgccgggtgaggaagcggggggctagcggcctggcgctgcggcgaccgaccggggcgtcaggatccctggcccccggagagcgaagggcgggcgggtcccggaggtgagtgctggatgtggtctgtgtgcggacgtcgggaggggccgctgcgggcggagcgacccattgcccggctctgccagcgcgctcctagactgcgaagcccctccctccgcgcgcatctgctccc

SEQ ID NO: 30295 - DNA, 98 bp, Homo sapiens; identical to SEQ ID NO: 12728
  chr3:101498512-101498610
  binary

SEQ ID NO: 30296 - DNA, 199 bp, Homo sapiens; identical to SEQ ID NO: 12729
  chr3:106362771-106362970
  hypo

SEQ ID NO: 30297 - DNA, 755 bp, Homo sapiens
  chr3:112051807-112052562
  hyper
cggtcacctttgaaaagggaaaaatgtctgaaaatagacaaagctgaatataaacatcatttaattccccccacacagacagcctccgctcctgtgagggcgtggggaaaacggagtgggagaagggggctagcgaggaggaagaggcgggaggtgcggcaggggcacaggtgacgctcctcccgcctgcctagcagagctccaggcgcacatccgcagtcagccacctcgcgcgcgcctccaggagcaaggatggagaggctggtgagcggggccggggcttgggaaggagggcgcagggcaggcgatgttgagccggtggccctggggcgggcggcgagtggaaggcgcggagcttcggctcttgccacaatctggtccggggactagatcagcggtgttgatggcagcgcttttctctaagcgctttctcttgctgagaaacggattttgccttccaaagggtggtttacaggcagctgctggcgtccagattctccattccaattgcctgaaaaaaagatgcaccaggccggggctccgggggctcttgatccgcgctgacgaagctggcgcatcctccgggcaggctcggctcggctcactggctccagctcccaaaactggggaggcacagcctattttaaactgcccccaaaagggaaagagaaatgctgtattggttccatattggcaccaaaagctgcggcggagatacagatttccaggctcgctttctccgggagagctcctgc

SEQ ID NO: 30298 - DNA, 877 bp, Homo sapiens
  chr3:112930343-112931220
  binary
cgcacggtaatgggaggctcctaggcaggagaagcaaaagaaggaattgtttgcgagttcagtcatccaaaaagcttcttccatatggagggaccgggtgcgctgggcgcggcgtcccctgcgttgtcctcctgctgccgcccccgcggccgccgctttctgccgcggggaccctgagccccggcccgccggtgtcagccgccgcgcgcgcgcacagacacacacacagagacacacaaacacacacagaaaagacacacacgcgcacacacggcgcgcacaccctcacgcccgccacagccacaacacgcccgcacgcgccctccctctccggcccgcaacttctcggtcctcggctcctttgttgctccagccgcggccgctcgcccgtgttgtgtgtccccggtgtcaccgagcgtgttgtgtgtccgtgcggcgcggcgctgtgtggctccctcgcgcccaccacgctggcccccgggccccggctcgcccttcccaggcgccggctgcagcagaggtgagtcacgtcgctgaagtttgttttcttttcataaaaagttgtgtttactgttggttcggggagaggagggggcgggaggcggccgcaggccgaggcagcgccagcgagtggctgccgggggacgtgccggcggcgggagccgggtcccagcgctcggccgggcgcccggggctgggagctgcggccgaggctgggcgcgccgggcgccgggcgaagaagttggggcgaggcgggcagcgggggtcccgggggctgcagccgctacggggcccaggggcgccgcatctcgttccctgccgcagcggtctggccgggcgatggtggtttcgcctcagcggttcccagaagcttctc

SEQ ID NO: 30299 - DNA, 614 bp, Homo sapiens; identical to SEQ ID NO: 23223
  chr3:120003757-120004371
  hyper

SEQ ID NO: 30300 - DNA, 338 bp, Homo sapiens; identical to SEQ ID NO: 29107
  chr3:122296462-122296800
  binary

SEQ ID NO: 30301 - DNA, 809 bp, Homo sapiens
  chr3:128273847-128274656
  binary
cgccgtggccggtgagggagtgaggtcagaggggaggggagggctggcatccttgggaaggctcgaatagaggggaggcttggtgtgaacgataccctgccggctgcgtgtggaggggaggctgtggcctgggcggaaggcaggagtcccgggaggggcagcggggacggggaccctgaggcccaggggattgggctcaggggccggattcaggatgctttccgcgcagagccagccgcagaaggggcatgggaaagagcctcatctacgcacgagaaaaccgggccgagagtcaagagccaaggcggggctgccgttccagggcgcgagccgggccgtcccccacctcgatcctgtgcgccctgcctcgggcggccagggtgcgcgcggcggccgcgggcgctgcggagagaccggcggaggccggggcacccggcgtgtttttcaggaaggaagccttcgctcctgtaacaggctggggcttggcccggcccgcggccgccccgccaggaagcgccccgtccgccccctcggggcgcgtccgcggcaggcacttttgaggacaggaaggggagaggtgacctgagcatccacgcagctgtggcattcggggacgggccgaggactgggtttcttgccatcctcagcgctgggggtgactccaagcccccgggtgggggtggggagtggccgggcatggcgcccggctccacaatgcatcgccttacccggccggaattcctgcaggacgctttgttctcagatggcagcgctgctagagccatcggacctgtgaggggggggcgccc

SEQ ID NO: 30302 - DNA, 869 bp, Homo sapiens
  chr3:128720432-128721301
  binary
cggaggagggaccggaggagcgaggcgcgcggcgcagcgatggagccggtcagcacgggcgcggaggccggcatggagggcgcgggaggtgacccgtaccggcgacctgcgcggcgcacgcagtggctgctgagcgccctggcgcaccactacgggctggaccgcggcgtggagaacgagatcgtggtgctggccaccggcctggaccagtacctgcaggaggtcttccaccacctggactgccgcggcgccggccgtctgccccgcgccgacttccgagcgctctgcgctgtgctggggctgcgcgcggagggggccaccacggccgggcaggcagcaggtgacgggaactccagagatgtgacccccggggatgcggccgctgagttggccacggacggggactcagataccgatgaagaggcgcgcctggcgctgcgcgccgagccgccggagctcaccttccgccagttccacgcgcgcctctgtggctacttcggcacccgtgcggggccccggctgccccgcggcgctctcagcgagcacatcgagacgcagatccgcctgcgccgtccgcgccgccgccgccgcccgccctgcgcgcctggccccgacagcggtcctgactgtgagcgcgttgcgcggctggaggaggagaatagcagcttgcgcgagttggtggaggacctgcgcgccgcgctgcagagcagtgatgcgcgctgcctagcactgcaggtgcgcgccggccacgaagggagggtggtaacgcccgggagagggctcgaactaaaagctggctggctgcggagcccgacaggacagagtcagaggaaggggagacagagggcagccccacaccatcccactcc

SEQ ID NO: 30303 - DNA, 439 bp, Homo sapiens
  chr3:129982901-129983340
  hypo
cgagggcttccacttgaccacctatggcaaccggaagcagatgcagagacatgtgcgcgaggcttcagcccgccccttacagggaaccgccccccctgggccacgccctggagtggacgctggagaatgtgctcctggcagcccctcggccgcggaaggcacaagtcctcttcgccatcgtggccagcgagacaagtagctgggacagggagaagctatggactctgtccctggaggccaaatgcaagggcattaccctctttgtgctggccttgggtccgggtgtggggacccatgagctagccgagctagccgagctggtcagtgctccctctgagcagcatctactgcgcctacaaggggtctcagagccagaggttaactacgctcagggattcactcgggccttcctgaacctcctaaaaagtgagcagtcccc

SEQ ID NO: 30304 - DNA, 751 bp, Homo sapiens
  chr3:132756962-132757713
  binary
cgaaaacagagaccctttgtgcccgcctcgcacccgctctgctaggtagcaaccgaacccccagagacatcggagcgggcgctgccgagggcaatttggtgattggctggtctcaccacgtgaccggcgctgagccttccgtgcgaccggattggctgtcgcggacgctgacggacaaggccggggcgggccagagcctggtcggaggggcgcgcgcgggggcccgaggggcgaaggcgcgagtgcgcgagagcgcgtgcgcgagcggtggggctttctcctgagccgtcggagggagccggagcgcttctcccgaggtaagcggcgctccggggcgtccccccagtccttcccatgctgggtcccggcaagcgggttaggctgggctgggcggggctcggggaggtgtggggtcagcttgccccgggagcccagcttcagggaggatgcagccccggttgccttggtttcccttttcctatcctctcaggcaccttcccatcctccccactgcgtgacgggtctgcccgaggggagttgcccacctggcagccctgcctccgcctttgtttcccgcctggagggttgctggcatgaaccccctccccaggtggagggtgcgggtgatggggcgcgggcgtcaggagcgctggacctgggctggggccgaggaggaggtggctttaatgcagggggacctgtcacatggggaaacgaagaagaagaaatgtagtgtcactttggccagccc

SEQ ID NO: 30305 - DNA, 777 bp, Homo sapiens
  chr3:134369464-134370241
  binary
cggggctgcgcgttgccacgggactgcgcgttgccacgggacgccggtgccactgcggggaagcgacggcagccatgggggagagggtcgggttcgctgacctcgttcgggggagcaatgggcgccccccggcgggcaggcccttgtggcaaggaggccaaggtgccgggggacccggggacccgggtcgggcgcgcgttacctcctccgcgctgcagcagcgagctcgggttcgcctgctggtctgagagcgtaccctgtgcggcgcgccgcttctccgagtgcacgatcagcagcatgtcgatagatacagcgttgatgtccttcttcagctccatgatgccgcctcctttccgacctgggcgccgcggccgcacgctaggctgcttgcgctgcaaatggccccgtgcgcgcagctgccccacacgggagagggcgagggcgcggaagagggcgctcccccgccgctggagccgcagggcgctgcttttcgctgactctgccaaacacgccattagggcccgcctgggagggcgctaccctaatgaagcggctctaagtcacctttgaaaggaaatccccgggcccaagccttgacctgcaccggggccatagtcagcaggggcggccggtccagagcctccctccctgcgcccctgcctcccgcccggtgcacttgaagcgctggtcctgggctccagggcttctctggctgagcgctgcctcatccccacggtctccggagggttctcgagagggctggagccgacctcccac

SEQ ID NO: 30306 - DNA, 788 bp, Homo sapiens; identical to SEQ ID NO: 24403
  chr3:13611739-13612527
  hypo

SEQ ID NO: 30307 - DNA, 1992 bp, Homo sapiens
  chr3:138664066-138666058
  hyper
cgctgccgacgcccggtcgcacctccgccccgggccctttccgcggtgaatttgggcaggagacgctggggctccggaaagagacgagcccagtagaaagcgcgcagagaggcagcttcaggccaggggagtgcaaggtcacagaggtcagggaggtgagcacaggaggacataaactgaggggacaaagaggagcgacaggagcttaggaaagcgaaaaagcacagagggaccctgggcgctggctccagaggcgggcccagagggtgtgaggtcaggctggcggcggcgtcgtcggctgcgaccggggccggcgtcgcgcgtccctgcatcctcgcatccgtctgcaccggcatgcggtgggctctcagagatcgaggcgcgaatgcagcgcgccggtcttgctgtcgtggtcccagtaagagcaatgcatcatggcgagctcgggctgccgggcacaagcgaactgcaggcccggcgcactggtgggcgcgggcgccgggggcgcggcggtggctgggctggcagggctgagctggcccggcggcggcgcggcggccccgtggtgcggtggggcaggcggcggtgcggcggccgcgtgcagatggtgtgcgtgcggatgcgggtgggggtgcggcggaggcgggggtgcggccggcgggcctcccaggccattgtacgagttcactacgccggggggcagcgccatgctctgcacgcgtgtgtacggcccgtacgaggcggccgggcccgccagccccttgaccacagcggccgcgccagggctaccggggcccgcggctgcagccgcagctgctgcagccgctgcggctgccgccatctggcaggaggcatagggcatgggtgagggaggctgcggtagcggccacgagttgttgaggaagccagactgcaggtacttggggggcgccaggtagccgtagccgtcggccccggcgcccgccacgccgcacccgcctgcggcgcctccggccccgaagagccccttgccgggctggaagtgcgcgggcggcggccggaagggcctcttcatgcggcggcggcgccggtagttgcccttctcgaacatgtcttcgcaggccgggtccagcgtccagtagttgcccttgcgctcgccgccgccctcgcgcggcaccttgatgaagcactcgttgaggctgaggttgtggcggatgctattttgccagcccttcttattcttctcgtagaacgggaacttcgcgatgatgtactggtagatgccggacagcgtgagcctcttctccgcgctctcgcggatcgccatggcgatgagcgccacgtacgagtacgggggcttctgcgccgggtccggcttctccggggctgtcccgccgccacccccaccgcccttgcctgggctcggcggcggcccttctggctccttgactgtgcgaccggtctctggggccagcagggcccccgccgcgtcctcgggctcggggtagctggccatcatgacaaagccggcgcgccgcggccgggccgcctctgctctccgctccaggcgctggcgcggcaaagagttggggcgcacgagtccgcttacggccaagtctcaaacttctggagactgcggatgccgcccgcgcttgcttgctggaggcctgtcgctgctctcccctctccttccccttcccctagggagcggccggcgggagtggagctcagcctctggccatggggagtccgcccaacagagaggggctccggcctcgccgcccctccccgctcaggccagtccccgccttggtgggttttcttttctgcgctcttcccctccccccgccccccggtttcccgaagcacgacccgcgtctctggcggagctgcctcctggagtccctagtgcgccaggagcctcgctctgttctgattcgtatgggctccaccgagttccgcttgcgtcaggcgccttcgcccctatagcggggcggccagccgcgcacgggc

SEQ ID NO: 30308 - DNA, 415 bp, Homo sapiens; identical to SEQ ID NO: 25630
  chr3:138679163-138679578
  binary

SEQ ID NO: 30309 - DNA, 1495 bp, Homo sapiens; identical to SEQ ID NO: 12739
  chr3:140660238-140661733
  binary

SEQ ID NO: 30310 - DNA, 650 bp, Homo sapiens; identical to SEQ ID NO: 29115
  chr3:141516080-141516730
  hyper

SEQ ID NO: 30311 - DNA, 2468 bp, Homo sapiens; identical to SEQ ID NO: 25634
  chr3:142837817-142840285
  binary

SEQ ID NO: 30312 - DNA, 92 bp, Homo sapiens; identical to SEQ ID NO: 12740
  chr3:14443834-14443926
  binary

SEQ ID NO: 30313 - DNA, 580 bp, Homo sapiens; identical to SEQ ID NO: 12741
  chr3:14443996-14444576
  binary

SEQ ID NO: 30314 - DNA, 911 bp, Homo sapiens; identical to SEQ ID NO: 26948
  chr3:150802802-150803713
  binary

SEQ ID NO: 30315 - DNA, 740 bp, Homo sapiens
  chr3:157823120-157823860
  hyper
cggccccgcgaacttccacgtccgcctgcgggccatccgggctgcgggcccatcctcccgctggtgaaaaatgcatttcggtggaatgggaacatctgggaagggcgcgcacaaaccccacacgcttccccccacgccacccccacaacacactaggaccccacccatgaccgagcataccaccggacccccacccttccactatcactctagctgacaaagctggggtccagggccctctccgtgtccctctcccctccccgctgggcctcggagtcctctcccgcccgagaggagtccggaaggcgggaaggggaaccgctgccgggggtcagtcaggtcgttaccctccgtcagtcgcgggctgcccggctccctgcttctctcggcggcgcccatgtccagctcccggacgggagagcgccctcctccagctcctccgcctgctcctcctcctcctacacctcctccgcctcctccgccgccgcctccgcctcctccgccgccgcctccgccggccgcccggactgccgggctgctgcggtcgtcgcggcccgcctcggtgcagccggtcggctccttggccccgcgcagcggcccgctctccagcacctcccggtacgtgatcgcctccttcttctccttcactttctggtcaaaagacttggagacgaacgccgtaagttcttccatcgccgccgcacgtcagcccggcgctcaacctctgccagcagagcccc

SEQ ID NO: 30316 - DNA, 229 bp, Homo sapiens; identical to SEQ ID NO: 23236
  chr3:157824101-157824330
  hyper

SEQ ID NO: 30317 - DNA, 926 bp, Homo sapiens
  chr3:169378990-169379916
  hyper
cgggcagtgagttgcggcgcgaagccttaagctttcacttcacaacttaggcatggttgaaaagggctacccacccccacccaccatcccactcccgccaactcccccccccacacacacactctctctctctcccaacctttagtccaaatcgaagcccgcaaacctcaagtatatgtacatttatttcccttcagatgaaaataaagacatcggcctcatttaaaagcaaacagggaaaacagttccaccggcgccctttgacactgtagcagcgagtgtaaagaacaacacccaaaagagaaacagatggactgatgacccaaagagccctatatttaggttgatttctcagacccaggggaaaggaaatgtatcggggagtgtacgagtgcttgggtgaggactgcacaaagcactggaaaggcgcctgggatgacagcatctcgcggggctacaccgccgactccaatgcccgcgaagccgagcctgctgaggtgccgccgacttcccgggctgctgcagggacgcagtgagcaaggaggcgtggatacgatacctaccgtatttggttctaatgtgcgagggtcgcgcggggggagactgggatttcactggggagaagcatcccacccatctccgatctctcatttctgcgttccgtaaacaacacaattagagagttttgttttcggcgagtgcgagtgtgggagagagaaccgcggcctgtccactcccgaggcagctccagccccgcctattgacacctcaaggaagagcgctcccagccgctccggggctcagtgtccctgagtccccttcaactcgaagtagaagcatttggacaaacgcagtcctgtcgtctacagtcctggcggagcatcacaccgtgtgggaaagtgtgggccccgccggcaaagccaggc

SEQ ID NO: 30318 - DNA, 1102 bp, Homo sapiens; identical to SEQ ID NO: 27999
  chr3:179168676-179169778
  binary

SEQ ID NO: 30319 - DNA, 581 bp, Homo sapiens; identical to SEQ ID NO: 12746
  chr3:180546449-180547030
  hypo

SEQ ID NO: 30320 - DNA, 983 bp, Homo sapiens
  chr3:181430092-181431075
  binary
cggccgggccgagggtcggcggccgccggcgggccgggcccgcgcacagcgcccgcatgtacaacatgatggagacggagctgaagccgccgggcccgcagcaaacttcggggggcggcggcggcaactccaccgcggcggcggccggcggcaaccagaaaaacagcccggaccgcgtcaagcggcccatgaatgccttcatggtgtggtcccgcgggcagcggcgcaagatggcccaggagaaccccaagatgcacaactcggagatcagcaagcgcctgggcgccgagtggaaacttttgtcggagacggagaagcggccgttcatcgacgaggctaagcggctgcgagcgctgcacatgaaggagcacccggattataaataccggccccggcggaaaaccaagacgctcatgaagaaggataagtacacgctgcccggcgggctgctggcccccggcggcaatagcatggcgagcggggtcggggtgggcgccggcctgggcgcgggcgtgaaccagcgcatggacagttacgcgcacatgaacggctggagcaacggcagctacagcatgatgcaggaccagctgggctacccgcagcacccgggcctcaatgcgcacggcgcagcgcagatgcagcccatgcaccgctacgacgtgagcgccctgcagtacaactccatgaccagctcgcagacctacatgaacggctcgcccacctacagcatgtcctactcgcagcagggcacccctggcatggctcttggctccatgggttcggtggtcaagtccgaggccagctccagcccccctgtggttacctcttcctcccactccagggcgccctgccaggccggggacctccgggacatgatcagcatgtatctccccggcgccgaggtgccggaacccgccgcccccagcagacttcacatgtcccagcactaccagagcggcccggtgcccggcacggccattaac

SEQ ID NO: 30321 - DNA, 958 bp, Homo sapiens
  chr3:183145386-183146344
  hyper
cgtcagaagcagctaacggatggtaacagcccagcagccctcggtttggagctcaacggactcggcaaccacctggtgaaggcaccagcctcggccccccgacccccaccagcggcgcgccccagggatgccccccgctgggcaccgcaggcaggacccagagcagcgaggcccagatgccgggcaaccccccaggaagcgcgctgccccggggcagcgggtgaggccaggagccagatgaagcccagagaccatcctcacccgccattaataaaacgcaggaaaaattaaagcttcgtttaccgacatgagtgatcactgtggccagtcgccgggtgagctcctggggaggcatctcttcttttaagcaagacagcatttcactgaaaaaccattccgtataaataaagccaaacaaaactgtttctaccgctgcggtggatgattttttaaaggcatctccgcccaaggatgctctgccctcgccctcttcctggctctccaggcaagaaacgagagtccctcgcagcctaggccagctctccctcgccacgccccgcgggggctcccgtgacagaccaagtctggcgctttcccagcgtcgcagctggaccgagagaggagcggccgttctgcaaaaggaagcaagtcgccaatctcgccggaaccgcgccccggctcctccggccgggcgagctccggggcttccagaatcgcggtcccggccgccaggtttccggcgccgcctccagggactgtagagtgagggatgctccgccaggtgcaggggaggcggcaggtggccgtggcttctctgcgccgccggccccacgccccagcgcccacctcgtccagcccacgggtggcgcccggggctctcggggaggcacgcacgctcccaagcgccgctcgttttggggtcgggaacgctgcgcacctttccctgcggggagcccgc

SEQ ID NO: 30322 - DNA, 727 bp, Homo sapiens
  chr3:183542795-183543522
  hyper
cgccggcagctccgaggtcgcgtgggatccgggctccaggcgcctccgctctgccgcccaccccatccctctggctccgggcctccgcgtcctcccaccacagggtggggactcgttgcggtccctacccagcccatacctgtacgacgtggtcactgctgcagccgcgtccgcgtcgccgatgggcagcacgtagaccccgcgggcgccgggcgcaggtggcgcggaggactgcgcggaggatttgcccctgcggccgcccgcccccggtccgcgccccggcggcggatccttgggcccggcgggcgtggtccacaagccgaagtcccgctggtactgagtgagcggcacgtcccggccggaatcccgggcgcccgcgggaggctggcccctgcgcgaggcggcgccgcccgtgcccggctcctcgctgtcgaggtccgagtagccgtgcagagtgagcggcaccgccacgtcggagcggtccagctggttccagcgccgcgccaggcagcacaggcggctgatacagggccacgccatgccagccccggcgcccgccgccccgctcccggcgcgcggcgctcccggccgcgcctcctgcgcccagcgtccccgcccccgcggcccgccccgcgccgccgcagcaccgccccccggcacgagggtgggcgtcccgggagggggcgcactcggcggcagccccacttggccggggccggctgcgcac

SEQ ID NO: 30323 - DNA, 842 bp, Homo sapiens
  chr3:184870185-184871027
  binary
cgaggcgccccacgggatttcatctcgtcgtcaaggcagcgccaaccccagccgtccggcgcaaggaaagctccggcgggcccggagcccacggcggccccagcctccggcagagcagccccggcagagcccggagccccgcggccgcagagttccggcagcgaccccggacggcccggcgggcgtcccccggaccgcggcggaaggcgggaagacgcggctcgacttacagtgacaccatcctaggtgacagcaccagtgcagcttgaagcacttgccatggctgtgcgtggcacagatagacagcccgtcgcacggctggaagtcgggtctgcgggcggcgcaactccgcgccagggcctgagcctcatctagtttctcgctcttccaaccccgctccgacgccggcgaggccgccgcactcatttcctctccctccgcgcggagccgacaccgggagcccgggagaagcgacgtctgggtgggcaggaagccgagccggctgcggacgcgggagggcgcggcacgggccgggagtcacgccagcacgcggcggcggcgggagcgcggcggtcccaggctcgaggaggagccgccccgggcgctgcgaccgggtccgggctggcagcctccctccctccggcgcggcgcgcgccgcgccccacgcgcacacgcacgcgcacaggcgcgcgccggtcggccccgcgcgacgttcctcagcgagcccggccttctcacacacacgccgctggggagcttggccgtcggcgtccccgccggtcacagcgaggtcctcctcacatactcactccttcctcggagaaagaccccgacggagggcc

SEQ ID NO: 30324 - DNA, 930 bp, Homo sapiens
  chr3:186079038-186079968
  binary
cgaagaaaatctcagactaggcaaggggaggtggaccggtggagtctgcgaaagcaccacaggtgactccgggtacgcactcctcaggacacaagcacacacacggacacatcttgtgactctgagactacacagatcaacctcagattcgacccttccctcctttattctctgaggtgtccgtgttcgcttcagcttccctttaagtcgccctgcgcaggggctttgtggagtgcccccaaagtcctagaaccccgcgggacggtcggaggctttggcggccagacattaggaaaagcatctcctgcttctcggactgcctggagcgcgaactggatatcaaggagccaaggttaagtccagaagaagaaggaaatccgaccagttgctttagcaaactgcctggagcaaggccgcctcccacccgcacagctttgaggcttgagggggcctctcagtcgcagagagagccgagccccaccctgtgcgttccccaagcctgcacccctcgagcggggcatcccttcctgcagggctttgtggcaggtggaactgtcggggtgggcgccgtggctttggctgcagccccttccctggccgcgggaccggctcccgctttgccctcctttaccaagttgctgcaccgggtgctccctgagccggggaccccctccgccgcgccggccgccgtcttacctcaccaggcaacacttggttgcgcggtggcccggggcgctccttcttcgcggtttattcccttacttgggaggaaagaggaaccgagagacagaagggggaccgaagctggcctctgggcgtcttcccgcctgcgcagccctctcgggggagggggatgcagccccagtgggtgccgcggagaccaggctgccaggctgtggttggtagcgccggggtcttcaccctgtgctc

SEQ ID NO: 30325 - DNA, 635 bp, Homo sapiens; identical to SEQ ID NO: 24423
  chr3:186857065-186857700
  hyper

SEQ ID NO: 30326 - DNA, 818 bp, Homo sapiens
  chr3:32859579-32860397
  hyper
cgttccccgagaccgatttccagatctgcttgctgtgcaaggagatgtgcggctcgccggcgccgctctcctccaactcgtccgcgtcgtcgtcctcctcgcagacgtccacgtcgtcggggggcggcggcgggggccctggggcggcggcgcgccgcctacacgtcctgccctgcctgcacgccttctgccgcccctgcctcgaggcgcaccggctgccggcggcgggcggcggcgcggcgggagagccgctcaagctgcgctgccccgtgtgcgaccagaaagtagtgctagccgaggcggcgggtatggacgcgctgccttcgtccgccttcctgcttagcaacctgctcgacgcggtggtggccactgccgacgagccgccgcccaagaacgggcgcgccggcgctccggcgggagcgggcggccacagcaaccaccggcaccacgctcaccacgcgcacccgcgcgcgtccgcctccgcgccgccactcccgcaggcgccgcagccgcccgcgccttcccgctcggcacccggcggccctgccgcttccccgtcggcgctgctgctccgccgtcctcacggctgcagctcgtgcgatgagggcaacgcagcttcttcgcgctgcctcgactgccaggagcacctgtgcgacaactgcgtccgagcgcaccagcgcgtgcgcctcaccaaggaccactacatcgagcgcggcccgccgggtcccggtgccgcagcagcggcgcagcagctcgggctcgggccgccctttcccggcccgcccttctccatcctctcagtgtttcccgagcgcctc

SEQ ID NO: 30327 - DNA, 916 bp, Homo sapiens
  chr3:37493509-37494425
  binary
cgcagggctcacggcccgcagggggcgctgccgcgccgtccagccgccgccgcccgggccgcccacctcgcgggcgcgcccctccgcagaccagcgccgcccggcccgggacccgctcgcgcagacttctcgggcggactgaggacgccgccgctcggggccgcccctgtgctcgccttcagcgcccgctcagcccgccgtccgcgccccggtggcgggcccgacgcccgcattccgcccgtgtccaggcgcagagctcccgccccggggagcttcctggccgtcggcgggccccgcggcccgcgcgctcggcgccctgctcgccgggcagaggggaaggcggcggccggctggggatgggcggcccggctgcgccgaggggcgccgggaggctccgcgcgctgctgctggcgctggtggtcgcggggatccccgcgggcgcctacaacctcgacccgcagcgccccgtgcacttccagggccccgctgactcgttcttcggctacgcagttctggagcatttccacgacaacacgcgctggtgagtgcccgcccgactccgcgaccctggcccgcgcggccaccgccccggcccccaggccagcgccgccgccgcctttccggtctcttccacgccgccgtcccgagggggcgatttaaatgtctccgttgcgcgcggctcggccgccgggggacggcgggagaagggaggacgccgtccggggcccgctaaggtcggggtcggcgcctggaggcgggcgggggcgtccgggtgcctccctggggtcccagcccagagcgtggggggagagccgctagagttgtctcctccgccgcccagctagactcggcttcactctctgaatcgaaaagtaacttggctcctctgcctccgggcggccgccgctggcccagc

SEQ ID NO: 30328 - DNA, 419 bp, Homo sapiens; identical to SEQ ID NO: 24436
  chr3:38035641-38036060
  hyper

SEQ ID NO: 30329 - DNA, 711 bp, Homo sapiens
  chr3:38080628-38081339
  binary
cgatgacgggatccgagagaaaggcaaggcggaaggggtgaggccggaagccgaagtgccgcagggagttagcggcgtctcggttgccatggagaccaggagctccaaaacgcggaggtctttagcgtcccggaccaacgagtgccaggggacaatgtgggcgccaacttcgccaccagccgggtccagcagccccagccagcccacctggaagtcctccttgtattcctccctcgcctactctgaggccttccactacagcttcgcagcccggccccgccgcctcacgcagcttgcgctggcgcagcgtcccgagcctcagctgcttcgtctgcgcccctcctcgctgcgcacccaagatatctcgcacttgctcaccggcgtcttccgcaacttgtactcagccgaggtcatcggcgacgaagtgagcgcaagcttgatcaaggcccgcggcagcgagaatgagcgccacgaggagttcgtggaccagctgcagcaggtaacgtggcggtggcgtcgcgtctgcggacggtgccggggtctcagcgctcggcacgcgtcagcacctgccaggtgccaggcgctgttccaggatctggggctgcagttgagaaacagcccatcatgccgaagtgggcccgacattctagtggaaggacgctctatccatacacacacatgcgcaaataccacacataccacacaacgtgc

SEQ ID NO: 30330 - DNA, 1465 bp, Homo sapiens
  chr3:44036183-44037648
  binary
cgacgtgatgtgctctgcagtgctggaattgagagttcaagagagagataccggtcctggcctctcggtgttcaggtgtgtgtataggtgggcgttggtgtgagaacgagcgagagaaagcgggagcaagagcgagagctatgcctcccttagtgtcagggagggtggccggctgatgaaggtgctgtgcagaaagccggggaagggcttaaagagggtgctggcgcctcgggaacgccctcccgctgcaccctacaggaggtcgtgggcggtggcttaacagccccagtgcagagcttgaaccccaccgtccagaaggaaaggtgagtgggggacccgggcgggaggtgaggcctgccggcagcggccctcaggcgtgctgggcagcacggctagcagaggcggcgcctggtcttggatgctgcagcggagacgccaaggagactgaatgcagggagcgaggcgtagcggccgcggagggtggggccgcccggaaatccaggcggcgccagccttgtagcatctgcaggccgggggcgcgcacacgaggggcacgtgggtgtggaggaaccggcgcggcggggcctccttcctgcagcgccgcggcggtcgagtgcccgtgctggaggaacggcgagtggggtgcctgccccgcgcaggcggtacccgccgccccagctccgcacacagcaggcacggccagggaccgggaccgtggcccagcgcctggaggcgctctccacgcgcatctttcccgatgccggggcgggaagccgagtggctttgtccggagatgccaggggatgtgggcaggggacgaagaggtttcccaactggccaaaccctggcttgaggaaagactgaggtggtcattgacccgtgggagcgccctggggcttcgagggaacggcagccgagcccgggagactggtgttgggtacccgcgggggccggcgggttccacgtgggtggaccccgagctgagggcagggtagggtcgcggatcgctgacctatgagctcccctactcccgcacaaggacacctgcacatggacccgggcttccacccgcttctggctgggttggcgccgggagcgcgcaggggagggacggcggcggagtgcggggtttggcgggtgaggtgggtgaggtgtggccgcgggggagggggcgaaggcactagaaggctgcggtcgcgctgtcgctgctgttcccaccgtcggcgcggggcgcggagggggcgaagaggtgcctgccagtcgcactgcggtctaggggtgaaaggaaaagggtccatgtaaaggagaaagggcaggcagagactcttgctggtgccagcaggcacggaaggatgtggccgcggggacttggagtttagagggcaacgctgggtgtcataatgccggagatgaccccgggtgcagaggcgattccagttgggtagagctacagagaacgtggccc

SEQ ID NO: 30331 - DNA, 990 bp, Homo sapiens; identical to SEQ ID NO: 26997
  chr3:44039665-44040655
  hyper

SEQ ID NO: 30332 - DNA, 691 bp, Homo sapiens; identical to SEQ ID NO: 22908
  chr3:49906737-49907428
  binary

SEQ ID NO: 30333 - DNA, 277 bp, Homo sapiens; identical to SEQ ID NO: 24441
  chr3:50377892-50378169
  hyper

SEQ ID NO: 30334 - DNA, 1023 bp, Homo sapiens; identical to SEQ ID NO: 28027
  chr4:10458329-10459352
  binary

SEQ ID NO: 30335 - DNA, 733 bp, Homo sapiens; identical to SEQ ID NO: 24451
  chr4:10462790-10463523
  hyper

SEQ ID NO: 30336 - DNA, 997 bp, Homo sapiens
  chr4:109088265-109089262
  hyper
cgcacttttgcagagacatctaccaagagatagcgtgtgcactttgttttccgtcccacggaagaatttatcagtagcgttattcagccctactcgctttaaagcacggcacccctcagcccaacaaaaagaccgaaggcgaaacattgtgggttcctgcccgcgaaccaaccgttcagccaccgaaccccctaaactgatccatttggaataagttaccctgcccctctacctcccatcctacacacacacacacacacacacacacacacacacacacacacactgcggaccgggggcccagctacgcacacaccccaaaacaaacgagggatctactcgggaccctcagccgggcggccgggcgccttcgttcccttcctccctctctgagtttcccagggacccgccacgcctctcggaactggggcagcggcccgctcacctcgtgtccgttgctggccgggatgatttcagactcgttcaccaaggaagacttgatgtcagctaaatcgccttcctcttcgggatgactgatctcggcgaagatcttttccttctgaggatcgccctcgtccttgaaggggatcatctcgtccgtggcgcagagttccgggtcccccccgccgccgccacctcctccggagagttggggcatcccggcggctctgtaatctccgctccgctgtgggagcacccgcgcaacagcaggaaagacagaggggtaactcaagggtgggggaggaaaggagagttggaagggttcgtgcagcaggacagcgggcggaagcggggcgggcgagcgcggggccgccggccggcagccggagcagctgccgcggcgcccgaatcccggcggccgccgcgctttcccgcttcgcggagaccgacgcaggcgcccgcccccgaggccgaagggcactgggcggcgagggctgcggtagctggcgactccgggggcgtctgcgcggcgcgcgctagacgaggctgccccggc

SEQ ID NO: 30337 - DNA, 786 bp, Homo sapiens
  chr4:111543907-111544693
  binary
cgaaacaagagtgggcaaagacccccttcttctctccctccctcccccaagaacccctccaataaggaaagctaacgccgaccgcgctctgcccgccccccccccacgcggcagccctgacagagaagtgtcaagagtgacagggacaggtaggtgatattagatcccctgcggcggcagcagccgctgcagccacgacgcggccctctgagcgcaccctccgcaacgcgcacacgcacacccctcgggcggtcgaacaggagccgggccttgccgcagctcagctccaggcacccaggcgagcgacggaccagatctgcggctccgcgcttccctgttggcctaacatcttaaaaccagaggcgggcttcctggtgccgagacgtcactccgccgcggccctccccagccctctccgcctccgcctcctcccagacccttctccgggtgcgactgacgtggctccgcaccaatcaggacgccccgagccgcggtggagggactgtcctgcctgcacctatcagcagtgcggggccgggctactgcctcgccgtgcgcactgggtctacacaggcaagctcccgggaattcagctcctgcccagcccaaggcgatccggcttttagtacgaacccaaaggtgaagagatgaggctaggagtcgaaggcttgggagaagagagtggaatggtcaagaagagaaaggtacaaggatcaacaagacacccactctttgtgtctcactacatccatttccaatcccccaccccatataaaaaggagacac

SEQ ID NO: 30338 - DNA, 1902 bp, Homo sapiens
  chr4:113435438-113437340
  binary
cgaactgcaccaagtccttcggcgttaaagagaaaggggaggagcgtcagtccgctctgcaaactctttagatatgccaccatcatctcttcccagggtctttttcgtctcaagaagcgcccccaaaacgccacccttggctttgacaataagctccatcacaccttcagtaaatcagagcccgtctgaatgaaggatacccaaagccaagaaatgcaagaaacaaccgaggaatcagaaaggctacacctgccctgtgaagtgagatggtttccagggcgtggaaaggaggggcaggggaagggaggagggctcgactggggacaggaaagggaacccactaaggcctggcgtgggtagcagaaatggcagctctagatacaatccctggctatggggaggtgaggtgcatagcggtgcttgtcgggaggtgggggctgccaatagtccatgtctgacccggccgggctggcgggcgataaagtgcagctgtagggggaggtggaattggaggacacggaggaggacggcgcggggctgttggtgcaactccacgtggaggcgggcgaggggctgtctccgctgctgctcagggcggcgctggctcctcccgggctcagcaacactgcctcggagaagagcgcccccggcaggcccccgccgccgcccccgcagtgatccgccaggcgcagggtctcggtgagtgcccagatgtagttgtgggcgaagcgcagggtctcgatcttggtgagcttggcgtcctcggggaacgtggggagcacctcgcgcagcgcgtccagtgccgcgttgaggttgtgcatgcggtttcgctcgcggttgttggccttcagtctacgggtcttcttgatgcgctgcaccgtctcggccgtcttggcgcctcgggagacggcccgcgcccgggaagggcgccgtttgcaatcgtgtaccagacccagcagccgtgcgggccggcagccctccgcacccgcagccacgccgccccgcgccccctgcccggcctcagccccgcgctgccgacgcgccccgcctgacgcgcccggctcctcctcctcttcttcgtcggcgctggatgacagcggggtcagggccgccaaggcgggggaggccgatccgagcagcactaacacgtcctcttcctccttcaactccaaggtctcggatttgacgaacatcctaccgaagagagaaaggggaaaaaggcagtgaggtgtaaggaaagaaacagaggcgcgatcttcgtgtcacaggggcgtgctccggcgcgcacccgagaagaccagctccgaatggcgcggagcaggaaggcgaaggaagaaacccaggcagtgctaaccaaggtcaggagcgccgctagcgctcgctgtgaccctgctgccagtcagccgggtcctgccctccgcgggcggtcctgcgttccctccccgagaagggactgcggcctccgcgacaaagattctgcgcggagcagagggcgtgcgggtgtggttggactgagtgcggggaaaccacctgcgtagttggaagcggtggctcgaatacttacttagttggctctaactgtgcctcagcgttgctgtgactttggcctgtgccgggaatctccgcgcagctgcgagcgcagcgccgggtccttcgcccggcgtgaaagctgcaagcccggcgctactgtggcgcagctccgcgggggacctctgcgaccggcgagtttgccaagagccccggcggcggcggcggcggcccgcccgggtctcgtgtgttgtggtggtggtgcgtgtctgtctgtcagtcagtccctggccgtgcggctcctggcacgcgactcccaggcactccagttaacgcgaagctgcttgtggttcagtggctgcgtgtctggcacac

SEQ ID NO: 30339 - DNA, 754 bp, Homo sapiens
  chr4:113437637-113438391
  binary
cgggctgcggccggagctggcgaagccgcagcggccgcagaggctcaagctgcggctgttgtcgccgccgctgtccattgtgattggtggctcgcgctcggctggagcgtgccgctaatttattaatgaatggaggtcgcgaggcgcagctggccaatcagggcgccctggactccgggaggcctgcgagccacgcgcaccggagcccgctccctttcagcagctcattaggggcccgagcgctgggggcggatggggggacccgtgctaccgcccccgccttcgtcctcgctgccgccgaggctccccccgcccggcgcgcgcgcaggcaccgcacccggcgctgccggccctcctaactcccgggtgatgggaactaggaattagttaatgggggtcagaatcccggggaaagcagttagccctgtggtgctgccgggcgtctcttggcaaagcctcttaggggttgtatcaaatagtaaacgattttaaaatggattcatttggttaggggaggagaatggcgtggatggagagatgtggacacctcgtgaacaagtgtgtttggggtccgtcgaaactggcgtgggagagtgaagggagaggacactggggattcaaacaggcgtctcttgggaggggaggtcggataggggagcagttgatgagcttttagaggatgtgagaatgaaatcactcacatgttagagctgaaaggatccccctcattttacatacaggaaactgaggctcc

SEQ ID NO: 30340 - DNA, 442 bp, Homo sapiens; identical to SEQ ID NO: 23257
  chr4:113443992-113444434
  hyper

SEQ ID NO: 30341 - DNA, 695 bp, Homo sapiens; identical to SEQ ID NO: 24454
  chr4:113444864-113445559
  hyper

SEQ ID NO: 30342 - DNA, 775 bp, Homo sapiens
  chr4:115520385-115521160
  binary
cgcccgcgatcctgtttctgccatatggcatccgttcgagggttctctcgcgtttgtgcgctcaaggcagagggagggtataacggggaggcgattcggccgaggaccttgtacttgacccctgaagggatgggcaccgcggagcccagaggccagagccagctgccagggcagggatggaggtgggggaccaggaggagcttcgggacctcttcaactcccctttactccgtcttccccctaaggaggaacaagagcgggatgtgttgggggtggggaatgtcttggggctgtacaagctcgctgagacttttcggggcccgccgtttccgcgtgcccgcgcgactctcgacaatggacagtgtacagtggtggcagggtttcacgggtccccgcgccgatttgggaatggtacggggtgcccttgcattagagaagcctgtgcgggcccccgggattagagaagaggtgagcgcctgcgggcggggagagaaggacgcgctgctggcaaaaagaagggcgccttccatggactggaggagcggcgagggagcctggtatgtgtgttttggatttgaaggaggcaaaccgcatcggagagtgcaagtagatgcagtgcgtcggggcaaaaggacaatctgaggaggtgggcggggtacccaatctctatatacaagctttctggtttaattgagggtttataaaattgagtacggtaaacctgccattgtgcagcacttccttaggaaaggaatagcctctgtacctgtaccgc

SEQ ID NO: 30343 - DNA, 978 bp, Homo sapiens; identical to SEQ ID NO: 24456
  chr4:122871204-122872182
  binary

SEQ ID NO: 30344 - DNA, 989 bp, Homo sapiens
  chr4:13545599-13546588
  binary
cgctccggcccgcggcttcctcctctaggtctttggaagcggccagctcacagaccggctggccgaggctcaaggatccccccgcaaggccggccccgctggccccccgcgcgtccgcgcagcgccgcctgctctcgttctcctcgctgagcgcggagtccgagtcccagccttccgggctctccgcagtccgccccgcagctgttctggtaccggcaggagacgccagcagagagtcctcggcgccccccaacgcgcccgcgtccctctccccaaagagccgccaacagcagacagcgggagccgcggccaccgatgccgctgtgcccccgggcgccgggcgcccctctggcgcggccagcccgccgcgctcctctttcttgttgaggatcgcctggatggagaaggacgtcaaggtgttggcgccgcgcacagccatctgcgccgcgggcaggagcggccggcggggcgggcagctggggcgccgagcagctccgagcgggacagagagcgccggcggccgcagcgcgagtgagctgggtgtgcgaggccgccgccgcccactgctgcgcggcccagcagctcccgccccactccgtcccaggatcagcgccgaccctcgcccccaccttagaggcccaccccgcccggagaccccctccccccgaatccagagccagacgctctcctttcgcagctcagctggattatctcatcgcttctcgcccttaggggcgggctggggtctgccccctcgggggacgtgaaggaggattggcgggggcccctccgtggcagcagtcccctcccgagcgccgccggggcgcacagcccgagtcactttttctttgcgcgtctgtcccttcctcgcctgcaggatttcgctcctggcccgtcctccccttccctgctgggcaggctcttccggagcccacccccggcggcggcggcggtagccgcggccgcggccgctggattccgagaggcgc

SEQ ID NO: 30345 - DNA, 1376 bp, Homo sapiens
  chr4:13548517-13549893
  hyper
cgactttgagttgtcgggtatttttgtgtcccaggagtgtgagaaaggggctacgttccgcgtcttccggaggcgcacagcaagggagtctcctggtgtcatctcgggccattacggcgcttagtcgatcattaggtctgtgggtgactgtaggcagagccgggagttgggtgcttggcgcggagggtgaactcgcgggtcttgagctgcaactagaagctgctcctagcaaggggtcgggtggagatgaaaagactgtggggaaggggaggtggttgtatgcccagagatatcccggcgtaactacggagtccaggcccagagtggcggtgtgtggcgaaggcgcagcaggcctgcgcctgtcggaggacggcagatctggacgcgaccgcgcgggcgtgcctgggtcccgcttcctgcccatcgagggcgacttccttcgggctcagctgtgagctccaggaactctgcaacctcccgacgggcgccacgctccggcttgggccggcccgggagttggcggagctgcgcggcccggccgggcggccggtgaggctttcgagaggcaccgggctcgctcagcgtccgcgcctctctaccccgccgcgccccctccgcgcccacgggcccattttttcctagtcttctgcctctcttccttcttcctccctcccctcctcctccacacctttgtcttcttcctcctccctcctcctgcttctcctccgcagtttggatcctacgggccccctacgtgccgcgcccttcggtccccggaaccgcccgggctgggggtgctgctgcgcggtgagacttccgcgggcggcgggcggagagcgggatttgactgcgaaagccaagggggcggggaaggggaagccccggccctcgggggcgcgcagtaaactgctgcacacgtgcccgcgctcccgaggggggcgcccagtgggctcgggatttcctggctgcgccaccgcgcgcctcgcccccgacgcccgccacctgtgccctgggccgccttccctgacgccagcggccggaggtcgcgcgcgccgggtgctgcccagcaacgaaaggccatgcggggttcgtccctcagatgccggtgaccttgattgaagtcacctgccttctctagcttccagtcctttaaaacgagggtttggacccggtgccttctgaacccggtgcttcactgagtgagcaagtgaagggtgtgtgtgtgtgtttggggtgggggcgggggcgaggggagggaggggcagcgttgccggctccccagagccaggtccaggcagaggtcgcgcccagcactgaccgtcggtcccaatccgcagactcccgagggcgatccaaaccgcctaagcatcccaagc

SEQ ID NO: 30346 - DNA, 905 bp, Homo sapiens
  chr4:1395992-1396897
  hyper
cggggaaaacaggcaggcgcttcttcctccaggcagtagccgaagctgacaccgcccccaagctgacacgcctagcccggtgctcccttgcggggctgtggggcaggggagtgggaccggagcaggctgcaggggtggggagcaggaggcggaaaatgccgcggccccaccagctccatggctaagaggagaggcgaagaggaagcagctggtcactttccgagacctgtgatcttttttgggacggggagggggcggtcagggaggtgacgctgggacctgagcctcagccagcttggcgggtgagcccctgcgctcagcccctgcgcccacgacgacgggcaggcaccagcagagtggcctgaattccggccgggggacgccaggccggtgggaaaacgggctggagtcccgctcaaggccaacacccgaggagccttggtccccaccggagaggattcacgggtgggcccggccgggcggagggcggcgcgggagcctgggagaagggggcgcggccgcctgcggtttattgattgagtgaagttccgcaaagtgcttcgcagcgggccgagcccgcgggagccacctgcccggccccgacgcgcatggtcatttataaatttaaaactcttccgtagcaaccggttatgtacagagtcaacgactggaatcgtagaaaacagccgggcccggcagcggcctcggaggcggagcggcacggggctcagaggtgcggcgcgtagaaggcgggcgccccgtaggtctgcgagcccagcacgaagggcgagagcaccgccgggctcgacaggaacggcagctgcgcggcgcacaccaggcctccggggccgtgcgccgggtacccggccgggccgtgcatgccgagcggggcgcccatgggcggc

SEQ ID NO: 30347 - DNA, 995 bp, Homo sapiens; identical to SEQ ID NO: 12768
  chr4:146857459-146858454
  hyper

SEQ ID NO: 30348 - DNA, 974 bp, Homo sapiens
  chr4:150999731-151000705
  hyper
cgccccacccttccttccttcctcccctcggcgctcccgggagcgctcggcagacgcccgagctttgtgggcgcccgcgggcccagcgcgagcctcgggcggcccaactttgcctctcccggtcggctcccgagcgggacttgtgaggcgtggccgggtggaggaggcgcttgcgggggcgtggggctccccggcaggcgggaggcacggagcaagtcgcactggacaatgacctgggcagctcggcgctgcggacacttttagctgagggcgcgggcgggtcggctcctccgcggctcctcggccccacctgcgcggagagggcgggatgccagagccaggtgtcccggcgcgttaagggccctcgcagtcagacgtccctgcaccggcgctcgcacccttagtcggcccggaacgtctttttgcggacgccctcggagcagccgcgatggccagcaccaggagtatcgagctggagcactttgaggaacgggacaaaaggccgcggccggggtcgcggagaggggcccccagctcctccgggggcagcagcagctcgggccccaaggggaacgggctcatccccagtccggcgcacagtgcccactgcagcttctaccgcacgcggaccctgcaggccctcagctcggagaagaaggccaagaaggcgcgcttctaccggaacggggaccgctacttcaagggcctggtgtttgccatctccagcgaccgcttccggtccttcgatgcgctcctcatagagctcacccgctccctgtcggacaacgtgaacctgccccagggtgtccgcactatctacaccatcgacggcagccggaaggtcaccagcctggacgagctgctggaaggtaggaggggagggcgccgcacggcaggtgcggcggagcgccggcaggtgcagtgggcgtgagccggcgcagcggggagcccgcggggtgctttccaagccgcac

SEQ ID NO: 30349 - DNA, 481 bp, Homo sapiens
  chr4:153600941-153601422
  hyper
cggcagagttctgtagcctcgggcaccctaccagcttttgcgatcctccttcccaggagtaggaagtggaggcggcttaccccggccgacgggaacgagcgcgatcaccagggcgaagactagggctgcgcggggagcctgcatgtccgctcgcctcggcagaggcgcgctcaggatgctgcgccgggctgcagcctctctgaaacgtgaacatttcctgtttcctgcttgtttgggtcggtgctgacttgaaggagaggtgtgtgcctgttttttaggaagtgatgtaattctgcaggagcctgtcagaccagcaaggattgcaaaagagaagttgctgttgaagcactggttctattatcacgcctctccagccctttggagtcccggcctccagcttttgaaaccgtccccggggcaacagagtcccttgctcagatgtcgttcggtatctgggactgggaggggtcctggaccacac

SEQ ID NO: 30350 - DNA, 1685 bp, Homo sapiens; identical to SEQ ID NO: 12773
  chr4:174089737-174091422
  binary

SEQ ID NO: 30351 - DNA, 987 bp, Homo sapiens
  chr4:174450407-174451394
  binary
cgggtggtggggaaaaccacctaccagactcatttcgccctccgcgcccctccacgcgccccagcgtgcgcgcagccccgccgcgccctcggcccgggcccctgcctcagcgctcggcgtcctcccccaccccccaccccccagcccccgggcgcccgggcccgcccggcagccgcagagggggctgctgcagcccgggccccgtccccccgcctggccagccgggcccgcctcagcagcgctgcggccgccggctccccatggggcgcggcgagctggtcctggcaccgtgcgcccctggccgccgccgccgccgcctccggttcccgccttgctccacggcccgcgcttcggctcctgcttcccgggctgctgcgcggaggcagaatcctctcgtgctcatacaaaggtgccggggctcccgcgaggctggtacgcggagtctcgggaatccaagcccgggccgcggtcctggcaccgaagctaacccggaatccaggggcgagtctgagccgcggctggaggagccggtccagctgtgccggggggcggcggggtcgactgctcactgcaaagctacctccgtgcgaccctccccttcccgcctcttcccctccccccaccagcccgatctgggttcttgggcgcttattgttttaatgaaatttttggttgttgttgttttggtccttaaatgtgattttagctgcgagtaacgtgtcctcgctcctctcgcgctctctcggagggttttcagagaggtctcagtgcatccattttctcagatcctctcctttcggggcaaggatctggggccctgaatgagccttggagctcgaagaccgcggctcgggctctcggagggctctgcgcggtggccgaggaagctccggggtgacggcggtggttctcctgggctggacgacgtgaggggagcaagcggattttcccagcaagatctccatgtacagctacatctttagggcc

SEQ ID NO: 30352 - DNA, 874 bp, Homo sapiens
  chr4:175139069-175139943
  hyper
cgcttcccttgcggtttaccgctctccgcaggctgcttctccgaagccagcggtggtagcgcccactcggttgagcccacgcctccgccaggcagcgcctccgccaggcagacctcctgcgggacattttgtggccaggggggttcctgcccagggacctctaatagggtcggtggaagctaatttgaatcttcccagttccttccctgtttatttctcaacccagcagttcaaaaattcactttataacggtcccctaacaaaaacacgagtaagaaagatagcaaagaattaagctggacaggcacccatgttgcgaaaaaggttttgcttggagactgcaggagagggctatccctctttacaattcacgacgttactaccaactttgccattgagtggttcctctccctgcccgaattcctggccatcttcgttccagagagcgatgcaatcatggccttgaaaccgaacggggcgtaacgtgccattcctctccagctcccgagccccactcccacccttgccgttgaaactgtgaaaaagccgccaaagtttgggcacccagcctggcagtcggaagacagtgagataaagaatgcgatagtaagtccttaagtgcttcctagagataaggtcccggaatcctggaaaaattcagtctggcctccctacttcagcaagtcgcctcctgcttctgtcagccccctccccacacacacctggagggagaggcggtggccacaggggtagctggggcagaccctccgctcctccactcccggtggccaggggtcctaaggccacgcggctggctttcttctctgggaatcaggagatgataatgagaaaatccctcaaccattggcgcgac

SEQ ID NO: 30353 - DNA, 482 bp, Homo sapiens; identical to SEQ ID NO: 12774
  chr4:189552385-189552867
  hypo

SEQ ID NO: 30354 - DNA, 203 bp, Homo sapiens; identical to SEQ ID NO: 12775
  chr4:189717765-189717968
  hypo

SEQ ID NO: 30355 - DNA, 183 bp, Homo sapiens; identical to SEQ ID NO: 12776
  chr4:190345382-190345565
  hypo

SEQ ID NO: 30356 - DNA, 702 bp, Homo sapiens; identical to SEQ ID NO: 12777
  chr4:190462487-190463189
  hypo

SEQ ID NO: 30357 - DNA, 1218 bp, Homo sapiens
  chr4:2060916-2062134
  binary
cgtctcccccacccccgcgatcacatggtgacccccggcagccaatgcagtggacgctaggaccctgcgggccgcgggcgccgcgactgcaccggcgccgccgcattataaatacttctccaaaatgcggcgcagctccctgcgcgcgccccggccgcccgccgcctccgccccgcgcccctgagctgccgccgccgccgccgccgctgccgccgccgccgccgccgccgcgggtccgagggcgccgcgcccttgccctgggcccggccgtgcccgccgccgcccggccgcgtccccgctgccgcgccgcccggccgggtgcatgcattgtgggcctcccgacatggtctgcgagacgaagatcgtggccgccgaggaccatgaggcgctgccgggggccaagaaggacgcgctgctcgccgccgccggcgccatgtggcccccgctgcccgccgcgcccgggccggccgccgcgccccccgcgcccccacctgccccggtggctcagcctcacggcggggcggggggcgcggggccgccgggggggcgcggcgtgtgcatccgcgagttccgtgcggccgagcaggaggcggcgcgccgcatcttctacgacggcatcatggagcgcatccctaacacggccttccgcggcctgcggcagcacccgcgcgcgcagctgctctacgccctgctggcgggtcagtgcgccgggcccccggctgccgcagtccctcgggccggcgcggagctcccccgccccggcgtccacgcggaccccgcgcccggctcccggggaccagcctgggaagccccccgctttctgccgcgccgggccccgcgcagggctggctatgggcgtggggatgggcgcagggccccgagcgggccggagccggggagggtccggggtccgcacctgcgtccccgccgcgcagccccccacccccaccgcctcccctgtcccctcccgggcatcctgggtgggggcgggtgccagggcaggtagcgcccgccgcggctgggccccggcgagtgcctaaatataatctgcgggcgggggaggccgcctcccgctcggtgctaatttatgaggggaagacagccggcgccgcggggggtgcgcgcgcctggcacagccggggcggtcgcagagggcggccccttcagcgtctttgggtgcccttcccctcagagcttcctgccggggtgagggggttc

SEQ ID NO: 30358 - DNA, 988 bp, Homo sapiens
  chr4:330305-331293
  hyper
cgcgcccggagcggatgggcctggcccggctccaccccgcggggctccgcggctcaacgggtcgcccaggggcgcgggcccggcttcgtcctcgacggtgtccgccccggccctggctaggccgacggcagccgggtccgggtggggctcgggctcggggcgcgcccctcccatctctccagggtccgcgtcctcgctgccgccaggtcccgccgagatccccggtggccccggctccagcggctgcagcgtcgccatcgccgggcagaccccggccgacctcaaagcgaccgcgcggtggggccggcggggactggggctgcgcagcgcggcctggggtgggggcggcggggcccccaggagctcctgggaaccgagggtcctggggcggtcccgccccgcacagctccgggtgagcttggggagggagacacactctcagcccacctcgccccgcccgacagcgctccgagtcctgagtcccctcacccccattctacagacacgaaggtgaagccaaagacgggacgctcacttcctgagaatttgctgcctgctgcgtggacaccaccgacctattgtttacagcggtcagggacccgccccccagacccccaggaccgcgcttccgggggaggagggtgtcctcagcaacggtgacccgcaccaaagccctcctcaccggggtcaccgccacagccggtgcgaggcccgcagggcgctggggatgcgcgaccgactcccgtgaacctgctcctcgcgcgtcagggagagctgtgcacccaactaggctctgtgaggacggactgaggtcggcctgcaggctgcggccccgaaggcaggatttgtggagagatgattcgcgagccttggaggaaggatgggctgtgcgtgcgtgggtgcgtgcgtgtgtgtgtgtgtgtgtctgtgacttttgtatgtttatgtgagactgcgtacgtgcgcgcgtctgtgtgtgcgcgcgcgc

SEQ ID NO: 30359 - DNA, 302 bp, Homo sapiens
  chr4:41869059-41869361
  hyper
cgaattgaaatggatatttccctcctcggcccagctgaacgaggctcaatgcctcaaagatgcagagctgcctcggtggacatgctctgtggctgatattataattttcataatgcgcttttatgtcgcgccagactcctccggtgaggagcccgcagagctgctgaaaggggctttgagaggcccgggcgcgcggctgctgcgagctgcgcgccccccgccggcctgagtggcaccgcgtgcccctgccggggcgcggctcctgcactgcgggcgcgcaggcggcggcgggctctgccggc

SEQ ID NO: 30360 - DNA, 415 bp, Homo sapiens; identical to SEQ ID NO: 29198
  chr4:41875378-41875793
  hyper

SEQ ID NO: 30361 - DNA, 2383 bp, Homo sapiens; identical to SEQ ID NO: 27041
  chr4:42152717-42155100
  binary

SEQ ID NO: 30362 - DNA, 111 bp, Homo sapiens
  chr4:42317327-42317438
  hypo
cgtccccagatcaagcccagcaggcgcccaccggccgcaccgactgcggggcccacttagcccgtgcccacctggaacctgcgccggcccacaagggccgtgtgcagcccc

SEQ ID NO: 30363 - DNA, 2263 bp, Homo sapiens; identical to SEQ ID NO: 29201
  chr4:42398819-42401082
  binary

SEQ ID NO: 30364 - DNA, 891 bp, Homo sapiens
  chr4:48485179-48486070
  hyper
cggcagccaggaacggttttttcctgctctggtcctttgtcaggtctttgttccgcccctggctacactcgataacagaaccacttactggcgattcacaggaggggaccgggcggcagggcggggcggggcctgcggggcgcggggccgcggcgcggagccggcgcagcgattgggttcacccggggggccgcgctgcgcggagtgccaggctgcgggcggctgcagacctgggagcggagaccggcccgccgcccccgacgccgccgagcacgtcagcggcgcgcagccggggctcggagaccgacgggcagaacgacgggcggcgactgcggcgaccgcgggacggcgagaggcacgcggcgggaggggaccggaatccgcagctccggccgcgccatggacggcaacgacaacgtgaccctgctcttcgcccctctgctgcgggacaactacaccctggcgcccaatgccagcagcctgggccccggcacggacctcgccctcgcccctgcctccagcgccggccccggccctgggctcagcctcgggccgggtccgagcttcggcttcagccccggccccactccgaccccggagcccacgaccagcggcctcgcgggcggcgcggcgagccacggcccttccccgttccctcggccctgggcgccccacgcgctcccgttctgggacacgccgctgaaccacgggctgaacgtgttcgtgggcgccgccctgtgcatcaccatgctgggcctgggctgcacggtggacgtgaaccacttcggggcgcacgtccgtcggcccgtgggcgcgctgctggcagcgctctgccagttcggcctcctgccgctgctggccttcctgctggccctcgccttcaagctggac

SEQ ID NO: 30365 - DNA, 962 bp, Homo sapiens
  chr4:53728037-53728999
  hyper
cgctccaaatcagggcgggcggcactaagccggggagcaaacaccgctcccggcccgcccagagcagacgccctaggttggggctgcagcgagtgcgcgcgtgggctgtggagccggcggaggcagcggtccggaatggctctgtggaggctgcgctctcttcctggccccgcagccacagcagctgccccatgctcgcgcggcaggacctaccaggcgcccaccctgggctgcgccgcctcggaccacccgctgctcccctccgcccgctgcctcttctccccgcgcctcacggggctccgcactgactccaggcgcctccgggggcgtcgcgcgcgcggagcggcgccgggggcggggcctcgtgtagggcgccccgggattggctgtggggagagggggcggggccggccgcggagaaaacagccggcgcgccgcgcgagtgcagtctgggtctggagcctgagccctgcggaacctcggcgctcggccccaccccgcccgtacctgcacttatttattgttgttatttcttaccgcggagccccgcagtcgggtcctcccgcccgctcccgcgcagcgctagcattctccagtccctcagtcccttcccgcgcggtgcgccgcagccgaggcgatgcgcctcattcagaacatgtgcaccatcgccgagtaccccgcgccgggcaacgccgcggcctccgactgctgtgtgggcgccgccggccgccgcctggtcaagatcgccgtggtgggcgccagcggcgtgggcaagaccggtgagtcgtcgcgcttagccctgggtctggtcttggacgacccctgacgggagttgaggctgaacaaggcgtggggagcggtgggagctgcagcccgaccgctctccgtccccgcgcagggagccgctgccccttgggagtgggcttagccgttgtctacgccacccgcctgcttccacagac

SEQ ID NO: 30366 - DNA, 451 bp, Homo sapiens
  chr4:54975783-54976234
  hyper
cgaaagttttttgtgtgcgtgtccttttctaggtcgggggtggggaggggcggtgggtggacgcagagggaggaaggctcagccttggatccttgccacctgaacaacgtcgcctctgcccacgtggaaagcctcgcttgtctggcagccggggttctgaatggttgccgcgacccctgcgctcccagcagggccaagaggacctcgcgggcaccagcgtccgggcgggaagggacgtgtgcccaagcctcgcctcctggccctcagtgggctgggacgcccttgatcaccggcgcaggaaagaggctccccagcccgtgagcttcgtccgggcgccagggcagggatggctggtggtgtgcactggagagcacgacggtgacgctgcgtgggaaagagacgtgggaagggcatagccggattatccactcagctccaattttctccaagc

SEQ ID NO: 30367 - DNA, 958 bp, Homo sapiens; identical to SEQ ID NO: 12781
  chr4:56914942-56915900
  binary

SEQ ID NO: 30368 - DNA, 1876 bp, Homo sapiens
  chr4:57180896-57182772
  hypo
cgcacctggaggactggagggggcagctcagtgagcttctgaacgactttgaggagaggctcgaagaccaggaacgcctgaaacccgaaggacaaagagaacactccgaggagccaggtatttgcgaggagcagaacccagaggccgagcggcgaagagagcagcagggaaggagcggggatttccagggggccgatcgtcctgggcccgaggaaaagagagaagaaggggacacggagcctctcctgaaacaagaggggccggtggaagccgcgcagcctccggtggagaggaaagaagccgccgcccttgaacaaggccgcaaggtggaggagctgcggtggcaggaggtggacgagagacagaccatgccccggccctacacgttccaggtgtcctccggagggaagcagattctctttcccaaagtcaacctgagccccgtgacgcccgcaaaggacacggggctcaccgctgctccccaggaaccaaaggcccccaaagccagcccagtccagcacgccctaccgtcgtccctgagcgttccccacaccgccattctggtcacgggcgcgcagctctgtggcccggcagtcaacctgagccagatcaaggacaccgcgtgcaagtccctcctgggcttggaggagaagaagcacgcggaagccccagctggggagaaccctccccgaggccccggcgacgcgagggcgggcagcgggaaggctaagccccgccaggagtctcccagcagcgcgtccgcactcgcagaatgggcttccattcggtccagaatcctgaagaacgcagagagtgacccgcgcagcagcgagagggaccagttgaggcccggtgatgagtccactcccaggggccggtgtgattcccgcgggaaccaacggaagactccgccagtcaatgcaaagttctctattatgcctgcctggcagaaattttccgatggtggcacggagacctccaaacagagcacggaagctgaaagcatacgaaaaagacccatgctgggacccagcgaagagacagccccccagcctcctcctgctggtgttcgcgagctcgggaagggtccggagaagtcggagatgcaccgggagcccgcagacaccaccgagggatgcaaatttgccaaagacctcccgtctttccttgtcccaagccttccttaccctccgcagaaagtggtggcccacacagagttcacgacctcgtcggacagcgagactgcaaacgggatagcaaagccagaccctgtgatgccaggtggagaggaaaaagcctcaccgtttggaataaaattgagaaggaccaactattccttgcgcttcaactgcgaccaacaggcagaacagaagaagaagaagaggcacagcagcaccggagacagcgcggatgcagggccgcctgcagcggggagcgctcgtggagagaaagagatggagggtgtggccctcaagcatggtccatccctcccccaagagcggaagcaagccccttccacccggagggactccgctgaaccttccagcagccgctctgttcctgtggcccaccctgggcctccaccggccagcagccagaccccggctccggagcacgacaaggcagcaaacaaaatgccactggcacaaaagccagcactggctcccaagcccaccagtcagaccccaccagcatccccactttccaaactgagcaggccctacttggtagagctgctgtctcgccgagcggggaggccggacccagagccaagtgagccgtccaaggaggaccaggagagcagtgaccgccggccaccctcgcccccaggccccgaggaaaggaagggacagaagagggacgaggaggaagaggc

SEQ ID NO: 30369 - DNA, 1425 bp, Homo sapiens; identical to SEQ ID NO: 24481
  chr4:57521376-57522801
  binary

SEQ ID NO: 30370 - DNA, 547 bp, Homo sapiens; identical to SEQ ID NO: 27048
  chr4:57687545-57688092
  binary

SEQ ID NO: 30371 - DNA, 692 bp, Homo sapiens; identical to SEQ ID NO: 23277
  chr4:76555346-76556038
  hyper

SEQ ID NO: 30372 - DNA, 935 bp, Homo sapiens
  chr4:81123012-81123947
  binary
cgtgtgtgtgtgtgtgtgcgtgcgtgcgtgtgtgtggtgtttgctcactaagcagggtcgtccccttacacatgcctggaatgcagccaacgtttccagtttgagttcccctatgtggcgcatctgcgtttccgctgccccaagagacttcacagcgctgatataagtccccaagacgaacaaggcggcggcgtgggcaccaaggaccacgggggcggcggcggcggtggcaaagaccagcagcagcagcagcaggaggcacctttaggcccgggtcccaagttttgcaaagccggccccctccaccactacccatccccctccccggaaagcagcaacccatccgctgccgccggcggcagcagcgcgaagccatccacagacttccacaacctggccagggagctggaaaactcccggggaggcagcagctgctccccagcccagagcctcagcagcggtagcggcagcggcggcggcggcggccaccaggaggcggagctgagtcccgacggcatcgccacgggcggcggcaaaggaaagaggaaattcccggaggaggcggcggagggcggcggtggcgctggtctggtagggggccggggccgcttcgtagagcggcccctcccggcctccaaggaggatctggtgtgcacaccgcagcagtaccgagcctcgggcagctacttcggcctggaagagaacggccgcctcttcgcgccgccaagtcccgagacgggcgaggcgaagcgcagcgccttcgtggaggtgaagaaggctgcccgcgcggccagcctgcaggaggaggggacagccgacggcgcgggagtcgcctccgaggaccaggacgctggcggcggcggcggctcctccacgcccgcggccgcgtcaccggtgggcgccgagaagctgctggccccgcggcctgggggccc

SEQ ID NO: 30373 - DNA, 477 bp, Homo sapiens
  chr4:81307585-81308062
  hypo
cgggtcaggcaagggggtcaccaccttgcgcccaccactgccgccacggcgcggggctgccctcttctcgcgggcggtggtggggggggggggtgccgccgggtttgcaggtccttttccttctgggggccgagacgacagcggtgatctttgaggtatttgtggcggaaaaagcccttggcacagccagcatagcggaacttgtagtagcccgtgtgggcgcgcaggtgctcggcgaggtgggcacggcggctgaaggacctgctgcacagggcgcatttgtggagcttcatgccggagtgggagaggacatgggccttcagcttgtccggccggttgaacaacttaccgcagcttgtgtgcgtcgataaagggcatttatatttcttgaagggctggtggatcaacatgtctctcttacagtttgtccttgaggttgaatgcggactcgcacaccgagcatttgtagggcttctc

SEQ ID NO: 30374 - DNA, 273 bp, Homo sapiens
  chr4:8615820-8616093
  hypo
cgccatctgcggatctgcaaagtggggatcatatggtccaccttgcagttgttcagcccctcagctgcaggaggggcgtctgtggcgagtacctgctgcactcacctgcctgctgggcacttggctgacaccccgacgtcccggctgtctctgcgcggctgacaccccggcgtcccggctgtctctgtgcggctgacacccctgacgtcccggctgtctctgtgcggctgacacccctgacgtccccgctgtctctgtgccacaggcatgtcc

SEQ ID NO: 30375 - DNA, 120 bp, Homo sapiens; identical to SEQ ID NO: 12789
  chr4:9523558-9523678
  hypo

SEQ ID NO: 30376 - DNA, 1344 bp, Homo sapiens
  chr5:100236036-100237380
  hyper
cgggatctggagccgaacctccattccagtttactcaaaactcaaaactggcctctccacgtggcttgggtagaaagacagtcaatgagatgatttgatggttttatgagtcaactcctccaccagaagcgctgtttgggagttgaaacgaaataatgagctcgggtcacaagcttttccacgaacctttcatcctggagaaaaaggaaagtgctcagggagcctagctgccctcgcattgttcctggcagctccaactccttgcacagtcttggtctctcaggagaccaaggcagtcaggacgctacagggcacgggtgtaagcgcgacgttcgcggccagccctctgccttgccccactgtaattgcgggttttgattaagaaggaggagccagttgccgactgagctttgaaagtgactttgggtggggggtgggggtggggtgggggtggaaggaggggagggaccaaaagagcctgagtcctgcaataaaggtttccccctatcttctcactcattctttccccctcgccgccggcgctctggcagcaggggataaccccggtgcgcgcctctcttcctgtttggtttactcaagcgcctgccccaacgccttctcagtcaagctgggaggaaactgcttcagcttgaaaaggatgcgggcaaaagcccagcccgactagctcaaccgccgcgccagtgcccgcctcctcttccttaacgcctagggctgcgcccaccagccggcaacgtccaggaaagggccacaggagaaatgacacccgtgcaatgcggagtgtcccggctccgcttccccgcagggactcgaggtgcgctccttttcctggccacggtttagggaggctcggagatggacacctcggcagtatctggcgaccctcttctcactcgctccgcccactcctgctctccagggtcccagccaagggcccgaaccctcggagtcctagtgagccttggccgctttgtctgggatcaggcttatcctcctagcccacggcccgggagggaacaaagagcctcgaccctcaagctctagcctctgcctctcatcggagccccatgcgcccattcatcacctttctaaagacccctttgtctgcctggcaagcacaggtctgcaagggatgcccacgcccctgcccaaagtcctgcttttctaacaactgagctagattggattttcaagccacccagtcttgtgtaaacgacctcataccggtcttttttaccccctcagaatagaccatgtatagattcgttgatgcatgacgaccattccagcccattccttgctagctttttcattctcttccagtcc

SEQ ID NO: 30377 - DNA, 337 bp, Homo sapiens; identical to SEQ ID NO: 12791
  chr5:110572-110909
  hypo

SEQ ID NO: 30378 - DNA, 268 bp, Homo sapiens
  chr5:114506308-114506576
  binary
cgagcagtcatatcccgctttctgcttctatacccccaagtcgcgatgtcaccgcacgttcttgcccagtagcgcggggaccgcctgcagggtggagattcctctcccggatgctggccagggactgaagttaaaaggccgcggcaagggagagaccccccgccacccgggcctacgctttccttcctgagggccaggacagagggtcctgagcggctccggcacccccgcacccccgcggggagtgctgctgaacgttaaggcgcgc

SEQ ID NO: 30379 - DNA, 1420 bp, Homo sapiens; identical to SEQ ID NO: 24489
  chr5:114514898-114516318
  hyper

SEQ ID NO: 30380 - DNA, 818 bp, Homo sapiens
  chr5:1294558-1295376
  binary
cgtcgtcgcccacgcggcgcagcagcagcccccacgccccgctcccccgcagtgcgtcggtcaccgtgttgggcaggtagctgcgcacgctggtggtgaaggcctcgggggggcccccgcgggccccgtccagcagcgcgaagccgaaggccagcacgttcttcgcgccgcgctcgcacagcctctgcagcactcgggccaccagctccttcaggcaggacacctgcgggggaagcgccctgagtcgcctgcgctgctctccgcatgtcgctggttccccccggccgccctcaaccccagccggacgccgaccccggggaggcccacctggcggaaggagggggcggcggggggcggccgtgcgtcccagggcacgcacaccaggcactgggccaccagcgcgcggaaagccgccgggtccccgcgctgcaccagccgccagccctggggccccaggcgccgcacgaacgtggccagcggcagcacctcgcggtagtggctgcgcagcagggagcgcacggctcggcagcggggagcgcgcggcatcgcgggggtggccggggccagggcttcccacgtgcgcagcaggacgcagcgctgcctgaaactcgcgccgcgaggagagggcggggccgcggaaaggaaggggaggggctgggagggcccggagggggctgggccggggacccgggaggggtcgggacggggcggggtccgcgcggaggaggcggagctggaaggtgaaggggcaggacgggtgcccgggtccccagtccctccgccacgtgggaagcgcggtcctgggcgtctgtgcccgc

SEQ ID NO: 30381 - DNA, 709 bp, Homo sapiens; identical to SEQ ID NO: 24492
  chr5:132082800-132083509
  hyper

SEQ ID NO: 30382 - DNA, 893 bp, Homo sapiens
  chr5:132946722-132947615
  hyper
cgaaggtaacagaccaagctgccggcgctgtttttcactggaggaaagctcggcggaagcgacacctagaggggagcggcgggctgtggccgcgccattcatcagtgtcggcggcccgcggccgcgagcgagggctgctggacagcgccccggcacccgctctcgagccgcgacaccgacctcgccgggcccgccccgctgacccgcgcactcctagtgcacttgccgcgccgcgcggaggctcgccgcgctctggaaaacaagaaaccccactgcctcggcggctttccgctcccgcaagagttgcgggcacaaagtcctcaggtggcaggcctggggttggcgccgctttgtcggctgcagggagccccaaagactagcgtcagctcgtccccaaactcgaggcgacaggcgccgaaagcagagtgctgtgcctgcctcgtccaggtccctcctgaaactcagaactcgtctttgttttgcgggcgcaaagagggcggagatcatccacagtgcaagctctcttaggaccaagcccccagcccgaacgctgaacgcccccaacacactgctccctagacacgttcaagcgggtaccccgggccgctcactctggaccgcggccggctacgcacaagcagcgccgcaggctgcctggagtcgggtcgtgccctgattccttcctccccagcctcacatgcggcggaccccggggaagccagggccaggcgaagcgcagcgggccctttgggctgcagcgaggagacgcaagtttccccgcaaagccgcggggaggaggtgctgagaatgcctgcccggcgccccaacccggagccaagggcaccgggcccgggccgaggggccgcgctcgcctggctccgccggggccgctc

SEQ ID NO: 30383 - DNA, 896 bp, Homo sapiens
  chr5:134366533-134367429
  hyper
cgaggcagccagacaggacctgcctttccctttcgttttcgggataaggccaacagctcccgaggtccccagcggcagggaatccactgcccagtctctggcccagggtatcctgctaacatctgagtgggtcctgggccccatagggcatgggggagtcccctgggggcacaggtctttgggctggggttgccttagtccgaggatcaggtaggatgagggtcaaaggggttgaaggtccgaggcgcctggaggcctggcagacgctagtgggccagggcctaaggtggggatctccggtggagggagggagcaggtctgaatggtgggagagtgaagttctgcttgtgggtctaagctttggagggctgcagcagaggcggcccgggagccctctgcgcgggtgcccttaggcgcgcaccccttgctcacccgcacgcgcggctcggtgaggttggtccacacggcgatctcctccctcatgctcatgtcggggtagcggttcctctggaacgtggcctctagctcttgcaactgctggcttgtgaagtgcgtacgttgccgccgctgcttcttcttcttggctgggtcgtctgcgccgccgcagcccgtgcctcccgcaccactgtcctcgggccccttgggttccccgccgcgctccttctctgcagtaggcaggacggggagcgggtcacctgggcttacgccccgttgcaccccgtcccggctccaccgaaccgctcgccaccagcgctggcggtcttccctccctccctccctctagggttcctgggaactgtccccactggaaagcgcccgccgggtgctggtcgtcagtaggcacctctagtctggtgtgccgcggagaagagcccaagaatcggagctggagccgc

SEQ ID NO: 30384 - DNA, 541 bp, Homo sapiens; identical to SEQ ID NO: 24493
  chr5:134880146-134880687
  hyper

SEQ ID NO: 30385 - DNA, 240 bp, Homo sapiens; identical to SEQ ID NO: 12800
  chr5:138923037-138923277
  hyper

SEQ ID NO: 30386 - DNA, 496 bp, Homo sapiens
  chr5:139047738-139048234
  hyper
cgcctcccagacctctggggccatgaatcatttatgaggcaaaaatgaaaccaattaaggacaaactttgaaagcctctaattgctgcgcctggtggcaccgtggaatgaggggaggccagccttctcggtgcggaatctccttggcccaggccttcccaggctgcccgtcccgccgcggctcagggcgcctcccggctccctgccgcctcccagccggacgcggacgtgcctgcgcggctctggcggccgcgtctgccgccccggcgcccgcccgggtcccaggccgactaattaggcccggctacctcccgcgccgcccactgcccgctccaggcccgctgcccgctccaggcccgaggtgatggcggctgttcctgccgttctggggcctgtgccccagagctggccgcgtttctcggggcgggagccagctctgctcgcctggcttaacccagacgagcccaggacgccctatccctgaaccccatcgtggc

SEQ ID NO: 30387 - DNA, 544 bp, Homo sapiens
  chr5:140797091-140797635
  hyper
cgtagtttaaaaaaaattccttgaaagaggtagagaaaagtcaagttgcagtcccacacagagcctctgggcgccgccgtcggccagtgcagagcaagcgctgacgccggggatccctcagcctctagcctgggattccctgcgcagccaacaacagaaaagaaaaccagctcccacacagaggctcccggctgcgcagaccttgcccagcacaccagattgccagctccgagacccgggactcctcctgtcctgggccgaatgctcttttagcgcggtagagtgcactttctccaactggaaaagcggggacccagcgagaacccgagcgaacgatgggagggagctgcgcgcagaggcgccgggccggcccgcggcaggtactatttcctttgctgctgcctttgttctaccccacgctgtgtgagccgatccgctactcgattccggaggagctggccaagggctcggtggtggggaacctcgctaaggatctagggcttagtgtcctggatgtgtcggctcgcgagctgcgagtgagcgc

SEQ ID NO: 30388 - DNA, 399 bp, Homo sapiens; identical to SEQ ID NO: 24497
  chr5:141931151-141931550
  hyper

SEQ ID NO: 30389 - DNA, 331 bp, Homo sapiens; identical to SEQ ID NO: 25715
  chr5:151066267-151066598
  hyper

SEQ ID NO: 30390 - DNA, 134 bp, Homo sapiens
  chr5:151784172-151784306
  hypo
cgaggatcctgagggcccggcgccgggtgctctgcagtttggcgcggaacgggtgtaggatggccacgtagcgctccacgctgacggtggtgatgctgaggatggaggcgaagcacacggtctcaaagagggcc

SEQ ID NO: 30391 - DNA, 707 bp, Homo sapiens
  chr5:157098032-157098739
  hyper
cggtgtcaagaccccgcaggagatggcggattcattcaggaagcagccgctccgggaagccttagccaagggtcttccggaaagacaccagtcttgatcctggagcctcaatccccgctgacccagcactttggtttccatagcaattgtctcgtcgcagaaaggaatcgcctgtgctgggtcttcagacctcagctccatgccgctgagcagccccaccctggctcaacccgttacccgccccgccagcaggccggggtcactgcagtccccacgtcgaagcggaaaaggtctgctcagctcaccgcaccccacttcttccagacccgtccgtcttcacagcaacgcgccgggtctcaccacggcggatgccgagggacaatattaccgcgtccgtggccgccggactctgcacgcatgtccaacagcccccgtccccttccccgcagccaatatgtgtctcccaggcaacgcgccgcgctcggttcagggctccgcccagggactcactccgcgtcagcgcgcgcccacctaggtgggctggcaaccagccaccagtttccaactctttctccaacagggaagccgcaatgacacagccgactaggccctcggtcacctgtgaccagggatcctccacgatcggcgggaccgccgcccaggcgaccaccagttccagcgccacctcgggttcgaactaccagcgc

SEQ ID NO: 30392 - DNA, 214 bp, Homo sapiens; identical to SEQ ID NO: 12805
  chr5:168189525-168189739
  hypo

SEQ ID NO: 30393 - DNA, 304 bp, Homo sapiens
  chr5:168195091-168195395
  hypo
cggtgctccagagcagaggagaggtgtccagcggtggtggcggcggtggcgggccatgctgcaggagagcacggtgctttccgcggtgcttgacagaaccatgttccgtttccatcgttccaccacatggttagatcaagcacaaaggaaagccccgcagcgactggtcagagtcaaggtcaggaagcagcgtcagagagaggacaggagcgctcagaggaagcagcgtggagaagcggaagccggagcaggcccccactgagcgtgattagtatcaggagtggggttccactggaacacttcc

SEQ ID NO: 30394 - DNA, 177 bp, Homo sapiens
  chr5:168233363-168233540
  hypo
cgctgatggcctagtgggtgatgggctgggacagggagctgaattctccggcgacagttgttgggggtgtcagacaggtgcacttacatttcgacgatgccctccggcaagttggcaggaatctccatcaagccctttcctcgacagtccacgatgttattgctgcacgtgcagggc

SEQ ID NO: 30395 - DNA, 795 bp, Homo sapiens; identical to SEQ ID NO: 22921
  chr5:169063996-169064791
  binary

SEQ ID NO: 30396 - DNA, 277 bp, Homo sapiens; identical to SEQ ID NO: 12807
  chr5:1702104-1702381
  hypo

SEQ ID NO: 30397 - DNA, 978 bp, Homo sapiens
  chr5:170738045-170739023
  hyper
cgaccccggttcccgcagggccaagtcagttacacataggccctgcccttgctatctggcgaaaggaacaatctttattgttggtgaagccacaatacccgggcgtgcaggtgggcggcgggcagagtcccctcctggagaccctctggcacacaacaaaaacaaatgatcctaaccggctccctggatataagagcctcgggcgtaaagcgcgggctgggaggcagacgggttctgcgcctcgaggctcccggatggcctcggctcccgggagggccggggccccgccggcggccccgcggtgccgggtgcatgacggtactgtccctctccctcccccggtgcaggcggcagacggcggaggagcgggaggcggagcggcagcaggcgagccggctcatgctgcagctgcaacacgacgccttccaaaagagcctcaacgactccatccagcctgacccgctctgtctgcacaactcgtcactctttgctctgcagaatctgcagccctgggaggaggatagttccaaggttcccgctgtcacctccctggtgtgagcccaccagcgcgcaccgtcgccacggatcgccgcccccacccagccgggcgccccggaccccccaggcgggctgcgggggaaccggcgccgagaggggaaggggccgcctagcccgagtaggccccagggcgcggccacagactggcgggccgcggaagggggtagggcccgagctccgcgcggccgcacaatccgagcccccgccccgcgccccgtcccgccccaggcccgggcctgacaagaaagcgccttacgtttctccgccccccgcccgcaccccccgggccgggcgcctgtattatactttgtacttttgcccaaacgtgtaaataataaaaaagttttggcttttttctttagaaaccggccacctgcttcccccgcgggggccgctggaggaagggcagccgacccggcc

SEQ ID NO: 30398 - DNA, 781 bp, Homo sapiens
  chr5:17216361-17217142
  hyper
cgcaggcgagcatgaaagcgatccaaacacagccagagggcgccaaaatgccgcaaataaaagttccaaaggcgtcaactggcttttgcgggaaggtaaaattggcttttgtgtaatcaaagagctaccgttgtcaacgatgtcacgttacgttatttttgtatgtccctcttgccaacaggtaagcaaagtgaacgcatcttcctaccccggtggctattctgtgtcccggtgctaaaccaagtgtccgcccccttagggcacccggacaagccgcggttggccctagctttgactcgagcgctcgcaagcagcagcgtgcgggctgcctcggccaaccccgtcttctcaatattggtggcctccattaaagcacagacatcaaaaacatcgacggcccctttcccctcttctcttccctccttcctctcccaagttccgagagcatcctccgaggggcgacgtctctcgccccaccagctggacctcggcgaccgcgcctcccccgaagctgcagccttcggggctgagccccgcgggtgcgggtgcaggtgcggagccgcccaaggtgcgcaactcgtttgcagcggcgcagcccagacgcgcctgcagctggggctcaccccaacctcgctgccagccgaggtagcggaatcgtagtcgacgtcgggagcgggctggactggggtctgagaagggtagctggtgccagggggtgtcattcatcacctcgaggcagctccctaagtctgagcgagagcccgagcacttcttatccaac

SEQ ID NO: 30399 - DNA, 780 bp, Homo sapiens
  chr5:17217629-17218409
  binary
cgggaggagggaggctgggcgggcggacgcgcggggggagggcactgggcaggaaggggagggggagcgagcgcgagaaatgcagaggctgcagcggcggcggcggcggcagtagcggcagcggcgacgacggcggcggcagcgctccaactggctcctcgctccgggctccgccgtcgagccgggagagagcctccgccagcggccaggcaccagccagacgacgccagcgaccccggcctctcggcggcaccgcgctaactcaggggctgcataggcacccagagccggtaaggaggcgcgcccggtggccccgcgccgccgcggacccgggggcctccgtcccccaccgcgccgcgccccgccccgcagcccccgggctctcccttcatgcagcgggcagcagggatgtgggcccggattggacggcaagggcctggggtccctctgtgagggctccgtcgcacttcggggatcccgggtgatggggggcccagaagtgggaggcttcagccgctcgcatggtggaggggtgaggggggcggcgaggttggtaaacggagctggggggagggggctgtcggggagaggagctgcgggtgacgggaggaattgccgaatgcgaaaccccctcagtgcgttgagtcccggggagacggttctgtgggctgaagggagcgcttccgtcatcggagcccttaccagcctgggagaaagcgctcggggcgaggggcgcagcagccaaagatggagggtgggggtggggtggggcgggagtcc

SEQ ID NO: 30400 - DNA, 337 bp, Homo sapiens; identical to SEQ ID NO: 12810
  chr5:17354400-17354737
  hypo

SEQ ID NO: 30401 - DNA, 762 bp, Homo sapiens
  chr5:175084709-175085471
  binary
cggttgcccggtcaagggcgggctcacaatctgcggggcggggagagggaaggagccagggagaaaagggagagaaagagggggcagtgtggcagaaaggaagaggaaggggcaagtgtcagagtcggcgagatgaggagggagggtgtaggagaaaggaaaatagaaagtgggtgagaccgtgggagagggagactgggggagaaaatgtgggcgtgtgcgcgctgagagagagagagagagagagagacttggagagggaaggaagggaaggagcgttgagagcaaggaggagcgagttgggggcggagacgaggaagtgggtgcgaggcgcggggcgcaggccgtgcgcgcgccgcccgctgcatccctgcccggagcgcagccggcgcgggcgcgggaccgaggcgaaccgggtgcggagccaatacccgcggcagcagcaccaggtaacgcggccgccgcctccccgcggggcctcggctcggggtggggtcccaggcgggcttggggacccggcgtgggctggcggagccgcccgaggggctgctcgggatccccggcggccgtcgtggccccgaacccgggttcgagcctcggccccaccgctccctggctgtgcctgaccttgggcaggtgcctccgcctggcctgcgagcctcagtttccttgtctgtgaccgcgggggtcgtgccttccccaagggggcgttgagagctcgggatgcagccccggtgcacagcagtgctcgggacgcgggtc

SEQ ID NO: 30402 - DNA, 1494 bp, Homo sapiens
  chr5:178016455-178017949
  hyper
cgccgtgaccaccgcctctccaggtgtaccagcgttggttaggaacagtaggtgctactggtcacagtcaccagatacttcccacgagcctcatctttatccccgactctggccgccggcgggaagcggcgtgtccgagcgcacaccccgtggagactgaccctaggtctgttactccaaagtccctggtctctccttcccctttctcgcggccgcctgcctggcacgggaccctgaggccggagcggagaccgcaaaaccccttggggccggcaccccctgcctccgccttggcgcagacgtgcccatctctgggacggccccgagcgcacgcagccggcgggcgaccctcctcccagagacctgcacgctgcccccggctcccagcgtaccgccaccctcaacccgacacacccaagtccgccccagccacgcgccaagacgctcacctcccgcagcaggcgctccaggtgcggctcggcccaggcgtccagggcgcctggcggccccgcgcgccgcagcagctcccgctcctcctcgagcgccgccacccggccctgcagcgcggccgcctggacacccagcagcaggcaggcagccgccgagcccacggagagcagcaggcacagcgcgctcaccgcccgggacccggccgtcgtcgccgagcgccctccgccgccgccgcccgccgcattgcccttccccgcgtcgccgccgccaccggcgcgctcgcctgggcccatggcgcgttcgtcgcgcgtggactctccgagggggcggtgctgctggggcagaggctgggtgcgagaggagcaggcgggacagcccgaggcacgaggtccgccgggcgcgggggttagcctccgggtagcagcggatcgccgcgcacgcccccttcgccgcagccagctcctccacagcggccactttgggcagtttcctctatgcaaatagaccctgccagaaaaggagcagggacccacccaggggaggagcggccgggctggccccgcgcggcgagggggcgggggcgaggaaggagcgagctcctcggagccacccgtcggcgccgggctgatcccacgcgcagcgcgcacctctgccctcacctagcccgggcgccggcacccgcccccgcacgcacctctgaggcttccccagcccaagcccgcactgtggaccccagaggtcggaggggagcccggcgacaccgcgccccttctgcagcccacccctggctggagcacccaccactcgtgccttagcacattcctctaaacttgtgaattacctttctgacacttgtaaaagttcaaaacttcaaatcctgcaaaaaactgagtgggtctgtcctcggtggtggattagcgccgcttcgtggcggaaagcgacctctgcgcactcacatttagagaggcagggtcgagattgcgccaaacagaaatacgccccttagaatcttctcacgagttcttagctgccggacttcggtgc

SEQ ID NO: 30403 - DNA, 317 bp, Homo sapiens; identical to SEQ ID NO: 12813
  chr5:178220780-178221097
  hypo

SEQ ID NO: 30404 - DNA, 219 bp, Homo sapiens
  chr5:178411635-178411854
  hypo
cgggacgtagagggcaccttctcaggatgtgcggcacacggagaccctgggcctgaccaggggacactcaggccctgttacgtggaggaagacgggagcacctcctagtcacggagaactgcatgacccgaggcacgtggcgtgtgtggaacgaatagagaaggggctcgccgggagtggacagcaccgggagtgctccaaacgggtgagcaggtgttc

SEQ ID NO: 30405 - DNA, 149 bp, Homo sapiens; identical to SEQ ID NO: 12815
  chr5:178650433-178650582
  hypo

SEQ ID NO: 30406 - DNA, 128 bp, Homo sapiens; identical to SEQ ID NO: 12816
  chr5:178651199-178651327
  hypo

SEQ ID NO: 30407 - DNA, 102 bp, Homo sapiens; identical to SEQ ID NO: 12817
  chr5:178652545-178652647
  hypo

SEQ ID NO: 30408 - DNA, 267 bp, Homo sapiens
  chr5:1787325-1787592
  hypo
cgcccaggctgctgggcaggctgaggctgggggaagcagagctcctgggcaggtgagtgtgagctgggcggtgcctcccggccaggcctgctctgcctgcattccccacgcagcccatggctttcccaggtgaggccgaggtaaacacaaggaaactcgctgtgcggcagtttcctttgccacgcactcttccatcagagatggcctccagcctacccccagccacctcccatcttccatatccctgtcctggagggctgcctcgcc

SEQ ID NO: 30409 - DNA, 981 bp, Homo sapiens
  chr5:179779937-179780918
  binary
cgtggggaccgggcctcggtccccctcactgtgtccgagaccaggagtcgggttgggcatcccccacccacacctccgagacggccactcggggaacgcgggtgaggggcagccaggcccggccgacgacagcccctcggtaggggcccggggcagatcggcgcccccagccaggtcctcggcgcctgcttgcgggcggaggcgcggagaggctgcggcgccgggacccgcggacggcgtggaggaggcggctcgggcgggcgcggcactcaccgcacatcgtggctgcttctcgggctccttcgcggctcgagggggtctgcccgttcggacgctggggctcctccgtgggctcctccgtgggctccgtgggctccgtgggctccgcgggctccagctcccgtccgctcggcctccagcccttataacccggagccctccgagagggcggggaagggggcggggaaggggcggggcttcccccgcccgcctgctcccattggcccccggttgtcgtgacaacgacgggacccggcccccaggagccagggaggggggccgaggggcggctcccaggcgcgggtcgggcgtgtaaggctggggcgccgggcgccagatcccggagcggggcttagggcaaccaacggcccgagttcagaccccgactcaaccagagtaggcgtggaagccgggcagggcccgatcgcgctgtgcctccgctttcccgtctgtgaaacggggctacccagggaagctccctcccacggggtgctgagaagtcagacgggccgcgtaaggggcagagcgaggggtccggcatcactcgcgcgctccggaaacccgcgtgagccgctgttcctgccgcgctcccatctgagtgacaggcttgtttcagagctccgcagacctctaagcctggccctcaccctgcgtggagagaacgcccgggcttggcggagagacgagaaaaccgaggctccc

SEQ ID NO: 30410 - DNA, 597 bp, Homo sapiens; identical to SEQ ID NO: 29260
  chr5:180046715-180047312
  binary

SEQ ID NO: 30411 - DNA, 878 bp, Homo sapiens
  chr5:180075806-180076684
  binary
cgaggcccctgtcccctcaaatccggggacccctggccttccgccccttctgcggcgctgacagcccgcgattcgcctcctcaagattcgtctcaagtgccagcgtgcacctgcacccgtccgcctcgggcgcgcggtggtccccggcccctgtccccgccgtcgccggccacggggagggggaagcccgcctcgagcgccctctgggggaccgaccgcgagcggaggcgctgggcgtcgggaagtgcgcacccaagtccggggcccggccgggatggatctccggcgcgcgtgggtcgggacggcgcggcgcggggaccccgcggggaagcgagtaagggcgcgaaggatccgggctcagcgcgcagcccggcagggcccggctccgaggacgcggagccaccgacggagacgcggattcaggggccgggagagctacccctgcgccgaggcgcggcccggccgccctggccctgacccggctgcggtccccgcccgccccttcctcatcccgaggtcccgcgccccaagcgccgtgctcccctcaggcgtccgcgcaccagggccaccgtgtcccccgcccgtacccggcggagcggtctcagcgcccgccccaggtgcgcggtaccccctccccggccagccccacgctcgggcgggtggcccgttcgccgcgctcaccgtccaggagtcccaggcagagccacagtcgcaggcacagcgcggcgccccgctgcatctccggccgctgcgcgtgggtccgacccgagcggccgcggctcggggctgaaagtgtccgcgcgggcgccggctggcctggggcggggcggggcggggcgggggccggaggcgggcccgggattcaggccgctccccgc

SEQ ID NO: 30412 - DNA, 1487 bp, Homo sapiens
  chr5:180479644-180481131
  binary
cggcgctgcccccggccacgtcctgcctgcgggcgggtcctccctggggagccgggagggacgtgggagctgcgaggccgcgcgcacgtggttcggttctcacttcttccaaaagcgtggtaagaaccgagggagaagccggatgtttgcaaacaagcgaggagacgacttgcggaccagacggcgcgggtgcgagcaggagctccccggacatccgccgccagccaagcccctgggaccctcccgcctgcggacgcggggcgagggcgggaagacgcggggcgagggcggcgctgcggccgcagaagcctcgagccgggctggggcgcggttccctcccgcacgccccgcggcgcgcccccgccccctccgccgcgcgcgcccccgccccctccgccgcgcgcgctcccgctccacgcccgtttcccaggcggctgcggtggcgcccggagaaggtcccgcgggaggtttcccggcacgcggcgggcaggccggtctcgcctctcggtgctcagcggcgcctggaccgacacggcccccgcgggtgttttccagacgtgttcgtacccggagcctctgcgtggaagagcgcgttcgtcgcgaccctgccgctgctgttggtcctcgcggcgctggcgctgggcgtcctccggaagcagcggagaagccgaggtaccggcgcgggcggcggggcggggaggggcaccggccggtgctgaaccccggggccgcggaggcgcctccccccaggacgcggcgcgggaaggcggcctggaaggggcgggggcgcgcactcagccctctccgctcccgtttcccttcagaaaagctgaggaagcaggcggagaagagacaaggtgagcggggacagggcgttctgcacgcacctgcccaagtgccaaaacccgccgtcatctaaaggctgtgggtcccgttacgagggtttattccagcgcgaggtgtcagggcggccaccggggaacggggatcggtgaccccggtggggaagggggaagatcgttcatatggacaaaagcggaggtgcggaacggctgcattttccacggaggctagtgcacagatgtcagggttgaccggctgctgtcgttacgccctcggagcttcacatcacactgtacagagggagcggtgaccagggtctctgctgccagcgccacctcgtccaggttttcatagcgcacagggagtcgggcggatgcgcaacatctccgcacagggtcaggaagcggcggtcaggcaccgagaaaacagcccagttacgtgaggcagtgtccggggcttaacgtttccgccgagctaatagatttgggaggctccgaccctgattttcacactagcaggagggagggcgctgggtcaccctcctatgcagaagggcagccaagggtgcgcacttccccatcccctgcctggagcctcacttccagcccagcctgggcccgcagaccaccgcgggtgggagtgcc

SEQ ID NO: 30413 - DNA, 635 bp, Homo sapiens
  chr5:180630981-180631616
  hyper
cgcccgagcctccccgccccgccctcacccctgcacacaccctcgctgaggctcagcgagaaaatagcaaagaaagggcccccagaatcgacagcgttggcacagtcagacggctctaggtgcgcggcttaacccgggagccccctccctggacatcttggcgaggtcctctcactcagttccacgaggtggggactttgagcagagcccgcttcggggaaagagataagagtgggggcagcggctgcgtggctgtgccggagacttcccgcgggcagagagctgcggagacgcagaccaggctagaggctccgaacagacaggaagaacatcgccaagtccgtgggggacgtcgcgcaggcggcccagtatctggcccagagggaaacgcagtgggggtggggtgggggtattggtgatgttgggggtgacagagaaccgcgctcagcccgggaaccagcgctgggcttcctggaatggagaaagaagggaggggctcacccgggcctcctgatcgacaggctgttctctgcaccccgtgcgcgggagcgcgggaccaagtcagggggtcccggggacccacggggtgggtgggggctgcgctcaccttggcctcctgcaccgcctcgtccagc

SEQ ID NO: 30414 - DNA, 673 bp, Homo sapiens; identical to SEQ ID NO: 25728
  chr5:180632796-180633469
  hyper

SEQ ID NO: 30415 - DNA, 984 bp, Homo sapiens
  chr5:1882899-1883883
  binary
cgcgctccgcaaacttttctaaccgggtaacaaagtgagcagcggtggccgccgcgattcctttaacttcgcattccggaggctcgagggggctctgggaccgagcggcctcgcagcggcgacagaaatacatattttacgaaaaagaaaaaaaaaaaaacgagtcgcgcgaacccgtcaagtcagatgtgcgcggcttgaagcggaggaggctctgacgtcagccccacctcgcgcagcccggcctggccgcagactcgccggtcactcgccggcggctcaggccgggaggggccaggacagtcccggccgcgcggtggacggaggggccattcctccgggcgttagcaaataaattccatccgagtcaatatcgcccagcgaacggtgtttctctttagtcacccgagaacgagaggcacttttaattagaaattaattaatgagcagctgctccttcccgccccactgtaatcattcgtctcaattacaaatgagacctatgaaaggacacgctgaagatgtaatcaacagttaaaattagcccggcgctgcgcaggcggccggcccggcctcgcgctggcgcgctctgctccgagtggcaggaaggggctcgcaggcgccccgcacgcgtctcgtcactattgtttaatcgagaatcagcaacgcctcccgccggtttccaccctacgccggaatggactttcagaacccactgcggccgcaagacagcccgcaagagctggtcaaaatgccctcaggtgcgtgggggcttcggggccttagttggagcccgacaccctgagactggcggcccgagggctgtagggccgccccgggcgtgcgcccaccggctttgcacctctgggcagccgagtgtcgcggagaacgccccatcttctccaccgcggtcttttaagttcccgctcagcccaccgcccccacctcgcctccccgactttcctccccgatcccctttccgcc

SEQ ID NO: 30416 - DNA, 295 bp, Homo sapiens
  chr5:1922827-1923122
  hypo
cgctgctgctcagggacccctcctcccattctggaaaccatcggcaaaacctcagcagaccacggggccattactgtgggctccggtttccagccactgcacttccagacttttctcttcggagccagtgggaatttagcaaatgactggatggggtctgggcaaccaggcatcacgaggcgccttctccttccactcggtggagcagggtctccagtgaatgcggcgtccacgcctgatcggggctcctgccagggcggccatgcctgctgctagagcctctgagaaaacagcc

SEQ ID NO: 30417 - DNA, 474 bp, Homo sapiens
  chr5:1951382-1951856
  hypo
cgccgtctgctgtgcgtgcgccgtctgctgtgcgtgagtcgtctgctgtgcgtgtgccgtctgctgtgcgtgagtcgtctgctgtgcgtgtgtcgtttgctgtgcgtgtgccgtctgctgtgcgtgtgtcatcttctgtgtgtgcgtgccgtctgctgtgcatgtgtgcattgtccattgtctgctgtgcatgcatcgtctgctctgcgtgcgtgcgtcatctgctgtgcgtgtgtcatctgctgtgcgtgtgccatctgctgcgggtgcatcatctgctgtgcgtgcgtgtgccatctgtgcctgtgtgcatcgtctgctgtgtgtgtgttgtctgctgtgcatgcatgcgccgtctgctgtgcgtgcatgtgttgtctgttgtgcatgtgtcatctgctgtgcatgcatgcattgtcttctatgggcacaggcgtcatctgctatgggtgtgtgcgtcgtctgctgtgggcc

SEQ ID NO: 30418 - DNA, 550 bp, Homo sapiens; identical to SEQ ID NO: 22922
  chr5:2038439-2038989
  binary

SEQ ID NO: 30419 - DNA, 318 bp, Homo sapiens
  chr5:2180343-2180661
  hypo
cggcaggagagctccacgcggccccccaccaccttcacggcaggagagctccacgcggccccccaccaccttcacggcaggagagctccacgcggccccccaccaccttcacggcaacactccgggaggagaggggagagagcatctccctcggccttctccgtgaagtctgggacctggagactgtccccccggccaaatgaaggaaaacggtgtttttgggagctcgatttcccttgacaagtcagattttctgttttcagattccattcagctctgcaggctgcagacctgggctcgcgtcctctcacgagatac

SEQ ID NO: 30420 - DNA, 537 bp, Homo sapiens
  chr5:2261209-2261746
  hypo
cggaaagcctgctctccgggtggctctgtggctgagacgggcaacacctctcaaatggaaacacctgacgttgcaccagatctcagatgcgaagggcgggggtccctccagtgaggactcccaggggaccgagttttccacctgcgttctagatgttctccgtgaaagcatcacgtggtgtcccggtgaggggcctggctgagtgggcatcggcttgagcgcctggagcttgctggagaagagactcatgggcaccaccgggcccaccatgcagacttcagggaaagagagcagccggaatgcgttttaaatcctgcctgagagcgtggatgctacaggactcctggcgtggggaacccggcatctgtgtatgtgcccgtgggcatgtggtcagcgaggcaaccctcacaggaccacgaggccctggtcggacacaggctgcccgcagccccttcccacaggagcaccaccagtaaggcctttactgtccccttatcccttgctgtttccccaccgacaccctgacgctgagcagcc

SEQ ID NO: 30421 - DNA, 418 bp, Homo sapiens; identical to SEQ ID NO: 12831
  chr5:2371462-2371880
  hypo

SEQ ID NO: 30422 - DNA, 213 bp, Homo sapiens
  chr5:2412076-2412289
  hypo
cgctctggccggattcggccattctcatggaaaccaggggcccttcccagggcgcctcctcacttcatctccaagctgagaggcaattagtaggagtccgtctcagagtttctggagcctcagccatgatggcggccacctcatccccggaaaggacgtaccgggagcacagtcagaagtgaggagcagccgtggtaacaaatctcatctgtc

SEQ ID NO: 30423 - DNA, 172 bp, Homo sapiens
  chr5:2541496-2541668
  hypo
cgcatgcgtgtgcaggctctgctgtgtgtgtgtggtgtgtgcctgtgtgcacgcatgcatgtgcgggctctgctgtgcatgtctgtgtatcgtgtgactgcgtgcatgcttgcatgtgccgactctgatgtgcgtgtctatgtattgtattgtgtgccctgtgtgcatactc

SEQ ID NO: 30424 - DNA, 312 bp, Homo sapiens
  chr5:3221011-3221323
  hypo
cggcgcactgtgctcctggtcctggcgcgagcatctcctttccagcctgcccggcgctagggctccatggaaccccaagctctctggcttcagaactgctccaggcaaatgcgtggcatcattcataaggaggcagcgtcttgcggtgctgagaccgagcccctggctgcttccagatgtcacttccaatgccagcccttccgcatgatagctctgtcaccaggagcgctcgggcgccttcactctgcttgcgcctctaaagcacacctgccccgcccacctggatctgctgtcaatagctgtcgggcgtgc

SEQ ID NO: 30425 - DNA, 778 bp, Homo sapiens
  chr5:32712324-32713102
  binary
cgcactgggacctgcccatgctgtcggctggggcgctggccgctggcttccagcacaaggactctgagtactcgcacctcacgcgcgtggcgcccgcctacgccaagatgggcgagatgatgctcgccctgttccgccaccaccactggagccgcgctgcactggtctacagcgacgacaagctggagcggaactgctacttcaccctcgagggggtccacgaggtcttccaggaggagggtttgcacacgtccatctacagtttcgacgagaccaaagacttggatctggaagacatcgtgcgcaatatccaggccagtgagagaggtgagcaggggcgcgtcccgggccccgggccctaacccaaccgctctccgcggctctccctgcacactcgtccactctgcagaccccactccccactgcggcgctgaggtcgggtgcgcgcgggcactcgttcaggtatgcgccgtgtggctgcgacaacctttgacgaccgcccatcgcggtgtacgtagagggtcccagggaggtgaaggggttggaggagagggcgtctgtagctcctgcgtgcccaggtccaacaggtgctgtcaaacacttcgatgttttttcttcccagtttccactttgccagcgccgggctggtgattagggggcgcactcccagtgcctggctccatccagggtctgaagcatccgaggcggaaagaacttgttccccagtcctttgccagcgtgcgcccccacttagtgcggaagcgtccgcggacgcctc

SEQ ID NO: 30426 - DNA, 317 bp, Homo sapiens; identical to SEQ ID NO: 12836
  chr5:3282952-3283269
  hypo

SEQ ID NO: 30427 - DNA, 216 bp, Homo sapiens; identical to SEQ ID NO: 12837
  chr5:3627893-3628109
  hypo

SEQ ID NO: 30428 - DNA, 449 bp, Homo sapiens
  chr5:3740590-3741039
  hypo
cggtgtgaggtgaccgcgtgctgtgctctgcagggccaggcctagaccccgacgtcccagtcccagtctctgtctgcccaagtgggcgggagaatctgggggagggagggagaggctgcttcccaggccgtcatcccagcacggcttcctcactgggaggacgcggcttgttcccatttctggagtcaggctgtatgggcccctccacaatcttcagcgccgcgtccctgcaggtccacatgtcccccgcgggccctcccctggtttccgatgcccatcacccaacctcttctgtgtcctcagcccggggtgggggtgcagcccctgcaggtgcctcagggtgtctgtgctcccagccctacccactgctcggtcaaaccttcacatcgccttctctcctgcgcgcagctggcggcttctatcttctgacccaccccagcgtgcctacc

SEQ ID NO: 30429 - DNA, 790 bp, Homo sapiens
  chr5:3761134-3761924
  hypo
cgctgaatgcggctctagcagctgtcgtgggccttcagagaggaagaatcttaaggcgcgtccaagacaagcggagtcgaggactccgtttcggggaggtttacctgaaaagctgtgtggaaaaacccgactgcgactttcaagcttgtgcttcacaacccaggagccgtgcattatgtccatgtgttcagatgcaagatgctcagaccccaggaaaaagggaattcggtgtaaagaaaaaaggactcttagcatggtccagtattaggacagtaacaccctgtgtgtgtgcacgtgccctccctccatctccctggcctttgcgtctctgtgtgggtgcacatgccctccctcctccctccatctccctggcctttgcgtctctgagtgggtgcacatgcgctccctccatctccgtggcctttgcgcctctgtgtgggtgcacatgcgctccctccatctccgtgggctttgcgtctctgtgtgggtgcacatgccctccctcctccctccatctccgtggcctttgcgtctctgtgtgggtgcacatgcgctccctccatctccgtggcctttgcgtctctgtgtgggtgcacatgcgctccctccatctccgtggcctttgcgtctctgtgtgggtgcacatgcgctccctccatctctgtggcctttgcgtctctgagcgggtgcacatgccctccctccatctctgtggcctttgcgtctctgagtgggtgcacatgcgctccctccatctctgtggcctttgcgtctctgagtgggtgcacac

SEQ ID NO: 30430 - DNA, 130 bp, Homo sapiens; identical to SEQ ID NO: 12841
  chr5:3781386-3781516
  hypo

SEQ ID NO: 30431 - DNA, 136 bp, Homo sapiens
  chr5:3806443-3806579
  hypo
cgaatcctgcaacgatgggtgcttaggatgagttgttccatttctcaagcaaggttcactgtcgtgttcgcacatggcattttatcaaaggtttccacctaccaacgcagaaattcaaatcatgcttttgcgcaac

SEQ ID NO: 30432 - DNA, 147 bp, Homo sapiens; identical to SEQ ID NO: 12842
  chr5:3865172-3865319
  hypo

SEQ ID NO: 30433 - DNA, 208 bp, Homo sapiens; identical to SEQ ID NO: 12843
  chr5:3932149-3932357
  hypo

SEQ ID NO: 30434 - DNA, 1567 bp, Homo sapiens; identical to SEQ ID NO: 25731
  chr5:40680513-40682080
  hyper

SEQ ID NO: 30435 - DNA, 901 bp, Homo sapiens
  chr5:4144311-4145212
  hypo
cgtgatattctatgcaagcaacattcatagaagcacagcttactacatgtgttctgtgtgccgtgctcttgcgtgcacctggaatgccaactgcacagtttactgtgtcctgtgtgccgtgctcttgtgtgcatgcagaatgctgaccgcacagttactaagtgttctgtgttccgtgctctcgtgtgcacgtggaatgtggaccacacagctaagtgtgttctgtgtggcatgctctagtgtgcgcatggaatgctgactgcacagcttactacgtgtgttctgtgttccgtgctctcacatgcatgcggaattctgacggcacagcttactaagtgtgttcggtatgccacacacttgtgtgcatgcggaatgctgactgcatagcttactatacgtgttctgtgtgccccactctcctgtgcatgtggaatgctgactgcatagcttactatgtatgctctgtgggctgtgctctcatgtgcacgtggaatgctgaccgcacagcttactaagggcgtcctacgtgcggtgctctcatgcacatgcacaatgccgatggcacagcttactaagtgtgtactgtgtgctctgctctcgtgtgcacgtggaatgctgactgcacagcttactacatgtgttctttgtgccacgctctcatgtgcgtgcacaatgatgactgcacagcttactacgtgtgttctgtgtgccgtgctcttgtgtgcatgcagagtgctgaccgcacagcttactacgtatgttctgtgtgccacactcttgcctgcacgtggaatgctgactgcacagcttactacctgtgttctgtgtgtgacgctcttgtgtgcatgtggaatgctgatggcacaacttactctgtgtgttatgtttgccacactctcgc

SEQ ID NO: 30436 - DNA, 799 bp, Homo sapiens; identical to SEQ ID NO: 12847
  chr5:41870076-41870875
  binary

SEQ ID NO: 30437 - DNA, 1687 bp, Homo sapiens; identical to SEQ ID NO: 23300
  chr5:42950747-42952434
  hyper

SEQ ID NO: 30438 - DNA, 1260 bp, Homo sapiens; identical to SEQ ID NO: 25734
  chr5:42991800-42993060
  hyper

SEQ ID NO: 30439 - DNA, 1290 bp, Homo sapiens; identical to SEQ ID NO: 24515
  chr5:42994313-42995603
  hyper

SEQ ID NO: 30440 - DNA, 722 bp, Homo sapiens
  chr5:43007771-43008493
  hyper
cgactggtgttttgtgcagataagggaacttgcacaagggacttgcctaagcatgcctgctgcggattaagagcgcgcatgcgcactgggggaatgggatggagccacccgggattctcgccttatacaaacagggaacccagcctccttagctttcatataaaagcctttgtattcagccgttaaggagcaaccggcaacctgctttcaggacccttgttttttatgagagctttcgtttacgcttaataaattctactccactcactcttcgatatccgcgtgcccacttcctcctgatcgtgagacaaggacccggatatagctgagcttagaagcaaaaatcctgcatcaatagcaaatgcggacactgaacgactagcggagtacccagcggcaaactttagtttttggtgcagttaaggtattgccactaagaaatcgtcgtctctgagaaatatcgaggcttggaaggttgtacagtgcttccaccgagaaagcacctacccaatgaaacgcctgtggcagaaaaaccgagcccaagcccttccagcgaaagtgctgaaagagcgcctcctcggccaatcactgggctgagaccgtgagacagccagcccggggaaagtggcggcgctaggagaggggaagcgttaccacaaagcacttctgagtcttgtgaacaagaaacgttctgggttgttttgtttttgagaaggagcctc

SEQ ID NO: 30441 - DNA, 186 bp, Homo sapiens; identical to SEQ ID NO: 25738
  chr5:43008736-43008922
  hyper

SEQ ID NO: 30442 - DNA, 1396 bp, Homo sapiens; identical to SEQ ID NO: 25739
  chr5:43017299-43018695
  hyper

SEQ ID NO: 30443 - DNA, 809 bp, Homo sapiens
  chr5:43019005-43019814
  hyper
cgcgaatgcgattttttttaggtttaccgatgatcagtttagcagtgcctgggagctcttataccaagtttgttttcgcaatattgagtcccaccttagctaagcttgtgtgtattttaaactcccatggaagtcaggaaatgtccgcaaacgcgatttctggttaccaagctccgtttggcaatagcaagtcctgccgaacgcgactttttcctcttgtggaccaagtctgaatagaccagctactgcgatttttaagtcgtagtaaaaaaggtttaaccgtgactgcttttttttgttggtgttgtttgtttttgtttttgttttcgtaggaaatgtagacttaggtgtaacatgtaccggtttagatctgacagagatatcacaattgtaggattgcatcttttagcaaggtttgtaatttcttctttctaggattggttctctgtaatttttgcttatttttaaattctctctttgtcttttgctctgagaacgatgttaccgatgtgtttgctttccatgtttacttgcattttagcctttatttttttaattttgattttatttaaatgttatgtattttttttctactaattttgagcgtctcagcttcctgcttctttacttacattctctcaggatccggggagccgagctcggtctcagtctccctgctgtcaggtgccaggttgtgtctggtggctctccttcgtatgcggagctgatggttttgcatcagcgcttttgccagtagagccgactagcgttttctcagttacggcaccgttcttagcgcccagtgtgac

SEQ ID NO: 30444 - DNA, 1069 bp, Homo sapiens; identical to SEQ ID NO: 24517
  chr5:54518558-54519627
  hyper

SEQ ID NO: 30445 - DNA, 993 bp, Homo sapiens
  chr5:71403137-71404130
  hyper
cggcgccgcctccccgccctctctcactccccgctcctctccgccgcgcactctccgcggcgctgggagagggcggagggggaggcggcgcgcggcgccagaggaggggggacgcagggggcggagcggagacagtaccttcggagataatcctttctcctgccgcagtggagaggagcggccggagcgagacacttcgccgaggcacagcagccggcaggatggcgaccgtggtggtggaagccaccgagccggagccgtccggcagcatcgccaacccggcggcgtccacctcgcctagcctgtcgcaccgcttccttgacagcaagttctacttgctggtggtcgtcggcgagatcgtgaccgaggagcacctgcggcgtgccatcggcaacatcgagctcggtaagtggccccgcgcccccagagacgcgcgctgggagacgcgcaaacacgaccccacccagggcgcgacggtcactgcgctcctcccgcgcgccccgcacccatgcctctcctcgtcacctctcatacttggtccagaccctttctgggctaattaagaataatccgaattattagatatgagacccagagggagagtctccaataaccttgagggatctgtcaccacgctgagtccgcagcctgtgctgagttggccaccgcctctcccgctaagtgaaatgcaggtgtcaggggagcagaggccacaataaagccgcaaccgcaggaggcagaagggtgggggagacctgatgcaaccactcctttcagtcctcttctggcctcaggaaaaggctgggacccccaccaccgcagacctggggccgaagcccatgtgccagggcccgcgtgggattcatcctcaccacggctacctcagcccctgagaaacgccttttctgatttcaaacctcccgatcctttctttcctcagaatgactaggctagtcctagggccacgcccgctccccccgcccccccctcccc

SEQ ID NO: 30446 - DNA, 1443 bp, Homo sapiens
  chr5:72742484-72743927
  binary
cgtcaagggagcctctagtgcctggacagggcggactcccttccccggcaccctcttcctccctaccccaggtcgggggttggggggctgtagcataggtcggctttgcataaatagagggacccgcagagccaaaaggcgcgcccgggctgttgacagttttgtccgagaattcgcagcggcgaaaatgggcgcgcgaggtcgagaggggccgcgcctggaggagcgaacaaaacaccgaaccaccaagacgagaaaaggagccgggattcctaccttcttcctcgagcgcgctaacatagcgttattaacaattggaaatcctagcagtaaagttctcgacactggacagggcagtcccttggtgcagagtccccaaggcggcggacgaggagactgaggaggcggcggcggccgcggcggccacgagggatcgggtgagcgcggccgccgggcccacggccgcctgcgccgcgcagcctcctccgctggatccgggagctggcggcgccgccaccggcgagggcgagggcgaggcctgagcggcggcggcggcctgcgcggcggcggcggcagcggcggccgggcccaagctgcccccgatgatgctctcgatggagaagggcgagcgcgccagcgctgaggcgcccgggccgcccgccttggccgcggaggccggcagggggccgggtagggcggcgccgagcgggtgcggccggtagccgaaggcggtccgggccagctcggcggccgcgccgtgcggtggcgggggcggcgggggcgagtgcgggtggaaggcggcggcggcggcggcgcgctgcggcggcgaagagggccgagggcggcgcgtaaggcggcagctgcaggccgtagccgcagccgtaggggccgtagccgtaggcatgcgggggcggcgggggcgcgggcgggaagagcgcggcggcggctgccgggtcgcccgcgccccctgcggctcccgcgccgcgcagcagcagagactcggcggccgcggcgttgggtgggagcagcggctgccgcttgaagcgcttcctccggcgcaggaagctgccgttgtcgaacatgtcggcggactccgggtccagcgtccagtagttgcccttgcccgggttgccgggctcgcgggggatcttgacgaagcagtcgttgagcgagaggttgtggcggatgctgttctgccaggcggggaacttctcccggtagtaggggaagcggccgctgatgaactcacagatctcgctcagcgtcagccgcttcttggggctctgcaggatggccatagtgatgagcgcgatatacgagtagggcggcttcaccagcgggttcttggcgccgctacccgcgctcccgccgccgcccgcgccgccgccgccgccgcccccaccggctcctgcccccgccgccggggccgggcccgggggcgcc

SEQ ID NO: 30447 - DNA, 943 bp, Homo sapiens
  chr5:72744430-72745373
  binary
cgcccggcccgggcggaggacttgaccttctcctctcggagcagcttttgccccgtcagctgaggagggggtggcggggcccgggcgggcgaatcagaacgccaggcgcccaggaacgtgcgggacgggtgagagtctaagaacagagctcggcgaggccagggctgagtccaggagagggcggaccttcctcggcttatagcagaagggggcctgtcacatggtgtgcacgtcagagcgctgccgagggaaggaaagcaagcctaggaaatcagcccttctcgggagagaaaattcacccgtaggagggaggcagcagctgagaagagtggggaggagaggggacctcactatttcttgccaaagaggctgatgcccgaattacgcggctgtctgcaccgagggccgctgcacgagttagacttcccagcctcctcaattagtcctccaccctaacctcagaagcacacccgcgacactctggtttgacccctcgacagcctgtaggagccttccagccgggggataaccaccccatcctctgaggtggcccctgggggacgctctggggtcggttgggggtgtccagcccctccagatcgggcgagcggccccccattggatctgatgcgaagccccccaatttaagcacgataataattgtttattgaccctttaacccattctcttcggttttactccaaagacgtttgttttccgccatctgttaataaaaacgctgtgagactggcgttttactcacttctctgcgattgaatgccctagagacttgacagttaaactaagccactctaatgagacgatctgacaaatgtcatgggaataaagaacgtaataattgaattcggagaagaaattgaaatttttagtgaaaacccaaatacacgcacaaaaattgcacctagaaactactaaaaagttc

SEQ ID NO: 30448 - DNA, 1732 bp, Homo sapiens; identical to SEQ ID NO: 23305
  chr5:76925469-76927201
  hyper

SEQ ID NO: 30449 - DNA, 763 bp, Homo sapiens
  chr5:76940861-76941624
  hyper
cgtcccctccccgcaacccgagtgcggctaattccgggcgtctatattcactcaattagagaaatctacagagaagatcgatcttccatctgcagacatgccagcttaacaaattagattcttgtttcgtgcaggtgatttggtgacagttggggaattagaagtaataagttgttgtgtttgagcccgggcccccgccccccgcccgcgcccctccccgcccgggggcccctcggccgcgcccgccgcccgggcaccccctaccgcaccccccagccggcccgcgccgccgccgccgtcgccgcatcccccgccgtaattagtgctgctgccctccatgtgggctcgattaaaccgtgatttagccgaaagaaatataattatggctgcaaataaaataatcagcattgaagagcgatttccttaatgagatggagcggttgcacgtcacggagtaaaggggtctcattaagaggtggtaatgaggcttgggtggatggtgcagttacaaaatagcccaactcctctgcaggccgggcccgtccgcccgaagtggccgccgcgtcgccttccagcggtccggaggtgccgcggtcccagaggggactcgggcccgccccgcccggcccccagggggcgcagcgcccgcagcgcggcctcctcccggcgtctcccgcgccgtcgggccgggcgggggacacaagccgccgcagcggctagggggccccgccagcccggcccgctccgcctcggctgggcggcc

SEQ ID NO: 30450 - DNA, 835 bp, Homo sapiens; identical to SEQ ID NO: 23307
  chr5:77147851-77148686
  hyper

SEQ ID NO: 30451 - DNA, 1132 bp, Homo sapiens; identical to SEQ ID NO: 25748
  chr5:77268330-77269462
  binary

SEQ ID NO: 30452 - DNA, 1319 bp, Homo sapiens
  chr5:79865177-79866496
  binary
cggagcaggcgcacctctgcacccggctctctgctaagggggtccggtatcctggtgccaaggctgtgcgcacctgagaagggcgggaaccggctgcccgcccctgtgtggctcctggaagcaggagctcctggaagctgcaaagggctccgcagtccccagcccgcccccagcgcccagccggcacctcctgctgcccagctgccgaggcacctgcggagacgcgcccaagtcagcccctccggagacgcgcccaagtcagcccctccgacccgcgcgctcttgcggcccagcgcgcgccgctcccgctgctgcgccgaccttcgcccatcaggccccccgccccgcatcctcctcgacaccccgcggccgggcagccctcgccggttcccgccgctcggcgaggctgagaaggaggcggaacccgcatccccgcggagtccaagccccagcggccgcaaaactggaaccgagaaccagtgggaaaggcaggaggcgcgagggtgagctcgcgtggagcgcgccccggggtggcggggcagagtctctcgggaggcccctgcagcccggcggccctcggctggccctgggtctctcatcctgctcggggcactgcaatgtcagggtgagcgggaggtgcgggcttcaggggcttgcgcgcaccgggcagggagcactgaggccgtgcgggccgctgggttccacgctgcgccctcgatgtcctcctcccggcagccgccactgcaagccaaagtttcccaagtgcagccggcagggacggcgcctcacactgacctgggacgcgctgtcgagttggcggcggcgctttcaaacctctctccggcactgcccgaccctctgtgcggccctagggcgccgtctgagctgagctgtggtcttcggctcctcggcgcctcgaatcgcagatctcggtagatgccgcccagtccccgccctgcttgcggaaagaggcgggcgactgccgcgaagcgctggagctgggacccggagcgcacacctcgccagacgcccgggcagcgaggcgcttccgctgggggtgacgcgtcggctccaggctctgcgcaggtgagggcggcaaggctcctctggacccaggggggccagcagctgctggaagctccgccttctgtccccgtaagtcccacccccgtcccccgcttcggccaccgcgcttcggccacggcgacttggccaacaacagcggcagcagggtctccccattgagggaagcacgcacccctacgtcacgggctttggctcctccagtccgtatccctcccctcagctcacatccaccc

SEQ ID NO: 30453 - DNA, 791 bp, Homo sapiens
  chr5:87956489-87957280
  hyper
cgacgtccaggcgtgactaaacctcgacgccacccccattcacaagctcaactcagggattcccaagcaaccgcagaccggaggtggcgcagaggcagtgaccgaggtcgctgattaggggccgagaggctggcaaataataattttaaaaaaaaaaaaaaccggaatagccttcgcggacgcagctcagcgtgccaggcaaaggacagtctgacgacccgcccctgccgagccccgcagcgcggcgccggtgtccagcagcctccaaggcgccgagcgcgggcacgggaacttgagctagcgcaaacttgggcggcctcccagcctgctacccgggccgcagcgcgcccccggcctcccagtcgcgcgccaacccgggagcgcgcgcgccggcgcaccagctccatcagctagaggagcccgtctcccgggaaacaccaatcagacgcccgctttcaggcgagggccgcgagccgcagcagctgcaggaggactcgggcagttggcggtcaccgggaggcgtcgtcctgccccgcggcgggccagccgccttcgctgctgccactgcctagcctaaccgcatctgcagccagtcacagagtcggctgtctcctctttgcaccgcccacgccaagtaccttgcaaggcggctgctaagcctggctaattttagatctccagaatgcgctatgcccgcgctcaactaaaaccaagtcaaaccatcaagcacagtgatgtgctgctttttgaacaaatatggctcaaaactccgtatttccctgaataaagtc

SEQ ID NO: 30454 - DNA, 870 bp, Homo sapiens
  chr5:87969885-87970755
  hyper
cgcgccataggggtcatctatttgaggaggaagaaaaagcgggtgtgtgtgtgtgtgtgtgtgtgtgtgtgtgtgcgcgcgcgcgcgcgcgtctgccttccacggaaagagagacggagagatgtgggagggtgggggtggaagtatgcagacagagaagggtgggggcttcgaggggaaggtgggcttcctgcaacacaagcggagaggctgtcaggggtgtgggcacgggggtgcggggaggcggtgcaggaatccgtcccgccgagtgccgtcggcccctgtgggcctgtttgcgcgcctggggctggccgcattctgggcgcgggtgtctgcgtgccggggtggtagttccgagcctgcgcgcgtgcgaccgggtacgggagggggaagagtgccgtaaaaattcagacgagtggcccgtatgtaaatgcagcccgcggggagcagggaggcggtaatgacagccgctggcgctcagccccgccggcggcccctagctttcccgccaagtgcagccggaggacagacagccatgcgtgtccttggcgggagagcccccacccgccgcgcgcgcccgacccccgcgcacacgcacacactcccctcgcaggcgtggggcccaatggccacgaacatgtcaggaaaacaaagctggggctgcgaggtggaacgatgaaacggcacacttggcggccgagggcagagcggagaagtcgccaccacagccaccggcgcccctttcttgcctgctcgtagatctgccctccggcccagaagaggccgaggaccatttcttagctgccccagaggagggggcgagcagaggagggggcggatgtgcacagggaggtgccagcggtccggtgc

SEQ ID NO: 30455 - DNA, 995 bp, Homo sapiens
  chr5:87970756-87971751
  hyper
cgggcacgcacacgccggcgcgcagggctgccgcgggcggaaggaggggaatgacaaggcctcggccgcgtctcggagaggcactacctccgcgctgaggccgctgagtttcaagtgcaaaacaccaggccaaatccggcaaggcggcggctacagaatggctcacacttcaagcctccttcctcaaacaatccgatgggaaggacctggctgttcaggggaagcctttgctggcctctctttttacatggggtgaagtcgaaccccaatctaggagccctggcctagatggctccgcagatgagtcccagacgtggccatggaaagactgatctctctctgctcagagcgcctgcctcggtgctcactagcgcaagcacctcccaacacacatacatacatacacacacacacacaacacagcactcccatcacattaaaacgcgcgctcatgatcctgccgttaatgaagccgaggcgcataatgagtgcacaggtaaataggtaccgaaaccagaagacttcaccagtcggctgggcgatttacctctccctacagggagcacttgtagttatcgtgttttaggagtgatttgctgttgtctgtggtctctcgctcctcttcttgtggagagaagccaaaaaatatatatgttccgtggtcagagtcttctttctgataagctacccgagcattggtctaaaacatctgttttatctgttgattttggtttgttgttttggggagtgttgcttttctgagggaagcaaaagaacgtgtgtgtggtggggctggaagctcagggcaagagtctgcgtgtgcggccggaaggctggcgagtctgagagccgcgcggtgcagaaagaaggcggcggcttgtcctcccccggggccggcactggtcccttggcaccccggcctgggctcggctactgccgccgccgcccgcgctctcgggctccgccggctgccgctccgtgttttcccccatccc

SEQ ID NO: 30456 - DNA, 716 bp, Homo sapiens; identical to SEQ ID NO: 27119
  chr5:88178399-88179115
  binary

SEQ ID NO: 30457 - DNA, 1197 bp, Homo sapiens; identical to SEQ ID NO: 22927
  chr5:88179191-88180388
  binary

SEQ ID NO: 30458 - DNA, 460 bp, Homo sapiens; identical to SEQ ID NO: 29295
  chr5:92906252-92906712
  hyper

SEQ ID NO: 30459 - DNA, 991 bp, Homo sapiens
  chr5:94955931-94956922
  binary
cgcgtcctgcccgccctcttcggtgcctcctcttcctccgggacaaggatggaggatctctttagcccctcaattctgccgccggcgcccaacatttccgtgcccatcttgctgggctggggtctcaacctgaccttggggcaaggagcccctgcctctgggccgcccagccgccgcgtccgcctggtgttcctgggggtcatcctggtggtggcggtggcaggcaacaccacagtgctgtgccgcctgtgcggcggcggcgggccctgggcgggccccaagcgtcgcaagatggacttcctgctggtgcagctggccctggcggacctgtacgcgtgcgggggcacggcgctgtcacagctggcctgggaactgctgggcgagccccgcgcggccacgggggacctggcgtgccgcttcctgcagctgctgcaggcatccgggcggggcgcctcggcccacctcgtggtgctcatcgccctcgagcgccggcgcgcggtgcgtcttccgcacggccggccgctgcccgcgcgtgccctcgccgccctgggctggctgctggcactgctgctggcgctgcccccggccttcgtggtgcgcggggactccccctcgccgctgccgccgccgccgccgccaacgtccctgcagccaggcgcgcccccggccgcccgcgcctggccgggggagcgtcgctgccacgggatcttcgcgcccctgccgcgctggcacctgcaggtctacgcgttctacgaggccgtcgcgggcttcgtcgcgcctgttacggtcctgggcgtcgcttgcggccacctactctccgtctggtggcggcaccggccgcaggcccccgcggctgcagcgccctggtcggcgagcccaggtcgagcccctgcgcccagcgcgctgccccgcgccaaggtgcagagcctgaagatgagcctgctgctggcgctgctgttcgtgggctgcgagctgccctactttgccgccc

SEQ ID NO: 30460 - DNA, 451 bp, Homo sapiens; identical to SEQ ID NO: 12868
  chr6:10319622-10320073
  hypo

SEQ ID NO: 30461 - DNA, 1528 bp, Homo sapiens
  chr6:105584092-105585620
  binary
cgcacttattcatgcttcaaagcaggcagtttctgggacttgtctggccaacaacccgttcccaaaggctcggggaaggaggttgcgggtgggtggcgcggacctcgggtccccagccatcggcgctctcccggggccctctgacctcgctccttaaaggaggagggtccgtggcaacggtcctcctcggccaggcgctctcgggacgcgggggtgaggagtgagcgccgtggcccaccctactctccgagcggggacggagtgggcgacaccgcgcgcccggctgcacgcaggctctgcgcggctcgaggcggccctacagggggcgaggaggaaccccggagactcggcggagagagcagagacggagctcaccaaggggcttgccgccgcagagcgcgggagccggcactcggtggggccgagggcccggggacgctggggctgcctgacctgagcggcggccgctgaccgttgagggtctctgtggccgcagcgcccagacccggggagaagggcggcctccaagggccgggagcccctcgagggcgcggccagcgaggagggacagagggcggcgcccccggctgcccgggcgcgtagaacaagcagctgccgccagggccgacaaagttgctccccgaggggctgagatccaactttcgcttcccgatttagccaggggagcgcgaggccgcacacaacccggcgcggggggaaagccggctgcagctgcgcctcccatccttacccggctggtccctggcggggagcctgggcagcgccgaccaaagttcggagcggcagcttcggggcgcgggacgcggggcacacgggctcagctgctcgacgggagcccgacgcgcgctcctcggcgggtcggcgggtccggaagctccgctgcccgggccgggtccccaagcccgcagccgctttgactaaaataggcatcgcgacggcggcggcaggcggcggcagccagggctggggccgcaccgcgcacgcgcatgcgcccgccgccccgcgccccccggcgggcggagcccggcgccgcggccaggatttcccacctcgctcccgcgactccgctgcgggtctgcacacccgaggactcggtttgaaacgcccgcttatttattttcttgtcgcctcgctacaagattctatccttgtttgggcatgagtggggggcggcagtctcgtgggaccggcggcattcgtcgttcctccttacggggataattcgagaagtgcggtccgggtagggagagaaatcaggagagaaaatgagaaagagaatcctcgtttcccctcaaagttggacgacccactcgtatatctcctttttgggagattcgcccataactcagcacaaacagggaatagcccggaaagcgcgcgagttcccgtccgattgtggcgggggaggctgaacgtttggtccacacgggtgcaggacgcgggggtcaggcctcctgctgcggaggaagagggggaagaggccgcgcgggagggacttctgacacgc

SEQ ID NO: 30462 - DNA, 975 bp, Homo sapiens
  chr6:105627242-105628217
  binary
cggcgctggcatgacttccccaggactgacaagggcccctaggaacggcttttctcccttgcaaaactggcctgtttatttcggctccagggtgcctggggccagagtaggacctgcaggaaaagatctgggaggaatattcgcccagaagcctctagggcatacgactcgcgttcttcaggggtcggcgcggataggaaccgcagcaaaggatcccctagacctccgagctgtgagcggcgacacagccgggaccccagaccccggaccccagggcgcggagttgaccggagccgggaagggagcggcgcgggcagcgcggggcagcgagacgcaagcgctcgcaggggtcggcggcccagcagaagccgcgcccgctaagttgcccgaagcggccgcgaggtgcgagggtgcggacagcaccggaaggcggcggacgcagcgcccccgggctcaccttcttacctttccttcccagccctgcccggagcttcagcccggcgcccgcagaagtttcccggcggagcgcgcttgacccgggtggcccgcgcggaagccctcagcgtccccctcgtgagtgcctcgccgcccaccctgcggcgccgggcgcagcgtgaccgcagcgggctccggagcggcgcggcggcgcgggcgggtgccgggcacgggcgcgcgccccggggcgcagccgggtgggcgggcgcggcggctgcgtctgggccggggcaggcggttcggccaccggggtgcggggctgcggagaatcctagcggccgctacggaccgaagtttccaaagatgcggttccccgagtgtacaccgctcccggttgtaacatacacctagtattcacagtcacactaggcaggagcgatgggctggctgctgaaccaaggcaactgcacgcctgctctctcacccccgctccacacacaccgtaaacaaaatgaagaggtaaatcaccatagtggggac

SEQ ID NO: 30463 - DNA, 592 bp, Homo sapiens
  chr6:106429018-106429610
  hyper
cggtgactgtgcaatgaaattgtcaattatcctctctgccttcctgcgttgaaagagtttcaagaagttgtggtgagtggatgtattcccagacggatgcgggcggtccccgggcagggaccccgaatccggggtcgcagggtggtagagccggaagattggattccatctccgcaaggattgagaaaaacggactcaccgactgaactattccatctccaagttgtttttattttccactttaagcataagaacgatgagaaccaggagccaggcggccccgcgtagcggtgggagcgcaggtacccgagagtaccctctgggggccggcccggcgcgctcgctcctcctcgcctttccgggaaccgtgcgcaggagctcacacggcacgcctgcggccaggggcaatcgggttctcggttcccggagtcccagttcccggtttccagtttccttatcgacgcgattgttccgtcggggtcttccaaggggatccgaatggtggccaagtcccgctggggaaatccgcaggggtgcggcctgcggggcctttgggggcgcacctacgccacgggctctgccattcctatcc

SEQ ID NO: 30464 - DNA, 925 bp, Homo sapiens
  chr6:106441828-106442753
  hyper
cggatacagctaatttgggggaatgtaagctggatgtcttttcctaatttatgaaacgtgaacgggggtaaggtatttatttgtacgctagttgaagtggggcaggagcactgattcctggacagtcactcaaaagctgcgcccaaagttttaaaaagcgcggggacggtggagagggaggcgaagagcccgcgctgctgggctgggctcgggtgccgcgctggggacgccgcatctactgagcggtcgccgaagacgccgggaggcgaggggcgaggtaagacgccgcctaaagaggcccgggctctcccccggggtcgttgttggaaaagcaaattccacggtgaactctaccaagctcagcgcgtacacagctagcggctctggattggactgcattcgcctaaattgcgtaattaaaaaaaaaaaatacaccactgccaccctacagcgacgcttccgctggaagacgagcggggacgcgtgacagcgcggggatagcttttctattacgtttcttgttctccgagctcgagcccccttttaaaaagtcgctcaccaaaaacggggtgggggatggaggtggggacgagaagtttccgaatgctgagttcatttggacgaggtgaggagaactagggtcctaacagcaggtccagaggactctcgagataggtttagagcccgtccttttgtctggagtgtcgcgggactccagaagtgggttgtgcaagacaaacttccagataaatctttgcccggatcctcctgcggtcaaagcatcagtcctgcccgtaacttcctaacgacatcttcttggagcagattccgcggcggggatggctgggtgtgcaaaccgaaaacagtttgtcagccctccagtcccgccgcgtcgggaatgcgagcccggccacgcggtccgacc

SEQ ID NO: 30465 - DNA, 770 bp, Homo sapiens
  chr6:106533693-106534463
  binary
cgttagcaggagaaacggaatgttacaacttttggggcggggggcggggaaacgtgcgttacatacacaacagcttgaggaccagacagctccactgtattacactagctgcaaaaacaatttaacttgctcttttgaagtaagatttgtgtcttttgtacctggggatttgagctgagaaatcagaaactgtgtaggtaaattttaagtttccttaatttaaggaacgtgcgccccctaattctgccgcgccaggaaggagggcgatctggagtgtttagaatacaatagagcccaagtaagcgttgaggttaagtgccttcaaagggaagtaagaagattccaagtcaatgttgaaatacacatgcgaagagaggaagctctcggcggctgtgctagcaatctgggggaaagccctgggctcggccaggtggtgttggccacgttggccacgcccccacttcgcgcagccgagtggctaaggaaatcttaagcagggaggggaagccagacggttaacacagacaaagtgctgccgtgacactcggccctccagtgttgcggagaggcaagagcagcgaccgcggcacctgtccgcccggagctgggacgcgggcgcccgggcggccggacgaagcgaggagggaccgccgaggtgcgcgtctgtgcggctcagcctggcgggggacgcggggagaatgtggactgggtagagatgaacgagacttttctcagatgttggatatttgcttggaaaaacgtgtgggtac

SEQ ID NO: 30466 - DNA, 991 bp, Homo sapiens
  chr6:108490139-108491130
  hyper
cgaagctgccatatatctttaggcaattatgacacacaaaaagccccgaggggaccccctggcgagggaagttaagaacggttttccagcttcaggaaactccggctcgcctcacgtcggagctcgctcggcttgctaaatgagaggagctttgcaacggggtcaaccagcttgtctcgtgaccccaagtcaccttaacgtggctgggtggcggagtctgaggcacaggcccgctatgccccggaattttcgcgtccctccctcctgggccccgccccagcccggttgcctgtttctaatctgccccgggagccgcggctcagaggtctgctcagaggcaggactcgcactggtggtggcctagagggcaacagtccggaagctcgggcgggggaatccgaggaggggcccccaccctgcactggtcttccctccaccctcatcgggttctccagagatgttgtcatgggcctcctgtccggatgggaagtggggaaaaagagaccccaccactgctcctcccactcactcatcttggcatcttcaacagtgccacagggaagaggacagctggggtgacagtactgctgggccccaaacgtggaccctggagcggtcagagggcgcgtgttaagcagaggatggttgtaagatatggaaaccaagtttaccgcttccagagtgagtgcagtgcagcggagctccagacccggttcctgagcgaccaggaactcccttgggcgcagtgacaggcccgaaggagtggaggacaagacccgctgtgcccttgcctggccctctccagcccctccctcccacagcacaatctcccctcccgccctgtgggaggggggcgccgagccggtggccgccgcgccgcgcgcctcccctgcccgcctttgtcgccgtccgaattcccatgctactctttttgacgggtcactggtggctctataggcaggtgctgccgcggggttgtaattacccggcc

SEQ ID NO: 30467 - DNA, 945 bp, Homo sapiens; identical to SEQ ID NO: 9837
  chr6:112193858-112194803
  hyper

SEQ ID NO: 30468 - DNA, 899 bp, Homo sapiens; identical to SEQ ID NO: 22928
  chr6:118228010-118228909
  binary

SEQ ID NO: 30469 - DNA, 1766 bp, Homo sapiens; identical to SEQ ID NO: 22930
  chr6:127836014-127837780
  binary

SEQ ID NO: 30470 - DNA, 1263 bp, Homo sapiens
  chr6:130686392-130687655
  binary
cgttggctttgatgtttggagtcgaacatccgcactgctcatcgaagacccccgtgcttcagttccctctgtcttccatttcccccgcccatggttctcgcccccccaagccgttctccggaaccccttgccgggccggcgggaagcgtggaccgagcgggccttggccgcgtcttttccggccaggtttggtttagctcgcgcagcgcccgcgcagcccgccagggggaccccggcccgccgggcggcatctgaggagaaagcgtccgaggggcgtggagccagggtcctgcggtgcctgctccgggaatactgcgagtcggctggagctccccagccgctccggagaactgggggagccgggtccctggctcggtaaccggtggtcccgcggtagctagaggcgggccccacgggtgggtgtgtccgtttccgcacgccagccttccagcccgggaagagcgcctgcaagcgggtactttgttcccaaagatgggttttgtctgcgggtgatttgggctctcgaagtgcaactttgtggccgggacgcggatcggccggcctgggctcctgcagagcagatcctgtctgcgtcctccaggaggagtgggtggcaggactggggtttcccacaggttttggggcggcggcgagattggcacggtccggggtcgcaggcgcgcagccacgcccctggaagtccgccccggcccccgcccccaacccgcctcttcggggctttatggcgtgaggtttggggctgggatccatctggagccgagcagaaaacttttcccctcccgttcccggtcccttttgtctttcttggacgcggtggcggcgccgcctgagcggcgactccctctcccctgcccggcttgctgcgcccggtgccctccgagggcaggcgcgcctggactctgcgcccggatggcggcggccctctgtgagcaccggcagcggcgcatcccctgccccgaggcctccggtgcccccccggcgcgggcataggggcgcccccaccctccgtccgcttgcaccccttgccacccgccccctcgcctgactcatccgcccgcggtggccgcccgagccctgggatggggagggagaccgcggctgcccgcggcggccgagattcccgctgacgcccccgaccctgccgccttcttcgtccgcctccagaggcgcccgacgtcccgacagctcctggagtgagaccaggactgagaacagggagaggcgacccgacccccagggccc

SEQ ID NO: 30471 - DNA, 2362 bp, Homo sapiens
  chr6:137241797-137244159
  binary
cggtaaatcacgacttcagcactttggctgaagtgtcgcgttcagcacagaggtggaagtaagaggcagaaaacagaagaaccacgagagaaatggatcctgtctattaaggcaacgtgatgcagcgctaaaaggttaggaggttacgattcccggggctaagagaaataaactgctggtggtgaacgaaaggggtgctggagcgcagcgatctcgaacctttcccttatagccaaaccctggccaaggccacaaatttcaaatcgcctgaaaaccaaactgtctggcgcttaacggttacctcggctgagcgaaacccttggctgctgctgatttaactacaggtccgcgcgagttactttccagggaactgaattcagaacaaagagttaccgaagccttactccctctccaaaattagaattccctttttctcttagtcatataggaaacacacagttcacaagtcctgtggtgcaaaggtgtgaaccctggcccagggaggtggtgactctccccgccctccgcctgccggttgtcctgcttccgaaagcaacccacgacggtcccgcagggtgagggttccctgggatcagttccctgggatccggagaacgccacgcggagtctccctgcagggtgaggggccccgggttcccgccccctccccctctactctcccattctgcgagcgcagccagcctcccctcccacgcttcgggaagcgtcgcccccgagctcctcggttcctggtggtggctactcgtgttagtgacttcgtttctgcgcgtttgcttattttcatctttgcctcagttcgaatgtgtccccgccaccaggccccgctgctgggcgagaccactgaaccccctgaaagcttccccggagccgcgcgcataatcccgggaccctctctggaaggcgtgcggagagcggtgcgcgtggcctggcaccggaaggagccagcttccgggctccgaggcaccccctggacagcgccccgggccgcgggttcctcctccgatgcccgggcgtcgtcgccgggatcgggagcttcgggggcccgccggcaccgacggttttcgcttccctggcgggcagctggacgaggtcccgccgctgcaccgggagggacagtgggtggaaaaagccgctgcagcgccggggcgagggggctgggggcgccgtcacttgttgcgaccaataaacggcgctcgatcctgatgcgctgtttctaaaatctttagctgtgtcccgatccctccaacccaagcccctcggccaggaggaaggggcaagcgagagccgctggctctgtggggggagaggggcgccgcgccccaagagcccccgtcccgccctgcggcagccgccccggggcgcccagccgcccgcttccctccgcagagcgtcttccctgacggtgaaaccgcgcgggacacaacccaccgcggctcatcacccacttacaaatagctgtcgctaggattcccgccactcctctcagaccggcccccccgccacctctgccacttttcggagtcccccgccctcgtcactgcctccccggagctgcggggcagtcggacgcagagctgcctaaccgcaagaacgcctggccggagctgccctctgcagccgagccggcgccccctgcccttcgccgccgcgctgggcgggcgcccccgccgccctcactccgctgctcccggctcctcgcgcgcaggtcgcggagctccgccaccgctgggtgcggcgaggccggcgcgatgcggcagctgtgccggggccgcgtgctgggcatctcggtggccatcgcgcacggggtcttctcgggctccctcaacatcttgctcaagttcctcatcagccgctaccagttctccttcctgaccctggtgcagtgcctgaccagctccaccgcggcgctgagcctggagctgctgcggcgcctcgggctcatcgccgtgccccccttcggtctgagcctggcgcgctccttcgcgggggtcgcggtgctctccacgctgcagtccagcctcacgctctggtccctgcgcggcctcagcctgcccatgtacgtggtcttcaagcgctgcctgcccctggtcaccatgctcatcggcgtcctggtgctcaagaacggcgcgccctcgccaggggtgctggcggcggtgctcatcaccacctgcggcgccgccctggcaggtgagcgggcccccgcgccgacccccagccgaccccacccaccccgctccgtcgggcagagaccgcggggatcactgagttcaacgacctcacttccagatggggagactgaggcagagagagccggagagctttgagagtggtcgctcagctc

SEQ ID NO: 30472 - DNA, 985 bp, Homo sapiens
  chr6:1389802-1390787
  binary
cgagagacagagcgaggagcgctcctgaagggagacgtcgggctcgtccccggggtccaggccgcggtcccactcgcgggcgcagtcgcccggcgccggccgctcggccccgcggcctgggaggccgttgcgcaaggcagggcccgcggctcggggagggatgcgccgggcgttgcctcccgcccgccgccgccgccgccgccagaagccccagaggagctgagggaggcgacgccgaagcgctggcccggagtggccacggctgcagcccgggcggcgggctagggcgctcgcagggcttctgggccgaccccgctccggcgcctccgcttcccgcccggggcccgccctcgcggcccggcctcgctcccgggtcccagatgaccaccgagggcgggccgccgccggccccgctccgccgcgcgtgcagcccggtccccggcgcgctccaggccgccctgatgagcccgccgcccgccgccgccgccgccgccgccgccgccccggagaccacctcctcctcctcgtcgtcgtcctccgcctcctgcgcctcgtcctcgtcctcctccaattcggccagcgccccctcggctgcctgcaagagcgcgggcggcggcggcgcgggcgccgggagcgggggcgccaagaaggcgagctcggggctgcggcggcccgagaagccgccctactcgtacatcgcgctcatcgtcatggccatccagagctcgcccagcaagcgcctgacgctcagcgagatctaccagttcctgcaggcgcgcttccccttcttccgcggcgcctaccagggctggaagaactcggtgcgccacaatctctcgctcaacgagtgcttcatcaagctgcctaagggcctcgggcggcccggcaagggccactactggaccatcgacccggccagcgagttcatgttcgaggagggctcgttccgccgccggccgcgcggcttcaggcggaagtgccaggc

SEQ ID NO: 30473 - DNA, 1059 bp, Homo sapiens
  chr6:149068769-149069828
  hyper
cgggggaccccctcgcttcctgctcgacctgcggcagtacttgggtaaggaagctgggcaggcgctagggcggcgccgacagcgcaaagttgtgcggcggggagagggtcgcggcggggacttctcgcgctgccaccgcgcgccgccgccgccccgggtctctccaggtgctaagcccgtgagcatctgtgccgcggtcgggagcgccttcttcctcccgcgcgtccgactgtcctcaccgaggcgggggcgccgctgggttgcgctgccggcaggtaccccggggcgaggcaccgctcaccttccccccgccccacctccgccacccggatccggactggggcggagtggatgggtgtgtggggtgtgccggagtgtgtgtatcttcaggcctggcggcgcggggagtggcgaagggaagggaaggtcctcttcgttgcattgttagtgaccgcagttcagtcccgtcccgcgccccggggagtgtgggtgggtttagccctttgccaccgtccgctctgagaattctgtcccgcagatcccccgcctgcccgccggccctagtggctccgcgctgtccccgggctggcttgtcccttggctgccgctgcccaccccgccgcccgcagctagcctggcgcggggaacgggttgcatccaggggtttggggatgcccgagggcgctggtcagcctggccagcagtgtcgcccccagtaacccgaggatcctcggcgctgtgtgcgtctcaagctcaagtcaaaacttgtgtgtgtgtgtgtgtgtgtgtgtgtgtgtgtgtgtgtgtgtgtgtgtgtgtggtttattaggagagaggccgcctgtctttagcagaagtaaggaaggggtttgacgggagggaaagagccgctccagcgagaaggcgtgaccccgcagctccctcgtctcggctgcgggagccaggggtgccagggacaggcgagcgcaagcccaggtcgcaaggacgatgctggcactcgcgttcgagccaagggaggatgcagatccctcccaagtctgtggccagaagaggtcgtgc

SEQ ID NO: 30474 - DNA, 1259 bp, Homo sapiens
  chr6:150285366-150286625
  hyper
cggcgcgatctccctgaacgaacatcgcggtctccccgaacgtcgcggtccctccgaacgtcgcggtctccccgaacatcgcggtgcccccgaacatcgctgtctccccgaacatcgcgatctccccgaacatcgtgatctccccagacatgcccagctgaaggcactcagttcccctcggtggctcctttccgccgggtccgcttcctgcggctgctgcttgcccctcaggccaggaggtttctggaaggaccggtgctgtctccccgaacatcgtggtctccccgaacatcgcggcctctccgaacatcgccctctctccgagcaacgcgatctccccgaacatcgcggtctccccgaaaatcgcgatctccccgaacattgccatctcaccgaacatcgcgatctcgccgaacatgcccggctgaaggcactcagttcccctccgcggctcctttccgccgggtctgattcctgcggctgctgcttgccccgcaggccaggaggcttctggtagcaccggcgcgatgcccccgaacatcgcgttctaccccaacatcgcgatccctccgaacatcgtgatcccccccgaacatcgccgtccccccgagtaacgcggtctccccgaacatcgcggtccccccgaacatcgcggtacccccgaacatcgccgtctccccgtacattgcgatcccccgaaacattgcgatctccccgaacatcgcgatctcgccgaacatgcccggctgaaggcactcagttcccctccgcggctcctttcctccgggtccgcttcctgcggctgctgcttgccccataggccaggaggcttctgggtggaccagcgcgatctccccgaatatcgcggtctacccgaacatcgcggcctccccgaacatcgcggtctccccgaacatcgcgatcccccagaacatcgcggcctccccgaacatcgcggtctccccgaacatcgcgatcccccagaacatcgcggtctacccgaacatcgcggcctccccgaacatcgcggtctccccgaacatcgcgatcccccagaacatcgcggtctccccgaacatcgctgtctccccgaacgtgcctggctgaaggcactcagttcccctccggggctcctttccgccgagtccgcttcctgcagctgctgctagcaccgcagtccagggggagtgtcaaagaaggctgaaaaggaattgcaggagggtggagggaccaaaaggctacagagggcaaggtagggc

SEQ ID NO: 30475 - DNA, 968 bp, Homo sapiens
  chr6:158957708-158958676
  binary
cgcaggcggcgacacaaagggtggagcggcgggaccgggacccgggaggctgcgcggcatggacgccgagtaccctgcctttgagcccccgctctgcagcgagctcaagcacctgtgccggcggctgcgggaagcgtaccgcgagctcaaggaggacctcacgcccttcaaggatgaccgctactacaggtgggcgcggcgcgggcagcggcggggcggccggaggcttccgggccgcagtcccctccgggaccccggcgcgccccggccttggcctggtcccgccgacggccgcctccgccggccgggcgcggagcctacggatggggacggggtcggggcggggatctgggagggaccaggaaggggacggggagcagggatactggcagcggcgggcaggttcctggattcagggcagcccggcgcccccgggcgaagggccgatttccgttcagctgaaacccaagccgaggctcccgcctccccggaaaggagctgcgggttgtggctcctccctgcgccccgcgtcgttctccccccgcgcccgcctcgccgcccccgctcgggcctcacgcggcgcagtctggggaggcgaccgcgcgcgctgcggcgtcgggaggagggtcttggccgcagctctgagcgccctaggctttgcaggacgcctcggaggcgggggcgccgccaagggctgggggcggatgggcgcggcggggaagacgcggcggggcgccatgcggggacacggcgcctgggagcggctgtgtggaacttgtttgcgttcatctctgtctccctcttcagcggcctaggggagagcggtggggactgcagaccctggcgccggcccccgcccccttcctctctgcgctctgcagttcggaggggaaggaaagtctgttcaccgccaatggccgatttacccaaaggcttggcggtgtcgggacaggaccctatcgcgagtc

SEQ ID NO: 30476 - DNA, 1048 bp, Homo sapiens
  chr6:1624708-1625756
  hyper
cgaaagcgacccggggcttccagttcagcttctgtttcgctttggtgcagtcgccctgcagaaagtcctagggaagaagagggggagacgaagcaggcgtgggtcgtgggggtgggggcagcaggtcccgagccccgggaactcccaccgttccgctccctctgggcgcacaaggctccgggtttccctgctttcggtccctgctgtgcgcgttcagttgcggctctcggcgccgtaaatcactaggtcgcggttaagaatgtgctgtgcggacccgtgaggaccgtgaccgcgatccacccccagctacctccacacctcttctccccaaggcgtcccttgggctcttaatgctttttttttttttttttttttttttttataacatgaagttgtcagggacgctcctatgagaactgtttggaattgctgcacttctctggctaggagggaagtgagtaaatcaccaggcgcccctcccagctgcccgtgtccctgcgccgctcagctcctgccgcagggctggccgcgccaagcgcgcgtcctacccaaagccaccagccccgcggggaagggactcgggctgtggggcgcgaggccccaggactcggggacccctctacctcggcggcagcgtgcgaccctctttctaacgcggccgtggatgtttcttcccgggccgcagccaagcgcggttcttcctgggcggtggctttgggcttttcgtacccacagtcaagtcagttcacgtcgcctcccgcacacacgcgttcataaaacgaaactggagtttcacgaagcaattcttaggcttagcgtccaggaacgctgtagacggtctattctattctacccctattctactcggttcgattctgttcctaagaaaatgccgatctcgacccacttgtacttccacgagcggagctgcagccagcagctctgcaggaccccgcactgcccgccaccgtcccctctggcagtgccttcctcctcccgctttccccaactgctccactcgaggaaacaagggcatttcatctccatc

SEQ ID NO: 30477 - DNA, 156 bp, Homo sapiens
  chr6:164241299-164241455
  hypo
cgtgctccacgatacctcccacggatgcgtttctggcctgatgcttggcgctctggcagtctgtgtcattcaccgctctgcctctgccgcctggagacgtgccgggcacgtaccgggtccttggtaactgcggaattcgctaatgaatgggtggac

SEQ ID NO: 30478 - DNA, 385 bp, Homo sapiens; identical to SEQ ID NO: 12884
  chr6:169567224-169567609
  hypo

SEQ ID NO: 30479 - DNA, 1598 bp, Homo sapiens
  chr6:26233864-26235462
  hyper
cgtcacgcagtgcagcccccacactatttacaaatacagtacctgagggccgatatcccaaagctaaggcttatcaaaggcctgcgaaaagacagacaccgggcaccaccagcagttggccattctcaacgaccagctgcacaagatcgtgggccggaagcaccttgggcatgccacgtactgctcacaaccaggacgggatgtgctcaggaagtcacctcaacgctaaagtaaactaaagcatttacaccacatccctgtgtcagaaataaaattttttcagggccacttttaagcgccgcgctttaacagaaatcggccggccaatcacacaccaccgcgggaatttgaagaaaaagtaggacctggtggctcaagtagccttagctatccggtgactgtggctgagactgagacggaaggatccttgcgcccaggctgctgggagctgttaataactgacccccaaccagcacgactaggatagaccgtggccgcacaacaccgcagcacccgcacccctctccaccccactcccccctccaaaaagcttcagctcttttgactgagacctgtgggtggctctgaaaagagccgtttaaaattttcaaaggggaacgtcccgccagtttcactttttcttcggagctgccttctttgcctttgtaaccttcggcttccccgacttaggcttggccgccttgggcttaggggctttggccttagctggactcttggcagctttttttggctgaggtgttttcacctttttcgcactcttggccactttcttggtcccagcagcggttgctggcttctttaccttcttaggagtctttttgatgcttttcttcggggtagcggcgccagccaccttcttgggcttcttggctgccccagcaggcttcctaggcttggctgcgccagcctttttggccttgggtttgccttccccggaagccgctttcttgttgagtttgaaggagccagaagcaccggtacctttggtctgcaccagagtacctttgctcaccaagctcttgaggccaagcttgatacggctgttgtttttttctacatcgtagccagcagccgcaagcgctttcttaagcgcggccagagaaacgccgctgcgctccttagaagctgccactgccttggtgataagctcagatactgggggtccggatgctttgcgtttcccagcagttgcgcctgccttcttcgcctttttcttcacaggtgttttttctgcgggtgcaggaatggtaggagcaagtggagcagtctccgacatgtttttgtcttcccagaaaagacaataagtaatctcaaactgtcagaacagcatgtcctctacgagggaggctgagggtttatatagagagacgctgagtgatgattggttccttgctccatgcgcggcgctgctggaaaaggactcctcgtatctaccgcgctgctgtgtttgttgccccttaaaaaagagtaaaaatataagaaatctgggcatgaaataattagagacttgggggaaactgatccgagagagttcgggcttcattcctgcctttgtttctatgcatagttttaaaacc

SEQ ID NO: 30480 - DNA, 167 bp, Homo sapiens
  chr6:26249947-26250114
  hyper
cgctgtcacccatggaggagtggagtggcgcgatctcggcttacttcaacggctgcctcccaggtccaagcgattctccttcctcagcccccgatatagctgggactgcaggagggcgccaccacacccgtatttttgttttttggttttgtacttttagtgaagac

SEQ ID NO: 30481 - DNA, 987 bp, Homo sapiens
  chr6:26250181-26251168
  hyper
cgggctcccacagtactgggattacaaggcgtgagccgccactatcggccattttgaagacaatggccaagacacaaaagcctagtttagaagagccaccggccctgcccccatcccctaaccctccaccctccttgttttaggagacattactccctagtgctacggcgctttcaactgaaattgttggtggctctgaaaagagcctttggtttaagttggcgcacaccctcagtacaacttatgccctctctccgcgaatgcggcgagcgagctggatgtccttgggcatgatagtcactcgcttggcgtggatagcacacaggttggtgtcctcaaagagccccaccaggtaagcctcgcaggcctcctgcagcgccatcacagccgagctctggaagcgcaggtcggtcttgaagtcctgcgcgatctcacgtaccagacgctggaatggtagcttgcgaatcagtagctcagtcgatttctgatagcggcggatttcacggagggcgacagtaccaggcctgtagcggtggggcttcttcacgccaccggtggctggcgcgcttttgcgagccgccttagtggccagctgcttgcgcggggctttgccgccagtggacttacgagctgtttgcttcgtgcgtgccataggaatgggtttcaagcaatggtcacaactgaacaaacagttgttcttactcctatttataaaggcaaagtccttctgattggtccgaatcttccagtttcgcgccctgaattatgtagtgtgataggacttgtgatcagctactaggtctcattttagaaaatcttaacctatctaaatgcttttttcccctagttccttacattttattatgttttatgtgcctacctgtattacgtaccttcattgattttattttaatcagtttgtttgggattatgtttgacagacggaaatgaacgttctgcagttccggagcgattcaaaaataccgc

SEQ ID NO: 30482 - DNA, 428 bp, Homo sapiens
  chr6:26251515-26251943
  hyper
cggaagctgcaatttggtaggaaactagaaacataatatccgtctttgtttctgtttaaattctcacctaaggagacagaacttataggtagatgttactggcaaggcattagtttttctaatgttttgaatgaaaaactacgttttttcccccgggaggtgtagaaaaggatttagggtaggtttcgcataaatatccaatcaaaaagtagacttgaatttaacttttttattggctgatttggtccaatcagggattgagaatgattaagcacctatttgcataaaagacctacaaaaacggccagctgtgctgttgagccttcactttggggtgtattcttactcctttatcttgttgcaatgcctgatccagctaagtccgctcccgccccgaagaagggctccaagaaggcggtgaccaaggc

SEQ ID NO: 30483 - DNA, 95 bp, Homo sapiens
  chr6:26252081-26252176
  hyper
cgatatcttcgagcgcatcgccggcgaggcttcccgcctggctcattacaacaagcgttcgaccatcacctccagggagatccagacagccgtgc

SEQ ID NO: 30484 - DNA, 2039 bp, Homo sapiens
  chr6:26271217-26273256
  hyper
cgaatgcggcgagcgagctgaatgtccttgggcatgatagtcactcgcttagcatggatggcacacaggttggtatcctcaaagagccccaccaagtaggcctcgcaggcctcctgcagggccatcaccgcggaactctgaaagcgcagatctgtcttgaagtcctgagcgatttctcgcaccaggcgttggaaaggcaacttgcggatcagcagctcagtcgacttctgatagcggcgaatctcgcgcagagccacggtgccgggacggtagcgatgaggtttcttcacgccgccggtggccggcgcgcttttccgagccgccttagtggccagctgcttgcgcggcgctttgccaccggtggacttgcgtgcagtctgcttggtgcgggccatctcagactacctgaaagaaaaactcagccacttggcagagtggaaactgcccttatatatactcagaaacattctaattggccttgttgattttcaaaagacccgcgcaacaaaaccattggctgaagagtccaacgatgtgattggtgaattactggaaaatctgattggatgaatcacttcatttttgaatcctctcttctcggttagtctgcgatccaagaacgttaacttcttaaagttctaattctgcgcttctcaagctgtagtccgtaaacgactactttaagacttggaagacgctaattctcattcagtagatgtgttgtggggccagattcggaggaccacgttttgagaagtttatcttgtgccgttttcttgagtcacctggactgctgctagctggaaacctttgaccattataaggcaggattcctgggtgatgtacctgggaaatcacgagccaagaagtcaccgacatacaacagtgagcaacaaatgttaactgaattctattttgtcccaaatggtgttttgcttcggttgagaatttttaaggcacaggctaattttaggttttccaacgactcttatcatttacttttcgttgggtcctattgatgatattccaggataccacccccactagcctcttctgcaggataacttgaacactgcagtggccctgtccatctaaactttacaaggttttgtaaacgttactgaacttgcttcttcccgactacattaaagcacttacttgagatattaaacattttctcattagtcctgtttgcctagtcagtcacttgtatagacagggcaacagcacggcctgaatattgggcaggacaccgccctgcgcgatagtaactttgcccaacagcttgttgagcttctcgtcgtggatggcgagctgcaggcgtcggggggtgacgcgggtcttcttgtctcgggccgcgttgcccgccaactccaggatcttggcggtcaggtactccagcaccgcctccaggtacaccggcgcaccggcccggacccgcttggcgtagttgcccttgcggaggaggcggtgcactcggcccacagaaaactggagaccagccctggaagagtgcgttttagccttggcgcgagctttgctgccctgcattccacatccagacgcagtgaagtatttaaatacttgtttagaagaaggaaagtgattgattctagtaaaacgcaagagctaaactcttataatctatattcggcaaagtagactgtgctatctcctgaacacagatttcagccaatcgaaaagcaggtgtttaaaaaaatttaaaaaaaaaaaaaaaaaaaaaaccacttctgacttacatacttatagttgaaaggtcaaattatgcaaggttgagcttctgggagagccgatgagatttaggagttcagaaatggcctatcatatattcagacactaaaagaaccaatgagaaaccgaaactcagccagcctcatttgcatatacacgaggtaaataatgagggcgtttgggctcaccagcattttcctgtggtcatttgacggtatcacttcggctgcgaacatgcctgaaccagctaagtcagctcccgccccgaagaagggctccaagaaggc

SEQ ID NO: 30485 - DNA, 408 bp, Homo sapiens
  chr6:26273355-26273763
  hyper
cgacaccggcatctcgtccaaggctatggggattatgaactccttcgtcaacgacattttcgagcgcattgcaggcgaggcttcccgcctggcgcattataacaagcgctcgaccatcacttccagggagatccaaacggctgtgcgcctgctgctacccggggagctggccaaacacgcggtgtcggagggcaccaaggcggtcaccaagtacaccagctccaagtaaactagttacctgggtaaaagcgctaacgacccaaaggctcttctaagagccacccatgttgtcatttaaagatctgtaattttccagacttggcattggcaaggtaaaatggctaagcaacacatgggatagtaagggtttactgaaacatccaagttcggccgggcgcagtggctcac

SEQ ID NO: 30486 - DNA, 134 bp, Homo sapiens; identical to SEQ ID NO: 23323
  chr6:26328309-26328443
  hyper

SEQ ID NO: 30487 - DNA, 278 bp, Homo sapiens; identical to SEQ ID NO: 12890
  chr6:26522013-26522291
  hyper

SEQ ID NO: 30488 - DNA, 333 bp, Homo sapiens
  chr6:26550782-26551115
  hyper
cgtactctggatacccgagggcgcggccccagcgccgcgacgccccgcccctctggctgctccgctctgggatgcacttccgacgccctctaggcttgggagttccgcgcctctcggtgtcgcctggggggcgtgctccggttggcgcactgattcccagttgggtaggggaggcttgactgagctcccacccggaatttcaccttagacctttaaagaccttgctccggcctcccgcgccagcgctaacacctagtcctctttagtggagttccggcggaaggggatggcgggcacccgacggtggtctcctcccagatggcgaatttccgc

SEQ ID NO: 30489 - DNA, 730 bp, Homo sapiens; identical to SEQ ID NO: 23325
  chr6:26577146-26577876
  hyper

SEQ ID NO: 30490 - DNA, 1003 bp, Homo sapiens
  chr6:27100290-27101293
  hyper
cgggaagcctcacctgcgatgcgctcgaaaatgtcgttcacaaacgaattcatgatgcccatggccttggacgaaatgccggtgtcagggtggacctgcttcagaaccttgtacacatagatggaatagctctccttgcggctgcgcttgcgcttcttgccgtctttcttctgcgccttagtcaccgccttcttggagccctttttcggggcgggagcagacttcgctggctctggcatagcactgtgtagctataaagcgccaacgaaaaggaaaaacagcgtgagcagggtatgacaaggcgcttttatatagaatcgcttatgcaaataaggtgaagagttgaagtcttgtgtctgattggtagttattcagggtaacgtcagaggtcaggtctgcccaatcaggattcgcaaatccagaagacgcactactattggttgaaattaaactgcagccctaaccaacaacacgtcttctttttcgcgcccaatagtgtttataaaaagcgccgcctttcccgttcactttgtggttgctcgtagtgagttgcgctcgctatgtctggacgtggcaagcagggaggcaaagcccgcgctaaggccaagactcgctcttctagggccggtctccagttccccgtgggccgagtgcaccgcctgctccgcaaaggcaactatgccgagcgggtcggggccggcgcgccggtgtatctggcagcggtgctggagtacctgaccgccgagatcctggaactggcgggcaacgcggcccgcgacaacaagaagacccgcatcatcccgcgtcatctccaactggccatccgcaacgacgaggagctcaacaagctgctgggcaaagtcaccatcgcacagggcggtgtcctgcccaacattcaggccgtgctactgcccaaaaagactgagagccaccacaaggcgaagggcaagtaactatctgtactagtttgtggcagctcaagtaaaatcgagtccaaaccaac

SEQ ID NO: 30491 - DNA, 615 bp, Homo sapiens; identical to SEQ ID NO: 24554
  chr6:27774739-27775354
  hyper

SEQ ID NO: 30492 - DNA, 293 bp, Homo sapiens
  chr6:27782420-27782713
  hyper
cgatgcactcggcctacgggaaactgaagcccggcccgagaagagcgggtcttggccttggcgcgagctttgcctccctgcttaccacgcccagacatggcaaaaggtctattacctttacggtcaagaaagactgaaatgaaattggaaaaacgtacattttatagcctctactgggcgcgaaaaggaagctgtgcgattggcttacgttttatttttatttagaccaataggactcgagtatgcaggatacctattttgattgggcaaaactggcatctgacgtcatccac

SEQ ID NO: 30493 - DNA, 513 bp, Homo sapiens; identical to SEQ ID NO: 24558
  chr6:27858278-27858791
  hyper

SEQ ID NO: 30494 - DNA, 456 bp, Homo sapiens
  chr6:35744187-35744643
  hyper
cgtatggaggctcccagggcccctacagtctggaatcccgcccgtgcgagcctgagcgcctttcctccctccttcccttccgcaggcgtcctcgccctccacgtccctcctccgccggggtggcctggggcgccgggtcacgtggccggggaagaggttttatcccgcggcccctcggaaccccgccgctgctctgccgcccaggcccatggccgcagccctggcgctcgtggcgggggtcctgtcgggggcggtgctgcccctctggagcgcgcttccgcaatataaaaaggtgagccggggagcgcgcccagccggccgcgaccgcaggagagggtggccccgccgccggggcactggagcccgaaggcgccgggcagcctgaaagggagaggtgggtccggaaccacacccaggcgggtagcctggggcatcctcagacggacttcaaaagcc

SEQ ID NO: 30495 - DNA, 293 bp, Homo sapiens; identical to SEQ ID NO: 24567
  chr6:36238212-36238505
  hypo

SEQ ID NO: 30496 - DNA, 855 bp, Homo sapiens
  chr6:37663981-37664836
  binary
cgccagggccaggggatgccggcatcctgatcagggtgtcaagccctgagtagaagaagcgaagccgcagcaacagcggggaaggcgagcccgccgcccggccttggtgctgacagccggctcgcccgcaagccgcgcggcaactccggctcatgcatcgcttggcttccactccggaggccgagccaggacgaggtttcggtgcaagtcgctgcaccagtcctagactgggtctgtccgggtctcccgagccgaccgggtgctctcaagggttcctaatcattcccacctctagcagggtgtgggaaagtgggtgcctcctcctgacatcccggcttcccaccagaccctacgaccggcccctgtgttccgaagcagctagctcggtctccacgcgccctggagagggcggggacgcgggcatccactccagagtccgagtcgaggtctccaccaaaccccggcagcgcgcactttgcgcctcttgcaaagtttccgcgcgaggttaagccaaggtggagcgggacgcgggctcttaccgtagactccttgtccccggcagtggaaggggatcagcgccagaagtagaaggcaggtcacctccatcttcacggccggtgcttcatccccgcgaggcggcgcagcccgagaggcggcggggggcgcattcgccggggccccgcgacgcccctatgtccccccctttccctgagaggtgagagagagagcggcgacgaagaccaggagactgaagaggcggaggtggcggcgacccgtgtttctcctccggcggggccgctgcccgcgtggggacgcagggggcgctggcccagccccgggtgcctcggcgcgccc

SEQ ID NO: 30497 - DNA, 441 bp, Homo sapiens
  chr6:37673023-37673464
  hyper
cgcatcaagtttcgctgagctggtctttctaactttctccccggcagctccgcgggaagcaggatcaaatgttctccagcctgaaaagcccggctggggtgtgaggagaaaggagaaggggaggaggggcggccaatctgcggtattggaaggggaggggccggggccgggccccagggacaggcctcgtgactctccttgctccctttctgtttaaccctcccagccaattctttttcctttagccattagctctttttgatccacgtaaaagggggtggggggcgggaaatctggcgtggacttggaggcgttcagcacacccgcgaccgctgcgtggcataaactacagggggcgccattcacataggatacgacagacatggcgcccgccccctccgcccccccagtacaacgtgggggccctgctgccacgccctc

SEQ ID NO: 30498 - DNA, 1350 bp, Homo sapiens; identical to SEQ ID NO: 25796
  chr6:391113-392463
  binary

SEQ ID NO: 30499 - DNA, 845 bp, Homo sapiens; identical to SEQ ID NO: 29335
  chr6:392974-393819
  binary

SEQ ID NO: 30500 - DNA, 1006 bp, Homo sapiens
  chr6:45390544-45391550
  binary
cggttgcggccgccccacgacaaccgcaccatggtggagatcatcgccgaccacccggccgaactcgtccgcaccgacagccccaacttcctgtgctcggtgctgccctcgcactggcgctgcaacaagaccctgcccgtggccttcaaggtaagaggctacaccgccccccgcccccggccgggagcggcggaacctgcccgccggtgtcttcctgcccacggggctgggccccggacgtcctccaagacctcctgccttggcggctctaaccccagaaacccccggccgggcctccctccggatgccctggcgggctcggggctcagtccctccgcgcaaatccctccctctcccacctgtgcccgctgccaccccgacttcagccctagtccccctgacccgttcagcactcctcatgcctcctgcctggccttgattctcactcactccttcgcgccgtctccctttcccccaggatccccaaagtacccactcttgcactgcgagcggacttgctccaccccgcccctttcccgggggcgaggatccccggcattgtcccctggggctcccgcgtccttccgggacatcccggcctggccgcattgcgggctgcccgcgcagcctctctttggggctccgcgcgctctcacccgcttccctcacagccaaacgcctctcctcaggtctcggcgtccccttccccgacccgcagagttcagcggtcctggtccctcccgggctcccgtgccgggattcgtggggtgccggtgccgggcattagtgcccggggctgggcgtggggtgctgactgaggcgcgcgggctgcgctaccagtgcccgggagggtcctggacaaacctagggtctccagaggagggggtgtcagggcgggggcgtttgctctgttcgctgacccgcgccagatcccgttaccgggaggaaggcggggccgctggggcgtccgcaagccccgaagcgggggcgttcagggggcctgggc

SEQ ID NO: 30501 - DNA, 406 bp, Homo sapiens; identical to SEQ ID NO: 12902
  chr6:4559591-4559997
  hypo

SEQ ID NO: 30502 - DNA, 563 bp, Homo sapiens; identical to SEQ ID NO: 25804
  chr6:50803791-50804354
  hyper

SEQ ID NO: 30503 - DNA, 814 bp, Homo sapiens
  chr6:50818180-50818994
  hyper
cgctccgggcacagggaccgcgggccaacgaaccgcgcgtgcgccgcgccagcctgcgtcgagccgtcgcacacggctccgggagcccgcgtctaggcacgctctccaggttgccaagcagggtgtcaacaagtgcgcacgcgcggacgcccacgcaggcgcacgcgccgtggcgcccccgggcgtaaccccagctgctgtgacgggccagggctcgcagctcgcctgctagagtttgtggcgcgccctcgggatcagggcactggggtttgaaggggctgcagcgtgggaagccttcaattttttttttttgtaagctgcgtgtgctcagattgaggaagcagttttgtcacacatgttcaacacgttccacgctggtcacaagctagcaaggtcaggtagtttttcgcccacttgttcgaaaacctattagttcctgcccaccctgctcttcgcttttcctcctctctcctaagggctgcagccttctggagctgactcaggcgagaggcgtccagagcccaaataggggtcacacctgctgtcgagagagtcctctgcataaaaatgctctttaaaatttttaaaatcagcataatggccaatggacttaacaaagcgtgacttgcccaggctgcacggagggcaactctggcagtcatctgtaactcgaccagttaacgtcccgaacgtgcctgttcgcggagatattagcaaacgtttcaaggatgtggctgtcagatgtcattagccaacgcttgctcacccaaccatttgcctaactgggaggagggcatggccacggcgtataggc

SEQ ID NO: 30504 - DNA, 908 bp, Homo sapiens; identical to SEQ ID NO: 25808
  chr6:52227115-52228023
  binary

SEQ ID NO: 30505 - DNA, 1731 bp, Homo sapiens
  chr6:56818408-56820139
  binary
cgttcgctgggcactaatatgaaatcacttaaaaggaaacatgccactttcggctaggggacagcatgttcgtcattcagtgtcctactggtttcttaacacgcatataattaatattggtactcaggaaagagaacttcttctgaccttgagcgtgcgcgctaaataaattacctcagaacgaaagtggtgcgatctcaaaacagcatctggggagaaaagagataaatgagacttcatttaactccttgttcttcacctaccgagtgactcatgacttacctgggagaccagggttgggaaagcacatcgcagactcctggaattcggtgggacatcctgggggagggaggaggagtcctggggccatcggtctctacgtgatttctccgcgagaagtttgcatgaaagttctgggggagttggggagccccgaagtttccatgccttactttcttacccctacgctccagcgaaggatgcgtgaaggcgaggctggcgcagccccggactacgctcaaattacccttaaggctttagcaaactgactaaaaatttgagttctttcctcccctccctgccctcggcatcgccgtggttattcaaacctgggagactggagggcggaggtgacggcaaaaagggcaaggggcgttaaagaaacgcactcagcctggggagtgggcaatgatggggctaggggcagccgaggagaagggagcgagccgcgcttcactctccaaatcggcttaattgttcctggtagcccgcagaaacccgtcgcggcgtgtcttacctcggcttcttgaacgacccgagaagaccgatttcatcggatgcctccctttctggagcttgcggtgccagcagcagaagaagacgatggtggcgatggtgcccagcagaagcaacaagaggaagagggcacattggatgctgtagggtctcagcaagacgaggaaagccgcggcgatcatggtgcgggcgaggcgagggcgactcgacggcggggctggagggcggcggcacaggcacccgcgctgggcgcacgccgggacggcgggcacgggtgagcgcggctcagcgcgtcatgcctggcgctcgcggccccgcgcccagcccaatggctgcgcaccccgcgccagccgcgctacgcgagtgatccagggctgcggggagcgcttgccatgactcagcagacagcgacgaggctgcgactcggcggctgggatcctctcccctccctccccaggcgcccccgcccccgtccgtgcgcagcccccgggcgcagccccgccggggacgcggcgagtggggaggagcagcgccgccgccgcggccgcccgggccccgcgcatcgtcctgcggccgccgccgacctcagcatcccagaagccgggcgcacgtgggtcggggcggggacgcggcgctcaggctgcagccgcggcagcctgcggggggcgggaatggggcgccgcggcgggggctcggctgatgacatcacggccaggctgcggcagcgcgggcgcgcggacatggctgcggcggtttcggcggcgtccgcgggctgcacccgggcctgagagcccagcgccctcccgcggggccgcccgccagtccgcgccgtccgcgggtgcattggccgggtgcctctagcttcccggacacccggagcttccgcctatccagcctccctcggccaaattgctgcggagcccgtcgtcagggggc

SEQ ID NO: 30506 - DNA, 968 bp, Homo sapiens; identical to SEQ ID NO: 24576
  chr6:5996316-5997284
  hyper

SEQ ID NO: 30507 - DNA, 1356 bp, Homo sapiens; identical to SEQ ID NO: 23342
  chr6:6007079-6008435
  hyper

SEQ ID NO: 30508 - DNA, 167 bp, Homo sapiens
  chr6:6534754-6534921
  hypo
cggagaggccctggagcgcctgcaaaccccgtgggacccaggcgtccaggcaccgcgcccaggagagccagctctgagcatccccggggggccactccttctgccaggagcctgaaacccaaacgcgagagatcaggacccccgagtgcagcctcttcccaccaccc

SEQ ID NO: 30509 - DNA, 589 bp, Homo sapiens
  chr6:74405600-74406189
  binary
cggtgggccggggaagtgggcgcgctctgttctccgcggccagctgggacgccgggccaggtggggccgcctgcgtttagcaactgctttctcaccccctggatttgcgatgtttgccacagcagcgagaagcgccattgtaatggggatgggaggggtggagcctccaagtcctgtctcaatttagatctctcactctgctgttaggcgcgcccatttcagattactaaactcgaattaagagggaaaaaaaatcagggaggaggtggcaagccacaccccacggtgcccgcgaacttccccggcagcggactgtagcccaggcagacgccgtcgagatgcagggcccaccgctcctgaccgccgcccacctcctctgcgtgtgcaccgccgcgctggccgtggctcccgggtaggaacgtgggcgcgcggggggcgcgcgggcgcgcgggcctgggccgctctgcggctctgggccagggcttcggggaggtggcggctgctgtgcagcagcgggtgggaaatgccctcgcggctgcagtccccagcctggtactggcctggaggtttgaccatatgtagcttcagc

SEQ ID NO: 30510 - DNA, 818 bp, Homo sapiens
  chr6:80656865-80657683
  binary
cgagcgaggatggggaagtcagcggctttacctgcgatggaccaggtccagcggtagaactctaccgtgtcgttgagtgccgtggacactacgtttaggacactacccggctccgagtccaggagccccatcgcggcgatgagcgggcgctggcggcaggagaaagcggagacccagagagagggctgaccccggaggcggtggcggccgacggggcgagcggcggccgggaacccctctaacggcggcggcccggctgcgtcttctcctgctcctcaaggcgccgcggcggcggggatgcggcagaaggcagggccaagcggaaggcgtcgtcaaggttcccgggagaaagacgaggaggtggaggaggcccagccgccagcacagtgcgctgcaccagtctgcagcctcgcgcagccgcccctccaatctcctcagccggcgtcacgtggccgcgcgcgggggcggggggccggccgcccctcctccctccctccctccctagtattgggactcgctggcgtagggatgctgcgctcaagggtgcgacgccaactgggctcgcgcaggcgcgcgccgtcgagcgggagcgggacacctgggctcctccttggcccctccccgcacaagtcgcctcattagccttccccgcccctgtcccgggcatcggcccctgcggaggagttcaccgcctccccacgggtgatttcttatccgccccggatacgtcctgggaaacaggacacgggaagaatgggtgttctgtgggcaaagatgaggtaggcgtggtgctttggtccttacctgacactcacctc

SEQ ID NO: 30511 - DNA, 984 bp, Homo sapiens
  chr6:88876226-88877210
  binary
cgggggacccgccgcggcgccagccctggggccagaggggacaagcctcttcggcccgcgtcacctacttctcctcttcctcctcctcctccgccgccgcgctcccggaggcccccgctgccatgacctcgctgtgctcccggataccctcacaccctgaccaggccaagaaggggctggtgcatgcgccgcccacgacctcggggccattaatcacacgctcccgggcagcgcgcatcgccaacaccttccgcgggggtcacgtctggggcagcgggctgagccggaaggggaaggggagcgggagcccagaggccgaggcgcgccgggcccgggggtgcggtctcgcgccccctccctccgcgcaaggccgctcccgtggcaggcggcagcgagctgggcccggggccgggctgagctttgggaccgcgctgcgcagcccccgagccgttcgctacctggctgcggtcgcgcggccacctgtcctccgccctcggggcgccgcccagcttcgcgccaggcgccttctccagcgcccgccgccctttcccggcgagaccactcgggcgcgccccgcccgccggtccccgatgcaaacagttgggctccgtaggcggctggctccgcgcctcccggcccggcgcgccccctccccggccacccggggccccgctcctcgcaccttttcgctggaggaggacgccccactccagggccggactgggggctctgggactcgggggcggcagcggcgggcgcctggggagccgcggtgtgctcagcagccgcggcaggaattaggggacatgctcgttaattgtttccactatcagccgccgtctgcctcctgtgtgcacggatcaaaccttaattggtctttacatttatcatggtgaattgcgaacctccaaacaagcctgggccgccgcttctgccgaggaggcgctcccctcccctccgcccccggggccctgcagggtgtgc

SEQ ID NO: 30512 - DNA, 1037 bp, Homo sapiens; identical to SEQ ID NO: 28143
  chr6:91320244-91321281
  binary

SEQ ID NO: 30513 - DNA, 379 bp, Homo sapiens; identical to SEQ ID NO: 12910
  chr7:100224197-100224576
  hyper

SEQ ID NO: 30514 - DNA, 1487 bp, Homo sapiens
  chr7:100806337-100807824
  hyper
cggcgctcctccgcctccgcctcctcctgcgcgcgccgcgcctgggcctcccggccgggatagtggcgcgaaggcggcaaggcgtggtggtagtggcggcggcgcaaggccgagggcggctgcagtgtccgcggccggatgtagttggggaaagggtggtacggccctggcgggtacacctcgtcctcctcccgatcccagggcgggagcacctcgttccagtccggcagctcgtctcgtgcgggagcgggggcggggggcgggggctgcggggagcggacgtgggtgggggcgggggcggcacgggggggcggcacgggctcgggaggggcgttcttcttccgcttccgcttctcctccacctcctcgatgatgctgaccacgtcgtccgctggcaggtggagtttggtggacagctcaatgaggctgtcgatcgtctgcggatccatctcctcgtcgtcctcctcctccccgccctcctctgtcccctcggcctccttccgccggtggcccggcgtctcctcctgggagcgcttgtcctcggcgccggcttccccgtcctcctcctccgcgaacaggagcgcgttctgccgcgccctctccgcctcctccgcctctgcctccgcctcggccgcctcctcatcctcttcccccaccctctcctccccgccgcgtctctcctgctccgcctcctcctcctcccttgcactctctcgctcctccgccgcctcctgcagcccccgacccccgaggccgcgctgccgggccccgccctgcagcaaatactggagcagcaggtccgaggcgaggtcggccagccgctcttcctgcgccgcggcctgccgcgtggcctccgcctgccgccgcccggcctccacctgcgccagcccttgctggagaaggcgctcgcccgcctcggagccgcccaggagtgcgctctccggccggcgcgccttggggaacggggcggccacgccttggtacgccttggacaggggtgccaatgcctcgcctaggtgtgttttgggggaggacactccttccccgaacttgtgggtttcgggaaggggcccgctgtcgggcatacgcgcctggaattgagagggggccgggggcggcaggggcgcgcgctccgggacacgcgcctggaactctccccaggaagcgcgccatacgcgctctggccccgggctctccagattcactcgggtcagcgtgtgcgtgcgggtttccgtctctgctgccgccgtctcctgctggcgcttggcgctacttggactgaaatctcgcagttcctggagcagggacgctagcgcctcgagctcctcggagggatcgctcgcctcgggcccattctccggagtctgagggcgaggcggagccgcgggctccgggctctccggcgccgggaggctgtgggtctggctgcgcacggtctcggtcagcagagcttcagctgcttcttcctccggcccctgctgggagcc

SEQ ID NO: 30515 - DNA, 832 bp, Homo sapiens
  chr7:103085746-103086578
  binary
cggggcccggcccaggtgcgcactagatgaggcagtcaaccaagtcaattggttcccgatcaactaaatctctcctaaaaataaacactgccgcgagcttcgagagttcagcgtgtcagagcctctatgatggcagagcacctgccgcgatgcctgattggtagggagaaggatttcccgggagggggccaataccaaattttagggctgttaggctctgagcagtcccttcgtgaccggataagtcagagacccggggtttgagccttgcccggcgctgagcggagggcccagtttcgggaccacagccttgctccctgggagctccgggcggccaatgccgggcaagcccagcccggcacaggaggaggcagggcccgtctccggaaagagggccagaggcagaactgagggcctggttttgtgtaattcgatttggatacaaacaggccagacccaaactggaaacggcgaagggctggattagcaccgaagggattcgaggaggcaaacgggaagtaaaaatgctgtgtggagctgcagagggcaaggggacaggggttgcaaaggaaagagcttcgtgagactttctccttcccggcgtagggaccagcagagtgcgggcaggtcagccctgtcaccggttcgtttagggaaaaagcgcgacatggggcctgggagacaggggcagaggcggtgacagcgagggcccctgctcgggtgggcccgcgggcctcagctcagtcccctcccgagggaccgcgacccccggccccgcggccgcccgcgcgcactcaccagcccgggctgccctgggcggagccgccccgcc

SEQ ID NO: 30516 - DNA, 260 bp, Homo sapiens
  chr7:106622687-106622947
  hypo
cgcaccggaacaatgtgcggcacatattagacactcaatacatgtttgccaaatgaatacgtgaatgattgtagtcttggacaagtcaaatggcccttagggactatttgttcattgattattttcccacctgcgtcacagcatggctgctgtcttggaaagcgtaaactgctcatgagtggcaggtgtgaagaagagaggctgacggagtgaacggtggtgaggcacaggaggaaagttgcaaggtgtgaggcgtggac

SEQ ID NO: 30517 - DNA, 1328 bp, Homo sapiens
  chr7:106684813-106686141
  binary
cgggggttcaccatggcgaatgacgcctgggaagcggggcgagtggccagcccgctcctggacgcgcggacaggtggacacgaaggcggcctcgctgggcctccctccgcctctcccggcccgggcgcgcagccctgcggtggtctgacaggcgggtgcgcggcgccagccagcggaggttgccatggtttccgggggtcacgtgggcgcgctctcctgcgccccctcccgcgcaccgcggcggggcgggggcggggcgcccgggcgggggagaggcgcggccgcggctggagcgggaggagcaggagatgctgccagccctcccggggccgcgctcgctcagccgccgccaccacacggagcagacgcgcgccgggagccgcgggccgggccagccgggccgccggggcccagtgcgccgcgctcgcagccggtagcgcgccagcgccgtaggcgctcgctcggcagccgcggggccctaggccgtgccggggagggggcgagggcggcgcccaggcgcctgccgccccggaggcaggatgagcatcgagatcccggcgggactgacggagctgctgcagggcttcacggtggaggtgctgaggcaccagcccgcggacctgctggagttcgcgctgcagcacttcacccgcctgcagcaggagaacgagcgcaaaggcaccgcgcgcttcggccatgagggcaggacctggggggacctgggcgccgctgccgggggcggcacccccagcaagggggtcaacttcgccgaggagcccatgcagtccgactccgaggacggggaggaggaggaggcggcgcccgcggacgcaggggcgttcaatggtgaggaccagaccccccacttcgcgcccccggatcccctcgctgccccccaccgctccccgctgtgctctcggatcttgccgctttgcgcacccacctctccccgcattctccacctttccctaccttcccatctcgcccaccccctcagcatccatttctgtctctcccactcgcccaccttcctactccgctctctgtcataccctcttcccttcctctagaggtgggagagctgggatgttacgcttccctcttaccctttgccccctctgcctgggccggttggggtgggcatctgctagaaagacaactttcgctgtggttggaggtatttcgcttagaggataccattgtgcataaagaaactggcccgcttggcgtcttctttcagcccttgtatttattaatggaatgtcgaaagagaaaaggagaaccgtgtttaatatgattggctttactgttgttaggacggtagattc

SEQ ID NO: 30518 - DNA, 1228 bp, Homo sapiens; identical to SEQ ID NO: 27193
  chr7:107300997-107302225
  hyper

SEQ ID NO: 30519 - DNA, 969 bp, Homo sapiens
  chr7:108095249-108096218
  binary
cgaggaagagcccagtctcttagacccgcacttctgagcgttaaccatctgggactcggaaaggaaaagaaagctttcttctcaggacagttctgcgccggtggtagccaagggctggagcccctgatgcgaagaaaagggaaggagagaggcggggtgcgaaagaaacgccaccgctcggcgccctccctcggtgcccgcggcgcaggggccacccgccagcgtacgggggacgaagatgtggccgcgggcgcgggcgggaggggaggcgatccggggaaggaagcggcctgttcgccagccccggggcccggggagccctccagcagcgcttgcggccctgaggacaccgctttgggagaaatgacgactcccttgctcaccctactgcgacaccccgtccccctccgcactctagcagatgcgggccgggagtagctgagctggccaaccgcctgggaccaggatgcggcagcgcccacccgcgcggcgtggagggggccgggggcggcgctcggcgcagatggcgctcgctgcgagatggatgctccagggcgggtaatcactcctggctcaacacagcatcccgggcggagcggatgccagatcccaccgctaagagcctgggctgggaaagcaatctttccaggcagcccccagcccggtgcgccggccccgacaagtcccagccctcggaggcagggcggggcgcagggactcccgggacccgcacctgtaaggccgacaaagcccccgcaagcgccccacccctctgtcctccgtgtctctctcgttccgcctcgattccccgagccctctccaggcagcgactggagaagcgaagtcggcctcgcccccgaactccgtggtcagcacaggtgtacgcacttccgaacaaagcccacgcccagacgtgtccgcaggggcccgaacaggcacacgcccgtgcgctcccggcccggcccccgc

SEQ ID NO: 30520 - DNA, 856 bp, Homo sapiens; identical to SEQ ID NO: 27199
  chr7:121946579-121947435
  hyper

SEQ ID NO: 30521 - DNA, 866 bp, Homo sapiens
  chr7:1275792-1276658
  hyper
cgcacgcctcgggcgccgcggggaccgcgcccgcccctcccggcgagccgcctgcacccggcacctgcgaccccgccttctacccgagccaaagaagcggcgccggcccacagccgcgcccaggtcgccctgcggacaaggacgcggcctcgtgcgggccaggggccgctgtggcggcggtggagcgcggcgccgcggggctgcccaaggccagcccattcagcgtggagagcctcctgtccgactcgccgccgcgccggaaagccgcttccaacgccgccgccgccgccgccgcggggctggacttcgcgcccgggctgccgtgcgcgccgcggaccctgatcggcaagggccacttcctcctctaccccatcacgcagccgctcggcttcctggtgccgcaggccgcgctcaagggcggcgcgggcctggagccggcgcccaaggacgcgccgcccgcgcccgccgtgccgcccgcgccgcctgcccaggccagtttcggggccttctcggggcccggcggcgccccggactcggccttcgcgcgtcgcagccccgacgccgtcgcctccccgggggccccagccccggccccggcgcctttccgggacctcgcctcggcagcggctaccgagggcggcggcggggactgcgcggacgcggggaccgccggccccgcgcccccgccgcccgcgccgtcgcccaggcccggccctcggcctcccagccccgccgaggagccggccacctgcggggttcccgagcctggcgcggcggccggacccagcccgccggagggcgaggagctggacatggactgaggccgcggcggccgggagaggcgcgtagccggcccgcggccgctc

SEQ ID NO: 30522 - DNA, 249 bp, Homo sapiens
  chr7:128430707-128430956
  hyper
cgagagtgaacatcagtcgtgcccactctgagcgggctactgtgggggcgtggctcgcagcccaccgggtgtgggaccggaagggaagacagggcggaggagagggggtcttccggccctgaggcttgatggggccaccggagggctcctcctaagagggtccttggccctggctcggtggggggtcgcggaaagcggagaggtcagggccctgccgttcgcccatccgggcctcgacttccctcctcc

SEQ ID NO: 30523 - DNA, 357 bp, Homo sapiens; identical to SEQ ID NO: 24586
  chr7:1308164-1308521
  hypo

SEQ ID NO: 30524 - DNA, 1138 bp, Homo sapiens; identical to SEQ ID NO: 25842
  chr7:134142980-134144118
  binary

SEQ ID NO: 30525 - DNA, 920 bp, Homo sapiens
  chr7:137531067-137531987
  hyper
cgggaggagagggggaaagggggaaggagaggcgtggaaacagagaggtgcccaactccgcggaagcgccccttgctgggtagaagagtgggtctcccgccgcggcgcacctgtctcggctgccggctccccgcacctacctgtacgagacctgcttccggaaagttaagttcctcagcttctcctccagcgcttcgtccttctccttctggccggcggccgcgggctcgtccagggcagcggcccccgccgccgcggctgaccctgcgccccgcgggtccgcgccgccctcggcgcccaggcagcagctcccggcgccgcttccgctgctgctgctgccgcccgtcgcccctttctcctctcccgccgaggagctggggttcatggcgcccgctccggcggccgcggagggagcgcaggcggcgccgctgcaggggccgggcgggctggcggcggcggcggcggcggctgcaggagcgcgggcaggtccgcgcgccgctggcaggggcagcaaatggcagccccttcccgcagcatccatccgcggctgcaccgcaccggggcattgtgggaaactccgctcactcccccgccccggccaatcagaggccgccgctccccgcctcccgcgccctcccgcgccggcccgcaccctccagccccgccggcctcttcctaaatcccgagcgaaagcccaagctgaacatgaactctgcccggaggcgacgggctgcggcggagggggagagagaggaggacaggctgcgaccccgggctggggacgccagggcagggacagcgagcatcaggaaggagagcgtccggggaactcgagtggccgcgccctgggtcctgcaccgtgaggctggggggaccaggaccggcgggcgcccaccttggtcctgagcccagctgccgac

SEQ ID NO: 30526 - DNA, 966 bp, Homo sapiens
  chr7:139168028-139168994
  binary
cgcccaggcgctgggcgcaggctcagccccgggcgcctcgccattccggggcagcttgaccaaggcagggcccggtgacggcggctcggggcagaccccgtagcccaggctgagcggcggcacgcgcggggacccggggcgaggcgaaggcggctttttcttgctcgagggctccaggcctgcgcccgccgccttctccacggccccggccggacttgggctgctttcgggaccttcaggttgtcgcaccttcgcgggcacctgcggctgctccagcgtggggaccaggcttcccacgggctccattgggagctctgccccggcttggcctccgggcgcagcctcccaagactcctccatcccgcgcgccccgccacccggagacgctgaggagcgcacctgggcccagtgcagaggagcttcgctctcctccgtccggattggtccagccgcgtcgccgaagttgtcaggccacgcccctccccgaaggaccccgctgtgattggctgtggctgaggttctgctgccccgacccccttcgggacacagccccggcctccaccaggcactgggagggagctgagaacggcagcggggccaggcgagggttgcagggtgggcgggagctctcgggagaaaagcagaacaccagcggaggcttgtggcagggaacccggagccccgcctgacccttccctcttctttgtctctgacctcacccattttcccctccagccctatgccggggtgttggttttgagagttacagtttgggcggggaaggattggccaagcctgtctggatcctgggacctcagagaaatcagaatccaaaggaattggggcgacctgtggaaaagtagcccagttggttgtcctgacaatccagcagggtttcgaaaggactctccatcatacttgggaggactcccccactgagtaacgctaagagaaaagaaacagggc

SEQ ID NO: 30527 - DNA, 854 bp, Homo sapiens
  chr7:139929854-139930708
  binary
cggctgttttgactcctgggcttccgccctttagtttacacatttgatgattccgtttgaaaatcgcaacctgaaatactcctcttctaggctggaggcggggttgggggcgggggcggtgggtggcggaaggagggccctcaaacaaagatccgctttctcctgaacaggtgtcaggagaccaagctttgacctccagctccctggcctccgggcgcgggccctgggctgatctggcggtggacgtgcagggcagcgggcccgcgcccaccagctgtggcaagtttctagtaagagagggatagagacaggcggagaccgctggggagtttcccggtgctcagccatcgcataggggggaacggacccttttgtgggccctcgggtccccccgtggtccccgctggcgcgctcgtcctctgccacccccagatctctgcgcactccccactcctgggcgttcgcactgccccccggcgcactctcgccgccccggggtccgaagcaccgcgcactccaccccgcgacgcgcgcatccctcgaccctcgcgcgtccacaccgccgctgcgcctcgcgcccccgcacccccgcaaccccacaccacgccggccgggcggggccggatgcgcagacgtgcagcacgtgcgctgcgcagcgattggcagcgccgcccccacgccgccccgccagggaaagggtgtcccgtgccctgccgcggctgctggtcccgcgggcgggggctgtcggggcgcgcgggccgggccgtgggggtcgccgcccgaagtgaccggggaacaatgacagcccgatggggaagggcggcggcttccctagagggccggttctctggctc

SEQ ID NO: 30528 - DNA, 821 bp, Homo sapiens
  chr7:140340170-140340991
  binary
cgtctgcagagccgcttcccccgtcagggctcaggccgcgcgagccgtttcctccctcccccgcgcgtcccctcctccgtcccctttccctccccagctcgaccctgcaccccctggcccggcccggccctacctccccgcgggcggcggctccgcgggctctggggcgcatcttgggggctccggggcgggccgggacggctggcggcgcggctcgggggcgggcggcggcgggtgccggggacgccatggccctccgccctccgcccctttgtccgccgagcctcccccggccgcccgcaagcccctgggggtccccgccgcgcgcgctcccgtggggtccccgccgcccccggccccagcggcgcgcttccctcggccggcccagcgcaggctcgcccgcggcccctgcctcctcctgccgtggctccgcgacgatctgcgcgacgcgcgccccctcctcccgacccatcccgcccggcccagtgagctaatccgcagctggcgggcgcccggccggttgccacggcaacccctctcccagggcccggccccgcgcggagctgcggtaaacaggaccttctgccggactcgccccctcgcctctcggggtgggggagaggtggcttaacccttcctgggaggacgcccgccgcgcgcgggctccattccacccaggcccgggcggattcgcgaggtgcttccggcctgaggcttagacctggacgtccaagcctggggaacggcggccgcgtgcccggccccgcttactctaggcagttaacacactctcggcaccgggccggggccgggggcacctc

SEQ ID NO: 30529 - DNA, 303 bp, Homo sapiens
  chr7:154540210-154540513
  hypo
cgcggcactagacaacgccaagagaatggcttagtaataatgagataataacttaatgaaaaacccctgcgagccctgcggggcggggagggagacctggtgtgtggtgctggacgcttcctgagcacctccctgcacagcctgcctctggagtttctcgcgcatggcggtaagcagggccaggcctcactctttccccttcacagtggagggtgtgagcagggcttcgatgccttttgctcacggtgtccagcagtggatgcgctggttggaacggacgtgcctataaccatgactcccacc

SEQ ID NO: 30530 - DNA, 481 bp, Homo sapiens
  chr7:154541944-154542425
  hypo
cgtagatgaacaccctcgctctccagaagacaagaagcgggagtcgcagcctattgaagtgtagacatgatgtctacacagccaccctgtgtcctgcaagagcccaggctcagagcgtgtgcaccgtgagggccgcctgtgccggagcaggccgcttctccgtagcaaccacatcccacagtgtggaggttcccagcggcgggtagtgcggaaaacagggaaggcaggaaagaaacttagccaggcactgagtgcgtgggaaggcaaaacactcttttctcctcccacggcgggggcgctccctgggcgatgctcacggagagtgggagggcgtcccgcaccgggcagagctgaagggtggcgggggtcggcttcctcctctctgcctcttcccttccgccacgcttcctacccacaccagccagtctccagtaacagatatagaatgccttcatttggaacacggagagacaagcgtgcc

SEQ ID NO: 30531 - DNA, 522 bp, Homo sapiens
  chr7:155254863-155255385
  hyper
cgcagtcctccctcaccaagtggtggaggtccgcgttgagcccatgcccagtccgaagtctagccccacatctggcggttcagcctcgagtggccttgggcgagtcacttccctcttggggccccagaatccttacccggtgcctattgggtggcacacctctgggtaacctgacttctctctgtccaccgtatctacccaggtcccaggtctcgaaaaccaaagaagaagaacccgaacaaagaggacaagcggccgcgcacggcctttaccgccgagcagctgcagaggctcaaggccgagttccagaccaacaggtacctgacggagcagcggcgccagagcctggcgcaggagctgagcctcaacgagtcacagatcaagatttggttccagaacaagcgcgccaagatcaagaaggccacgggcaacaagaacacgctggccgtgcacctcatggcacagggcttgtacaaccactccaccacagccaaggagggcaagtcggacagcgagtagggc

SEQ ID NO: 30532 - DNA, 172 bp, Homo sapiens
  chr7:155256233-155256405
  hyper
cgtgtgcatacatcgtctgcgtctgtggtctgtgtcgctgtccccagtcccaccgcagtcctgccgcaggcctaaccctcctgccctgggcactgcctccatgcagaagcgcttcgaggttctggggctaaaggcctggggtgtgtggcctaaagcccaagagcggtggggc

SEQ ID NO: 30533 - DNA, 219 bp, Homo sapiens; identical to SEQ ID NO: 8685
  chr7:157334647-157334866
  hypo

SEQ ID NO: 30534 - DNA, 537 bp, Homo sapiens
  chr7:157341254-157341791
  hypo
cgcaggccccggagaggccgggcagcgctcagagagctcagaacatcctcctgagggttctgggatttatcgtcaacctctttctacaaaaatgcagcgttctccccccacccccaaatctagtgaatggaaagagccagtggatcgagttcctaggacttgagatgtggctgcatctggaggtgttgcaggaaacgccagtggacctttgggggcccagaagtgaccccgcccatgcaaggccggcatggacgaggccggtcagagcagagcaatcggtgtgcggctcacattaaaccaggccctccccgtgctcctctcaggaacacggccgcagagaggcaccttgaatgggtctgcgtcccggaggagagactgacagtaccttcgtctggaccatgccgggtctctggtccctcaagtgctccagggtcgctgcgatatcaatctctttagcacctgcaacaaaccacaaattgggctgagttcagagcacaagataatccatgccacatctgtcaatctcctgctagccac

SEQ ID NO: 30535 - DNA, 531 bp, Homo sapiens
  chr7:157347322-157347853
  hypo
cgaaagttaaattccagggaaacagaaaggcccagtggtgtgacgctgacatcgaaaagcctgcaaacagtcgaggagtcagcgcacacacaaagaaaatccagatggaaggaaagaaaggaaccttaacgatgtctaccggggacagagcgtggggtccacggagaagtcccaggcgttttccacctaagaagcatcatggtgattcaaacaccagggaaatgaatggactcagtggagccactttctgctacttgaccaggtttaattcgagttgtccatgtcgggaatctacagggaagtgacgcaggctgccatcttgctcagcaccccagtgtggcgggcgccccagtgtggcgggcgtcccagtgtggtgagcaccggccaagtcagtttgggttgggctgcaccctcgtgcctgggacacccaggaagacccacctctctcgtgttagtggaccagggaggcagccacagacaccaggctctgcgtgctccgctggcacccgaatggccactgggtaccatccc

SEQ ID NO: 30536 - DNA, 137 bp, Homo sapiens
  chr7:157352977-157353114
  hypo
cggctccatgcacagggacgaagacccccgaggagaccatcgaaggatggtgggcagtgctgcccacacggatgcccagagcgtgttccccaagaccagcgggtctcatgctgtccacacgctcccaccaggcgatc

SEQ ID NO: 30537 - DNA, 402 bp, Homo sapiens
  chr7:157404210-157404612
  hypo
cgtaccctcccccaaaaagacacactggagtcccagccctgggaacatgaccttatttggaaatagggtctttacagaggtaagcgagcggagggcatttgggcggccctaatgcaatatgactggcgtgctgttaggaagaaggactctgcacacccacacgggagggagagcgcccgtgtgaagacgaagacagccgcggtcatgctggggacacgcggagggagcgcgcccgtgtgaagacgaagacagccgcagtcatgctggggacacgcggagggagagcgcccgtgtgaagacgaagacagccgcagtcatgctggggacacgcggagggagagcgcccgtgtgaagacgaagacagccgcagtcatgctggggacacgcggagggagagcgccc

SEQ ID NO: 30538 - DNA, 152 bp, Homo sapiens; identical to SEQ ID NO: 12932
  chr7:157414227-157414379
  hypo

SEQ ID NO: 30539 - DNA, 437 bp, Homo sapiens
  chr7:157445780-157446217
  hypo
cgctcttggtgctgagcctgccccccagacggtgcagccggcctctcccacctgctggggctcctcacatctagcttggcctccagacatcaccaacctctgctgtttatttcatcggatcgtggggttcagatgccacgttttgtccaacgtgccccaggagtggctgcatgtcaggaacatgtcgctgggaatctctgtggcttatctgaccatcctgccatcctcaggtgaggggcactgaggtggccggttgggtgtctggcggaaacgaggctttgcgcacagagggctgggctgctggatcaccacggaattggctgccttgtagctgtgatgagtcggaaggtcggcgactctgatgcgttcctgcggcaccaacctgcatgtgctttctacagcctgtgtgtgccagggagggtggcggtcagtgcccc

SEQ ID NO: 30540 - DNA, 232 bp, Homo sapiens; identical to SEQ ID NO: 12935
  chr7:157507378-157507610
  hypo

SEQ ID NO: 30541 - DNA, 284 bp, Homo sapiens; identical to SEQ ID NO: 12936
  chr7:157510178-157510462
  hypo

SEQ ID NO: 30542 - DNA, 161 bp, Homo sapiens
  chr7:157511449-157511610
  hypo
cggggtgagtctcagcacgtccaggcgtccgcggtgacactgcagccactcttggtttctcagctgccgcaatcggtccttccagtgtccgacctctggggccctcagacccccaaacccaccttgtcgctgtggcctctccgcctcctgcaggtggcagc

SEQ ID NO: 30543 - DNA, 408 bp, Homo sapiens; identical to SEQ ID NO: 12938
  chr7:157513007-157513415
  hypo

SEQ ID NO: 30544 - DNA, 429 bp, Homo sapiens
  chr7:157550880-157551309
  hypo
cggtgtcgtaattgactggacaggtactaatgccgaccacatccaaatatggatgatgacgagcgtggtgttgcccacagtccaggcctgtccaggcgccattccccgtggcctgcacgctcctgggtcatgctccgctcaggcggctccttcagtgaagttgcacagcagtcagggtaacctccatgtccccaaagggcaagaccggctcagaggcgaggtaggtggcacgaggccacacagctggtcagctcagccgggctgggacgcgggccccagaccgtggcccccgtgcagctctgggtccagctggccaaggtggactttgcacaaggtttgggaggctaaagggagccgaggcaggtggcagctgctgtgctgggaaggctgcgtgcgcggggcatcctctcttggcccgggtgggcggac

SEQ ID NO: 30545 - DNA, 242 bp, Homo sapiens; identical to SEQ ID NO: 12941
  chr7:157594777-157595019
  binary

SEQ ID NO: 30546 - DNA, 332 bp, Homo sapiens; identical to SEQ ID NO: 12942
  chr7:157621949-157622281
  hypo

SEQ ID NO: 30547 - DNA, 469 bp, Homo sapiens; identical to SEQ ID NO: 12943
  chr7:157625840-157626309
  hypo

SEQ ID NO: 30548 - DNA, 203 bp, Homo sapiens; identical to SEQ ID NO: 8687
  chr7:157642963-157643166
  hypo

SEQ ID NO: 30549 - DNA, 239 bp, Homo sapiens; identical to SEQ ID NO: 12945
  chr7:157730053-157730292
  hypo

SEQ ID NO: 30550 - DNA, 227 bp, Homo sapiens; identical to SEQ ID NO: 12946
  chr7:157736806-157737033
  hypo

SEQ ID NO: 30551 - DNA, 273 bp, Homo sapiens; identical to SEQ ID NO: 12947
  chr7:157738113-157738386
  hypo

SEQ ID NO: 30552 - DNA, 145 bp, Homo sapiens; identical to SEQ ID NO: 12948
  chr7:157744287-157744432
  hypo

SEQ ID NO: 30553 - DNA, 410 bp, Homo sapiens; identical to SEQ ID NO: 12949
  chr7:157853839-157854249
  hypo

SEQ ID NO: 30554 - DNA, 337 bp, Homo sapiens; identical to SEQ ID NO: 12950
  chr7:157860325-157860662
  hypo

SEQ ID NO: 30555 - DNA, 218 bp, Homo sapiens; identical to SEQ ID NO: 7517
  chr7:157916520-157916738
  hypo

SEQ ID NO: 30556 - DNA, 241 bp, Homo sapiens; identical to SEQ ID NO: 12952
  chr7:157919964-157920205
  hypo

SEQ ID NO: 30557 - DNA, 234 bp, Homo sapiens; identical to SEQ ID NO: 12953
  chr7:157929571-157929805
  hypo

SEQ ID NO: 30558 - DNA, 111 bp, Homo sapiens; identical to SEQ ID NO: 12954
  chr7:157934031-157934142
  hypo

SEQ ID NO: 30559 - DNA, 196 bp, Homo sapiens
  chr7:157934555-157934751
  hypo
cggacagagtcctttaaagtcaatctgtacacgaaatgtgtgacggacacgggcgttctgatcggagcgtgctgggcgttcactgccaccgatgtcccctgctggggtggccgagtgccccgctctggccgacgttgaggcctctgaattgttcggcagacagtggcggcttctttaccttcgggttgaagtgtcc

SEQ ID NO: 30560 - DNA, 119 bp, Homo sapiens; identical to SEQ ID NO: 12957
  chr7:157935699-157935818
  hypo

SEQ ID NO: 30561 - DNA, 264 bp, Homo sapiens; identical to SEQ ID NO: 12958
  chr7:157936035-157936299
  hypo

SEQ ID NO: 30562 - DNA, 224 bp, Homo sapiens; identical to SEQ ID NO: 12959
  chr7:157949173-157949397
  hypo

SEQ ID NO: 30563 - DNA, 180 bp, Homo sapiens
  chr7:157958509-157958689
  hypo
cgcctttctcccctgggcccgccctgacgtggcttaactcaggtagcgacaccggaagccacggtcttggcagagcagtcacctcgaggccgacactgttcagctagtgcatggtgagcagcatgaaatccagacagggggcttcggaggatgtggcaaaccgccataaatatgggctac

SEQ ID NO: 30564 - DNA, 105 bp, Homo sapiens; identical to SEQ ID NO: 12960
  chr7:157959868-157959973
  hypo

SEQ ID NO: 30565 - DNA, 477 bp, Homo sapiens
  chr7:158037641-158038118
  hypo
cgacaggcctgagcgaggccagcagttcgaagcccctgctccctggctgtgtcatgtggacaagtgacgtcgtcttgaggatggcctcgtgaggcggcggtgggcatgaaatgagatgaggcgtccagccctgcatctgcagcgtggtcagcacagaggctgacatccatggtcatgccggaatccgtggtcatgccagaatccgtggccatgccggaatccatggccatgccggaatccgtggtcatgctggaatccacggtcatgccggaacccatggccatgccggaatccgtggtcatgctggaatccacggtcatgccggaacccatggccatgccagaatccgtggtcatgccagaatccgtggtcatgccggaatccactgatggtgcacgtgacccacgatgggaaaagtcacaagacagcttcagagctggtcaaacgggactgagaggggctgcaccaggaatgcgc

SEQ ID NO: 30566 - DNA, 394 bp, Homo sapiens
  chr7:158039908-158040302
  hypo
cgaggcgcacgctgggctctgagacgccccctggccaagaggggtggaggaagggggcaggcgccaggatctggaaggagatttccaacccacgtggggtctcacaggagaaggccgtgatgggaggtggggaagtggggaggagggcgctcttgaccgtgtctgcgtgtctaagcaaaggatacaggggcgcaaagggaaggagtggccaggggtgcccgtcccaggtgtgctcttcttcacggcgcccctgcttccccaccacgcccatgtccacggctcgtgggcagctgggcactgggccactcagacaccgtcctaaacactccacacaggtaacttgctccctctccagccacacagcaaacacagcaaaggggacttgggtgtctgc

SEQ ID NO: 30567 - DNA, 127 bp, Homo sapiens; identical to SEQ ID NO: 12963
  chr7:158087705-158087832
  hypo

SEQ ID NO: 30568 - DNA, 338 bp, Homo sapiens; identical to SEQ ID NO: 12964
  chr7:158136094-158136432
  hypo

SEQ ID NO: 30569 - DNA, 118 bp, Homo sapiens; identical to SEQ ID NO: 12965
  chr7:158198545-158198663
  hypo

SEQ ID NO: 30570 - DNA, 479 bp, Homo sapiens; identical to SEQ ID NO: 12966
  chr7:158270795-158271274
  hypo

SEQ ID NO: 30571 - DNA, 911 bp, Homo sapiens
  chr7:158282124-158283035
  hypo
cgagactctgtctcaaaaaaattttttaaaaaaggatgaaaaacttgccgaaggacagagcaaaacaaaatcagaaagcaagggttggtgcgagcgatgggcgcccagaacccgggcaacctcttctccccacccaccgaggccgcagcccatggctccggggttccatccgcctcctctcggcagcgcgccccgggcggccccagctccaggccagcggcggggctcaccaggctgggcgctgcgcacggcgggcaggagaggggcagaccagggcgcagcagccaggaccccacactcaccgttcacacaggcctcggacgctccgcagaggccctcctcgagcaggcagcctgcggggaaacagagaagagacgcggtcagctggaggggaggaggggggtgcccccgaggctgccttcctggccccctggtgaatttcagagaaaccgccggtcaagcaggctcctccgacccggcttttccgagatggggccgattattctgaagccagaacgctgcgcccctgacccggccacgtgcgaggcctcctggcctagtcccggagcccagctctcacctggaccaggcccacagctctgggctgagggtcaagccggcgtcatcacaggagactctctggccgcgggagcagcagcggggccggggcctccccttgaggcctcccctgggcccggcgcctcccctggaccgggtgctcaccgcacgcaccgcgtccctggaagcaaggctgccgggcgccggggagcggaggcttccagggaggtaacgagctccgcggggagcccggctgcgtgggaagcaaaccgtggcgtccgtggccacagacaagagacgcaggagagggtcgggagaggaaaggaggcagcggaggcagcagagacgaagac

SEQ ID NO: 30572 - DNA, 721 bp, Homo sapiens; identical to SEQ ID NO: 24610
  chr7:158349387-158350108
  hypo

SEQ ID NO: 30573 - DNA, 377 bp, Homo sapiens
  chr7:158380259-158380636
  hyper
cgggagctgccggccgcgggggacggacgaaggggcggcaggcaggacgcgtggcggcagcagcagcagtagcagcagcagcagcgggagcggcggccccatccccgcggcctggccggcggcgctcagtccatggccgcgcgggaggcggcgggaggcggccgagtccgggcccagggaggcgcgcgccgccggctcctcccgccgcgcctctcgcgctcttgcggcgacgccgggccgagcttcagcaccggacagcgcccggccccgccccggccccgcccccggcggcagggccccgcccccggacgcgcgtccgccctcaggccacgcccccggccagccccgctcgccccggccacgccccccgcccgccc

SEQ ID NO: 30574 - DNA, 389 bp, Homo sapiens
  chr7:158380811-158381200
  hyper
cgcctgccgccgctccccgcccggcccggtgctgggggtcgcactgtccctggggacggcgggggcctaagccgcgcccttggcccggacgggaaggcccgaacctactctgctggggacctgggcaggcggcctctacccgcggggccccgcgcgcgtcgaattaacgccttccaaccgtttctttaatttaaacgtaacgggccacttgcgcatcggggcgcgcggaggtggacccagtcgacctcccctgcagcgcgggcggcgcccaggctcggtcccaggaaagctcccggagggcccagggcgtgggctggggccaggcgggctctggggcagagcagggtgaggcctgttgcgggcctggtctcctcgccgccgtcccgccc

SEQ ID NO: 30575 - DNA, 998 bp, Homo sapiens
  chr7:158936973-158937971
  binary
cgacactaaaactaaccagtaagtacagggagggaccgagaggcatctgcggccaacgccaaccccgatctccccgtgaaacgcgcagcccgcgcaggcgcccgcagctcccagctcccgggacggccccgaacgagctcatcgttgacgcgtccaggaagaaacgatcccgtttccagcaaaccccggacggtggggcgcggggaagggcgcaggcagcctcccaacccgagtcccgcaacccggcgggaccggagctcagcgcttcacgctctccgggaggaagctccggaccccgggcgaccccgctccctctcccggaccccgcccgcgctccagcacccgggaggaaggcgaagaccggcgggaggagcgctcttctcggaaggggagaaccgggtccgaggcgccgtggggcgggggtcgcgggcgcactcacgggggcgagcagccagcaggtcagcagcgcgggaggcagcagcgtccgcatcccgagctcagcgtgccgggggccgcccagcgcccgccgcctccgtcctaggtccccgcggttccgccgcctccagcatgggccgggagcgagtgcgcggagacctcgggccccgcagctgtagccgagcgcccgagcgcgggggccgccccctccgtcccggcagctggagcgcgctcaatgcacgcccgtcccccacgcgccccgccgctccgccccccgcccctgtccccgccccgcgctgccccaatcctcgtctccctcctcccccgagaacccccgctccgcgcccctcctcaccgccccccacttccccttccgctgcgccccgcgccctctcctcgcccctgggctctctgtccccgccgcgcgcgctccctctggtctcctcgacccccccagcctctctctccgttctcctcccctcttccctggcccacgcccccctcccggccgcgcctccccgatctgtgggcggaggggctgggaagcggggtgctcagtgcgc

SEQ ID NO: 30576 - DNA, 929 bp, Homo sapiens
  chr7:158962544-158963473
  hypo
cgagggcataaccgggctccatcccaatgctgcctcatccctgcagtcaccccgcacaggtgacgcaggcttcagagggccccggacctcgcctgagggtgaagaaaatcacggcatcactgacaaggccgccatgaggatcgcgtgagcagaaacacgatgatcatggctcactgatggggcagctctgaggatcgcgtgagcagaaacacacagataatcacagaatcactgacggggcagctctgaggatcacgtgagcagaaacacacagataatcacagaatcactgacggggctgctgtgaggatcccgtgagcagaaacatggatgatcacggctcactgacggggcagctctgaggatcgcgtgagcagaaacacacagataatcacagaatcactgacggggccgctgtgaggatcccgtgagcagaaacatggatgatcacggctcactgacggggcagctctgaggatcacgtgagcagaaacacacagataatcacagaatcactgacgaggcctctgtgaggatcccgtgagcagaaacatggatgatcgcggcctgactggcggggctgctgtgaggatcatatgaccagaaacacgtggaagatcatggctcactgacggggctgctgtgactattgcgtgagcagaaacacgatgatcatggctcactgaatgggcagctctgaggatcgcgtgagcagaaacatggatgatcatggctcactgacagggaggtctgaggattgcgtgagcagaaacacagataatcacagaatcactgagggggccactgtgaggatcgcatgagcagaaacacacagatgatcacggctcactaatggggccgctgcgagaatcgcgtgagcagaaacacggatgatcatggctcactgacggggcaactctgaggatcac

SEQ ID NO: 30577 - DNA, 1161 bp, Homo sapiens
  chr7:18125868-18127029
  binary
cgttccaggtaccgccccacaatgctacctcctctttaaaagaagtcgttcagctggggcgggctggcgctgcgtggcgcgcacctgagcggccggggctccccgagccacggggggcgcgagagggcgaggcagcggcctggcttctccccagcaccgttctctgtcacggccgccgcctgaccatcaccccgcgcctcgcgtgggcatgtctcgcttcagaaatcccaagtcgtcttaggttccctggtccttcccctgggggggaaaaaaaacgctggtgcagcccagagcccttttccgctccaccccgggatgtcctcgctgccctcccgcctcccgcgcgtccttcccagcgcgtcggccgcgcgcccaggtgttcccgcgtccgtaatcccctccggcccgcgcctcccggcccgccctgcgggtctccagcgcctgggcccgcgctctcgccgcgggtccttcctcctatccccacccagccccgcccagcctccgcggcgctggggctcccggccgagcctctcctcccacctccgtcccctacttccctccccaagaagtgctatttttagcaaattctccgcgcgccgccgcccgctcagctcgcagctcgcagccgcccgctgccgccctcccgagccccccccgcgcggcggcggcggcggcggcggcggcggcgcgtcccgcacatcgcgcagcgcgcaccgagccggccgcgccgcgcccgccgctctcgccgctttcgccgcggtctcctcctctagcgcccgccgcggccggtaaatctcggctggaggagcagcggcggcccccgagtcaactttcattccctttttgcttctgcctcaccattctcttctcctcctcgaaagatggctgtttggagaagggggagaagttaagaggtcgccagcgcggagcgaaggagggcgcgatagcctcagcaggagcgggcggaggtgagtggcaccacggcagagtccccggctggtgcttgaggaaagccctgggaattgggggccaccggtcctcaggatgcgccgcggtattcccttctcgggttccgcaggttaacagcatctcagtccggactctgatgccacttgccttgcatctcgcagcccggagaccggtgggtttaagggaaccttc

SEQ ID NO: 30578 - DNA, 866 bp, Homo sapiens
  chr7:19155978-19156844
  binary
cgaaagaaagggtggcgctgacaaaacggtccttacccgtgaccctgggtgtctctgtctcccctcctgtcacgcacactcacgcgcacacacacccctcaccagggcgcatccccctggagactgctctccctagcggggtcagaccggccttccggggacgctgggggcgcgaggcaacggtgccaagtgaggtgggaaggctgagcggagagtgggagaggggaggaaatcgaggtggactgggaaccgcggcctggccggcctgccgtctgccacctgagaggcgaaggggtgcagcggcgcggtccttacctaggtctccggccctgctgagggggtggggggctccgcctgctagtgggacgcggacatggaccaggccccctccatcctccagaccgagaaggcgtagctgagccgctcgtgagccacatagctgcagcttgccatcttggagtccagctcgtcgctctggaggacctggtagaggaagtcgatgtacctggccgccagcttgagggtctgaatcttgctcagcttgtccgagggcagcgtggggatgatcttccgcagcgcggcgaacgcctcgttcagcgactgggtgcgctggcgctcccgcacgttggccatgacccgctgcgtctgcagctcctcgtaagactgcggactcccgccgccgctgctgctgccgccgccgccgcccgcgccgccgccgccgccacagcccgcagacttcttgccgcgcttgccctgggccgggctgcccggctcgtcgccgcctccgacgcccccacccgcggctccgccgggccccgcgccgccgcccgcgctgcgcctgctgctgcgccgcttgcgtcccccgc

SEQ ID NO: 30579 - DNA, 989 bp, Homo sapiens
  chr7:19156850-19157839
  binary
cgctcggcggctgctgccggtctggctcttcctcgctgttgctcaggctgtcgtcggccggcgagactggcgagctggacacgtcctgcatcatctctcgagcggcgacgcgtggcctcgcgggcccggggcagaggagaagagcggggcgcctcagcccgccagcttcccccgcgcgcggcgccggcccgggcgatgcggcccgcggaggagagagcaggaggacggacgggagggacctccgcggggagggcgcgcgggggaggcggggagggaggcgggagggggaggggacggtgtggatggccccgaggtccaaaaagaaagcgcccaacggctggacgcacaccccgccaggcctcctggaaacggtgccggtgctgcagagcccgcgaggtgtctgggagttgggcgagagctgcagacttggaggctcttatacctccgtgcaggcggaaagtttgggggcagcagtgtcattggcctgacgtgaggaggagggacttttcgaagttttataggaaagtttccgctttccagtccccctcccccgtcccacctcccttcctcggggtctaacaattcgtcctcccaaaccattcaaaaacgacctggcccgggcggccggcccctccacccgcctcctagccgccctcccccttccctccccgtcgccttcctccggcgggcgcggggcgatttccttccccgccggagcgtgcgggcagcgcccccgaaccctagcgcagcccaggaagcggtcggaggagactgtcctggccgcggtggcagccccatccggagtggctgtgacagcagcaatggcaacagcttctacacagtgggtgatgtctcatctcgcccaagagccctctaggtccgtggggccgatttgggattgctggggctgggggggtggtgtggcgcggggtgggggggcatgccaagaaaagtgtcaaccgcggagcccacccaatggtcaggtagac

SEQ ID NO: 30580 - DNA, 540 bp, Homo sapiens
  chr7:23287221-23287761
  hyper
cgcgagaggaagagagctgagccgctgtaaccctgggcctgggattgcggggacgggacgggtgggaagcggccaaaggcgcagcggcttctggtcagagccgcagaggcctgagacgtgggccgcgccccggcccaggagaccccgcggccgcgccctaaccctcagtctcccgactgcgactgcgacccgggaaaacgcctacgtttttggaaaggaagtcccatcacagggagctgacccggtgtcagcgcgcagcacgttcccggcccgcagtgcgccgcgcgtcctcctagcagcccgcggagcccggcactgtgatggtcccgcttcccacacgaggccacgggccacagagtgggcaaggaactcgccccaagccacacagcgggtaagttgaggaggcagccttccatcccgacctctgtccttcctgcccgggtttggggttggacaggctcgggctccccgccagcctaggggctgggtctccagtggctttgctccatttcctcatttccttcaaaacgaggagttttc

SEQ ID NO: 30581 - DNA, 352 bp, Homo sapiens; identical to SEQ ID NO: 25869
  chr7:25896245-25896597
  hyper

SEQ ID NO: 30582 - DNA, 684 bp, Homo sapiens; identical to SEQ ID NO: 25870
  chr7:25896671-25897355
  hyper

SEQ ID NO: 30583 - DNA, 824 bp, Homo sapiens; identical to SEQ ID NO: 27231
  chr7:25901811-25902635
  hyper

SEQ ID NO: 30584 - DNA, 444 bp, Homo sapiens; identical to SEQ ID NO: 25871
  chr7:26192423-26192867
  hyper

SEQ ID NO: 30585 - DNA, 1756 bp, Homo sapiens; identical to SEQ ID NO: 25873
  chr7:27135176-27136932
  binary

SEQ ID NO: 30586 - DNA, 1116 bp, Homo sapiens; identical to SEQ ID NO: 29388
  chr7:27190160-27191276
  hyper

SEQ ID NO: 30587 - DNA, 941 bp, Homo sapiens; identical to SEQ ID NO: 24623
  chr7:27195477-27196418
  hyper

SEQ ID NO: 30588 - DNA, 2039 bp, Homo sapiens
  chr7:27212356-27214395
  binary
cgattccgaggtccaggggaagggaaatggcccttctctggctctcagctcagggccccccgcttccaggccggatttgccttttcttcttcccgcaacgaagattcccgcccctcagcaactttgaaaaaagcatgggggatcgtaaactcgaacttcgccggttaatgggcttatttattggcgctggcggctgcttattttggatgccttacaaacatccgcgctatctgcgggcgagctactttccctccctccccctccccccgcgtgggccgcgccgcgcaggctgggcagggaccagggctctgggtcctcccggccacaggaaagagcgcacaggagggggcctgctcgctggtgtcctcgtccctagtcagggggagctgaggccagcgccgaggacgtcttgctgtggggcgctaagccggacatgaattttactgcgtccccacgcccaaatattaaaaagcaagttcacaaggtcagcctgcctgcagcttgggccaaggccggccggctgctgcgcgggctcctagttttctgatccttctcctccttgtgtctgcctgtctgcccgcctgactgcagccctctgcagccctgcttacccagggaatccttctccggcgaggctttgctgctctcggaaggggccggggagagctcctccgcggccgaggacgacgcgtgcgcctcctcgtcgccctgcgagcccccgccgctgccgcaagccagcgtggggggcggcggcgaatcgagggctcgctccttccgggccgcatcggccgagccggaggctagcgcgggcgggagatcgaaaccgcgccccgggggctgcgcggggaacgggccagccccgagttgctgcgcgccgccgccgccgctgccatagcccttggcggtgccgtaggcctgagaaaggcggaagtagccaggcactggcaccccgctggaggtgcccagggcgcagccgtcgggcggcgggccccgcgggaagggagccagttcggcggcggtggccgagactttggggcatttgtccgccgagtcgtagaggcagtaggagctctcttctttgatgttctgcgcgaaagagcacgaggtggcctgcggcgctggctggggtggttgcggcgggggcggcggctgctgctggggcggcggcggcggcccgtcaggcggctccatccggcaagaccggggcgcgtctagccacaggtctatgggcgagggcccgtagccgtgcgccccgggacctagacccccgccaccgccaccgctgcccggcgacgctgcctcattgcgcttgccgcccagcgtggggaagagcccgcagctctgcagcccgtagggcaggtcggcggcgggcggcaggtagaccccgccgtgggcgtagtaaccgccaccgccgccgccccccgcgccaccaccaccgccgcctgcctcgcctctgcccgagctgatgagcgagtcgaccaaaaaagagttcgcggcggggctctccgagcatgacattgttgtgggataatttggcgaagggagcagatagccctttctggctgacatttcttgtgcaaaacatgctgaatacgattagcaatccccccgcaccgcggcgggcgcccgcagccaatcccgagccagagtttccgcgcgaccactcccagtttggtttcgtaggcgcggggccgctctccgagggcgccctcagagcccgcgattgatataaatatgtaatctgtattgatgggccaggagacgcaccccgacaccttggcccgaaggccgggagctgtgggggctgccccaacgtggctggtggggggcctggccattgggctcgccccgcccctacccggacgtgagccccataccggggtcccttagaagggcccttgggccccgcgcagttaacaagtggggtgtttatggtgcgcgcccagtctgccttgggtgctcaccatccctgtcgcagaagctgccactagtccccggtgtactctaaccactgaagcggccgtgtcggggactcacgc

SEQ ID NO: 30589 - DNA, 961 bp, Homo sapiens
  chr7:27223331-27224292
  binary
cgaagctgcgggcaggctctacttgctccccctttaaaaaaaaaaaaaaaaaaaaaaaaaagacccacaagacaaaaaaaaaatcgcttttgacagattgaataacaattgtgaataacatgcagttgggcagaaggaggcacgtaattgccaccacgccagaggaaaatggcttcctttggacaaaaaggccaactttgggttaatttgttcttttaatatattgctagagctaagcgggctactttatctgttaaacgcgctcctagcgccgtcgttaaacagcgacgcctttgaatcccggccgggactggagtcccggcgcaacacatggcttttataaaaatctccggattacctcgctatcaaaagctcccgaagcccttgcagggggaatttacaggcgcccacctccggctccccagcctggagctggccccgagcggggtcgagctgctgggcttgggagctgagaagggaaaaaagggaaaaggggagttgtttttttttgcaggcatgccttggccggtgggtatttcacggccaatttcagcactcgccacgtgatcccgccttttataacaaagttttgttgggggaaacctaaaggcccttcataaaccttatatgcttataaaacagcatataaaaatttaacagcggtgctgcgctagatttccaactcccctttcataaagcgcagggcgctgcctttatacgtactggagccgccggccttgtcctcagtgtggccggaagacgactcggggctgctgctgctctcggggcgccgccgccgctctttctcctctgctgccgccgccgtctcccggcagccgccgccgccgccgctgtccgaacttgaagttgccggcgcgcccgttgcagccgccgccgccgccgcggaggtcgccgtggccgccgggggccccttctcggcgctcttgtccccggggtagtc

SEQ ID NO: 30590 - DNA, 1383 bp, Homo sapiens
  chr7:27238984-27240367
  hyper
cggctgcgtagccctggtggtagaaggcgaactccttagcgcgggagctgaactcctcggcagctgggccggcggtatccatgtacttgtccgcgaaggcggcggcggcggcggccgaggcgggctgcgcgcacgacttgatggcgttggggtgcgggcccatgcgggcgcacgggtagtagccgctgccgaagtagccatagggcagcgccgcgggccccgacgagctctgcgccgctgccgagcaggggctgcattgcttggcggcctctgcgcccgccgggcccgccgggccgggacctcccgaggacgacgcggcggcggcggcggcggctgcagcggcagccgcggcagcagcggcggcagccgacgggggcgcctccccgggggcgctgctgtaggcggacgcggctcctggcgccaagggcgccgggtgcgccatcaggttgcggcactggttggccgcggccgccgccgcagccgcggccgccgccgccaccgagaagttgccccctgccgccgcagccgccgggtgggggaagcccccgcccccggccccggcagccgccgccgctgcagccgctgctgcagccgccgccgccccttccatgttcttgttgagctcgtcggccaccaggccgccgccgttgtcgtagagaaacatgacggtgggctcgatccagcgggggtggaggagcacggaggctgtcatagcccgagccgcatggagaagaccccagtggcgctgttttaaaaagcccccaagaagtgaagagcgcgcggcgcggggccggggcccgagcgaggggggcggatcgcgccccgcggggtcgcgccaggcggccgcccattggcccggcccccccgctccgcccacggcgtatgcaaagcgggcggctccgactccagctctgcacggtgcacccgtcgtccccgccgcggcccgcgccgtccccagcgccagccgcgcggccgcgcaccattcacccgggggagaggcggaggaacgtgcgggtggggcagggaaggaaggcggccccatctccgccccccttcccttcctttatcccagtggggcccagacccgcgcaaccaggcggggaggggaggtgggcgcgcgattgggttgcgatctggagcagtggggacaggtcaggtaattctgccggcggtcagggatgggagagtggggaggacgggaccagcctagctcagaatgggtgtttcttggagcctctgggactgttttctttccaggaaccggcgcgtatttctgcagtgagaccacaggacggacatcggcgccttcggcttcgatggagttgcgattttgctctttccagggaaacagtggcagggtgtttgctgcttatcggttcctgc

SEQ ID NO: 30591 - DNA, 845 bp, Homo sapiens
  chr7:27244536-27245381
  hyper
cggactcctcagagctggcgcaaactccgtcctccaaaactcggctctgggaggcctaagtgactccgaagccggcggcagccgcggcagcggccgtggtggtggaagagctcttttccccgacagtgccactgatcgctcttcactggagctggaaacagccttcgcggaaaggaccggagcatgcgttagaagcagagggagcttggtgaagggctcggctggaaggaggaaacgccttctcgcagtgcgcggccagcccgcgggggacaccggcttgctggactgcaggggcccgtgccacccaggaagtgacctgcgggtcactcagccggggcgctgggcgagcgcgggacggcccggagaattccgtgcggctgcgacgggaaaaggacgaggggtctctgtacccgacgctgccactggcccaaaggaattttacccgcgagcgcccaccccaccctagcttgatgcttacgcccgcaacaaaacaggaaaccaggactgggcagtgcattctttaagtcaacaaatacactgaagacttcgagcgtttgaaggaaggagggggtttgcacgtaagcctggccccgccgggctcggctttctcgctgagaaagcggcgcaggcagccaggcggcctgggcccgcgggggtccatctcgccctagactcctaagaactcccacggccctgttcccagctgcgaattcttaatgcacaacgcgacggagggaaggaaattcaccagcgcagcgacgaggaaggggaactcaggaccccttcaagtacacactgaggtgtgatcagagttttatgggcactttatatgctgtaatcataac

SEQ ID NO: 30592 - DNA, 806 bp, Homo sapiens
  chr7:27252381-27253187
  hyper
cgaccgcacccttccgctgaagtcccccacttctgcccctccgaggtggggtgggggtgttctgaaataacggtggctgcagttagatggctgaggacatagaaagcggttgttatttattccaggcaccatcacaaaaggcttccaaaaatatcgagccgagatattttattgtccagcctgtctgcagcctgtaattatgcgttcaagatgtttaatgtgtgcaaatgcattagccgctttcgctggtgaaaaccctagctgggggcggggtagaggcaagtctggagataattatgtcgtacagtcgcaaacattattccgttcttactgtaaacggccccggccacctttacgagaaaccaggaaacttctgagagttactagcagcgtttacgcgggcaaactgagttctttttctttctctcccggattgttcgaagtatctatcgggcggcttcgatgccaggttcagaggcgcgccagggagagggcgccccgcagaggagcgcagcggagaggcctacgcaggtccccggtgcccgcggccctcggaggccgggccctgcgtcttggccaggcactgggtggcagctgaggctggtggcccggagccctcgcggccgcgggcaggccccttcttgggcagggtcgggcactcccgctgtccagggctcttcggcaccctccttccaatcaggtcgctctcccctgctccccagactcaactcctccgaagctgctccaggttgaaatgtgaccgctaggccgactccctgggcccgcgagcagttctcgaaaggtgc

SEQ ID NO: 30593 - DNA, 984 bp, Homo sapiens
  chr7:27264586-27265570
  hyper
cgggaatatttactagattattttagtgataatgaaaactatgcaaattttcagaagtgacatttcagggacaaaccgaataataactgtaaattcataaatgtcaaaattgccttcaaaaaggttttgccgttttgttttttgtttgttttaacgttccaccaatggttttcgggtgacggtgtccttgcacgatgtagtccgtcttcaaagttcttttacacaacgtgaattatattgaaattgggctacttcatagagcttcgcctcagtggaggacagcctggaataggtgagggggtctcgaaaggaataccaggccggggagtactggcaagtgtcggaggggaagggcaggtcggggagaggatccccaggggctgggtgtctgcagggctccccgtaactcagaggggccggcggccgccgcccgaagcctgagcttttctcagcagatggagaattcatttttaacccccaggaaggaatgggctgagacatcagaccaccgctcctagagggtcaaatttcctccccataaatccaaaacattctctttagggagttccctccgtggcgcgcaaacccgggaagccgcgcgccctggggtttcttggcgggccgtgcgcgcagcctgaaccgccaaagtcgcgtcatcccgcatttgcctgcacccaggagtttgcaacccgcagagcccgcagaggccaccgccaagagtgcgcgccttggcgccccgtcggcctctacttcctcggatctgagccagcgccgctaatccgcaggctgcagcagaacctgtcgccagcttggagagtccctcgcgctgccctggcttcccggtccgcgggcgactcgcgctgctcccgggtttgtcgggaccccaggagggcgctcaagcctgtcggcccctacttgtgtgtagagaataggcccgggtacaccacctcagaaatgcagaggaagccggggacactgaagccc

SEQ ID NO: 30594 - DNA, 895 bp, Homo sapiens; identical to SEQ ID NO: 25876
  chr7:27281871-27282766
  hyper

SEQ ID NO: 30595 - DNA, 157 bp, Homo sapiens; identical to SEQ ID NO: 12990
  chr7:2959057-2959214
  hypo

SEQ ID NO: 30596 - DNA, 425 bp, Homo sapiens
  chr7:3283455-3283880
  hypo
cgtgagccaccgcgcccagcctcagaagtgctccttttttaccaatggagaaacagcccagagaggaaaagcgatttgcacagagtcacgcagctgaagactggcagatccaggctgtttgctgtcagtctgagctctcgaattctaagacgagccacttctctcgggaagccaggaaggctcctcgcaaatcctggtggagaagtggttacctcaaagccctttaagcacagtcataaacttaccttgaagggccaggtaatccgatcatagagtcggcgttcaaaaaaaaaatgaggtattgatatgtttatcctcaccctcataacctgttctattcaaataaattcagtgtgctcagttctgcagggagtgacagagctgccccgaatcagatggtgccacgcacatcccatttctcttgc

SEQ ID NO: 30597 - DNA, 954 bp, Homo sapiens
  chr7:3340861-3341815
  binary
cgaccgcgacgtgcgggcgggcgcactttcttctcagcgccgggcgggggcggcggcggcggcggctcctccgcgcccggcggacccctcggagctagcgcggcgggctcgggactgcgtgagcgccggacgcgaatttcccccgttgacaacttcttctcgcccggctcgtccccggcccgcgccgcgcccctcacgcggggacccaggacgccgcccctcagcgctgggcggccgctcacctcgggccggggggcgccgcgcctcccgcggagtggccgcgcccgctcggagccgtcccgcctgtcctgcccgcccgtccgtccggcgcggcgctcggggtggcggctgctcggcatggcccggggcgcccggccctcggcggccggtggcggcggcggcggcgcggagccccctgagcgcgcgggccccgggcggccgcggggatccccgcccggccgcgcccgcccctcgctggcgccgcgccccggcccggagccctcgcgaccccgggcggcgcccgagacctccggcggggacacggcgggcgcggggcggtgcggcgggcggcgggcggcaaagttggggccgggccgccgcggctggtgggcgctgctggcgctgcagctgcacttgctccgggcgctggcgcaaggtaggtgcgcgcggggtcgcgggccgggggcgtcgcctcggggcgcggaggcgcgaacttgagcagcgagagtgtgtccggggtccccccgcttcccggcccgggtcgggatgcgccttgctgggggctctagggagcccaggggctcctccacgccagactcggaggagagggaaacggagccccgtagagcctgcaccccgtctgctactttgcgttttattttttttataccgcagtagcacaaacaaaaatttttaagttgaggacccatttctcagctccttaaaaggatgccc

SEQ ID NO: 30598 - DNA, 257 bp, Homo sapiens; identical to SEQ ID NO: 12992
  chr7:38725412-38725669
  hypo

SEQ ID NO: 30599 - DNA, 761 bp, Homo sapiens; identical to SEQ ID NO: 12993
  chr7:4219149-4219910
  hypo

SEQ ID NO: 30600 - DNA, 203 bp, Homo sapiens; identical to SEQ ID NO: 12994
  chr7:4243576-4243779
  hypo

SEQ ID NO: 30601 - DNA, 180 bp, Homo sapiens; identical to SEQ ID NO: 12995
  chr7:42834387-42834567
  hypo

SEQ ID NO: 30602 - DNA, 304 bp, Homo sapiens; identical to SEQ ID NO: 12996
  chr7:4349444-4349748
  hypo

SEQ ID NO: 30603 - DNA, 316 bp, Homo sapiens; identical to SEQ ID NO: 12997
  chr7:4410656-4410972
  hypo

SEQ ID NO: 30604 - DNA, 1373 bp, Homo sapiens
  chr7:45613422-45614795
  binary
cgcccacagggtctccgcgaccctagagcttagggaagaattgccgaggggcggggggtccctcatgcgcatggaagggacgtacgccccaggcctccaccttcctcctgaccccggggattcttggacgtcgattctccgtctcgtaggggcgagggccctgggttcgcagtcagacgcgggcccctctcaaatctagtggcctggttttattgagtgggggaaggcacatattttccaagattaactgccccgcaacagggaatttcgcaggatttcagtattttcgactccccaggtgacgccaagagggtgggttccactgtgcacggtggggaaactgaggctcggaggggacaaggaaggtactcgaggtcacgcggctcctccggcgggcgggaacgcaggacgcggagttggggcgcgggctgtgcgcgcccaggttcgcggctcccggggctcggctgtcgcagcgcggtcgccgccgaggaccacggtcggggcgcgggcgggctccagtgcgcaggcgcggcgggcgggaggggacgcgctccgggcgcgcgcgcggggcagccggcgccccaactccgcccgccccgcgccccgcgccccggcgcctcgccgcccgccgcccgcccgccccggcgccgccgcccgcgccccggcgccccgggccggcgaggggcgcgcccgcggccgcggccgctgcatggcgctgagatggcgggggcgccgcgcggcggaggcggcggcggaggcggcgcgggcgagcccgggggcgccgagcgggcggccgggacaagccgccggcgcgggctccgggcgtgcgacgaggagttcgcttgcccagagctggaggcgctgttccgcggctacacgctgcggctggagcaggcggccacgctgaaggcgctggccgttctcagcctgctggcgggcgcgctggcgctggccgagctgctgggcgcgccggggcccgcgcccggcctggccaagggctcacacccggtgcactgcgtcctcttcctggcgctgctcgtggtaaccaacgtccggtccctgcaggtgccccagctgcagcaggtcggccagctggcgctgctcttcagcctcaccttcgcgctgctctgctgtcctttcgcgctgggcggccccgcccggggttccgccggggccgctggggggccagcgaccgccgaacaaggggtttggcagctccttttggtcaccttcgtgtcctatgccttgctgcccgtgcgcagcctgctggccataggctttgggctcgtggtggctgcgtcgcacttgctggtcacagccaccttggtccccgccaagcgcccacgtctctggaggacggtaagtgcagccgc

SEQ ID NO: 30605 - DNA, 527 bp, Homo sapiens; identical to SEQ ID NO: 12998
  chr7:4917102-4917629
  hypo

SEQ ID NO: 30606 - DNA, 335 bp, Homo sapiens; identical to SEQ ID NO: 29400
  chr7:50251388-50251723
  hypo

SEQ ID NO: 30607 - DNA, 1629 bp, Homo sapiens; identical to SEQ ID NO: 24645
  chr7:50343211-50344840
  binary

SEQ ID NO: 30608 - DNA, 111 bp, Homo sapiens
  chr7:50441160-50441271
  hypo
cgcgtaggggaacatgccaagaggattatcccaatgcctgttctgcgtggtgtcctttttctagcctcggaagcactaggcctacaccttcgctatagccctcgtcttagc

SEQ ID NO: 30609 - DNA, 726 bp, Homo sapiens
  chr7:53103571-53104297
  hypo
cgcccggtgcccagcacccacctcatcgaggtgcggcccacccaggaccccgccaagccgcagcgggtggtctccgagggctggaggcgccctgcccttcccggggagaccgctctggggcgagacctctcctgtgcctgggagggttgcatgaaaggggggctgtgtcgtgcctggaacccaggacggacctggagcccggtgaccatcgggatcgcgccccctgagcgtcaggagagcccctggagatcccctggacagagagcccgccccgcaggccgccccgccgcccaggagctcctggacccctgcacccgggagactctgctgggggcgctcagccagtgccccaagggaagcgctaggttcgacgggccgttgtggttcgaggtctcagacagcaagggtggcaggcggaacctgcagccccggccctctgccttcaagcccctgagcaaaaatggagcggttgcttccttcgtgcccaggccagggcctctgaagccgagcctcggcccctggagcctcagtttttgtgatgatgcttggccttccgtgctggtccagcccgccccatccgccatctgggacttctgggaggcgacaacgccttcctgcggcagctgcagtagggtctccttcgccctcgaggtcacccagtctgctggcccctttggctcctaagaatctgggctctgctacccacctccggagacacaagcccac

SEQ ID NO: 30610 - DNA, 1327 bp, Homo sapiens
  chr7:5632268-5633595
  binary
cggcgaggacaccggtggggtgagagcaccggcggggcagcagcgggggccgcagcgccgggtccctcggcccggggcccctcccgcgcggagccaggggcgggacaggggggcgtggcctggtggcgctgacgtcacctcgcctataaaatgtccggggcgccgctagctgggctttgtggagcgctgcggagggtgcgtgcgggccgcggcagccgaacaaaggagcaggggcgccgccgcagggacccgccacccacctcccggggccgcgcagcggcctctcgtctactgccaccatgaccgccaacggcacagccgaggcggtgcagatccagttcggcctcatcaactgcggcaacaagtacctgacggccgaggcgttcgggttcaaggtgaacgcgtccgccagcagcctgaagaagaagcagatctggacgctggagcagccccctgacgaggcgggcagcgcggccgtgtgcctgcgcagccacctgggccgctacctggcggcggacaaggacggcaacgtgacctgcgagcgcgaggtgcccggtcccgactgccgtttcctcatcgtggcgcacgacgacggtcgctggtcgctgcagtccgaggcgcaccggcgctacttcggcggcaccgaggaccgcctgtcctgcttcgcgcagacggtgtcccccgccgagaagtggagcgtgcacatcgccatgcaccctcaggtcaacatctacagcgtcacccgtaagcgctacgcgcacctgagcgcgcggccggccgacgagatcgccgtggaccgcgacgtgccctggggcgtcgactcgctcatcaccctcgccttccaggaccagcgctacagcgtgcagaccgccgaccaccgcttcctgcgccacgacgggcgcctggtggcgcgccccgagccggccactggctacacgctggagttccgctccggcaaggtggccttccgcgactgcgagggccgttacctggcgccgtcggggcccagcggcacgctcaaggcgggcaaggccaccaaggtgggcaaggacgagctctttgctctggagcagagctgcgcccaggtcgtgctgcaggcggccaacgagaggaacgtgtccacgcgccagggtgagtggggacgctgcccccgcctctcctggtccgtgcacaaagcgcaccccacccgcgcccctccagcctcccgccctttctcgctcgcggcgccgctgcggtccggagcactgcccattgcgcccccgctaggcacgcgggctaccccgcctggagggggcgaggagtggggctttgcccatcctcgggtgcc

SEQ ID NO: 30611 - DNA, 294 bp, Homo sapiens; identical to SEQ ID NO: 13005
  chr7:57324312-57324606
  hypo

SEQ ID NO: 30612 - DNA, 188 bp, Homo sapiens; identical to SEQ ID NO: 13006
  chr7:57706384-57706572
  hypo

SEQ ID NO: 30613 - DNA, 118 bp, Homo sapiens; identical to SEQ ID NO: 13007
  chr7:63569143-63569261
  hypo

SEQ ID NO: 30614 - DNA, 331 bp, Homo sapiens
  chr7:63652630-63652961
  hypo
cgccttgggcacctcggcctgcgtcattgcgctctgcctggctgcggccgctgtggccaacacctccccggagctcctggagagcgaggcgaagaaagactcagccggcacaaggcaaaggttcagcgggttgagggttcaaggacacggaacgggtgcctgggtggaaagcggtcaccaggtgtgagtgtcaccgtggggccagtgcccagttttgctgcccccgcttcctgaagatcgcagctggagccacctgggcgcagcgtttgatgtggcacctgcagtggccaaagtgacacccaaccgtgaggacgctgcagggagtcggcac

SEQ ID NO: 30615 - DNA, 494 bp, Homo sapiens; identical to SEQ ID NO: 13010
  chr7:64332690-64333184
  hypo

SEQ ID NO: 30616 - DNA, 454 bp, Homo sapiens
  chr7:6543023-6543477
  hyper
cggcccccgaaggcgcgcgggaccccagcagccctggccacagcgacagcccctgtggagccggccgaggcctcggggcggggttgtggtcgcggcacctgcaggacgaactggtccggctcgctgaggcggccgggcgcctcgcggaaggcctggtagcgctgctcctcgtcggcgtcgggcgcgaagagcagcagctgcgcgagatgtgcgggctccaggcgccggggctccatgctcatcagcacctggcgcagctccgcggggctcagcttcaggtgtgccaagaggatggctgcgggcggggcggggcggtgagctgggcggggccggagcggggccggatgggacccaagacggagagggcagggcagaggcggggagagggcggacacggggcggggcctaggggagaggacggggccttgaggctggaaggacaagaaacgcggac

SEQ ID NO: 30617 - DNA, 802 bp, Homo sapiens
  chr7:6570393-6571195
  binary
cgaccagcccaattgtaggaaggaaagtgggctttcaatcccagccttttatcccaacaccgactctttagggccacgcacgggttctgagcgcccaacgcttagacctcgccgccccggtacccaccgagtttatttccaacctccctgggcctcgggctccgcccaggctcggagggtgcccacccagggcagggaagcccctccacgctccagccccacccgctttcagaccagcccgaggcggatccgtggcgcagagggcgcacggttcccggaggcgcgggacgcgatggggaagctaccgaaagtgccgagagaagccctggtccttccccatctggagccggggaccgcggcgcggcaggtgccgaagggcagggggtagccgagcccaggaatggagcgagcgcgccgcgactccacgcacctctgccctgcgagcgcgcgcggcccctcccgagccgtcccggcccgcagccccgccctggccccttttggtggccccgccccctccaggtagccccgcctctgccctgctgggacccttttggtcgctctggggtgcagcggaaactggcggcggtttgaagccgccgcgctcactccccttggctctctccgttattcccttcccaggatcctcgcctgcgtcctctccagctactgcgccccggacccccacacagtggcgagtccccgcagttcagaggaagccccgacggcctttggtagaacatgcaatattttccggaggggatgccctttacgctgggcctccagggctcagcaggagtcggcc

SEQ ID NO: 30618 - DNA, 113 bp, Homo sapiens; identical to SEQ ID NO: 13013
  chr7:70543004-70543117
  hypo

SEQ ID NO: 30619 - DNA, 207 bp, Homo sapiens
  chr7:77324199-77324406
  hypo
cgcgcccggccacattccttatcttttaagctaaaacccatctccccaaattgcttattttcgaagcaaaaatcaaagcacatgcttacaaaacatcgaacacgcagtgtgcttactaaacgctaaaatacagaaacctaaaaaaacaattcttgcttttcaaacatccataaataatcgccaacgaatttttcctggcaagtctac

SEQ ID NO: 30620 - DNA, 771 bp, Homo sapiens
  chr7:82072331-82073102
  hyper
cgggtgagctggctggaaacttttttccccagtacggctgcactctgaagtctagagaatcccgttagagacgggctgagacgccgcgagtcgtcggcgggcgcttcccgggacagtcggcccccagtgcccggccccgtggaggcgcccgagacgccggttcgggacgcattccagcggcgagcggcgcgcaccgcctgcccggcgtctccgcatccgagcctggctccccggccgctcgctccccacccccacgggcggaaaagccccgcgactcgggaaccgacccccacccccaactcccgcggcgcccctcggccggcgctccctgcccggcccgccgacttacgtgacggccgaagggaacggctcctccgacgaggggccgatgagcaaagattggaaaagtgtcagagtcaaggccagcaggcagccagcagccatcttcgcgatcgaagatcaatgccccctccctgcccaagcgggggaaggagcggcgctggaaaccgcgggcggaggaagagcagcacacgccgccgggaccgcgggcgtctggagggctggctgcgcccggggcccgaggcgcggagccgcgcgggggacggcaagggcgggagcggacgccgaggaaggggcggtggcgggcggacccactagcgtgcgtcggctgctccgcgccgcggccgccttgcctccgccgccatcaagggcgactttggaaacagacctcggcgagcccgccggcgctcgcgcgctctcgctctccctctc

SEQ ID NO: 30621 - DNA, 571 bp, Homo sapiens
  chr7:86415591-86416162
  hypo
cggctcttccagatccctcagatcagctacgcatccaccagcgccaaactcagtgataagtcgcgctatgattactttgccaggaccgtgccccccgacttctaccaggccaaagccatggctgagatcttgcgcttcttcaactggacctacgtgtccacagtagcctccgagggtgattacggggagacagggatcgaggccttcgagcaggaagcccgcctgcgcaacatctgcatcgctacggcggagaaggtgggccgctccaacatccgcaagtcctacgacagcgtgatccgagaactgttgcagaagcccaacgcgcgcgtcgtggtcctcttcatgcgcagcgacgactcgcgggagctcattgcagccgccagccgcgccaatgcctccttcacctgggtggccagcgacggctggggcgcgcaggagagcatcatcaagggcagcgagcatgtggcctacggcgccatcaccctggagctggcctcccagcctgtccgccagttcgaccgctacttccagagcctcaacccctacaacaaccaccgcaacccctggttcc

SEQ ID NO: 30622 - DNA, 927 bp, Homo sapiens
  chr7:87563639-87564566
  binary
cgccacggccgccgcagcaccggccggggctgggtggaggtggccgcggggaccccgggggcgcggagcgagggaaacggactcggcggcgccggcatgaggagctgagcgtctcgggcgaggcgggctgacggcagcaccatgcaggcggcagtggctgtgtccgtgcccttcttgctgctctgtgtcctggggacctgccctccggcgcgctgcggccaggcaggtaagttagccgtcctctgtgcctttgggccataccatttcccgggaatctttggagccctcaggcgtattgaaaagggggcatccccatttcccgagtgcgcggggagattttttttttttttttttttaattcgggagggtggtgagaagtggagcaaaaatatatgtgtggaggcgcgcagatgcactggaagccttcggtcaaagcctgtttttctccttctgaagaggaatggggagaatgggaaaggggtgccctgcttctgggccccgctcctggttgctctcggatgagctggtccaaggctctcgggctggtgtctctgcgtccttcccagttgggttccgagagggagggggcggtggggattttcgtaggggagacgtaggactgcaggatggaggagtgagggtcagggtcattattttcgccttttctctccactccctcctttcccggttcctgcctggaggagacgcctcattgatggagctagagaagaggaaggaaaaccgcttcgtggagcgccagagcatcgtgccactgcgcctcatctaccgctcgggcggcgaagacgaaagtcggcacgacgcgctcgacacgcgggtgcggggcgacctcggtggcccgcaggtgagaggctcggtccgggaggtggtcctccgcgcctcccggcccacccgagaccccacgattgc

SEQ ID NO: 30623 - DNA, 623 bp, Homo sapiens
  chr7:96634291-96634914
  hyper
cggcctgaaacggcagggaccgagccagaacagggtctgatttttctttttctgtaccaccccccagtggggtggagcccaggtgtgagggttcgtcttccttctgtggtttcaataaaatacgtctagaaaaatccacggtgacaaggagctcccacaagagtgtagtaggaccagagtggcagggacgtcaagaaaggggggcctggatttaatgcgggggtggggtcactgcttctaagcacaggcaacctacaagggtgcaaagggattgaaagagagcagcccccagttggctgtttcaaggctgagatattggcaactggggctccgggatttggggcacgagctgcggcgggaagcatcggcggccggccgggcagaggcgcctccctccccaacggccccgggcgccacacagcgcggcccccggctgcagctccggctgggattggaactgcggaaggtaggcgaagaactctgcaagtcgcgcacacgccagtagaagccgtgcgcctgtgacgtcagggggcgactgaccaatggggaggcactgccctttggagacaaaccattcgactcgtggcgtctgcatcaagtctgaaagcagacgcgcaactttc

SEQ ID NO: 30624 - DNA, 805 bp, Homo sapiens
  chr7:96636033-96636838
  binary
cgcccttttccttgctccttccctccaggctgtaacccacgtttgacccggctggggacatttctgggccggaactggggagcgtgttttgcttcccagcccacgctgggcaggcagtggcctactttgcgtggggcgccccgtgctcctcagtgactcggagggaagctggcctggctttcgctctggttaaactagtaacagtcaggctctttccagtgggctttaaagtgtccctcaccttcatccctgaccgggccccctatctagcttttcgctacagtgttggctgctcctttgttcgtggaggggaagcaaagaacctcgggctgatggttctcagcacccgagggggacaaagttgccgtgagaggcgcagcctgctcgtgggctggtctgagctgttggttgtgttttgtttgaggatttggtcctcctcaggagagtcatttcaaaacatgccgaggatgcttgatgcactgagcttggagctggtgacatcaagtcaactggccgcgtaaacacctgggtggctcaagcacagcttcaggtactgttaagccgggcacaggggccccgctccgcccggacagctgccgccttgctgcgctgcgcaccccagagagcctccggcaccgcctccgctgcggcaaagcgggctgtttgtctgagggcctctggcgctcccttggcccagacgctgcacattgttcgggccagggactgggtcaaggagattacgcagacgctgggagcacacgggcagagtggaccaagagaggtcggggcatcatagggatttttc

SEQ ID NO: 30625 - DNA, 129 bp, Homo sapiens; identical to SEQ ID NO: 29430
  chr7:97680605-97680734
  hyper

SEQ ID NO: 30626 - DNA, 626 bp, Homo sapiens; identical to SEQ ID NO: 25907
  chr8:101118020-101118646
  hyper

SEQ ID NO: 30627 - DNA, 144 bp, Homo sapiens
  chr8:101821988-101822132
  hyper
cgctgtaaacgcacctttgcggaacacagacgacacaggaaagacgtttggcagtaatactacgacagcgaggggcccgggaagcccgcggaaacgcaggaggcggccaggagaggcagcgctacgcacatcccccccaccttc

SEQ ID NO: 30628 - DNA, 298 bp, Homo sapiens; identical to SEQ ID NO: 13023
  chr8:1026288-1026586
  hypo

SEQ ID NO: 30629 - DNA, 610 bp, Homo sapiens
  chr8:103135914-103136524
  hyper
cgtccgtgttcaaccagcgcctttcggcctctcccttggccccctccccagacgcccacgccccgcactcgcctcctgtggcctttccgggcagactccgcaggcccgggatccagcgggtgccccggcccccggccccggccccggcccccggggcgggatgctccagaggtccccgggccgccaggctcaccaacgcccccttctgcccagcgcgccccatcccgccggccccacgcgcctctgcgcggccctctgcaaagttgctctctccttttctgccgcccaccctcaaggtctgtaattttgttttgttttccctcagaggcactgggggaatgacagaggaattgacagggtgaactgcacccaggagggagctgctggaaccaggttcccagaaccgcgcgctcctcgaacccacccctgcgcccgcggcgcaccgagcgcacgggtcccccccagcagccgcccccggcacacccgccccggctgcaactccgactccgctctggctcccgagaagcggagggaaggcgctgcgactcaccgcctcggccgctcccagcgtctgtgtcgcttcgggcgaggcggcggcagcagcggcagc

SEQ ID NO: 30630 - DNA, 2917 bp, Homo sapiens
  chr8:104510995-104513912
  binary
cgcctggaagagctggcgagcccgcccagctctgttcacccggccccgccccgccccctccgggagggctctccgggcggcgcccagccccgagcagagcaaaggacggcggcggccacctccgttctccggccgctggtttctcgtctttcctcgtcctttcattgaacccatctccgtgcttcgaaaatctgactctaacccgatctcttcgcgtctccgcctcttctttctagagtgagcgccaaaaagggcctgacagacagaagcctttggccccagcaccggcccagcccgtctctagacgattcttgctcctttcaccctcacagcctccagtggtcgcttcatcttcgcaccctcccggccaaccctaactctcctcgtctctcctcgcgctgtctcgcgtcctcccctcaggatccttccgcacattctcagcgtccagcgcggtttcccacaacttcctcacgccccgctcccctcgccctgtccccgccctcgacaccacctgcgttccccactcgctccaacctccctcccccgctatccccacttgtgggcctccagctctctgcccctttcctggcccccatccctgacaccccagggacccttcctccctcctcacgttctccctccttccaggatcccgccccgacacttcggggccctcccgctacgcgcactctttctcctcaggtcctgacacctgggcgccccctccctgtcacccaccttcagctccagccctgactctcgggcgccttgccacccttacgctccccgccccgccccggtccctcgggcgcccccactcgccgcctctacctccctacctgctacacctggcacccctgcccccacccctgctcatactcttcccccgcccccgacacctcgggcgccccctcacacgctcctattctccacacttccgtccccgaaaactcgggcgccctctcccttcacgctcagtctctcctccctccccgcccggccccggacccagcctggagatcgcgctcgggaggggcggctgccgcccgcggggcgcccgcggtgcccgggcctgggcagcgaggaggtgacgccgcccccgcgggatgagcccgggaggcggaggggcggaggaggtgctggcggcggcactgagcggcggcggcgcagggcgcgcgggccttccgcgccgactccatcgacccaaggggcggcggcggtggcggcggctgagcgaccctgggccgggcgcgtgatgaggaggggccggcgccagaccccgctgcacgtcggagctcgcctggatccgggcgttggcagccgaagggccctggccccgggactctccgccgctagcccccgtcatatcttctccgctttcgcttctccactctagccgggggtggggtgggtggggttggggtctccgcgggggtttccggccccgcggcccgctcccgggtgtgcctggaggagttctccctctgtggcgcgcgggagccctgtgatgcgtcagccggcgggacggatgagttgcttctccgggaaaccgtcctcgcttcctcacgaccctctcggctcccgcctgggtgcccctcgggccggcagtactccgcctccgggcgctcgaagcgagttccccgggggcttgttcgcaggcaccccttcccctccgaggcggcgcgcgcgctcccggccctgaccgcggccggacacactcgcgccccggtccgcctgtcgccctcccgcctgctccctccagtcaccccacccttagctgtccccgccaccttactccaccaccctcccccgcctctccgcgcactccgcgtcccggcctccagttcccctttcccttgaaccgctcacttcacagcccttcgcccccgggaagaagaaacatttcccgaagcgcactcctcagccctccttccccacgcgctcgccctcccctccccctgcttttcttgggggaggggggctgtcgccttggattgaaggccattgatttgtatgtatttgtcccagcgctggaggctgccccagccgccgcgccggtgccgccgctgccagtggagttgcctccccgcttccctagggtggttcggctccaccaaacatgtcggctcctgtcgggccccggggccgcctggctcccatcccggcggcctctcagccgcctctgcagcccgagatgcctgacctcagccacctcacggaggaggagaggaaaatcatcctggccgtcatggataggcagaagaaagaagaggagaaggagcagtccgtgctcaagtaaggacctggctccatattcccgcctctctccctgccctccgccccctcgcccactgccctgcggccgcctgcgcgccccagttcgccgccctccctcccgctggcggcgcccaggccacgagggctgcggccagcgccggccgcccgggctgttttaggggtgtctgagagcaggggtgtgtgtcggggagggagggcgccaaggccggctgaggtgagggtggcgagccttaggcggtgtgattttccttggcgcctttccggatttcctcgctggtcatcttggctccggggccccagcgggactggggctgaacccaggctctgtgcgtaccctctcctttcccgccgcgctgaggcagtgactggggcacagaatccaatatggccgtgcacaggtgctccctggacggacccgggcgaaggcgcgctggcaggggatgcggacgccaccctggtcccacgcctccgcggggcggctctaccagcaacgcgggacagagcagggctgcccacagtggctgcgagcagcgggcggcggcgcgggctaggggcctaagctctgtcgcggtcgggtgggtgtgcgtccgccgccatcttccagcccctccccctcggc

SEQ ID NO: 30631 - DNA, 233 bp, Homo sapiens; identical to SEQ ID NO: 13025
  chr8:1078113-1078346
  hypo

SEQ ID NO: 30632 - DNA, 467 bp, Homo sapiens
  chr8:1132651-1133118
  hypo
cgtggtgagttgggcattgagctgccgtaggtcactgagtctgccctgccatcacgtctgcgctgccctgagacacggagctccagcacattctgcagagctcacactatcgagtccagcgcgcatgtgagaggcaggaagggagagtccacgggtcggcaactctgggcagtggcgcgtgggggacggactccgcagcctgtgggatcggcagcatccagtgaggtggagcggggctcaggggcactcaggatgcagtgagcgcacagccctgcggtggcatgggtgggagacgcgcaccatggagccggtggaaggtagacattcgagcgagctggggccagttcctggaagtgtgtcactgccagtgcggggaacgtgagatttactcacccagcagcgggacctactggagtgctttcggtaagagctgggatgacacaaatgcattcacgttcgattccctc

SEQ ID NO: 30633 - DNA, 931 bp, Homo sapiens
  chr8:11554731-11555662
  hyper
cggagagcccctgtccttctgtcaaacacacgcacaggactaacgagggggatgagtggaaaccagccgcaaagaaatggagtgggaggttcttctttaaaatccattccgttcagaacacagtgaacaccctttgacagaacaaggactatctagctattccaagctccgtgcctcccctttcttgagactgttgttacaagaaaccgatgatttctaacaataggaacctcccagctggggaagcggtgttcggaggggagcagcgctctcggtgggcacctgctgcagttggggagggagaggtggtcgtggaggccactttcccctccaccgccagggaagcctggtctgtctgaaggggtcctcgcctgcgccgaggatggccggacggccgggcctccggccccagcacagcccccctttcagaggaccccgggtcttcgcgcctgcggaccagaggctgttttcgcacttgggcttcgcgcttccttgacactttcctgtctctgctcgccgcgccaggtcgcggcgcctgcctgggcgtcttctccaactccgggtcacctcggggcgagggcaagggtgccgggccggtggggcgttccggccaccacggggcggaggagggagcggcctttgcggaaacgggccgagctggctcagggaatgccagatctctgggggacccaccagtcccctgatgtgcgcgttgaggtcttgggcctggcggcgctccagccgcgggtgtccctaccataaccactgtcctccccgggagctgggcaagaggagccctggactctgggttgacctcgtcccggtcgggttctctctcctcccacccaggcccggccgctttctggcgtccgtcctctcccaggaggtcctggcctctctctgcgtcgccaagtctcttgactcccagctc

SEQ ID NO: 30634 - DNA, 431 bp, Homo sapiens
  chr8:1246428-1246859
  hypo
cggagaaatgtggcgtgcatgaacggacaccacgcgagatagggaggattcaggatgtgatcttatttcagcatctttataagtgatcaagtaaaagtcatataattgaagttatctaaaccccccatacaccaaatgcgtccgcttcctggtctgtcgtcctgcagcctacagaggccgcgtccttccacatgatggccccgcacctggcactgtcgccgtccctcagtggagacaccaggaagccctggatcacagtgtgacacgttctgtactggggtataaatacggtttcatggggacacacaggagggagctgagtgtgctcctctggccccggagagtgctgagaggcagcgtaccctgcagaagagtggcagtcgctgagcgtgggggacggctcagtaggtacctcggccacagtcctgccc

SEQ ID NO: 30635 - DNA, 393 bp, Homo sapiens
  chr8:1269157-1269550
  hypo
cgtgtgcctctgcgtgtgtgtgggcatccgtgtgcctctgtgcccaggcatccatgtgtctctaagtgtgcacatgcatctgtgtgcctctgtgtgtgcgcatgcatccatgtgcctctgtgtgtgtgtgcatccatgtgtctctgcatgtgtgcatgcatccgtgcccgtatgtgtctgcgtccatgtgtctctacgtgtgcacgtgcatccatgtgcctctgcatgtgtgtgtgcatctgtgtctctgcatgtgcacgtgcatctgtgccatgtgcgtgtgcgtgcatctgtgtgtctctgtgtgcatctgtgtgtctctgcgtgtgcgtgtgtgtctgtgtgtctctgcatgtgcttatgcatccgtaccatgtgcgtgcatgtgtatcc

SEQ ID NO: 30636 - DNA, 117 bp, Homo sapiens; identical to SEQ ID NO: 13030
  chr8:1326617-1326734
  hypo

SEQ ID NO: 30637 - DNA, 759 bp, Homo sapiens
  chr8:133492249-133493008
  binary
cgcgtgctgaggacgggctggtctccccttcagcgggaaagcatccatgggtcttaaagccccagagacttctcagctccagccccgaccccaagtccccaagcgcgccgccgccgagggcgccccgagcggccgggtactcacaccaacgcgtggtaaagcagcgcccagccccgcggtctctccagggcgtcgtagatcaaagtttggatgcgccggtacttggcgttgtttctcttgactgggcggctcagcggggtcttggccaggagcccgatgccctgcggggtcctccgctgcccctcgtcgcggccgccgccctccagcagcagggtcccgtctttgtcggctccggccccgagcgccaaggtgacttgctccacgtcgccgggcgccagccccactttccgctcctcgtcgccggccgccgccgcgtcccctccggctgggttagccgccccgccgcctccgccgcccccgtcgccgccgccgccagccgcccccgccgccctgcgcgccttgagccccatctgcctcgcccccgccggccgcttcgccttctccgctgctgctctgggaagaaggggcgctcggggtgcgtgaacgaggcggcggcggcggctgcaagcccgggaactccaatgccatgatccgcgcgcccctccccacccccccccaaaagcaggcaaaggcgggccccctggggggcaggggaggccaggcagggggtcagggggtcacatcccgcgcgggtcagcc

SEQ ID NO: 30638 - DNA, 948 bp, Homo sapiens
  chr8:140715392-140716340
  binary
cggggaggcggggggcggggaggctggggggggccccctccgctggggccgccacagccaccgccaccgcgaggcggctggcggggcaggggcggcgcgggcccgggctcagccgagaaggcggacaggcacaggaggctgctcgagcgccggggccaggcgtccgggaaccccgacaccctgcgccagacccggccgaagcagcccgccccactgcgcagggccatgcagggcggccccgctgggtaccgcgcgggccttgctgccctccgcaccccgccccccgctcccgcgggaaacgcagggacgggaaccggagccagaaagcggccggagggcggccgcggggcccggtacccctgtgggtccagctcgcgggtggcggtgcccagcaaggagcctgcaggtccgcgcgcccagcggaacctgcttccccttttacccctcctcgccccctctcggtggtggggaggaaaagtttgcgaagtggcggtgtctctggagtcccctgcaagcggggagggggccgagcaggtgcagcgggaggggcagcccgctccccaaaggtccgcgcgcccagcgcccacccgggcgcgcgggtgcgcagcggggtccccgccgggcgtcggccggtgcgcgaagtttgctcggctcaacccccaaggcgcgggagcggggcgcggccccaggacggcagggaccgcgatggagcggcttcgggggcggccgggggacggcgcggtggcggtcggccagcccgctcctccgggggcggcgggcgcggcggcggcggcgggaggggtcccgcgggcctcgcggagcagcggggcggacgcgggcgcatgagccgcgcgggggtcggggccctccggcgtccgggcgtcccgggaggcggccgccgcgctggtctgccccgggcgctacgtgcgtgcgcgccgttgggagccc

SEQ ID NO: 30639 - DNA, 1301 bp, Homo sapiens; identical to SEQ ID NO: 13031
  chr8:142138208-142139509
  binary

SEQ ID NO: 30640 - DNA, 420 bp, Homo sapiens; identical to SEQ ID NO: 28220
  chr8:142243860-142244280
  hypo

SEQ ID NO: 30641 - DNA, 593 bp, Homo sapiens; identical to SEQ ID NO: 13034
  chr8:142262690-142263283
  hypo

SEQ ID NO: 30642 - DNA, 893 bp, Homo sapiens
  chr8:142317706-142318599
  binary
cgcgagtggtgtatcgctggttgaattctcataagttagagatagcaggcaggggttagaaggacaagacagggtcaggaccaggagttagaggcgccaggctcctctctgggtagagaaaccgaggaactgggggcggggaggactgatgggtgcgaaagcgggccgggtccaaatgaaggcgcgcgccccggggtgggggccggggtggggggaatgagggaggctgcagggctggggaccagggcaggtgcaatccggaaagaggaggcgggaaggaattggggggccctgaggagccagcgcaagccgggtgggggcacgtcccctcccccggagaaggtgcggggctggggctgcggcgcggacccgacctggaggccgaggctgtgcgggaggtgggggtggggaggctgcaggtgcccggcgcccaggtgcgaggtgcagggggcggcggggcaggcggctgcgggcggcaggccactcacctgtctcctccggccggggccgcgggggcggcggggcggccgggccgggccgggcaggggctacgggggcgcggagccccgggcgcaccggggtcgggaggcggctgcgggtccgggcgggggctgctccctcggccggccggccgggcggtcagtcagcgacgcgggcgcggagagagcgctgcgaggctgcggccggcgcgcggagacaacgccgctttatcgggtcggaaacagccgctccgcgccgcttccgctgacgcagcgccggcccctgcgcctcatgactatgcagcacccgccgccgcgggacggggattcggggggcggggtctgcgccgcgcgcgctcattggcctccgctgccgcccaccccgcccccgaacggccgccccgcccccgccgc

SEQ ID NO: 30643 - DNA, 142 bp, Homo sapiens
  chr8:142593579-142593721
  hypo
cggagcgctttctggaaagccgtggtgaagcatcacccggtaccagccgcctcgctagctcttgccatagcagcagcgtgaacaagcgtcccgccatttagtggctcaaaacaacaaggtgccgtggtttctcccgagcctc

SEQ ID NO: 30644 - DNA, 454 bp, Homo sapiens
  chr8:142630171-142630625
  hypo
cgagggtggtgggcgccccggagcgctggtggggattgggcaaagacgtcaacaccagggctgtggaaggaggcgaggggccttcaggtgccgagggtggtgcgcaccccgggatgctggtggggattgggcaaagacgtcaacaccagggctgtggaaggaggcgagggccttcaggtgccgagggtggtgggcgccccggagcgctggtggggattgggcaaagacgtcaacaccagggctgtggaaggaggcgaggggccttcaggtgccgagggtggtgggcgccccggagcgctggtggggattgggcaaagacgtcaacaccagggctgtggaaggaggcgaggggccttcaggtgccgagggtggtgcgcacccagggatgctggtggggattgggcaaagacgtcaactccagggctgtggaaggaggcgagggccttcaggtgcc

SEQ ID NO: 30645 - DNA, 209 bp, Homo sapiens
  chr8:142984443-142984652
  hypo
cgcaggtccgctctatcgcaggccgggcacgctttgctcagaggcccacactgcagaagtccagtctcagcagactgtcaccaccgcccatcgccaccctgggagagtgaaggccgtcgtaggcaggagacaaactgctggatgagctgagtgccagagaaccttgatgcgcaaacaaaggcgcggctgggtctggtccgccggccggc

SEQ ID NO: 30646 - DNA, 260 bp, Homo sapiens; identical to SEQ ID NO: 13040
  chr8:143662794-143663054
  hypo

SEQ ID NO: 30647 - DNA, 1309 bp, Homo sapiens
  chr8:144240980-144242289
  binary
cgcgggccccctactcaccgggcgccgagcacagcaggacggccagcagcgccaggccgaggcccttcatggctgcaggcagcatgctccgggtgggcctgggggcggcgcgggggcttggggcgcgggtcctctggggcgcaagcctggaggggagaagcatcggtcaggagaccccaaagaccctctcctttcccagcctcaggatgcaaccttctccccggaatccaaggccggggtccgcccggagctcgcagagccccacccccagccccttctccagagcgtccgccgtcacagcatccccgccgggagacgtctggcctctggggcgaggtgacagctcgagacgcctccgccccgcgccggcacctgtgtgggggagcggatggggggcgtcctcttctccccggggagctgcaggtgcgtccggacaggaatgagcggcaggggcgggagcgggtgggacctgccactggggggaggggcgcgtgccaggtccccacccccacccctgggctggggggccgggaaccccgggccgagtcccctcccttggccttccgcgcgcgcctcggcgctcaccgcggatggggcgtggagcgcgggcctcggggtcggggggctcactcacatcccgggggtgtccgcactccgggctcgggcggcgtgcgcggcgcggggagctgtgcccttcggtctccctgcggaccggaatccgggcgcagcctcgtctttcggggaacgcagccgcagacgcggaccccgcgcgaggggcggggcggagccggggcgggggccgcgcggggggcgggggcggctgggagacgcgcggggcggggggcgcccggggctcgcggcccccacgcaggtagctggcccgggccctccgcgcccccttgctggcgcgcgcgctccctcgggttcccgctccctccctcgcggcgccccctgctcctccccagcctccgcggccccctacccaggcgtgggcaggatcccttccccctctgcttggctgagatccccttggaatttctcggaagaacgtttactgcgaaaggaagcaaaatgcacaaagacgcagagagggggaggtacccggcgcggcgccacgcgcaggtccgggttcgcagacccctggggtcagactcccgccctggggccccgccctccccctcctccccgcccctccccaacctcatacccgtttccccgtttccccgtttccagtggctccaggccgttctcctcccctgagcatccatgaagacccccaccagaagccgcagccccaggggcttctgtc

SEQ ID NO: 30648 - DNA, 486 bp, Homo sapiens
  chr8:144328118-144328604
  hyper
cgcggggctctggcgggcctggcggctcagtgcgatctgggcaggcaggaagtggagtgagcacagccagcggctgggagcacatcccggaggggctgcctgcggcgggaggagcggcaggggccacgtggtgggggacggctcgccagggcgcgcacgcggtggcggcggcggtggaggcgttgcccgcctagctaggggcccgcggcctggagaggcgtcggttctccttccgcgctgaaggcggagacagcgacttcccgtggaggcaagccgtgggcgccgcggaggcgggggctgggggtcggcggaggcgggagctgggggtcggcgggggctgggggttggcggggagcgtcctcagggacaagtctcccagcacgcggccgcgacctccccgttgggggtctggagccaggagcccacgcgcgtcggatccggagagtctggtgggcgcagcctacgtgacagggtcggctcgggacc

SEQ ID NO: 30649 - DNA, 363 bp, Homo sapiens
  chr8:1471350-1471713
  hypo
cgggcccatggtcctgccaggggcccacagcatgaagatgtagctccctcacacacacgttgaatttggatttgcttgtctggcttctgctggggcgcaggatgtggggatggaaggaccaagacacacgacagagaacagcgtcacggggtcaccgtcccacttcccaccccgcgcctcacagcacagacgggggatttgccggcctcacgccggccgagccactgctgacttcacgcagccccagccatgcccccacgcagacacacggagccccaaggcgggccagatctcagggccggatggggctgtggagctgtgccttagacgggggggaaggactccctgccccaggccggcacc

SEQ ID NO: 30650 - DNA, 660 bp, Homo sapiens; identical to SEQ ID NO: 29465
  chr8:29387050-29387710
  hyper

SEQ ID NO: 30651 - DNA, 169 bp, Homo sapiens; identical to SEQ ID NO: 13047
  chr8:3509598-3509767
  hypo

SEQ ID NO: 30652 - DNA, 459 bp, Homo sapiens
  chr8:41553941-41554400
  hypo
cggccagtgggggcggcgtgctgagcttctggggcttgaccaggcggcaggtgatgcgggtgggcgctgcgcacgtccgtggcgggatcaccactcgcaggccgttgtggcgacttcctctcatggaaccaccccgggcgtcaaccatgaagctcaccagaaacctaggagtggggcagatgcacgttgggcttctgcatcccctctcggagatggagacaggagtccccgagccctgcgcccgccactcaccctgtatgcaccgggctggccaccgggctgatgttgtctgaggtctcggtggccgggctgctggggatgagggagtcctcatcatactctttagatgcctgaggagagagaaagggtcctcctgtcccacctcctcccgggccagctggatgccgtgccagggcgtggaggcttggaagaaccttgccgctagaaaccaggtgccac

SEQ ID NO: 30653 - DNA, 949 bp, Homo sapiens
  chr8:41754269-41755218
  binary
cgccgcctccctccctccgcctccctccctctcctgcggcggcggcggcggcgaagcgggggggcgggggcggggaggcggctcgtactgcggcggcggcgggcggtgagcggccgcggaaggggcggattcgggcgctcagcgcgggaaggcccgggggcccggccggcgcggcgaggctgggcgcactgggcgtccgcacggggtcatggcgagcgccgagcttccgcctttgcagagccccgcgccgtcgggcggcgggaacaaagcggccgctctaccccggaccccgctgcgggccgcagggccaagccgggggaagaggggaggctgcggcgggcggcgcgccccgcgcccgggcgacccggcggaccagcgcgcctggcggcggcgagcgcggcgacatcgcgggagcggaggctcggcctagagggcgggcggcagagggcaaggaccgggcttggggagcccccgggcggtggccgctgagggcccggacgcgctactcccgagcccggggtgcggttcctccccgggcgccctcggcgtggggcgcgcgcctccggggctccctggggaagagccggttccccgcgccgcacgctgggagcttgatttgcccctttcagaccatgtgggcctttcatttgcatatttccgaattatagatgaaaacgtatccaggatcaagtgaattgttttcctttgagtcctcttgggacagaaaaggaagtaggtccccgctccagccccgcccgtcccccatccccggcgctcccgcgcacgcctccctggggacgccgcctgcgcccgtgccccgcggggaagagctgcacttgggtccgcagcgccagcccagcctgcggcaggcggagggggcctagggctcagccaaccaccccgtcacgccgcacaggagccagccggggtccccggctcgggagctgcc

SEQ ID NO: 30654 - DNA, 494 bp, Homo sapiens; identical to SEQ ID NO: 24686
  chr8:49468683-49469177
  binary

SEQ ID NO: 30655 - DNA, 861 bp, Homo sapiens
  chr8:55379013-55379874
  hyper
cgctagaggtcaccggagcgcgctcccctcgccagggacctacactcttcccgctgctacattaggccgcattaacaaggatctggattcactttaatttaaaaggtaaaagatcttaggtctgatgggggagtgcggcgaggagagctcggaccgcgacgtcgcgcgcccgcttcgaggagttttgagctcttagcttggtgccggggcccgcccggcgctagatgaagtgctcgtttactcggcctaagccacggtgactcgaaggtgagaatgcaacttcgcggtgcaccggctcaggggcctgcctgccgcgccaaggcttcggaagttctcagcgggaccgctgggacaggctttcctctgagggaagaggaggggatttgtgcctctgcacgttctttcctgtggaggggaaaatcaaaccctgtagccgtccgctgccgggtagggatcgggcgatgctcggcgcccgagttctccgccgttgaggtggagcccggcggcgggagcttagattctctgtgggccacatggtctcagaagaggccccgcggcccgggggcgcccgcagtgtcgctggaccggcggcagcgctggccacgccgtgggctgggactggcccggaacgcgggtggcggttcggcctcggagacccgcgcagccgtcggagcatctccgtgcctcgctcaccaccttcttttcctccgcgtccggcggagggtttcggcgcgcggggcaggcctggagcgccgtgagcaggccggatgcgggatacgccagtgactaccagagccagacccggagcgcgctgccggcggtgacggctaggctgggcccctgtccttgggccgagttgcc

SEQ ID NO: 30656 - DNA, 1353 bp, Homo sapiens
  chr8:56014432-56015785
  binary
cgctcctcccggcccttgggacccgccagggcagtcccccaacccccgcccgccgctcctctcggtcccggcccctcctccgggtccctcctcctccctcgcccctcccgagccagggtgggagcgacggcagctggaagagaagggatgaggtcatcctctccctcggagtcagctggtggaggagaggaagcgggaggagggagcgcgcgcgaggggaggagaggaatgtgcaggtccgaggagcgccgcggcggccgctgctgctcctgctgctggcggcggcggcggctcgggcggcagcagcgaagccgggacggcgaggagcgcgggcggcgggcaggggcgcgcgcggggcgccgcgagcagcttggctccgcgcaggcagccaggcggcgctcctgccggccccaggcgcgccgctagcccggcccagcgcccagcccggcgggcggcgggcggcggcggacggcaggcgagccgacgcaggagcaggaggagggggagccgcaccgcctgggagggaagccggggcgaggcgaggaggtggcgggaggaggagacagcggggaaaggtgtcagataaaggagggctctcctccggtgtggaggcatcatggccgctaaatcagacgggaggctgaaaatgaagaaaagcagcgacgtggcgttcaccccgctgcagaactcggaccactcgggctcggtgcagggattggctccaggcttgccgtcggggtcgggagccgaggacgaggaggcggccgggggcggctgctgcccggacggcggcggctgctcgcgctgctgctgctgctgcgccgggagtggcggctccgcgggctcgggcggctccggcggcgtcgccggcccgggcggcggcggggcgggctcggctgcgctgtgcctgcgcctgggcagggagcagcggcgctactcactgtgggactgcctctggatcctggccgccgtggccgtgtacttcgcggacgtgggcacagacgtctggctcgccgtggactactacctgcgcggccagcgctggtggttcgggctcacgctcttcttcgtggtgctcggctctctgtcggtgcaagtgttcagcttccgctggtttgtgcacgatttcagcaccgaggacagcgccacggccgctgctgcctccagctgcccgcagcctggagccgattgcaagacggtggtcggcggtgggtctgcagccggggaaggcgaggctcgtccttccacgccgcaaaggcaagcatctaacgccagcaagagcaacatcgccgcggccaacagcggcagcaacagcagcggggctacccgggccagtggcaagcacaggtctgc

SEQ ID NO: 30657 - DNA, 460 bp, Homo sapiens
  chr8:56364032-56364492
  hypo
cgagtctgcctggaactggcctggagaaggtgcgttctgggccttaaagagtccgactacacctatgccgtacaggcccccagaatgcagcagtactgccttggaccgccggatgcgccagcagacaacggtgaagcggttctggcggtagcagtaggacacgcgctgcagggcgttgtcctggacactctggggcacgatcagcagccccgggtacctgcggtagatggcatgcatgcggttgaccagagaaatgcggaaggattcagacttggcccggctcaggcggctgctcagggggcccaggccaaggcactgatagtcgcggcagcaagccctttccaccaggaggctgctcatggtcatgccgtccgagggcttcaaggctgaggacggggtcagtgtgctgggctccagctcttccgacactgagatctcctcctcctggtcctcagagggc

SEQ ID NO: 30658 - DNA, 182 bp, Homo sapiens
  chr8:56364865-56365047
  hypo
cgcggccaccgggaaggagcggaacaccaccttctcccccaccagggggtctgtgagcatccccgtgaagatgacccggtacgtagtgaggaagagggcgccctcagctgggagcagtgctggccaccccgcactgcccgccctcgcaccctcctcacgcccatccggtggcaggtagatgc

SEQ ID NO: 30659 - DNA, 290 bp, Homo sapiens
  chr8:56602062-56602352
  hypo
cgcccttcccggactccatccggctgcgcggggcagagttctgcattgcagaggccgggctgtggggacccaggccagcaccactcagggagcagcttggtgggccccgttcccgggtgtgagggcaggaaaactggctgaggagtcggcactagaagccttgacagggggcgggctccaggtccagccttgtcggagttgaccgagggcttaggccagagatgaggaagaaggacccagaaggtcccgggcgggcacagaggcagcgcccagggaggtacgcgctggcc

SEQ ID NO: 30660 - DNA, 674 bp, Homo sapiens; identical to SEQ ID NO: 25941
  chr8:57069543-57070217
  hyper

SEQ ID NO: 30661 - DNA, 114 bp, Homo sapiens; identical to SEQ ID NO: 13054
  chr8:61156160-61156274
  hypo

SEQ ID NO: 30662 - DNA, 768 bp, Homo sapiens
  chr8:61822259-61823027
  binary
cgaaacagagtggaggctcctttaatcttgacagcccgaatgctacaggggtcacagcacatctgctccggaggaaagacaaagggcaaggtggggccacggtagcccgcgcggggctcttggcgggctgggggcggcgtgcgccgagctgggcgcgagtggaggggccggcggctttgtgcgcccccgccagtgcccgcccgcagccccgccgcagcgtttaaccttgacttctccctcctcgcttctggcacgggaggaaagcctgtccagatgggcgtcctgagtgtgacgacgtcccctcccgcccccgcgctctcgcgcagatgtcgcacgctgccctgggtcccgccacaccgcccaccaaggccgcgggccctgcgcgcccggggcaggcgggcacatcccgcaccctctccgcccgcccgcccccggcgcccttcgcattcccttcttcggccctggcccctcggaccggagcgcccaggccagctcagggtgttcccgtgggggtctccggaaacaatggtgagcctgtgctctgctggctggggggcgtcgtccccgcagctggcgcgtccctccaggctgagcgcccagcgccccccgcggccctaagttgggccacctggcggggcgctgcggccgggccgggcggggacatctgaggcccgacagacccgcgctcatggacaagtgtcgcccgcgccgggcagggccgtggagacagaccacgcagtgacaggccggaggcggctcgagggatcc

SEQ ID NO: 30663 - DNA, 438 bp, Homo sapiens; identical to SEQ ID NO: 29478
  chr8:65499649-65500087
  hyper

SEQ ID NO: 30664 - DNA, 908 bp, Homo sapiens
  chr8:67873342-67874250
  binary
cggaggcatcctgtaagaggcttgcgagactcttaccaagccaccccggctttaaacgcctctccagccacctgtgaaccgcgaaggagccggctttcgcggcggggaccttgccaccagtaccctcgcgggccgaggtcgttctcccggtcggcttcccgcctcacccgaaaaggaattagagcatctacccaagacggtgactggcagggcagatcaaggtgtcctggtctcggccccagccccgcggtgcgccccgcccgcttaccttgaccgggtgcaggtagccatcgccgcgcagggcgcccaacccggcgtccgccggcgcctcggcgtcgtcctgcaggctgcgggtgagatgcgcgatgtaggtggtggccagcagcagcacgtccagcttggacagcttggtgtcgggcggcacggacggcagcgtgcgctgcagctccaggaaagcgtgccgcagggtctgcacccggctgcgctcccgcgccgcattcgccgccgccggccgcccgctcccggaacgcgagccgcccccagggcccgccggccccggcccggtccgcccgggacgcgagtcgcggatggcggcggccaggggcgcgggctcggcgctggcgctgagggggctgcccgctgggcggccgcggtccatggcagcttcccgcgccgcgcgcgctgcaaaggaccgaaggtgcggtgaggccggggggcggtcgggcttaacccgagaggcgcagccccctggttctccccgtgcgcccaccagcagcccaacggggctaagggcgctctcaagcgagctcgttttgcctgggacgcgatttgcttccggacgtctggggagagttgcggaactccggagttcttgggcttcctagaaggataagaagaggcgcagtgcc

SEQ ID NO: 30665 - DNA, 913 bp, Homo sapiens; identical to SEQ ID NO: 24696
  chr8:67874755-67875668
  binary

SEQ ID NO: 30666 - DNA, 942 bp, Homo sapiens
  chr8:72754306-72755248
  hyper
cgagcagcggccttcctcccgcccgttagaagggcgctgtgctggagtacgaacccggcccagagaagccactcgcccttctttgtcacttaaaaccctgtcccgacgcggatctcacgtctagacctctgtctttaaagcggatgtagagcgcgttctaaccgttccctaaccattgtgtcaccgcgaaaggccggggctgtgtggaaccgtcccgcacgtgtgcgatgaatctggctccgctgagaacggatccgtgggctgtctggcgcgggctggggcagcagccgagagttagtctacagagctagggcccgagggtggacctgcgtccgcgtctcgtcacgaaaggaagctctttttggagaggcaaaacgtggtcgcccagatccggcgcagctgtagccgtgggcgctgtgcagtgacagccacacccgccacctgtcacgatcacagttccagggaaaggggaagggtcaaggagaatccagcggaaacttcttcccatctcacgagctctcccttctctccgtggcccccaaacactcgcatttaacgaataatcccatcaagtgagttccagtccgatttaagcggtggttccacatagtctgttggctgcggaaacttctttggtgtcagagtccggtcttcccgagaccacgaatggccatgtctgtaaatcaaaaagaacgtgagatattagagagaaacgattgtctcaaaccgaaacagctctcctacgcgaaccccagatattcctgacttggagtagctaagattttatcagcattctgggaatttgcatgtcctctctctgaactaagattttcattttactggaggttgataatccgagacttgccatatccgttcacgcttcttcctggactttgcccgcaggataatttggtgaaactcatctgactttgaggttctgtc

SEQ ID NO: 30667 - DNA, 814 bp, Homo sapiens
  chr8:72755373-72756187
  binary
cgggagagctggcagatcagagagggactttccagataaatcccatctggggaaacgttactatcttccacaagcaatttttctaaaaatgcaaatgctcttttatagagctcggccttccctcctttaagaaagggcttgccgattcaaacctgcccgactcagctggattaagttgggcaagggagatttgccgtcagtctgcaacctggtggcagatggagatggaaccaagatttaccctggaagtaggatattagtcaatggctgtcactggggtacaatgttcagaacgatgcaaacagacacggagggttgattcttcttcagggaaatggctggccactcccttgatttgggagaaactaaactggccttctcgttcccagtcccagaacctccacccctttcgaattcttcccaacgggctgaccctgcccggcgcccaggagcgccctgggtatctcctggctgctctcccgaatccttgcgcgccgcgcccctaccaggttcactgggtgcacgtagccgttctcatagcggtcctcctgcaacagctgccgcaggtgagcgatgtaactggaagccagccggagcgtgtccagcttggagagcttagtgtcggggggcacccagggcaggctggtcttgagcctggagaaggctttgctcagcacgcgcatccgggcacgctcacgggcgttggccgcgttccgctgcgactgcttgcactctgcggctgagcccttggccgggaggggcttcttgccaccaccgcccgcgctaccacctgcgccgccgcccccagccacac

SEQ ID NO: 30668 - DNA, 984 bp, Homo sapiens; identical to SEQ ID NO: 28239
  chr8:73449197-73450181
  binary

SEQ ID NO: 30669 - DNA, 934 bp, Homo sapiens
  chr8:82192863-82193797
  binary
cgcctggtggacagcaaaggctttgatgaatacatgaaggagctaggtgaggcacccggcctggcagcgcctgcaacgtggcgtgttgtgcggtcgtctgtccctaggtccccgtcagcgtgccagattctggggcaggagatgctcggcggcctacccccatcccctcccatcttccccaccacgcggccgttgggtgcagcgcgcgcagcaccacgcgggcaggcggcgaggagcagggagcgtgcgcgcctcttgcccgcccgcgggccgcaagattccggaggtggtccaccccgtggtccacctacctctgcttctttcccttcgcccaaacggcagcccttccgcattgcttcctgtcctttagcgcgcgcacccgtcacctcacgctgcacttctttcgaccccctccaggcgaccctgtatttcccttttttccccctttactcatccttccccttcctgccaccattctgtctctcccatttaccccatcgtggcagcacccactcccctttccctccctgtcgcatcttttgttccctgtggcgcgcaggtcaccctccgttttcttcatggggacgcggtgctggcgcgcagtttcccgcagaaatcctgtggaggggtctgagtggcgctacagcttcagcttgcattcctctgtcagccccgtctcccccaggtcctctgctcgcccttaccagttgagccgaaccctttggattggtaccccatggaacaccagggcccccgagaagcgtggcgctggcggtgccgacctgctgctggcactgccgggccggggcgccgcagtgggcgggtggcctgtgggaggagcgcaatgaggcctgggggtggccgtgtgttgccatcctggcctctgccacttgagggtgaggaggaaggaggcagtgggctttgctggaaaacc

SEQ ID NO: 30670 - DNA, 627 bp, Homo sapiens
  chr8:91803656-91804283
  hyper
cgtccttaccttgcgctttggctgctcaggacaaacgccctgccattcgtcccttctctctgtccggacgccctcctccatccctgcacttggggccgtcgtggggctggtaggggtccccaggctatctccagccgtggccgatggccgtgccgggggcagagcccgctcccctccgcgcgttgctacgtgcggggatgacatggatccagacgccgtcaactacgggaaggaggaggcgagagttggagcgcgtgggagcgcagaggccggaggagggagggggggacaccgagcgcggagagcgcggagagcgcggagggaggcgcgcgcgggagcgaacaccctcccggatccagagcccggcggcggcgaagcagcagctgcggccgcgcccttgccagagccggtgcgtccgcctagccccgctccgcctgaggccgtcagggctcccgaggatggaagattcccaggagacatcgccgtcctccaacaactcctcggaggagctcagctctgctctgcacctgtccaagggcatgtcgatcttcctcgacgtaagtacagatggtgggagctgggcggttgcttcccagcacctttcttttccccgaaaggaaggggttc

SEQ ID NO: 30671 - DNA, 1072 bp, Homo sapiens; identical to SEQ ID NO: 25956
  chr8:91996920-91997992
  binary

SEQ ID NO: 30672 - DNA, 919 bp, Homo sapiens; identical to SEQ ID NO: 22970
  chr8:9763158-9764077
  binary

SEQ ID NO: 30673 - DNA, 982 bp, Homo sapiens; identical to SEQ ID NO: 22971
  chr8:9764090-9765072
  binary

SEQ ID NO: 30674 - DNA, 1300 bp, Homo sapiens
  chr8:99956460-99957760
  binary
cggctgcgtctctataacagggaaacctcgagcaaacctgtgcctttaagactcagttgctatccaaacagaagtaaacagagtggaccattagcagacgccgggcgcggaggcggagccagggcgctgagggccccgcgcggcggcgggacgcccgcccgaaggggaggcggggccgctactaaagcccaagactcccggcctggggcagcctggggagggacgcgggcggggacggagctcggcgtgcttgctgctggagggtgatggccctgcaaggctgtgggctccgacctcaccgggagtcgacagcgagaggttcgccgaagagcgaggttctgggcgagcgctgaacgccggccccaagcaccccgggtctttacacagtccgcgtccacagactctgacgaagacgtggatctgctctcgctttagctgctcgcggtcctccagatcatgtccgcgactcctgcgactccgcgcggaaaaaaaagtttgccaggcgtggactcaatgacctttccaagctgtgcgcctcgctgcctggaccgggtctgagcgcggctgcccaggttgacctttctgcgggaggtgagtgttcgctctgggaaggggctgtagctgccctttggaaggaagggtttgggggtgtaagaggcgttcagattctcggtctggtgtgccccaaattcagatgtgaaaatagatcatggggatgcaatcccagggcactgtatttctcacttccttgggtccctggcacgcgactcccagctaacacccaaccacacacatttctacatactgtttcttaattttgttttgggatatttaatctaagcggtcagcaagacttcttataaaagctggtctacgtacactgagatcaaaccccacaatcccatggtgtttctgctcctgccctagcaagcctgggtcgacttgtcccggggcagccgcggcagcgcagcgtggacgggcccggacacccggtgcctgcccagccagcgacgctgaaggcacatttcaagagggaaatagttcagtcctcggtaatttgtcaacctcgtgctggctttaaaattctcctcccaccttctagtcctgactgagggggcccaaaagcaaactccccgggggcttaaacgctcggattcctgagaaacggcaagtgagaaaggagttgcagttgtacgaagaaggagcgaggaaaaggtgtttgtggagggagccccggatctgtcttcctacctgttagccgagaacaaaagggggctggcgtttcccgaagcgaaagggc

SEQ ID NO: 30675 - DNA, 648 bp, Homo sapiens; identical to SEQ ID NO: 24708
  chr9:100503340-100503988
  hyper

SEQ ID NO: 30676 - DNA, 703 bp, Homo sapiens; identical to SEQ ID NO: 13065
  chr9:101569830-101570533
  binary

SEQ ID NO: 30677 - DNA, 923 bp, Homo sapiens
  chr9:113390-114313
  binary
cgcgccccttggaccttcgccccaggccggcgcagcccagcttcccgggcaggctccacgctaccggggtccagtgcgcggcgacgaagcggagagctgtgtccagactccggagagaaactccggctccgcggggcggcgcggggcggcgcggggcccggagctgcccaactccgccgcctcgggaaggcggcttcgggcccgcagggagccccggggagggttcccggttccgccggcagcggcgtcgaggggtgcctgggctcctggggaccgcgagaggaaaaagaacggaaatcgcaccggggaggaaggacgcgcagaacgcccccgtgaagcggggtgctccggtcaggcgtgcgcgggagcgcggtccgggggagtccggcggcgccgtcgcgcgcactcggcagaggcttcgcgggagaacgcgcagcccggggcgtggggcggggaactgcccgcgcgaggctttcggcgcgtctgggtctcggcgagagcaaagcgcgtcctggcaccgggggcggcggcgcagaggccgggaggaagaaatccgggccctggcccaggtcgggcttccacccctgcgacccgcgagaggcccaggcgggaaaggcggcgagtggcgtcagcggttccgaaagcaaacctggcccggtgctactgcccgagggtcgccgggcgcgtttcctaattcccccgagtctggaaaacggagacttccgtagcgtcttcttcagtgcgtgctgcgagtgctgaaggaggacccggtgcctggacgacccggagcaggggaagcactcggccgacgctgtcgctgtcatcggcgtcattggcgggcaggacagtggggcgggtaaggggcctccccgcgcctcccggcccttcgcgctcggcgccagctctttggctcccttccctgc

SEQ ID NO: 30678 - DNA, 289 bp, Homo sapiens
  chr9:117887-118176
  hyper
cgctcgggccgccgccgccctcgatgtgctctcggggaagcgcaaccccgccccaccgggccacctgcagccccggctggagcgactgctctaggaactgctggctcgccgcctcctcctcgtcttcatcttcctcctctcccaggacatcgattttaccgtcttccccatcggagtcccggaggctgcgctgcggtgtggagcgaaggcgctcagctcttggcaagttcatggcggagcaggtgcttcagtcgcaggggatgtggcggccggatcacctggccccggc

SEQ ID NO: 30679 - DNA, 88 bp, Homo sapiens; identical to SEQ ID NO: 13067
  chr9:119976921-119977009
  hypo

SEQ ID NO: 30680 - DNA, 716 bp, Homo sapiens
  chr9:124990438-124991154
  binary
cggattcaggcgcctttcgagggccagtcggagggaaacccggagcaaaaagagagcgagatcggggcgaaacgggaccaaaaagagaaaagagaggcgctcaaggggaggaaaaagcaccctccagcccctcggcgcgccgggtaccggccccgcgtcgggattctcagcgctgcgccggcacaacccccggcgcatcggcgctatcagcgcctattcagacggacaataccggcctcgcctcctcttgattcgcctgtgtctttactaaatcgctttttgagaaattcctccaacatttgcataatgtgttcccgctttccgcgaccccccccccccgctcgcgcgcgcgctcccacactcacaagcacacactcacaggcgcaccctcgtacccctccttcctgcaaccgcccgccaccctgctcggcccggctgggtcccggaccctgcccgaccccggcccgggccgctcacccagtcgttcgccggctcacctggtcggtggcggggccgccctcggccggcagccggcagccctcgggcaacgccggggcggcgttctcatgcttccagtacatgggccggggaacctcgggctcagcgggcgcgcagcgcggagagctgcgccgagggggaccacagccgcagtgggagcagaggctgctgcaggagcaggaggagagccgaggcgccggccccgccgccccgggccc

SEQ ID NO: 30681 - DNA, 484 bp, Homo sapiens
  chr9:128651916-128652400
  binary
cgcacaaaagtaaacccaaagagcccgcacatgacacggaggctgctccatttacattaattatgcagtcagggcggtgagaattcgctgtcagccagcagggcgggggcgcgccgcggcggggagcggggccgggccgcggggcctcccggcgcgaacgcgggagggggagccggatcgccgtccgccgctccgcggctccgcgctgcgagaacaatgggcgcgcccgacgcccgcccgcgctcgcgctgcccggcgcgccccgaaagccgcggggcagagcgccctgagcggtcccccgcgccggcggccccggctgcgccccgctgtagcagctgaccttagccggctgcggccgagagaacgcgcgttgcccgccgaccttgtgccctggggtcagcacccactgcaagtcagaacctctccgtggtcccaaagttagtgcttttccaatccaaaccagaaacttgatttgaggcctggc

SEQ ID NO: 30682 - DNA, 511 bp, Homo sapiens; identical to SEQ ID NO: 28259
  chr9:129485513-129486024
  hyper

SEQ ID NO: 30683 - DNA, 724 bp, Homo sapiens
  chr9:134151944-134152668
  binary
cgcgcggccgcgccaccctcgcggcagaagcctgacttcctgccctccggccttccgcacgcgctccctccgggccccgcacccgcacccgcccggcgcggtcgaatcaattgcagagcagtttgtgttcacccggccgaggtcccggcgccctcggggcgagcgccgacccgcggcttccaggaggcgagctcagggctccggccgctcgccggtgacgggggagcgcggcgcgggtccccgtcggcgcccactcgcgggcgcgggccggacgtccccacgcaggggcgccgcgtcccttcgccgctgtcgctgccggccgccgtgcagggtcccggggctgcgctccggccgccgccgcctgcttcgccgcggccgccgaggacctggtgggaggtggaagggacagcgcgtcaaggccagcctcaaagttaagccgaactttgctgcggggggcgcgcgggggcggcgacgcgtgtgcgctgggcgcgggctgcggagctgacggcgcagctctgggcggtctccccggaggcggtggcccccgccccccgcgcccgccccgtcagtggcggccgcacgaccgcgcgcaccagcgaataatagccgcccgtgacatctccgctgataccgtcccggacgggcggggtggggggcgagcggctgccgctgcagggggcggcgagcacttgccctgctctgtccccaccgccgcgccgccagc

SEQ ID NO: 30684 - DNA, 351 bp, Homo sapiens; identical to SEQ ID NO: 13071
  chr9:137620493-137620844
  hypo

SEQ ID NO: 30685 - DNA, 395 bp, Homo sapiens
  chr9:137623301-137623696
  hypo
cgtttgcgaggcaaccctgcgccttcctctccctctgcagccagctccgcctccaggggaaggtgcggatgacttggagggggagttcactgaggaaacgatccggaaccttgacgagaactactacgacccctactacgaccccaccagctccccgtcggagatcgggccgggaatgccggcgaaccaggataccatctatgaaggggtgagagggtgcaggcccccgttccgggtggggttggggggctggtggggcatcatgggggctcctgcccaagagcctcctcaggggtgggcctctacgggcagctcaagtgttacaccctattcccaaaactttatttttaaagagacctcggtgcctcgaatttgctctgaataacgtgtgtatc

SEQ ID NO: 30686 - DNA, 473 bp, Homo sapiens; identical to SEQ ID NO: 13074
  chr9:137642188-137642661
  hypo

SEQ ID NO: 30687 - DNA, 305 bp, Homo sapiens; identical to SEQ ID NO: 13075
  chr9:137645508-137645813
  hypo

SEQ ID NO: 30688 - DNA, 359 bp, Homo sapiens
  chr9:138662649-138663008
  hypo
cgggacagggcgggtgagcggcggtacctgaagttgccggtgcctctgcccaggtatggcgtgtgcctcatcgggctgaagcgggaggacaacaagagcatcctgctgaacccggggccccggcacatcctggccgcctctgacacctgcttctacatcaacatcaccaaggaggagaactcggccttcatcttcaagcaggaggagaagcggaagaagagggccttctcggggcaggggctgcacgagggtccggcccgcctgcccgtgcacagcatcatcgcctccatgggtgagccgggacaggcgcgcgggactccctgggcctgctcctttggcgggagaccaggcgggacacc

SEQ ID NO: 30689 - DNA, 454 bp, Homo sapiens
  chr9:139739050-139739504
  hyper
cggccatggagaccctgccggagccaccgccgccggagtccgctgtgccgcgcgcccggacccgcgaagccgagccacgccgccgcgcccgctccaagagtgcgccccgcgcgcccccgggcctgacgcccgcgcccgcctcgccgccggtgttgccccgccgagggcgggaggcccagcgtgcggcgcgggccgaggcatcgccgcgccgggagcccgcgtacccggcgctccgcgcccttgccaacgagctgcatcccatcaagttgcagccgcagcggggcggccccggccgcgtcgcgcccctgtgcgccgccgcgggccgctgcgcaccgcccgagccacccgcgggtcccgccccccacgtgcgctgccgcctggacatcaagccagacgacgcagtgctccagcacgccacccggggctcgcggtcctgcgggcccaccgaggccgc

SEQ ID NO: 30690 - DNA, 395 bp, Homo sapiens; identical to SEQ ID NO: 28278
  chr9:21031427-21031822
  binary

SEQ ID NO: 30691 - DNA, 553 bp, Homo sapiens
  chr9:21968174-21968727
  hyper
cggtgactgatgatctaagtttcccgaggtttctcagagcctctctggttctttcaatcggggatgtctgcagagggcagaaagaaaacaggcgttagaaacctgaggtcaaagatgtgtggcacatcccgccctcctctcttgccgtccctaccggcattgaaatacttatggataaagttctcgcaatggcttcacgtgcatgtacccgccgccaccgctctcccacacctccctggtccagcagctagtccactgcccgcctggctgctccaggcgcgccgaccgctcaagcgctccaggtccacccggcggagggcagagaaagcgcgaccgcgcggcccgcagggttgcaagaagaaaacgagtgttatataatgagtctcagtggttgctcacaatgccaggcgcgaaggcgtgaagatgtggcctttcccttcccgcatccccaggcatcttttgcacctggtgcggagtgagccagccagcttgcgataaccaaagggcgcctcaggctctggcgctcctcggcggaatcccgtagcttccctac

SEQ ID NO: 30692 - DNA, 1512 bp, Homo sapiens
  chr9:21974169-21975681
  hyper
cgtgaggcaccgcgcccggccgcttctgaataatttcgatcaaaatttatattcgatatttattccaacatacaccacagatttccactgataatccctcctagtaagaaagataagctccatccaggtatctgtgaattggaggctaagtagtcccagcacatcttacatttctttaagactccctttttatcccaaacgttcgtaaattttgtatctgataaagagcatacttccatctaatacaaatatgttccccccttcagatcttctcagcattcgagagatctgtacgcgcgtggctcctcattcctcttccttggcttcccaagcccccagggcgtcgccaggaggaggtctgtgattacaaaccccttctgaaaactccccaggaagcctcccctttttccggagaatcgaagcgctacctgattccaattcccctgcaaacttcgtcctccagagtcgcccgccatcccctgctcccgctgcagaccctctacccacctggatcggcctccgaccgtaactattcggtgcgttgggcagcgcccccgcctccagcagcgcccgcacctcctctacccgaccccgggccgcggccgtggccagccagtcagccgaaggctccatgctgctccccgccgccggctccatgctgctccccgccgcccgctgcctgctctccccctctccgcagccgccgagcgcacgcggtccgccccaccctctggtgaccagccagcccctcctctttcttcctccggtgctggcggaagagccccctccgaccctgtccctcaaatcctctggagggaccgcggtatctttccaggcaaggggacgccgtgagcgagtgctcggaggaggtgctattaactccgagcacttagcgaatgtggcacccctgaagtcgccccaggttgggtctcccccgggggcaccagccggaagcagccctcgccagagccagcgttggcaaggaaggaggactgggctcctccccacctgccccccacaccgccctccggcctccctgctcccagccgcgctcccccgcctgccagcaaaggcgtgtttgagtgcgttcactctgttaaaaagaaatccgcccccgccccgtttccttcctccgcgatacaaccttcctaactgccaaattgaatcggggtgtttggtgtcatagggaaagtatggcttcttcttttaatcataagaaaaagcaaaactattctttcctagttgtgagagccccaccgagaatcgaaatcacctgtacgactagaaagtgtccccctaccccctcaacccttgattttcaggagcgcggggttcactaagtcagaaaccctagttcaaaggattccttttggagagtcggactgctctctccttcccctccccttcccctcctgcgtgtaaaacggctgtctggggcaagggtttctcagacgtgtacattgcctggtataagagcagactctgaaaagatgaggtttatttaatacggac

SEQ ID NO: 30693 - DNA, 200 bp, Homo sapiens; identical to SEQ ID NO: 13077
  chr9:2876419-2876619
  hypo

SEQ ID NO: 30694 - DNA, 842 bp, Homo sapiens
  chr9:2933129-2933971
  hypo
cgctgccatgacgccggctgcagtggggtacaggagtaggtcgcgggtcctcaggtacagactctgaggtgtgcagcccctggagcctgcacctaggagcgcccccggaacctgctgccctgagaactcacccctgggagccccgggaatagggctgggcccagccaccccctggagggagagtagggaggtgaggcacagaaaatgggcagagagggtccccaagacagaactgggcccagggcggtgccgcgcttgcacgcggagcatgggggccgggcccgagacatggaactggggccccgcttcaggggcccagggcaagaagtgggagcggcacccacttcgaggacctgcccagtggcatgaccactgcgcccaacccgccgatggcgccaagttcctgcgcctcaggaagaggctccgtatggggccgcctgaggccgtatccccaggacctgccccacattaaggtgaccgctaagccagacaatcctgatggtgaggccccgtgcctgccatctgctcctggagacgccccccaaccccaggcatggccgtcagccggcgaggcggtactgaggcagggggcgcgtcctggtcattggagagtttcagcccagtgggtgaaccagacacactgttcaagggggcagcggttagtaagcaggacgagggggagccccaggccgcagggagaactcgtgacaacgtcacccctgccccagtcgtaggcccgggcccagtgaggacatgaagcccccgcctcaggctgcaaggaggcgccaccagggctgcaagctccacggagctggtgggacctggagacaggcgagaacccc

SEQ ID NO: 30695 - DNA, 2374 bp, Homo sapiens; identical to SEQ ID NO: 27341
  chr9:37025701-37028075
  binary

SEQ ID NO: 30696 - DNA, 798 bp, Homo sapiens; identical to SEQ ID NO: 25994
  chr9:37034135-37034933
  hyper

SEQ ID NO: 30697 - DNA, 2450 bp, Homo sapiens
  chr9:37035890-37038340
  binary
cgggctgggggcggggggtgttggtgttttgttgttgttgttgtttccatttagagggcttgttttgtttttgtttgttttctgtgagttttcatttttccatgggatattcttttgtttcgggtgttttgcgtgttgttttttcgtgggattgattttagcgggttttgctctgtaagtcctggtctttggggtgagttttgattttgtgtaattttgtactttgtccttgtaggctgtctttttgtgtgtcgtttgtaaggcttttccttctccgcggtgtttagatgtgttttgatttggtgtgagtgggtgtcgtctgtgtgtgtgttgccttagggaatttcgtgttgtgtgtgttttgtttccttcgatttgaattttatttttttgaactgtacgttttggtgggggatcgggttatattttcatgtgttgtctttagtttttgtgtttgtgagatgcgctggtgagagtttgcgtgtgtattttggcttttgtggggctttgggattagggaggggacatcagccgctactccgttcctgcccgcacccatgaagggcagaggattaggccaagcatcacgaatcgtaggttcgccgtgctccgccgcttcgcgctctggacgctcgagaccagcgggaaacaaatgtggttcccgagggggcgcccgctggtcgtcaaaacctcgcgggcccggaggcgccgctgctgggtcagaatcgcagagcccccctcgcggggtaccgaggcccagccgccgtccccttgcccaccctctcccctgtgagtcggtctccccttgcgcctggccagcatgcttcggaccgtccggactcccgcagcgttggcccaaggggcggctcccctcggcggagcaggtgacgaaccacttcggaggacacggaattgacactgcggccctagagatacgggacaaggggccagaacgcggggagtctaggctcagatcggagtcgggatcccgggaaaatcccccatctcccttgcccgcagccctagaatcccagaaacccaactccgcgcagctttcggtttggagagcccgccctggtttgcaagcacagatacatgtgcccacacccgaacacacgcagacaccgccagagagcgagacagcgagcgggcgcctccgtagcagcggcctgcggggcggaaccggagctggcgccgcctcaaggggaaaccgaactgtagtgaccggaaatgtccccaggacagaataagccattccttctgtccacgttgccaggacttctccagctcaacacaccttggtttgtttaatgttacacgagggagaagatttagaggcagagacacatgctggctcaatcggcgaggaaatacgagcagagtctaaacagaaagaaatatggaacggggggagactagactgtggggaaggcaaattggaggcccagaaaaggggctggtgcggaagctcctccaggcccctgggcgctctggcattctgtgagaaggagaaagcagaagccgagaacagagagtgacaggaaaagaaaagagacgcagaaggggttggcctaggcacgctgcgagctgccctccagctaagacgctgcgggcaagggagggggaggccgacatcgccaggcgaggggccaaggtcgggctctttaactcagccaggaaacatcgttgggggctccagggctcgtggagcccgaactggggctcatttccggcccgatgcccctcttccccagacccctagcccggaatccagcaaaggctgggccatcgccgtccgccactgggcctccctctgtgcgagccctgggagaagcctcagggaacgactctggcactggggctcggccccggagctagcgcagagcgtgggtgggagtcgacatccaggcaggaggcaaagaagaggccccgccctaaagccgagggcccagttcttcgaaagcctgtggccggagctggactcacaggattcggggtccgtacagcgcgcacgtggtaccgcatcttcggcaggcggcgcccctaatgcccagccccgccctgcttcgtttgccgggcctgaactgtgtcagcattgagggtggacgccgagtcgcggcgagttggtcccttgcggtataaacttggggcttccctaggggcggtgccgggatggatgggggcgcctctccacctgcaactcccccagcgcagagcgcaaaaagtgcacatcgcgggccagccgtcgcctcggggtttcaggcggcgcccggggcaaaaaggagctgaggattggtttgggtcaaaacacccatttcagttggcagtggggtcctctgcgcctacagggcttcgagctccgggtgcgggctcactggggcaccatgtgccagcgactcgccacccggaaatacttgggttgcgctagaatacgcaatgggtctgtgttc

SEQ ID NO: 30698 - DNA, 878 bp, Homo sapiens; identical to SEQ ID NO: 13082
  chr9:503936-504814
  binary

SEQ ID NO: 30699 - DNA, 888 bp, Homo sapiens
  chr9:504833-505721
  binary
cgggctggccccgcgcggagccgacttggcgcgcgccggggttgcgcggcggccgtggcggtggcggagggcagcccccgcgggctcccgctcgtgcgggtgaacccggcggcctcggggcggtcctgggggggggtccgagaggtggcgtcggccccgcggccgtcggagtttggcgcgctctgcagcggcggcgctcggccggtctggaggagggagaggcgcgccgggcacggagcagcgagaaagttcgggccgggccggccggcgggagggtgcgggcgcctggctaccccggcccggcgctctgtccctcggatgcctctgggcccttccctagcccggggcggaacgggggaccctctctgaagcggctctccgtggagttggatgttgcccttcgcgggagggagtggcggtcaagacccctttatcctcggccccagaggggcaggtggcctcgggtcgccctccgccaactccgaggtggcttcggccggggctggagggcggggaggcgggggaggggcgtgggcgctgcggcctctggggcggcccaacccggcgcgggcagcgtgggtttccgaggtcccgcggttccaggtcgagggaaggtgtaggggccctgaagcgggctggtccccgaatgttgcgttttctgtgccgctttgggcaacacgcagtggcgctcgcggcagccacggctccttgaccgttcatctccttcacccgggtcccgtggaactttcagaggcaactgttcttggtggctcttgcgggtcagcacgagccgtgctgcacgagcgtgacctagtgaaggccttgggcgagttggcgttaacaatttatggcgtccgccagcgctcgctttccgcacgtggcctctgc

SEQ ID NO: 30700 - DNA, 183 bp, Homo sapiens; identical to SEQ ID NO: 28284
  chr9:66494093-66494276
  binary

SEQ ID NO: 30701 - DNA, 162 bp, Homo sapiens
  chr9:71223806-71223968
  hypo
cgatattagcccgaggctgcagcagcgcatccccgggcgcggcgcccaccaacactcacagtgcaagggcttggctccgagggggctgggagcccgggcgccctggagtgaggggggccaggagcgggctctggaggctgcagaggcgactctggagaggac

SEQ ID NO: 30702 - DNA, 938 bp, Homo sapiens
  chr9:96720648-96721586
  hyper
cggcggcggcggcggggcctcctctgctcaggcactgccgcgttggcggccgaaaaaagagggtcccagagaaggggaaccccctccctgtcgaggacaccgaggcccagagaggggaagcctcctccccagtggggtgcagtctgggattgcagtccccaccccaggggcgcagctgccagcccaacgcctgggacacaccccctcccgaggcctctagccgccgccgcgaaaatcccggaaaccgtcctgctcgcggcgggcgcagtggaaaaggtgacctcagcgccccgggccagccgccctccctagcagccgggcggcgaggggctccgggcggcaggggttcctcggcgccgcccggtcgctggatgaggggccctcggagcgcagaaccggccccctccccacccatgttctgcccctcagaccctacagcccctttggaggctgcgggacagggaggggaccacctcattcccacaaccgaatcccctaagcattcaggtgtaggttccagaaccacctcccctccacccacacccttctcctactccagcgcctcccagacgggattgtgaaatggctccgcgtgcgaacgggtccaggagccgttcgttgtacagaggaggaagctaagtctggaaggagcactcgagcaggctcagcggccagcagccagcggcagggggatcgtgcatcgcttggagggcgctgggctctcctccatccgcctcagccgtgggcagtttgtttccgctcccacttgcagcgggtctgcatcttaattggcaaaacgaagttggggccgcggtggagcggaggcttcttccagaacggtcagctcacctccggatgcggtcgtccgagcagccgcctgcggggggtcccacgccctctatctaacaggttgacgtccagcccctaggggcccaggc

SEQ ID NO: 30703 - DNA, 257 bp, Homo sapiens; identical to SEQ ID NO: 13086
  chrX:34149228-34149485
  hypo

SEQ ID NO: 30704 - DNA, 200 bp, Homo sapiens; identical to SEQ ID NO: 24732
  JH636052.4:5118715-5118915
  hyper

SEQ ID NO: 30705 - DNA, 191 bp, Homo sapiens; identical to SEQ ID NO: 13087
  NW_001838286.2_1380778-1470498:80846-81037
  hypo

SEQ ID NO: 30706 - DNA, 1229 bp, Homo sapiens; identical to SEQ ID NO: 13088
  NW_001838286.2_1380778-1470498:81101-82330
  hypo

SEQ ID NO: 30707 - DNA, 296 bp, Homo sapiens
  NW_001840306.1_6328-82586:33382-33678
  hypo
cgcaacgaaaccccagacaacatcctccgttttcacaagagcggtgcctcccctggtcaccactgcgacccctgcttccagctggcacgagccacacacactgctcatttttctcagcgcctgattgtctgtctcacacttctgccccggccacccccgcaccgcacgcagactgaataaaatatgccagataaccctggcagggacaccggccaccaatgaatttaactttcctacacataatccgccaaggatgctgcgaggctatttagaaggttttgttgttctcgctgcgc

SEQ ID NO: 30708 - DNA, 280 bp, Homo sapiens
  NW_001842432.1_1-179261:102996-103276
  hypo
cgttcctgatggaggccgtgggcctctttgtcctcgcttaccaggcagcagctccagccattctcagccccaccggtgggtgccgccttccatcaggccaaagactttccgaaactgcccttcttggggccgggaggccgcatcctaggcctccctggggcctgcggcgctggcagcagctccatgttgaggtcacctacagccggcaccacggcacgctggaggtccctgagccgggggttgggaggccaatccatcggtgcagtgccgggtgcaggcc

SEQ ID NO: 30709 - DNA, 59 bp, Homo sapiens; identical to SEQ ID NO: 29553
  chr1:101703569-101703628
  hyper

SEQ ID NO: 30710 - DNA, 603 bp, Homo sapiens; identical to SEQ ID NO: 24737
  chr1:101774910-101775513
  hyper

SEQ ID NO: 30711 - DNA, 2283 bp, Homo sapiens; identical to SEQ ID NO: 22736
  chr1:108506290-108508573
  binary

SEQ ID NO: 30712 - DNA, 109 bp, Homo sapiens
  chr1:109772100-109772209
  hypo
cgcggagcggataaagttggaagcagagcggtttgagaacctccgagagattgggaaccttctgcacccttctgtacccatcagtaacgatgaggtaggtggctgtgcc

SEQ ID NO: 30713 - DNA, 87 bp, Homo sapiens; identical to SEQ ID NO: 13094
  chr1:110167965-110168052
  hypo

SEQ ID NO: 30714 - DNA, 2280 bp, Homo sapiens
  chr1:110610350-110612630
  hyper
cgacctgcagaactcgctgaggcccaggctcctgcagctcccgccgaagactcaaagccagagtggacataaacgccgtgggcaggaccccggtgaggcctcggtgcccttcttgggggttctcagcgttggcccagaagcctcagcccgggtctaagaacttgggactctcctcgactttggcgatcggccgggtcatccggctcagggcctcagcggcagcgggcaaaactctagtaggagtctcttgccgagggcgtgtttcgacgtcagagccaaactcgggacagactagccaagcgcggacggcgcgagagtggctggcagcgccagcacgcagcctgggttcagagcaaggctgggcgctctcagcaaagggcggcctggggctgcgcgggcggcggactgcaggcgggagaagagcgaggtgcgccaggctctggggcgcgcaactgcccagcctcgtgaaagatcgcgccgcagatggggcgcagctgcgcgctcactcgtgtggactggaaacgctccgagccggttattttaaaaaccgggaaataaggcgggttccctcttcgcccgccacttcccaccaagtaggctgtgcggccctgggggctgactgtcctcaagcagccaggctccaccgcgcgccgcgctgcgccgaggtccgctctgccgcagggacgctggcagcccgttgaacaccggcaagagcgccagaggctagcggccgccaggatctctaccaggctctgctcgcacccgcctgcctccctttcgtttggcctgtcctccgttcaactgaaatcgttaattttcttacccccttgttctcattttgatatattctacgctttaaacatgctccgttttcttttgtttagtctgctccctccctctttgtcctttcccccttctctagttatccgtttcgttcgatcttgctcctgctttttttattcgttcgttcctcatttattcattttagttcatcccagctcgccgactgccatttaccctctcgttctcgccgcgctctccgttgttttgttcaatttcccttccccttttcttggttgtcgctcgctttctttggttttctttctcggtatttcgttgtcaaggccacccttgccgtcggatcccggggtgctgggtttctcccggccgctcgttccgcaccagcgctctctgcagttcgcgcggcaccggtgtggtccgggggcccgagctgtcggtgccggatgcggcgcgcctagcagggacgcgggcctgggggggtggctcctgcccgacgcggagcgctgagccaggccgggtacctgtctctggcggtgctcaccgcactgcgcggcctctgccgtctggctgggatcagaggagccaggccaactgcttctcattaagtcccaactgtggtttttatcaggaaagcctctttcaaagggcacagacacgaagctccgcggactcgttcatttcctccgttgacccacacacacctccccgccctcccctacacattcccaccgccccggctgggcgaaagccggagatgcccggccactccgtggaggcccgcgaggcgccagccgggcggcggcagggggttgaggcggatcttggaggatccagttctgggcctaggctgcgggatatggcagcgcagataaggtgggtgcagtgcggaagccgagacgccttacaggtcatagggtgcggcggacggccgcagagctgccgatcagcctgccaggcccctgccttcaggcgcattctcggatgccggcgcggtccagccggccttagcacagggcaccggcccgtgagcccgcggcgccagggggttaggctgcccagggctgctcctgactgcccagcggtgatgatccagcgcggggaagccaagactgccagaagggcggctatcatagtgcataacggcagggaggccagcttagtatgagaaataagaatacagttattccgtcttgaggacagccctggcattgcacgaccagtcgcggccagactgtgccagtctgccgcacaggcagcacccttcctgtgaaggctaggcccggggaggagagacgggccaagaccaggccgcagtccccagccgaccccgatttgaccactctaggttgaggcccagcctcagggccctcaaagggcgccagacacaaaagccgcgcttcttcgtcaggtctcagtgtggctccacagccctcggccgggtctgggcttcagggtaggtggcagttccagtccaacttc

SEQ ID NO: 30715 - DNA, 1278 bp, Homo sapiens
  chr1:110626374-110627652
  binary
cggttccccctccgccaaaaccgtatgatattttagggaagcccctctttattcattagaaatcggctgctttgagtttggcccctaaaaacttgcctcctgccccggaagatttattttattaaatggtccacacctgaaagtaattgagtctcggcgtgggtgcggggactgcggagggagggtccaggcgcggcagcggcagtggcggcggctctcagctcctctccagcttcgcaccctgtgcctccgggcgccctagtctccccgccacgccgcgacctttcctcggcctcccgctcccgctttgcggaaaggtccggggcgcgtgtaggggaaggagagagaggtatgtggggcgagcgggagttgagcgtggatgtggggaagggggtgcgtcctgcgtcgcccccgcaccctcgcgtggccgggcgcagatccccgtgcacgggtcctccgcacacccttgccagcccgcagggattgttcgccgcgttggtgactccttcccaaaatgggaataaaagatcgaaatagctagtaagcatgcaaagtttattgtcaacctcaagtctctataaaaccagatcaaagggaacaggcgtttggtttcttcccagatcgctggggggcctcggggctcaggaagccccaggagtccagcccgctgccgctcactgcgctcttctctccagccgggtccaagggctcgagcatcgcaacctgcggcctgagttggccccgggcgcacgcgagggaaatggatgcagtgcccgtgaacttggggcctgaataattgataacaacccgctgggtgcccgtcgcgcggccaggcctgcggggagcggagccggaggcagcaagcaaaggaaacgcacgagccgggagcgcgggcgcgcggggccacgaaagaccgaccgactgtccgacgggcggtgggacaagaggacggatgctgtgggggggccccggaacccgccgccacaactcgcggcccacgcgggtcgcagccgccagccgtagggagctgccgagcagcgacgttccgcattccatcgggttcccgcgccctactgggcttgtgcggcgcagtgcctgcgtgtgctttcgttttctcaaggccattctgataaaacatacgtgctggttccctttcttttctcagaatgattcttcaaggcgaatgactcgaaatggagatttcttctaacaccgcgtgatcaccgacaacttttgcaggacgggatgaaactcctctgggtttccagtcagatgtgc

SEQ ID NO: 30716 - DNA, 570 bp, Homo sapiens; identical to SEQ ID NO: 24745
  chr1:110672768-110673338
  hyper

SEQ ID NO: 30717 - DNA, 348 bp, Homo sapiens; identical to SEQ ID NO: 24746
  chr1:11131713-11132061
  hypo

SEQ ID NO: 30718 - DNA, 818 bp, Homo sapiens; identical to SEQ ID NO: 6654
  chr1:113498720-113499538
  binary

SEQ ID NO: 30719 - DNA, 118 bp, Homo sapiens; identical to SEQ ID NO: 13098
  chr1:116219361-116219479
  hypo

SEQ ID NO: 30720 - DNA, 109 bp, Homo sapiens; identical to SEQ ID NO: 13099
  chr1:118172998-118173107
  hypo

SEQ ID NO: 30721 - DNA, 301 bp, Homo sapiens
  chr1:118173578-118173879
  hypo
cgcccagaatctagggagctggagcctgtcgggaggcttggtttcataccattcctcacccagctcagagcaacgcaggctacctgttctggccatgactggatcacaggtctcccagctcagggcattttcaccacagcaggccatcccagggccaccttttacttaggaagtttccgaaaatgggaaatgtccctaagggaaaggcatgagaagctggagtcgctgcctttctttcgggtgcttccctggaaaaaaggtatccgaggctatagtgttcgagagagagagagatggagac

SEQ ID NO: 30722 - DNA, 614 bp, Homo sapiens
  chr1:119522312-119522926
  hyper
cggttagcccagggtccccacatttctccaggatgtaattagagctaagaacagccgccatccctcagggttccgggtcccgggtttccagggtcccgggtttccaaggccccgcgataaccccgggcgcacgcggcgcgatgcggcgaggcgaggcgaggcggtggggccagcgcggagccccaggcgcgagaacaggaactcgggctggcacaccgaggcctcgcagccaagccgcgcctgacccgttcgccgttccggccccgcggcgcctccaaggccgggccgaggggccgaggggccgagggcgggcagacgcggccacggcctaattctgacttctgaaggtcaccgaaactgcgctgtttttccagagatgggttgaagagaagagatgcaatcccagttccttctgcggcgaaacgggatctgaaattcttggagagggggaagaattggacgttttcatcgtgcgtggaggaaaattgggggaggggaagtgagtggcaagtaagggggttaactgcttcccggaccctatccggagtttaaactacacgctcccagctgtgggatagtaaagagaacgcagcggtgaggggattcggaaaatc

SEQ ID NO: 30723 - DNA, 927 bp, Homo sapiens
  chr1:119528626-119529553
  hyper
cgggctccgtgcgatctggggcctcccaagagaaaacttccccgggacaggacgtctgccacgcgcagctaaacaacttctgttttttccgccgtggggaaaataaaagaaccttacaaattctaaggcgtcataacccctgcaagaacttctaactgtatgaaggcccacgcgagattttgacaatagataaatgagctgaggaaatagggtctggccagcgaagggaaacacacagtagccctgggtgcctttctggaatgcccacgcaggggtccgcgtggacaagcacttgcattcaaatacaggaaaaggcttggacggtcgaaataaatctccttttaattttcttttcatcgactaataaaaataattccccagcactaaactcaaataccgtaacgggccacaaaaacacggagaattcataaaactctatctctgcaggtcacccgctaatcgcattattattagcctcgggagcatggaaattgaactgtcactgcctaaagagaaaatgtaagcgacagctgtccctcctctgagttggacagctttgtggctgagatccccaagctcctgagccccagaccgtctctatcccagtgcaggccgctgccccctccccgggcttgtcagcgtgtgaagcggggtctactccccagctctggctgttcagcaggagcaccttccagcatggttttagaagtccgggctggaaagcttctgaaaccgctaaaccaagttgcgagcgttgtatgtgcgcgcgcgcacactcaagattcttccgacaacagctgttcccccgggctgtttttgcacagttgaaatcttggcacttaacacaaaacgttaaagttggcttctcccctcctagggttctgttaaaatacagacatgacatcccccctgctttttacatgttcc

SEQ ID NO: 30724 - DNA, 847 bp, Homo sapiens
  chr1:119548592-119549439
  hyper
cggcgactttgaatccaggccaagaaaagagaggtacaccaatattgggattctgtattttgggggtctaattggtgagtacagaacaaaggagtggagaggaaggcaaaataacctaagtaatagaaaatccagccatagactgcagtggaaattaatggcacgagaagccttgggggcaaaggtaaggggtcgcagttgaatgccacccgaactcatccagatgccgctgcgttcaagctctcccagcacccgcggccgaagtaaataacaattctcttaatgctaaggcagcaaggagagggcactgcgaactgcagacttttcttctaaggatgaagaggacattataaaactgcacactacctccctaatggcccattcgtcctagctctgtctagtgaagtagagagcagaaaaaaacatctagctctatcaagttgaaaacattttcacattcaccttaaactggtgaagcaaacgggttttccctttactaacatcgctcttgtttttccatttagtctttgggaacgtagcctcaatcttaaccgcgtatgatcgtttccactgcacctgtgcgggagagacaggcgcatatccccgtggcgtcggatctctaaattatctaatctggcggctgcgtacgactcagggaaagccctggccgcgagctttttcaccaggcttgagctcagcagccgggcccgcagtgttgccgccagtggggaggcagggaggctgtcggcgcgccggagccaggcgggaaagggactacagccgcccgccgttgtagcgcaggaagcgggcggtgccaacacacacctcgcagctctgcacgttcttc

SEQ ID NO: 30725 - DNA, 877 bp, Homo sapiens; identical to SEQ ID NO: 22738
  chr1:12123137-12124014
  binary

SEQ ID NO: 30726 - DNA, 717 bp, Homo sapiens
  chr1:12251334-12252051
  hypo
cggggcaggcggtgggagaactgtgcccacgtgagggttgaggaggtggtgcgtgggagagtggtgcgcatgctcgtgctgcgaggagcaggactgcggggaggagcgaaactgctgggaagagcgggactgcggggaagagcgggacttcggggaggagcggcactgcggggaggagcaggactgcagggaggagcgggactgtggggaggagcgggacttcggggaggagcgggactgcgggggacgagcgcgactgcgggggacgagcaggactgcggagagtagcgggactgcggagagtagcgggactgcggagagtagcaggactgccggtcctgcccctggactctggccggtgttgtgtgtgccccatgctgaggcggtccgccagcctcctggagatccgctgtctgagagtgctgggctgtctgggagggcagcgtgggtgtggcggaggcaggcgtgaccgtttgccgccctctcgctgctctagaccaggtggaaactcaagcctgcactcgggaacagaaccgcatctgcacctgcaggcccggctggtactgcgcgctgagcaagcaggaggggtgccggctgtgcgcgccgctgcgcaagtgccgcccgggcttcggcgtggccagaccaggtacggggtggggctcaggtccttggggacgcccatgggcctctcctttgtagacatccttgcagtgtcac

SEQ ID NO: 30727 - DNA, 184 bp, Homo sapiens; identical to SEQ ID NO: 23675
  chr1:14125492-14125676
  hypo

SEQ ID NO: 30728 - DNA, 77 bp, Homo sapiens
  chr1:150947664-150947741
  hyper
cggcccccggtccccgccagggtgggcacattcccacttccagccccacggggcgcgggcggaggagggtgcagccc

SEQ ID NO: 30729 - DNA, 603 bp, Homo sapiens
  chr1:152080369-152080972
  hyper
cgcggaattttctgtcgcgctcctggcggcgcagctgctgttcttccctttccggacggagctgctcttcctctaggatttttctgtagcgttcttggcggcgcagctgctcttgctccgtttcttggcgcagctgttcctcctcacggaattttctctccagttcctggcggcgcagctgctgttcctcctggaggaattttctctctcgttcctgacggcggagctgctgttcctcttcgcggaattttctgtcacgctcttggcggcgcagctgctgttcctccccttcctggagcagctgttcctcttcacggaattttctgtcgcggtcgtgacgcagctgttgttcgcgctcctggcggcgcagctgcggttcctcctcgaggaattttctgtcacgctcttggcggtgcagctgctgttcttccctttcctggagcagctgttcgtcttcgcggaattttctgtcgcgctcctggcgcagctgttgttggccctcctggcggcgcagctgctgttcgtcctccatgaattttctctcttgttcctggcggcgcactttctgttcctctaaacggaattttctgtcacgctcttggc

SEQ ID NO: 30730 - DNA, 369 bp, Homo sapiens; identical to SEQ ID NO: 13109
  chr1:152192964-152193333
  hypo

SEQ ID NO: 30731 - DNA, 77 bp, Homo sapiens
  chr1:153438391-153438468
  hyper
cggtggcgccaccgagcacccacctcgccagagttgcgaggcggttccacgtggctgggccgtccttgccggttctc

SEQ ID NO: 30732 - DNA, 457 bp, Homo sapiens; identical to SEQ ID NO: 23677
  chr1:153540038-153540495
  hypo

SEQ ID NO: 30733 - DNA, 71 bp, Homo sapiens; identical to SEQ ID NO: 24763
  chr1:153937085-153937156
  hypo

SEQ ID NO: 30734 - DNA, 193 bp, Homo sapiens; identical to SEQ ID NO: 13111
  chr1:154179803-154179996
  hypo

SEQ ID NO: 30735 - DNA, 107 bp, Homo sapiens
  chr1:155160940-155161047
  hypo
cgttgtgcaccagagtagaagctgagcctgatgcagagcctgaggccgaggtgacattgtggactggaggggcggtggagcccaaggcgggcctgttgtccggggcc

SEQ ID NO: 30736 - DNA, 81 bp, Homo sapiens
  chr1:156010521-156010602
  hypo
cgtgagccaccgcgcccagccagtccacagaatttaacttgggttgcacctggactggacaccacctagtttagctctctc

SEQ ID NO: 30737 - DNA, 186 bp, Homo sapiens
  chr1:156030658-156030844
  hypo
cgtgagccaccgcgcctggcctcaagtgggtttctgaggggctatttcttgctcattagttgggggaccggccctcaccacagattccagaagcccagcaatgcacactcagccctcagtgggctgtctctgaaggtcctgtccctttttcgcttcccccccgctggagctgcttctcccgcttgc

SEQ ID NO: 30738 - DNA, 933 bp, Homo sapiens
  chr1:156405338-156406271
  binary
cggggccaggccaaaaccaggctggaacccgccggcagggcccccgaggcgcctctgcctgctctctccgttcttgccggcggcagcgattcggactcccgctttcgacaaagtctcagctccgcagcagcacccggcgcggactcgctgggcgcgcggactgagctccgggtggaaccaggaccctcgcgccctcgccctcgccctcgccctcgccctcgcccgagctggaccaccgcgagcaccgccgacgccagccgcagagccgcgggtgcgcggggaagaggaaacgaaagcgcgggctccggagctgaggtgagaagtgagcagaaagtgaaaagagaatccatcggaaacagataaaaaaggaaaaacaaaacccactcgaaaagaaagaaaacgttacaacaaaaaggataaagtaacgctaaatgaaataaaaaggagacatactaaaaacgttaaagttgttaaactaagtgatagaaaaggcgaagaaacaacagggctaggaaagggctccgaggcgcccgcagggaagggggccctagacggggcgatgaggcttttgggagcctccggccgcgggcgcggcggggtccggcgggtgcgcagcggccggggctcctccgcgcgctgcccgccgccggcacccggctcgggcgaagagccggctggacggtcagccagccccacccacagagagtcgcgggagcccgagggccgggagctgcgggactccttcgcccccacctctgccgcccgccgaacccgaccccgggaaatcctcctagccgccgcctcccagcgccgggtctccccgagcgtgtgctctcggctgcgaggccctgcatgcgcagtgtctgggttcgcggcgtcaagcggagcctcggtccagcctgggcagccgagagcgcggggactgctgaacgc

SEQ ID NO: 30739 - DNA, 304 bp, Homo sapiens; identical to SEQ ID NO: 28305
  chr1:156468615-156468919
  hyper

SEQ ID NO: 30740 - DNA, 391 bp, Homo sapiens
  chr1:1566262-1566653
  hyper
cggccgcggggactcgcgctctgatccaaggggcccgacactccccagggctgtggggtcccgtcccagcagggagttagttggggggcgtcccaggcagggtctgggggccgggcgcacgcaggcggggtgacgagctgggggggcggggggcggtgtcggagcaaatacggcggccaggcccagcctctcgcgctttccaagaaccgcccgcggccgccgccagctgcttggcgctgaccccgttggccgggctgccgtcaccctgggcccgacgccggcgcggaaaacggggagggacgagacagacacaggccggtctggctcggaatctcctgctcctctgcccaatcccccacccccgccccgcgggacgccggtgcccggtctc

SEQ ID NO: 30741 - DNA, 407 bp, Homo sapiens; identical to SEQ ID NO: 23678
  chr1:1566669-1567076
  hyper

SEQ ID NO: 30742 - DNA, 73 bp, Homo sapiens; identical to SEQ ID NO: 29577
  chr1:158710971-158711044
  hypo

SEQ ID NO: 30743 - DNA, 334 bp, Homo sapiens; identical to SEQ ID NO: 23682
  chr1:161367769-161368103
  hypo

SEQ ID NO: 30744 - DNA, 296 bp, Homo sapiens
  chr1:161450250-161450546
  hypo
cgtggatgctccaatgggacggaggcccatggcaggttgtgaccagtgaagggtggctggtggcgagctctgctgtgacagcttccattggcatttgccatcagtgcataggtggttcagtggtagaattcttgcctgccacgcaggaggcccaggtttgattcctggcccatgcagcacgccctcccattttggtgctgcagcagcaccaaggcgtagctgcgttcgcctctgccgcctccttacactcggggcacgtgagcttgtcctgcactggctgcgctcccacgcatgac

SEQ ID NO: 30745 - DNA, 765 bp, Homo sapiens
  chr1:166135450-166136215
  binary
cgcgccttgcaggtgatgctttggatacagcccatcctgcagcccggtgccggcacggcgcggcgtggggcagcgcgggggcccgcgcgggcagccgggggcgcccgtcacgccggcatggcgacgcgccgctcgctcccggtcagactcagctcgcacctaggagcggggagccgccgggcatccttggggaagccccctcctcttgcagccgcgcggggtccccgctgccccgacgtccgcccacgcccgccccctcgctccggcagggcgcgcggagggtgcactcctaggaggcggcgggtgccctcgccggctccagcgcccgggcggagggcagggaggggagcggcgctgcgaggaatggtgcccaccccgggccggagccccccgcccctcgccggagaggaggaggcggcagcggcggcggcatggagccgggggagggcggcggtggcagcgcccggtctgtctgcctccgcggcggcagcagcagcagccgccgccgccgccgccgctgcatgaacctctgcaccacggctgccccccgcgtgcagcgcacccagcggcgggcgagcgggcggcccaagaggcaggcggaggcagcagcggcggcggcggcgaccggagctcccgccggccccgccccgtagccggaccacaccgacactcctcggcccggctgcctcggcccggggggcgccaggaggctgtggcccggggtggagagccccaacggctggagcagcacaggacgtgctccgc

SEQ ID NO: 30746 - DNA, 608 bp, Homo sapiens; identical to SEQ ID NO: 24778
  chr1:169396301-169396909
  hyper

SEQ ID NO: 30747 - DNA, 953 bp, Homo sapiens; identical to SEQ ID NO: 26039
  chr1:170630196-170631149
  hyper

SEQ ID NO: 30748 - DNA, 330 bp, Homo sapiens
  chr1:170637507-170637837
  hyper
cgaaaccagattgtcctaataagaccttttgttggaaacacatgtagtcataaaaaggtagacggaaagtcaattagacacgcgcgcacacacgcacacattcacaagccggtgctaagtgtgcacccggcgcagctggctcccgggccgcggcgggatgcaaatacaaaacagcgacgcgggaaatcgatttgtcacaaagggagaggtgtaaacgcagcgcaaaggaattgcttgcccaatctaccagccacactctctcgggaccttgccccgccaacttctcttcgccagagaaacgcccaggagagcgggaacattttctagggc

SEQ ID NO: 30749 - DNA, 557 bp, Homo sapiens; identical to SEQ ID NO: 28312
  chr1:170640136-170640693
  hyper

SEQ ID NO: 30750 - DNA, 247 bp, Homo sapiens; identical to SEQ ID NO: 23429
  chr1:171554936-171555183
  hypo

SEQ ID NO: 30751 - DNA, 382 bp, Homo sapiens
  chr1:173638662-173639044
  hyper
cgccgccaggtgatccaggaggtcccgcgagggggcaacggacacttcagggcaccagagtttgctcttcggcctgaattccctagggaccttctgcgatcccttgcggctgccggcggggtaggagaccggtgcgcaaagctctggacagaagcagtgtgaggacgctgagattgaagcccactcccctccagccctgcccgagcagcctggagggaagatgtccgtctaccccatcgcactcctccccaagtgcccaccccggcccacagcgccaggacccctagactcaccacacccgggccccggcctcctcggttaccatagcaacggcgcaacacgcgaggcagcgcctcctcctgcgccgcggttccggcagcgc

SEQ ID NO: 30752 - DNA, 475 bp, Homo sapiens; identical to SEQ ID NO: 29585
  chr1:175354887-175355362
  hypo

SEQ ID NO: 30753 - DNA, 344 bp, Homo sapiens; identical to SEQ ID NO: 29586
  chr1:175365604-175365948
  hypo

SEQ ID NO: 30754 - DNA, 403 bp, Homo sapiens; identical to SEQ ID NO: 23690
  chr1:175372314-175372717
  hypo

SEQ ID NO: 30755 - DNA, 384 bp, Homo sapiens; identical to SEQ ID NO: 23691
  chr1:175375048-175375432
  hypo

SEQ ID NO: 30756 - DNA, 161 bp, Homo sapiens; identical to SEQ ID NO: 24786
  chr1:180925259-180925420
  hypo

SEQ ID NO: 30757 - DNA, 666 bp, Homo sapiens
  chr1:181451679-181452345
  hyper
cggctgcgtccccgcccctcccgcctggccagctcctcccccgcttctcccagcgctcttgcgcgcctcgctgcgcctctgcgcgccgctcgctgtcctctgcctcgcctccccattctccttccgcatcttctccagtgctccgccgagggcgctgcctgcggggaagagggagactgagccgttagtgaggaagttcggtctgtggacaagtgtggtgccaggccgccgcgaggctcggctgcaacctgttcctcgcccgccggtgctcgccgcccgcccgctcgcactcccgccctctcggcggcgcagccgcggatcgctgttgcatgctgatccggggaggcggcggtggcgagcgctccgggcggatgctggcactcaggcttcgctgctctctggatgctgctcaacttctagcccaagcgcaggagctttgaagtcatttgtcccttttcgcttggatcgacttcttattttgagattttgggcattgcggtttacgcaggaacctcaatatcgctctccccacctccctccctctttctccaacctttggatgcgtctctgctggcagatataaagacccaagtcttcgcggtggaatttcttagatggacttgcaggggctggcgttataaagcatgtcatcgtaaccccgtcctc

SEQ ID NO: 30758 - DNA, 115 bp, Homo sapiens
  chr1:182911469-182911584
  hyper
cgccccgatctcctgttgggctcttccttggcggccccttcggcggagctgaccttcctcttgggtatcctggcggcaggcagggcgcgtgccgggtgcctgcgggccgtggcgc

SEQ ID NO: 30759 - DNA, 212 bp, Homo sapiens
  chr1:18960805-18961017
  hyper
cgcttggccaaggccgggtcaatcagctgggaggggtcttcatcaatgggcgacccctgcctaaccacatccgccacaagatagtggagatggcccaccatggcatccggccctgtgtcatctcccgacagctgcgtgtctcccacggctgcgtctccaagattctttgccgctaccaggagaccgggtccatccggcctggggccatcggc

SEQ ID NO: 30760 - DNA, 966 bp, Homo sapiens
  chr1:18963106-18964072
  hyper
cggcctgtgagtcccgggagagcccggctgcggggctgcgcgcctggtctaccccaatactgcggggagtgcgtcctcccgggctggcgttttggctgctactctcggcgtcgatcaattatttataggaaacttgggcaagggggcgggggacgggagggagggagagaggaaggaggagccggcccgcggctccctaaatgaatttgttaaccagacccccacacgctctctaaacggtcccttgaaaccccgcctgacagttgactgaccgctgcaatcaataaaaattagccagggccgccgcctgactcagccccgcgttgccagggcggactgggggacagagagtgccttcctctgtggcgtgcgccggcagggctgggagtggaggccaagttcccagatgcccagggtcggaggatcgcagtgggggagagacccaggctccacacaccctctccccattcttagcacggcttccgcgggcaggctggagtctgagtcctgcgccatgctttttctcaggatcagctaaggagggcgtttagttttcaagcgcccggaagcccgggaaaggggattgtgcttttgtttcttgacgggaggaagtttcgagagaaggaagggaaagtttttcctcattaccccctccccttcctcattgccctcataattcccctcctaagtctctttgagacttggtaagtgcacgttaaggggcgacagggagagaaacagaaatggaagacccagagtcacaaagactgacagttaaagaaaaggccccaaacacatacgcggagaggcggcaggctgagggaatcggaaagacagtggccatgggaacccgcagactgatggctttggaaaaagtggcgagtgccctggaacctgaaagcttgcaaaaagccagtgttgtttcagtctcccttcagaggtttctcccagcacccctctcctcac

SEQ ID NO: 30761 - DNA, 982 bp, Homo sapiens; identical to SEQ ID NO: 26045
  chr1:18969363-18970345
  hyper

SEQ ID NO: 30762 - DNA, 487 bp, Homo sapiens; identical to SEQ ID NO: 23430
  chr1:19676386-19676873
  hypo

SEQ ID NO: 30763 - DNA, 310 bp, Homo sapiens
  chr1:1974777-1975087
  hypo
cgcagcgcaggagtggcagggcccgtctgcagtgcaggagtggcagggcgtgtccgcggtgctgaccggttggtcttgggccctggcgctgtgtccccgcacaggtctcgggagaggttctccactctgagggcgtgtccagtccagagaaggggacgcgcggcgtgttccccagtggtctggaccctggggtcccgccccatccctgccctgcccaggccctgccccctgctggtgtgtgtccctggaccaggcatggagcgaccccggccctggtgtctcatccacagaatagggtcatgattctcac

SEQ ID NO: 30764 - DNA, 870 bp, Homo sapiens; identical to SEQ ID NO: 29594
  chr1:197882002-197882872
  hyper

SEQ ID NO: 30765 - DNA, 1496 bp, Homo sapiens
  chr1:197887294-197888790
  binary
cggtcgtttttctgaatcgaaatgtctgcagctggctatcctccgtcgcagctgattccgaaagagcagggagaggaactgggaggaggtgggatggggggtggtggcattctcttctacagacctcaaggttcccttgattccggggcaggcgtctccccggcgaggatccgcagctccgagggcaagctgggcataagcaataggaggacggcgcgctgccgaggcgtccgagccaagcaggagcccaggtggccttagtctctgggcctgatgaccggacctgtggagtagattccgacgcgactgggtcatttccagttctctagacgctcggggcttgggacccctaaccgagagaatctcagggtttctggcatcccgactcagtccctctaaggagacagcactacgtttagcgccaggacccggcgggtgtcatgtgtagggggaaatcaaataaaacatacggaggagcgcggcacccagtcgaaacgcatgaactttataaccaacccttaaacaagctaatcaaccaccactgtttctactatccataataataaagtcatgtcctcttaataaagaaaactaattacttatctaagcgcttccctttccagattactaacggggggggggggggactacagaagtctccggaaattatttcggccaaacatagctgtgtagatcctttggtaccacagtaggacttgtagcccaaactaatcaggagactgctctagcccttatcagctgggttttgggtccggccaagtagcccaactggtgaacgtgtctatatttgtaacactcattcagtgccggggcccctggtcggagtaaagggctaaactttactttttcaggcccgctgaagtttcgtggggaagatcaacccatttctgctagtcgtgagggaaatgtccggaggttaactccttttccctttttctggtcatcacttttaaaaacaaatagtagcaacccaaacccaaattttgcagcggggctgggctcctcaaggtggggccactggggcatcccgagtcgggtcagtgggacccagagggaagcataacttgggcactaaacagattttcaagacaaaggtctcagtacgcctgttgatgctagggaaagaggggactgtatacagcgggctggacagcggaccctctttgggaacagccactttacacatttattgggaacggcaccaatagccctgaaaattagggaacagcaggggctgccaaatatatctcaatcaaaacaaagtcgaccaaattatgagcagaggtccaataatctcccctttgcttttgatttcaatgctgcttataagaatttagagaaatcgaactgtaatattttttgtttaaaaataacctgtgctcgttgaaatttccttttcactcccttatcatttccgttgttttattttgtgtgcgtcgaaaaccacaatttttagcttgtaattatttgaattc

SEQ ID NO: 30766 - DNA, 398 bp, Homo sapiens; identical to SEQ ID NO: 22986
  chr1:200009765-200010163
  hyper

SEQ ID NO: 30767 - DNA, 1062 bp, Homo sapiens
  chr1:200011258-200012320
  hyper
cgctgggaggacctcgcctagcatccctttattaatatttcacgaaggcaggctcctgccttctctggagcctcttttctcggaatgttcccaaactctggctaactcactcccctgtgagccatcctagggctctgtggcccgggaagagacgcgtcaactccgcgggtctgcgcgcagtccttagccgcaaagtgctgcaagtgacccccctgacggccctttccgaccgaagagctcgggaaccaaagagaaaaaaaataactttattttcaaaagaacaagtcatcactgcggcgatactgtggcggaggactttggcgatggggtgggggctatttctctttcctttttggtaaacaaatcagaggaaacttctgcccggccgtggctttccatcccccacctgccccaccccctgcaaacgccactgattaacttaaaacaaactcggctgcgtgtttgtgcgccgttgggtagcaggaggtagagcctaggcgagagcctggtgcgcccacgggtttcgccgaagagtgcccgggggagtgcgggcagggtcccggctgcgcagacctgcgggtgcccgcccacccgcgccccgcgctcccatacttgacctgtgtggatgtggagtctccgggaaataccggatcaggcacttcctggggtctcctggtcactgcccttcctgtgcatagtttgtcatctttttagctgcgaagacgccttcgtgggtctgcgtccggagcaaggcggttacccgatcccggcagtgagccgcgccgcgcgtcgtggcggcctgatttctgtttaactttaatagggcgatctcgaggtgtttatattttgctatgatgatcggaaacatgtgaggttcattacagggcttcaatactttgaaaccaaaacccttctgtgtgtcttttactcttctggtatttttccccgtacgggcgtcctctattttctttttccttctttttattttcacagattttcaaacgtaaggagatgaaagtatccagaatagaaaagtactgtcaatacggaactgaatgtttc

SEQ ID NO: 30768 - DNA, 114 bp, Homo sapiens
  chr1:201797440-201797554
  hypo
cgtgagccactgcgcctcgccacaccctgcatttttaacacctcactggagcgctcatcctctccacctgctccgctattcaggagcggctctgcaccgtaggccatttcccac

SEQ ID NO: 30769 - DNA, 160 bp, Homo sapiens; identical to SEQ ID NO: 13135
  chr1:202112280-202112440
  hyper

SEQ ID NO: 30770 - DNA, 126 bp, Homo sapiens; identical to SEQ ID NO: 24794
  chr1:202933745-202933871
  hypo

SEQ ID NO: 30771 - DNA, 195 bp, Homo sapiens
  chr1:202995171-202995366
  hypo
cgacacaattcactgaagagcatactacagatgtagtatccggatatcaagtttccccacttaaaaaatgggtgcgatcaaaggaaaagcaaggaacgggcaggagagcaagcgtgaaaggtgacaaacttgacaattacaaggccgagactaaggccaatttagggaacgggctgttagactaggaacaagggc

SEQ ID NO: 30772 - DNA, 640 bp, Homo sapiens; identical to SEQ ID NO: 22988
  chr1:20512360-20513000
  hyper

SEQ ID NO: 30773 - DNA, 890 bp, Homo sapiens; identical to SEQ ID NO: 26054
  chr1:205424669-205425559
  binary

SEQ ID NO: 30774 - DNA, 829 bp, Homo sapiens; identical to SEQ ID NO: 22742
  chr1:207669273-207670102
  binary

SEQ ID NO: 30775 - DNA, 330 bp, Homo sapiens
  chr1:2125181-2125511
  hypo
cgggcgctggggcagggacctggcgggggattccaggtgccctcctgccccgtgaagcagccggtaggaacggcccgggccccacaggtccggcggaaagggtgtccaggaaaaggtcttgggtccgacagtgaagacttcagtgggctccgggccgcacctgggctcctgcaacacagagttgttgggccttgcccagcgatggctcccgccctggaaaccccttcatcgctaagatgggcccagtgggcacacctgtcctgggaaggcgggcagtgaaggcacctcgtgatccaggatcagctccgggctcaccgtgcgcagtagctc

SEQ ID NO: 30776 - DNA, 203 bp, Homo sapiens; identical to SEQ ID NO: 22991
  chr1:214387644-214387847
  hyper

SEQ ID NO: 30777 - DNA, 953 bp, Homo sapiens; identical to SEQ ID NO: 26061
  chr1:215255075-215256028
  hyper

SEQ ID NO: 30778 - DNA, 771 bp, Homo sapiens
  chr1:217312962-217313733
  hyper
cgctaggcaagtgagcttgcggtaattatccctggatagagaaaccaatctggctgggagaggcccctctgcaattgccggcggcggcggcggtgcgcgggcccgcgcagaggccggggacttcgggcgcttgctaggtcaccgcgccgggcgaccgccgctcgccggctatttaatatacatggggtgggaacggagcgaagcggatctccgagcctgcctgtcctgcagaaaaaaaaaatcaatttgctatttatttttgaaatatatagatttagggaatgttttttccagctcgacccccttcaagaatggcggcccacatttaattacgtcttttaatgacttttcccttatttgccatcgctattccacgttaagggcgggggcggggtggagtttctttggggggttttcaattctggtatcttcaaaaagatttgccttatgtgttaattgcatgctgttaagcacatctgggactgtgtgctgaccaactcagaccaacttttaattaacacattgacccggagaagaagcagccgcccagcctccccctctaaatatgtatattagccacgcggaggcggctcggcccgcgccgccagatgcaagcaaggaattgcctgcgtcgaggggcgggagggggtgcaaattgcaacggttctctctctttctgtgagcgttttttctcgcctcacctctaggaaaacaacaaagaaaaagagtaaatgaccggctcctgaatcaggcttcttacatcctttaggc

SEQ ID NO: 30779 - DNA, 2014 bp, Homo sapiens; identical to SEQ ID NO: 22744
  chr1:221051890-221053904
  binary

SEQ ID NO: 30780 - DNA, 632 bp, Homo sapiens; identical to SEQ ID NO: 22992
  chr1:22140678-22141310
  hyper

SEQ ID NO: 30781 - DNA, 653 bp, Homo sapiens; identical to SEQ ID NO: 22745
  chr1:223936543-223937196
  binary

SEQ ID NO: 30782 - DNA, 836 bp, Homo sapiens
  chr1:228558714-228559550
  hypo
cggttccagcgttccctgatgagctacaagtccatcctggtgatgcgctccatccctgagctgctgcggggcccacccgacagcccctccctcggcgtagcccggcacctctgcagggacactggtggctcctccagttcctcctcctcctctgacaacgagctcgccccatttgcccgggctaagtcactgccaccctccccggtgacacactcaccactgctgcacccccggggcttcctgcggccctcggccagcctgcctgaggaagccgaggccagtgagcgctccaccgaggccccagctccgcctgcatctcccgagggtgccgggccaccggccgcccagggctgcgtgccccggcacagcgtcatccgcagcctgttctaccaccaggcgggtgagagccctgagcacggggccctggccccggggagcaggcggcacccggcccggcggcggcacctgctgaagggcgggtacattgcgggggcgctgccaggcctgcgcgagccactgatggagcaccgcgtgctggaggaggaggccgccagggaggagcaggccaccctcctggccaaagccccctcattcgagactgccctccggctgcctgcctctggcacccacttggcccctggccacagccactccctggaacatgactctccgagcaccccccgcccctcctcggaggcctgcggtgaggcacagcgactgccttcagccccctccgggggggcccctatcagggacatggggcaccctcagggctccaagcagcttccatccactggtggccacccaggcactgctcagccagagaggccatcccc

SEQ ID NO: 30783 - DNA, 1031 bp, Homo sapiens
  chr1:228644877-228645908
  binary
cgagggttccctgttgttaacagaacacgttgcccacctcgcaagtatgcagcccaatcagtccccagggtctcggttcccgttgcgcccttccccatggccactgcgctcattcatgagcctagggtgatcaggcctccggcctataaagaactgcaggatcagtgcggctcttttctcgagatagtaggtggctctgaaaagagcctttatgtccatcaaaggggccccgggggcggcgggcggcctcacttgcccttggccttgtggtggctctccgtcttcttgggcagcagtacggcctggatgttgggcaggacgccaccctgcgcgatggtcacgcggcccagcagcttgttgagctcctcgtcgttgcggatggccagctgcaggtggcgcgggatgatgcgcgtcttcttgttgtcgcgcgccgcgttgccggcaagctccaggatctcggcagtcaagtactcgagcaccgcggccagatagaccggggcgccggcgcccacgcgctccgaatagttgcccttgcggagcaaccggtgcacgcggcccacggggaactgcagccccgcgcgcgacgagcgcgacttagccttggcgcgcgccttgccaccctgcttaccacgaccggacatttccgagtcaaggaaaaaagacaacggcaaccgaaaagcgagactaaaaacaagagggcagtgaaggccagcgagcccttatgtatggtacagaggtaggctagaccgcggcgttcgattggatggctatggtagccaatcagaaaaagaacctggcactcctaatttgcgtattcctttcccagcgatgacgtagaacaacgtttgatccaatcagaagtgagcaaatcctgagccttcatttgaatacaaaacgtacaaatagagttactccgagcgccgcgcgtttctgtttggagagactcagccatcatgccagacccgtccaaatcggctcctgcgcccaagaagggttctaaaaaggctgtcaccaaggcacagaagaaggac

SEQ ID NO: 30784 - DNA, 555 bp, Homo sapiens
  chr1:228652216-228652771
  hyper
cgtccttcttctgcgccttggtaatggccttcttggagccctttttagaagccggagccgcccgcgatggctccggcatggcgaggtgacaagagcgcctagacgaacgcggatgcggggccggcagggctatttgccatctttatattcaaattaaggctccaaatttgtagtgtctgattggacggcctgactccgcggccgccactgggaggaatttctgtaaatagcagagtccggttcttctttcctattggacggcggtccaaccaatcccaaggcatatccgccgcgcgccggagctgaggttgcgcatctttgttcaaagcctttgttttaaacctggagatttttgtgtctgcagcggatctggaggtagctaaagagaaactgaaaaacggttgcaaccccaaattgaggtcttctctggctgtgaggcacatacatgggggcattttttttttctgaggcccacagctagggaggggtagttagtgcttatttagaaggggaggtggcggtgggaatggcagtttgcaacgaccttaacccttc

SEQ ID NO: 30785 - DNA, 109 bp, Homo sapiens; identical to SEQ ID NO: 8884
  chr1:229606426-229606535
  hypo

SEQ ID NO: 30786 - DNA, 464 bp, Homo sapiens; identical to SEQ ID NO: 7698
  chr1:231038126-231038590
  hypo

SEQ ID NO: 30787 - DNA, 190 bp, Homo sapiens
  chr1:234736252-234736442
  binary
cgatacaaagtgaaaaaataaattttttaaaaaagaaagggaaaaactacaatttgaccattctgaccagcctccttgttccaactggcctcttgatttgtataaagataatggggtccggcggcccccttgatgcatgaattgcacgctgggcataatgaacttattgtgcgaaagcactttggacttc

SEQ ID NO: 30788 - DNA, 807 bp, Homo sapiens; identical to SEQ ID NO: 22748
  chr1:2374848-2375655
  binary

SEQ ID NO: 30789 - DNA, 655 bp, Homo sapiens
  chr1:243646223-243646878
  hyper
cgtgtgtggttcgcaggctgtggggggcttcttgcagcgggggctgctgcctaaacagactccgcgggccccatgatggcaaaccccctcgccccgttcatgacttaatgcctcctagaagaaaaggctaaaaacaagacacacagaacaagaaattgcactctctcaaaacgacagtcgccctgaaacggacgctggaagaggtttccaggcccgtggcgacggtgaggggggtgaaggtcgcaggtggagggcacggggcggcggctgcggagcccggggaggaggcggcgggcgcccgggtcttcctcggagcgcgccccctgggctgggcggcgtgtccctgcctcccgccggcgccctcgtccccgcagcagcgtccccgccgccaccccgctgcctcgtcgcctttctcgcaaacagcggtgccctctacgtgggggatcctggaggctgctgagcacgagcgccctccgcgacccgcccctgctcccgcctccactcttgcctcggggggagggtctcagtcttctgcctaaggcgccctcctcccttgggaagtccgccgtcctctgccgtgaagattgcccctctctcctccagtgcctcctccccagcggcttcggtggctcccaccctccgcaccccgtctcgc

SEQ ID NO: 30790 - DNA, 149 bp, Homo sapiens
  chr1:2437281-2437430
  hypo
cgtcggagcctgcgccaggcccagaagacaccccaagaaaagacctggcctgtcctcagagggctgagctggacaggctcccagggtaggctgcaaagcctgctcctcaggacgcaggccctaaccccgggccacaggccccccaaccc

SEQ ID NO: 30791 - DNA, 727 bp, Homo sapiens
  chr1:244893329-244894056
  binary
cgggcaacatagttggttttttttttttttctcctgtctcaaaaaaaaggcattgcagagattgaaaaccgtttcccaccttctcccctgcagtgtttaggaagagacaatccgcccccgattcagcgcttcccagcccgcagcaactgcgcagcggggggaacccagggctccgcggcacccgcaggctttagttactgctccgaggccctcggaccaaagagaggctgcgaggaggacgcggctcgtttagctcgctgcgaacctcaagataacccttggtttccatgcacatccccccaacattgcatgtgctttcattcctacggtgctggggttactttcatttattgcttttgttgaccaaaaagaaaaaaacaatcctgagcgtgcacagggggcgcaacgggggaccggctcctcgtggctgaccggcggcggggctggcgcgcgggggcggcctgcgcgggccgcccggggacgctgctctggggtccggccgcggcctcgtggccgccctgcgcgcggtccagcaccagcagcgggatctcctccagccggtccggccgctccttgcgccgcaggtagcgccgcctccacgtcgccagcctctgaagcagcctctgcaggctcgaggggccccacaggccgcgctccggggcctccttgcctgcgcgcgcgtgagcttgcctgagcttcttcctgcgcgggccgcggaacagccgcc

SEQ ID NO: 30792 - DNA, 493 bp, Homo sapiens
  chr1:245032179-245032672
  hypo
cgtgcccggcctatatgcagttatcgtataccaattatacctccataaagctggggaggttgggggaggaagacaaaagaattcaggcctgcggggaatgatgggagtgggtaggagaggagagaggggagagaggaaaacacagatcaccagcagcctcgtgggtggttttgtaaaggactttggcttttgctttctgctatggactgaacgtttgtgtccccacaaaagtcctgtgttgaaacctaatcccccatgatattaggagctgaggcctttggaggcaacgaggtcatgagcgtggagccctcatcaatgggattagaaaatttatacagagctgaagagaccagcgttcgtgtcttctgccctgtgaggacacagcaagaaggtgccctgggtggggaggcgggccctcaccagtcactgaggcgctgggcttcttagcttccagaactgcgaccaataagtgtctgttgtttataagctactc

SEQ ID NO: 30793 - DNA, 255 bp, Homo sapiens
  chr1:245986537-245986792
  hypo
cgattgcaaaatccatttctccttctctgtccctgcttctctgcccttcccccaagctttcttgctctctgccacacgtgcgtgtgcacacacacacgcgcgctcgtgcttgctcgctctcgctctctctctctcttttctaaggctccaggcatccgtccctggagaagtgcaccttgggaaggcgatgaaatgaaagaagggcacatcctcctttaaccccaaacatctgaagtcagcgccgcgcactactgc

SEQ ID NO: 30794 - DNA, 186 bp, Homo sapiens; identical to SEQ ID NO: 6363
  chr1:246324319-246324505
  hypo

SEQ ID NO: 30795 - DNA, 182 bp, Homo sapiens; identical to SEQ ID NO: 23436
  chr1:246330213-246330395
  hypo

SEQ ID NO: 30796 - DNA, 1005 bp, Homo sapiens; identical to SEQ ID NO: 28352
  chr1:248020330-248021335
  binary

SEQ ID NO: 30797 - DNA, 265 bp, Homo sapiens; identical to SEQ ID NO: 23716
  chr1:248027980-248028245
  hypo

SEQ ID NO: 30798 - DNA, 204 bp, Homo sapiens; identical to SEQ ID NO: 29617
  chr1:248074847-248075051
  hypo

SEQ ID NO: 30799 - DNA, 741 bp, Homo sapiens; identical to SEQ ID NO: 29618
  chr1:248099374-248100115
  hypo

SEQ ID NO: 30800 - DNA, 109 bp, Homo sapiens
  chr1:249212391-249212500
  hypo
cgaagcaggcggttggagactgagagccgcttcgatatgattgggcactggattatccatcaggacaagaggacccggtgtgccctctgccactcacagaccaacaccc

SEQ ID NO: 30801 - DNA, 988 bp, Homo sapiens
  chr1:25255579-25256567
  binary
cgatcccggcctagcgccgtccggtaaaatttcggaagcccgagggtgtgagcaggaagcttttgcgaagcggcgcgggaggaggggtgctggaggcggagggtaggccctttcaccgttcgcaccccacccgcggtgtccttgcccctgtcccgggatcctcttctccgttacccgcagggctgtatctgagcgatccgggttaggggggcgcaaaaccccatccgcccatttccgcaccaacgtctctacgcaaggcgccccaaaacccaggtggagcggggcaaccccgttaaaagtcattcctgcagggcgcatccaaaacggaacgccgaggtcccggagccgagcgcgcagccagactgaaccgggtgcccgggtgtcgccgcggcgtctcgggcacctcccatccccactgctcccgaggctctggctcccgcagctcagacgcccggagccccagggccggcgccctcccgccccgggtcccgcactcaccttgaaggcgacgggcagcgtcttgttgcagcgccagtgcgagggcagcacggagcagaggaagttggggctgtcggtgcgcacgagctcgcctgcgtggtccgccagcacgtccaccatcgagcgcacctcgggccgggcgcgccctccgggccccacggccgcctgcgcgctcagcgcgccgctgttctcgcccatcttgccgccgccgccgccgcaggggaaggccggggagggaggtgtgaagcggcggctggtgcttgggtctacgggaatacgcataacagcggccgtcagggcgccgggcaggcggagacggcgcggcttcccccgggggcggccggcgcgggcgcctcctcggccgccgctgccgcgagaagcgggaaagcagaagcggcggggcccgggcctcagggcgcagggggcggcgcccggccactactcgccagggcccgcccgctgcgaggcctcgctggcccgacggccgccc

SEQ ID NO: 30802 - DNA, 777 bp, Homo sapiens
  chr1:25256577-25257354
  binary
cggctagtcccgcatcctcggcgcgcggccccgcgtgcggccgcccctcgtggctgtcccggctgcctgggccgcggcggggcccgcgcggggctgtgccgctgccgccgcctcccgccccgaagctcgcccgcggccgccccgactccgcggccgcagccccagaacaaatcctccagaatcaagtggcggggccgcggccgcccgcgcggggttagtacccccggggcccgcggggcggggctggcggagcgacgcgtcgcacagccaatcggcggagcccccatcgcgggcacctcggtggcgttcgcggggaggaacggggcctgccggaggccgcccaacggggaggggcggaaggcgccaccccgcggaggaggccccagtgccacagcccagggcccccgagagctctgggagcccggggcaaatgctagaaatttgcttagaacgtccgggtcccacggaaggcgcccttgccgccctctctcgggtcgtagctccctgacgctggggcgcaaccccttcgctcctcctccccgctggccgcggccgggcttccccagctcttgctgcttcgggcctgtgacttctgcaaccccgggctgggggccgcggggtctcagggccggtgacgccgcactgggagccgccccaaagaggttactcacctccctcgtcccgcacattattctgacccaagagcctccaccccacacgggattttgcgcgtcgtccacgcccggccggcggcctttgctgctcccagccctgcgc

SEQ ID NO: 30803 - DNA, 574 bp, Homo sapiens; identical to SEQ ID NO: 22996
  chr1:26551673-26552247
  hyper

SEQ ID NO: 30804 - DNA, 625 bp, Homo sapiens; identical to SEQ ID NO: 28354
  chr1:27189675-27190300
  hypo

SEQ ID NO: 30805 - DNA, 211 bp, Homo sapiens
  chr1:27844793-27845004
  hypo
cgtcgactggactctggccaagggcagggactgtgtggcactgctcactgctgtatccacaaggccctaaggcataatgcctggagcctcaatccatgatcggtagggaacgaatgaatggctaagcctgttggggcaggtgtgatagtttgagtgaaagtgacagggtctgcggtggcagcgaggagagaagagacacgatagaattgac

SEQ ID NO: 30806 - DNA, 1009 bp, Homo sapiens; identical to SEQ ID NO: 23722
  chr1:29585852-29586861
  hyper

SEQ ID NO: 30807 - DNA, 606 bp, Homo sapiens
  chr1:29804763-29805369
  hyper
cgctgtgtccatcgcagtccgccggccccctcccagcgtctctcgaccccttccccccttccctgtactccagccgcggctgattcctgctgtctgggtggggtccctgtaaggctcaggcggctgactggggaggcgatcccaggaggcacagtggggaggggatagcagggcggaaagaggctgaatcacaaggaggcgggggcggcggctcggtcccagggccatctcagggaccgtgtcggggggtgctgactctgcccatcaaggggagccggacatttatccgccaaagcccgtccctcgcggtgagggtcgctcctgggtgtgggacccctggcttcccgcgctgccctgcccggggctggtctcgtcccaggaccctggagagcggccccaggaggcgtggaggaggggagagagccgagggaagtggtcatggagcaggtgaacgcacaggggcttcggctggagcgccctcctgggaagagcccctcctctgcaaggacctgccgcagcttaaccagcctgcgctgctgtcgccagcgccagttttaaatagccaaaccctactcacttcatccagcaacgcacccccaacttcac

SEQ ID NO: 30808 - DNA, 95 bp, Homo sapiens; identical to SEQ ID NO: 23725
  chr1:31863040-31863135
  hypo

SEQ ID NO: 30809 - DNA, 589 bp, Homo sapiens; identical to SEQ ID NO: 23726
  chr1:32410105-32410694
  hyper

SEQ ID NO: 30810 - DNA, 918 bp, Homo sapiens
  chr1:3309969-3310887
  hyper
cgcggtctgagcaggacccaccgcgggtctcacgaggaaaggaggattataagcagacggcaggaatgtgtagggagctgcagtcataatttatgacaagccctgcaggaaggggtctgcagtacagtaaatgcgcaatttgtgacgctctcgagccaggagccggcgcaggctgggtccgcagacgcccggttcccaccgcggccggcccggtctttgtcccgggaagtcgcctgaccccgccggccaggaacagtggcgttctcggcgcgtctggctgataaggcctttgtgacaccggggacaggctgtaaaaacgcagccagcttttgtctgcacctccgcgccgctggcaagggcggggccggcgagtgtggaaaagtttgcgcggattcccgttcacctctgacccccgaagcagttggaggcaggtcggggacccccgcccccgccccgccccgcctcgggccctgcgatcagcagtaatagcgattaattccgactgtggctccaagtcccatggccaaggcgccctcctcctgcaggtccagggccagggagggggagcccgcggcccggcgcgctagaccctcccgcggcggcggcggctccagggcagtgtccgcgccggaggggagggtcccccggcaagtctgctgccctcggagccggggtggggtcccaggagacaccgggggccctcggattgggggaagaggtgggggaaggggtttccttccgcagcgccgcggatcagaggagggaggcctggcgccctcggagctgcggtggggggcatcccaggagatctggctcggtgtgtagagaagggagtccgggcggcgtcctgggagtgtctgtggcctgcagagaggggatggggttggggtgtggatcccgggaggctcggaggcgctc

SEQ ID NO: 30811 - DNA, 721 bp, Homo sapiens
  chr1:3328548-3329269
  hypo
cgacatgtcggacggcagtgactttgaggacgtcaacaccaccacggggaccgacctggacacgaccacggggacgggctcggacctggacagcgacgtggacagcgaccctgacaaggacaagggcaagggcaagtccgccgagggccagcccaagtttgggggcggcttggcgcccccgggggccccgaacagcgtggccgaggtgcctgtcttctattcccagcactcattcttcccgccacccgacgagcagctgctgactgcaacgggcgccgccggggactccatcaaggccatcgcatccattgccgagaagtactttggccccggcttcatggggatgcaggagaagaagctgggctcgctcccctaccactcggcgttccccttccagttcctgcccaacttcccccactccctttaccccttcacggaccgagccctcgcccacaacttgctggtcaaggccgagccaaagtcaccccgggacgccctcaaggtgggcggccccagtgccgagtgcccctttgatctcaccaccaagcccaaagacgtgaagcccatcctgcccatgcccaagggcccctcggcccccgcatccggcgaggagcagccgctggacctgagcatcggcagccgggcccgtgccagccaaaacggcggcgggcgggagccccgcaagaaccacgtctatggggaacgcaagctgggcgccggc

SEQ ID NO: 30812 - DNA, 409 bp, Homo sapiens
  chr1:33772297-33772706
  hyper
cggagcgggagtgaggccgggccggctgggccggcggagaagccggagggccgggaaccggcggcggcgctagttccgcagcagccggtaccccttgggcgcccacagcagtcgcgggcggcggatctcggcccgcgggccgatgtccgggctccagcagaactcgggcgacagcaccttggcgggcttgtgcagccagaagaacttgttgaggtggctctcgtcgtgccagcgcgcctccaggccgcgcgcgcggtcccagtccaggccccccgcacagtgcgccgtcagcccgcgcagcgccgccacgctgcccccgaacaccgccgcgtggttatagaagtcgccctggccccacgccatcgcggcggccgaatgcgcgtcgcgttcgaagggcagcagccacgac

SEQ ID NO: 30813 - DNA, 108 bp, Homo sapiens
  chr1:35390551-35390659
  hyper
cgggaccgaacgaagcctcattcagcactcgggacagctccgaaggagcaaatccccgccgaatcccactcagcacccgggacagttcccagcgacattgccggcccc

SEQ ID NO: 30814 - DNA, 1336 bp, Homo sapiens
  chr1:3567108-3568444
  binary
cggtgtctgtcgcacatatattatatcgtgtatgtaatgtataagtatttatttcgtttgcttggggttttgtttgcttttgctgagtccgacccctctacctgccgcctggcccttgcctcacgctccagtgccactgagatcaaggagagaacgaatttgccgctgactgggcagagcgagcgcgtggatcgcggccaccgcccgttcatcacccgcgcgcatctgggctggcaccgggcgaagaatcgtgcgggtctgggacctgggggcccagagggagcgagctcctgcgcgggcgctcggtccgcaggtttcgcaggctcaggggcgtgcctcgttctcacccccactccggaccccggtcctcttccctagacagcggccccctccacccctggctcccgcaggccgctagtagtccgcgccaggccccgccggcgcctctagggccccccagatcgcgcagaccctgacatccccgcctggccctgggttctgggagctgagagccggccagggtcctgctcgtacctccgggcgcccagcctcgggtctgctccccgcggacgccccaacctccccggccgaatggatggtggtgcgcgcgcgtcctactccggcggtgccggccttttctgttgccaaaactagacccaaacctctgcatgggattcgtctttgggtccccaccccgtgcgcccagcaaacagtgggtgagccatgaagatgtgcgagtcagccggaccctccccgtcaggcgcggacccgctgcggccagagaacccagtctgcgccagcccggctcgctcgcgaagccacgggcttcactgacgcgactttccaagacgtgggggtcaccatgggcagaggacatcggttcggagccagatcacgggccccataagcatcagaccataagcagcgccgccactgagagccgctcggaactcgcccagcatgtcgggtcccctagccagggcctggtgtacgtggtcgagggccctggaagccccgatggcctaggaggagcaggcgggcggggcggcgggtgtcgctggccggtagagagcttcggcctgacctagcgcaggtctggtgcgcgcagagaacaactccaagcgcaccgacgcccgcgagctccttccaaacaccgaacgggatccagagcccgagcccacaggcggcggccgggggagggagcagggtgctggccgccgcccgggagtgttcgcgtcctgggtgacccctggaaggacgtggggcccaaactccggctggggttgggagagcagcccccagaggctctccgcgggatcctctgccgggcgggacc

SEQ ID NO: 30815 - DNA, 1246 bp, Homo sapiens; identical to SEQ ID NO: 24846
  chr1:36042458-36043704
  hyper

SEQ ID NO: 30816 - DNA, 83 bp, Homo sapiens; identical to SEQ ID NO: 13162
  chr1:36640437-36640520
  hypo

SEQ ID NO: 30817 - DNA, 171 bp, Homo sapiens
  chr1:37721103-37721274
  hyper
cgcccaaaggagccattttcgggcgaagccaggggcccacgtgggagggagctccaggagagatcagtctctgctggcgtggagggggcggggagggggctgtccgtggtgctgaacccaagctatcctaggattgccaggcagtacgaatgaacgctggttaatggaacc

SEQ ID NO: 30818 - DNA, 217 bp, Homo sapiens
  chr1:38953081-38953298
  hypo
cgtcaatacaggatggagctccccagacggtgctggctgttgagtgctgcagcgagtgcgatattggccctttagatttcacagacaccctctccaagtacaaacacacactcacacacacacagacacatgcgcgcgcctactccatcgcgggctgcgtggtgtgtgcagtcagcagccgtgtggagaatgtgaaatcacacctcgctctccttcc

SEQ ID NO: 30819 - DNA, 231 bp, Homo sapiens
  chr1:40149563-40149794
  binary
cgaagcgctggcctcgggaacagcagcgcccgcgcggccccgcacctcgatgatctccagcatctccaggcgcgtgatgcgcccgtcgccgtccaggtcgtacatctcaaaggcccagttgagcttctgctcgaagctgccgcgggaggtgaccgacagggcgcagatgaactcccggaagtcgatggtgccgtcgccgttcttgtcgaaggtgcggaaagcgtgctgcgc

SEQ ID NO: 30820 - DNA, 115 bp, Homo sapiens
  chr1:40237074-40237189
  hyper
cgcgacccgcaacagggagggggccggctccgccctgggctgggggcccccgagtcagtcctccgtgtccagcgcacaggcccgggcgcaggacagagctgaggtcaggctccgc

SEQ ID NO: 30821 - DNA, 109 bp, Homo sapiens
  chr1:40905044-40905153
  hypo
cgcatgcctaactggcactggctatatcacgtgaacaatctcaattcagtcctgcaaggcaaggtttaaaccagttttccacttgagagatcaagtgccttaaattacc

SEQ ID NO: 30822 - DNA, 738 bp, Homo sapiens; identical to SEQ ID NO: 24853
  chr1:41284015-41284753
  hyper

SEQ ID NO: 30823 - DNA, 306 bp, Homo sapiens
  chr1:41485949-41486255
  hypo
cgggctgccagctccttgaggattaggtgctcctccagggccgtctgcaggcgccaggggagggaggccagggtgtccctgtggacagtcacctgcaccagtgcataggccttccgcggccgcctcaccacttcaatgtgctcccgcgccaccggcatctccagccgctccagggtgtctcgcagcaggcaggcaagcaccggcactgagaactgggggttcagatggcccacatagagagtgtgcgccgagggagcctcctcgaggtcagagtactccgtcagggactgctctgcgggtagctcc

SEQ ID NO: 30824 - DNA, 166 bp, Homo sapiens; identical to SEQ ID NO: 23740
  chr1:41991605-41991771
  hypo

SEQ ID NO: 30825 - DNA, 160 bp, Homo sapiens
  chr1:43842627-43842787
  hypo
cgtagagtatgccatgacaaaacaaagtctgaaggactggtggtcagtgtggcgggaagagaggcaagcatggcaccaaagagctccggttttgatctccagtgaattacacacagccacccacgaagaactgagcccgacctagcaagcacagacaagc

SEQ ID NO: 30826 - DNA, 187 bp, Homo sapiens; identical to SEQ ID NO: 23440
  chr1:44351032-44351219
  hypo

SEQ ID NO: 30827 - DNA, 370 bp, Homo sapiens; identical to SEQ ID NO: 27443
  chr1:44717932-44718302
  hypo

SEQ ID NO: 30828 - DNA, 1187 bp, Homo sapiens
  chr1:44883084-44884271
  binary
cgggagcagtccctgatggctgcagagccatctggcctggcttggcttggctcggcgcgccgctcgcctggcggctgggctcgctgtagttgtgctcccgctcttcccctgccctcgctccacgccgcgccgctctgtgcggcggctgcctcctcttacggccggaatgcctaatcaccatggtgagaaaacggacaccgcagccgtcctccctcctcgccccgcgccctccctcccatcaattgtcatgcagaagtgatccgggctgccgttttctcgcggccgcccgccagcccctcgccgctgccggcagaagggtggctggtaattgatcttctgggggagggggcgcggagaggcgcgagaactggccccggggaggccaggccacggggtgggccccgttcgcttacttgcaagggacccccagcctccgccaccgaggcggcttgcaagtggtttcagaaatgttggtgatctcgccgtcgctctgcagcacttggaggccgcaggaggactccgcgcgccgcctcgagggccgggagcgcccagcccgcggccgcacacacgagggcccgtcgcgccccccgccctgccccgcctcgccctccacgtccctgcacccccaagtcgcactaagaacccagtccccgatcggtttcctctacgccgtctgagcagaagagagtgggaaccggggtgacggataaggggggggcgcccacgcgacgtcggggtgcatgggagcgcgcgggaggcgctagtgggtgcacggggcgtgagggggacacagcgcgggcgtggggatggccactgcgcggggagggttctgcctggagaaggagggatgggaggaggttgggggagcagggcgcgtggaggagggaggttggacgtgtgtacagcgcctggggacctcgctggccccttggtgcccccaggactctgaggcttctcctttcggcttgaaatgtttttcccttcctgcttttcaaatctgtaaaaatgttccggggaatgtttccgaagtccagggctccgtccttcggcgggattgctggcattcgggcaaggcgagtcgcggtggcctctgaggctcgcagccagcacagcggggctcgttaaagtctgggcaatttctggaactcttcccacgggaagttttccggggctgccttccggtcagc

SEQ ID NO: 30829 - DNA, 594 bp, Homo sapiens
  chr1:45106068-45106662
  hypo
cgcctgttgggaggggtgaggagaggtggcaaggagcaaggcaccttctgtcccccgtggcaactgatgggatttaatcgccttttggaacacaattgttaagctaggacagagggagtgcaggcagaaggagcaagtatcaatggttttaaacggcgtctgtctctctgcgtctctcctgacgtgaggcagtgaaacgcgttatcgaggaggcccggaaagtggctaagtgcgtttgacacacgccaactccctgcctccacactggataattgcattgtcaactgttcagcgaggtggcaggtgacactgcaggccgattgattgtcccgcatcgcagctccccagactgtcagctccccaatcgatggcgtttacacaagacaccgtaactgcatctgtaactaattccagtgtaaaactcgccggaagctgctgcccctgccctccgtgttggagagcacaggcccctggagggccccgagacgtttcctttctccctgggctctggttttgttgggagcagcaggtgaggaaatcgatgcctccttttttgtggtttcaggttccaggacgatactgcccccagtaaac

SEQ ID NO: 30830 - DNA, 56 bp, Homo sapiens; identical to SEQ ID NO: 26106
  chr1:45156613-45156669
  hypo

SEQ ID NO: 30831 - DNA, 339 bp, Homo sapiens; identical to SEQ ID NO: 12086
  chr1:4673912-4674251
  hypo

SEQ ID NO: 30832 - DNA, 593 bp, Homo sapiens; identical to SEQ ID NO: 24857
  chr1:46951168-46951761
  hyper

SEQ ID NO: 30833 - DNA, 957 bp, Homo sapiens; identical to SEQ ID NO: 24858
  chr1:46956469-46957426
  hyper

SEQ ID NO: 30834 - DNA, 764 bp, Homo sapiens
  chr1:47694808-47695572
  hyper
cggaacacaaggccttcctagacaccgtttccaccggcaccattcccctgaaaactcacctggggcatatttagagagaccggcccctctgaataggatctccactccgccggaaaggggcggaagccgaggaagaggatgcacacccgggtctttgctttccccctttttcgctgagaggcctgcagttacgctgcggtgtggtcctgggcgatctgccgcgcccaaagcgagtttccaggaaagataggggtggagagaaagaggcagggcaagagggagggagagagagaaatgggggtcaatggctgggaattacctcctgtccccgaccaaccagtccagggaatcgcaaacagctttccgcccccaacctgcaggtgtttggagcctttcctctaccccctcctccccccacccgccttaaaaaaccctatacatgaccaatcaggaatagctatttagtccaacagcaacaacaacccctcccgacaggctgtctggaacattttcgaaccctccaactgggatcggtctggttcagtgtttgttttctaagcagggaggtgtctacgcggttgcctcctcagccaggtctccggctgccgctacaccgcgaagggatagtcccgggcctggatgggcggaggtccgtgttgggaaaggcgaatagtcttcagactctggtcggtgggacagaaccttgaagtcccccccacctcattctctctctgacccccatccacccacctccagcccaaagc

SEQ ID NO: 30835 - DNA, 2285 bp, Homo sapiens
  chr1:47695911-47698196
  hyper
cgacactactttcaaggatgtagcaggattgagcttgcttttattttttcctagtggattttgtttaatttgttttgcctaaatcgtcaggcttatgatcacacatcgaagtcttggattaactgcgaaggcctccttctatttgccgcggctttggtggacatataggaataattcttccctggattgcaatacaatgcggaagattttctttctcctcttctaatccaaaagaggggaggggaggaaagaagaggggaatccatccattcccggcgtgttcgcggggggttaatgttgcgtgttcgctgggggttaatgtttgccttatgaccaagtctctgtgtccgtgcctctctccattttctcttcctacctcaaacccagcaacttagaaaacggctgtagcggaaaaaaacccgctgctttgttctcccgccaaaggagccaaaagggacaaactgctgcgctctgggatgattattttaattaaaatagatgttaatgatgacgattgtgatggtgatggcattagcaattacaataattgacaaaacaaaattctttcaacccgagctagggccccactaacccggtccctcccagagcccggattcggcctcggtctcggatgcgacgggtatcagacccaagcggcaacgtcgctcacccgaagagggggcgggaaaatcttcccaggaggtgatcccgaatgtccccacccgaggctcgaggcctggtgaatgtgcccattgtcctttcggggcctctcccttggagcccggcggccgcacccacgaaactgaccagaaatggatgaagccggagtgcagcgggaaccgaagcccgcagctaccggctcgaaggcgccggcctcggcgagcgctgctcagcttcaagcctggaggagcctcccactcaccaacgaacccctcaaacacctaggcacaggcgggcctccgggcagagcagccgccgaccgggcgctgtccgcccacccaagccaacaactggctcccgaatacatcataatttggaataaaatgtgaaatcccgctccccgcccccatgccgccgcccccaccagcgcctcgatctctcgctcgccctccccccactcccgcccccagcgatttgcaaacgcacctctaaaggacacaggcacacaggcatacaactcagtgcggacaggaccacacagggtccagccccacagaagggcagcaaacaaacaccacctagcactgccccagaagccgacttggtcagccccgcacactgcccaacaggacacaacgaaatcagtcaaacgcagcggctcacggacacacaatccagcacagtcgggatcacacacgcccgacataacgacgacaccacccaaacacagtcgcaggggccacacacccccacacacagaatcagatccctgctgagaacaccaacggagcacaatcgtacgcaacgaagaaaacgcagaagggcctcgaagggtccacatctacacaccccaaccgcgcaggcacaccacactcggacacagagcctgtcgccaagaagaccacacttagaagcagccaacgccgcccacagttctcatgaacgcactctcacaatcccaccgcatgcacacaaccacgaagaagaaatgaaaaccaaccacagcctcgcgcatttctgtatattgcgtaaggaaaagggggaaggaaggaagagagtctccgaggcgggaggggcggcggcagccggggcgggggcgtccgtggaaaatgcccccccaccgccccccccggccatcgaaaggaaccgagggaaagggagcgaagacctcttttgcggacgtggggaaaaagaggaggaaattgatgaagaattcggtgggaggccgcgggttgcttttcccctagaaaaaggccagaatgctcacgtttttccgctacgggggtacgcgtgtggccattttgaggcccggtcctgagcggcggcggcccggcccctcccgcggcccccgctcccccgcccgccccgcgcccgcccggcccctccaccgacgcgctgtaatcccactcacgttccaggcctcgttagcatgggccgaggcgcgccggggccgtgtgcgccgcagagataaggcactgccgcgggtccgcccgcccccgataagcgcctcggccattatgggccaaatgattcattttaatttggcaatttcaccggagggagtggggactggttgagcggcgctaggaccggctccggaacgcgctgcggggagcgttggacgc

SEQ ID NO: 30836 - DNA, 838 bp, Homo sapiens; identical to SEQ ID NO: 28369
  chr1:50880863-50881701
  hyper

SEQ ID NO: 30837 - DNA, 2783 bp, Homo sapiens
  chr1:50882781-50885564
  hyper
cgtcgccttcgttgcctgtggttccaaatctgagatggggagcgcgcagtgtgtacatccaaatctacacctcggaaagagcagggactgggcccccagccttgcaagatccctgtgaagactggggccgacgatccaaaaactaagagccggggcaaggtgacccctccgcaagggtgcccaagctggggtacacactgtgttccctctgctcagcggtcgcgggtccttcgggagttgtgagccccgcgccactctggtgggataggtcttccgagtaccacaggaagtctcctctcccagtagccccgagggtcggagatcccacgggacctcggacaagcgtctccttagcgccgcggcctgagtgggaaatcacgaccttccccagcgccccacccccaccccctatttctcgaggagcgggacgggattcggcattgttttcttagaaaataacatttatttctagctcatatctatgcaaaggaaagcacaaagtgctgctctgcagcagcgttttccgctgcgggcccttcagtcagggcgtttggcgagtcccgggaggcgaggatgggcccgcgagcgggcggttctggctcagtcacacgtcgctctgttcctgcttcagtgcgcaccttgacggctccttagggacagaccagccgcaggcaagaggggcaggtgggcaggattcatcccgagtttccaatatatttaatctctaaacctgataagtacaatgcgcgcatagtctaatttttttccattttgtccctttttttgcttgttttgaatgtttttcacgttaataccgaggtcacctacagattacaattaataacttagaattccattttataacattatacactggcttgtatatatatatgtatagattatatatagatttatacatatataaaaacacactgcaccaaggaaacccatgcttatcggcataagcaacaaagagagcgacaaataccgcaacgaggaaagtgcaccttaaaacttgtttcctttttttttttttacaattgtatcgatatatatgtgtgtcccaaagactcagtgccaagagatttatacatcctaaatttatatttgttagagcgaatatttaaattttttaaaagtgagggctggggagacacagaaaagactctcggattatcctgccatccactgagagccggatgagcacagctaaggagccgcaggagcctgcgctgctgtcgcagcctctgaattctcatgaattcccagccttttggaaagggggccgggtgaggctggaagagggatccggaggtaggagatgaggacccaggccgcgcaccccctccgagaacacctgcacctgtctgtagctgctccccctttgctcagccttccccacccaccctcctaaacaaaacccaaaaaccaccttagagtgagaagacgcccagccagggcgcagagagagcgctgggcgaagaggggtcgatggcccgcgggaacagggctggggttcctgtttggggaccggccggctgccaggcccctcgccctactgcttctccggagcgccgttgaccataggcccgtacaggccgccgccgtaggtcggctccttgtgcaccgccgcagcagcggcggccgagcggtcacgcatgagatcgctaaaggcgtagtccatgggtgggcggaagccgagcgtgggcaccaagccggcagtggagtagggcgccatgaaggccagaccgcggctgtgcgccgccgccgcggagtaggccaggcgcagggggctgaggccgagcggcgcgcccagcgggtaggcgcccgcgtcggcaccgaagtgactggcgttgggctgcagcggcgagaaggccgagcggctgctcagcgagcccagcgccccaggcgccatggcgccggccagcaagggtctgtggtgcggaggtgcggcgggccccgcctgcagcggcgcaggcagcccaggccccccggcggcggcggcggcggcggcggcggcgtcgacgcggctgggccacgcgtcgtctgcagctgctgcagcacccacggcggccttatctgggggcgccgcagggcccaggccggccgccaggcccccacggtggtggttcagcacctgctcgatggcctgcaccacgtcgccgccgcagccctgcaacaccagctccaggacgcctcgccggtggcctgggaacacgcgtgtcaagatatccagcggcgtccgctgccgtggacccgagcctccgcccagccctggcgccggcgcggcctcaccctcttctttgtcagcctctgaaccggattcagagcccagagggctagcggagcccgggctgtcctcctcgccgccgccgccagggccagcgctgcctgggcagctgccacctgcctctttggaggcccgagctaggggcgaaccagaaaaggactcgccatcgccgttctccgagcctgagccgggccgcacctctggggacgacgtcccgggccccgagtctgcgccgtcgggtgataagggcttcaccggcggcggcagcgggctgcccgggcggcctgcctgcagcagcgtcttaggaaacaggtcaaacttctgcaacttggcctctgggaggggagaaaacgtgtcgtgaggagcggttagctagaagacagcagtcacagcacctcggccctttggatctcagtttcctctccctcagccccacagcccttattcactaggctccagtgcccctctttctttttgctctagcattccttcc

SEQ ID NO: 30838 - DNA, 1321 bp, Homo sapiens; identical to SEQ ID NO: 28371
  chr1:50885965-50887286
  hyper

SEQ ID NO: 30839 - DNA, 1823 bp, Homo sapiens; identical to SEQ ID NO: 23003
  chr1:50892168-50893991
  hyper

SEQ ID NO: 30840 - DNA, 212 bp, Homo sapiens; identical to SEQ ID NO: 24864
  chr1:6046186-6046398
  hypo

SEQ ID NO: 30841 - DNA, 618 bp, Homo sapiens
  chr1:61519352-61519970
  hyper
cgaattaatgtggagaacgaggccgtccgggctaggttcccggggctcaaagacgcaaagggaaggcgacaaaggtttctcacaggtcgccgttagggagagggggcagcgcaggaaacccgtttatttaaagttcagttgtgttgggcatctgatccaggacaactcgcccaggagcccggcgggtttcagctgccaccacgaaagtaaggatcggttctgccgcgtcgccccctccttccccttgggatgtgccaggcgggcgacagataagggggcgcggcgcggggtcagccaccgagccagagggcggcgcccggttgcagcgctccacagccgcctcctgcagcctcgcggtcgtgaccttgccgagcagctcctgcgcctcaggctcggtccctgcacccgccctcactccagtccctctcagggcctgcagtggaagatccccgtggtccgggtgggtggcgatggagagcagaattgaatttatttgctctcaaattcccctaaaagctctgaaactgggaaagtccgcgggctgccagggacagtaatcactgtgtccccacccggacgcaggaggtctcgggaggagctccgaggccaagcgcccgc

SEQ ID NO: 30842 - DNA, 360 bp, Homo sapiens
  chr1:6171654-6172014
  hypo
cgggatgacagcggcggggagcgggcgacacagcaatgccgaggatttctagccaccgccagaagtgaggaagattgaggaagaacgaggaaggcttcccccggagctctcagagggctctccccgaggtccacggaggaacgggcaagtccctgcccagcccggcctggccaaggatacgtcacgatgcccgccagcagccagtagtcatggcgccggtgccagatgtcgtagattttcccagaggatacagcagcccgctcctcgttctgccacagcgtgtgcaactctgggaaacaagccaaggtgagcagggtgagaagtgccccagctctcacgcacaggcaggcttggagagcc

SEQ ID NO: 30843 - DNA, 224 bp, Homo sapiens
  chr1:6281676-6281900
  hypo
cggctaacgcagcttcctggtttaggaacattttccccggtcgtatcaatcccccaggttggtaaatgaacagaagggatgaataaagcctactttttaggctcaaggagcagctcgtgaaggggtggcaggtgcgctgctgccttgttttctgtcctgctaagaggctcaccccgcgacctcttctgtaaactgccactcagcagcggcctgcaagccctcac

SEQ ID NO: 30844 - DNA, 371 bp, Homo sapiens
  chr1:6301695-6302066
  hyper
cgcgaccctcggccagtgtaaggcgagtagcgggccaaggaggctgtttgtgatggaggagccacgggtgggggcgtcagaaagtagggggatcattccaggtggggagaccactgaccgaaaacgggccacaggacagggggcgcggcgggcagtgtcggggttggggtcggggggcaacggaggcggaagtccattcagtggaccagggcggagcgacgcctgagaattccgcccaggccttgaggcgggcctcgcctcccgcagccaaagcagaacattgcgaattagagcattttgcggtcaattttccactgcttaagaaacactaagctatccacgtgagcgtccccccgcccccggcccgatgc

SEQ ID NO: 30845 - DNA, 1379 bp, Homo sapiens; identical to SEQ ID NO: 24867
  chr1:63785002-63786381
  hyper

SEQ ID NO: 30846 - DNA, 1393 bp, Homo sapiens
  chr1:63786671-63788064
  hyper
cggaattaaatccacatcccagcatcttctgcaaatatttcactaattatttcctctcggaactcctcccctcgtgctccttcctctggtgaggccggcgctcccctcccaggccgcagcggacagacagggattgggttccgtgtgcctgccacaccaggcaggctcttgcggctcccaactaggcggcctaaatgagggaggaaagaggaggcgcatcgctgattcaccgcgtcaagagcactgactttccttggaggtgtgaggtccacgcaccccagccacgcacttgggggtcggtttgcggtgcctccccctccagtcccagtgaaatccccacagtttttcctactatcactgacttgccttgcactccgcgtgcattggccacacatcctcgcctcctccacccgctccgccgccggttttcttggaagttaaatcttggaggatttgtccacaccttaagagaagaaaatccacgttagctggcagcaacggagatcccagcatgctggcatgcccaagtctgcccaggttcccccaaggccatgcccgccgcccgggaagtcactgcccgcacccctcacgtttcttcagccgcccctgggcgctgcgtctaacctgaagacaccaggcctcttcccggatccactcgacttacccaggccgctgccaatcccagctccttccccagcgcctcatttccgattttttcatatgctaagtcgtttaacaactccaagtagccagttatggcttctttatttataggttccctgctattttacgtcgtttttatttctctcggcaactattctagtagattaatcaatagccattttctgaccttcgggaaccccagctgatgctttttgtggccgcacgaaaaaatacatacaggaaaacacgcccgcatcaagccgggaaagagcaggtaggacctgagtggtttggttgggggagggggaaaaagacatctcagcaggtgtcttccccggaatgagcactgaggccagaggggaatctgaaatctaattagcaggagggagccgggtgcgctgctcttactctttaaagctaaaaacaatgaaacaaaaagcaaaacagagactaagttttgctttttaaaacacgatatgggaacctcgttctaggtcgcccagtccctgtctaaggagtgtgacaaagtgggggggagaagggcggaagggagagggggcggggaaggcagggcagcgacagtcgcacagtcccgcggacgctcccaggcccacgccctgactcgctcacacccacccacactcacacccacccgctccctgggccccagggcccggatccagcctgggtgggggggtctccgggcgggccgcagcgccctccgtgcccc

SEQ ID NO: 30847 - DNA, 406 bp, Homo sapiens; identical to SEQ ID NO: 28376
  chr1:63791875-63792281
  hyper

SEQ ID NO: 30848 - DNA, 768 bp, Homo sapiens; identical to SEQ ID NO: 23005
  chr1:63792564-63793332
  hyper

SEQ ID NO: 30849 - DNA, 1123 bp, Homo sapiens; identical to SEQ ID NO: 24868
  chr1:63795363-63796486
  hyper

SEQ ID NO: 30850 - DNA, 940 bp, Homo sapiens; identical to SEQ ID NO: 24869
  chr1:6479997-6480937
  hyper

SEQ ID NO: 30851 - DNA, 622 bp, Homo sapiens; identical to SEQ ID NO: 24874
  chr1:75595748-75596370
  hyper

SEQ ID NO: 30852 - DNA, 785 bp, Homo sapiens
  chr1:75602421-75603206
  hyper
cggcgcaggacgaagggccgctgtccccgcgctccttccagggcccagctggcccctcctgcagcagacagaggacggggcggagagggtctgggtggggtgggaagcttagctggcccgcgaggagggcagggccgcaagacttctggggtccgaataggtcaggggtcggcagccccagcgggtgcgtagccagagcttggactcggggaagagggcgagaatcgtgacctcaagaagctgggggtggggtggggtggccagggggaagggaggggaggcggtgggggcgcccttgtgggtaggtgggatgcgaaggggaggaggggtctagaaccgcctgcgcctcgcggtttcctgcaggtgagccccgagggagcgggggacgaggactcgtgctcctcctcggccccgctgtccccgtcgtcctcgccccggtccatggcctcgggctccggctgccctcctggcaagtgtgtgtgcaacagttgcggcctggagatcgtggacaaataccttctcaaggtaggatagggcctcgggtgcgaggcccaaggggagcgggcttagcgtgggagctctgggaaaagagtaatgttcctcccaccaacctttccgttcaagttctgggtgaaggttgtaggcttttgcagaaaatcagcccagtttagggcaactcatgcggtgggataaagtgagaagaaatcccagactcttctatgtcgttgcaaaacagctaatgtgtgacacatcctggtctggacgcgccggatgtgtgtggatgc

SEQ ID NO: 30853 - DNA, 938 bp, Homo sapiens; identical to SEQ ID NO: 24875
  chr1:78511432-78512370
  binary

SEQ ID NO: 30854 - DNA, 693 bp, Homo sapiens; identical to SEQ ID NO: 28384
  chr1:8277128-8277821
  hyper

SEQ ID NO: 30855 - DNA, 251 bp, Homo sapiens; identical to SEQ ID NO: 24876
  chr1:85773944-85774195
  hyper

SEQ ID NO: 30856 - DNA, 207 bp, Homo sapiens; identical to SEQ ID NO: 23750
  chr1:86860814-86861021
  hypo

SEQ ID NO: 30857 - DNA, 750 bp, Homo sapiens
  chr1:90308855-90309605
  binary
cggcggaggaagcgtggagtccattgatctaggtacttgtggggaggggagaacccgagcagcagctgcaaacggaagggctgtgagcgagcgggcgggcgggtggctggcagcgaggccaccagcagggggggcccgggccgaggccgcgccacctcggcaccacgcgggcagccggtgcggcggggtcgccacggccaggggagcgctgggtgcccaccatggcagttatgcaagcggtgaccccctggtcttgcctccccgccgccctgcactccttcctccccgctgccgacacttggatctctctagctctttctctcccctgtgttttcaaacaggaagtgcacggctgtctataacgtgctgccgggtctcaggatggaggagtgaagtctcctgtcgccgtggttccagcctccggagctcgcccaagccgcgtccccagagagcgccctgagagaacagggtggccgcttggtccaggtgcgcggggtcgggtctgggtccagggagcgggtcgggaagtctgcggcacggagcactgctagtgtcggatctgcatctccagctctgtgctgcagcttcacttgcccgccccccaccactggcttctcacccggggtctctgccaaactctggctgctgccgccctgggttcgggccggcggaaggccctgggcgtgcgctgcggagccgcctgcgaggactccactagggcgctttccaggctggactgccccgggctgc

SEQ ID NO: 30858 - DNA, 171 bp, Homo sapiens; identical to SEQ ID NO: 7743
  chr1:91170461-91170632
  hyper

SEQ ID NO: 30859 - DNA, 244 bp, Homo sapiens
  chr1:91180090-91180334
  hyper
cggttctggtaccaggtcttgacttgggtgtcagtgaggttgagcgctgcagccaggtccatgcgatcctgcacgctcaggtacttctgccgctcaaagctacgctccagttgattgagctggtggtcggaaaaagctgtccttgcttttcgaggcttcttggctctcacagggggactctcacggctactcgtaatctcccggtctccttcctcctttgtccctaccatagaaacccagccac

SEQ ID NO: 30860 - DNA, 1325 bp, Homo sapiens; identical to SEQ ID NO: 24879
  chr1:91184657-91185982
  hyper

SEQ ID NO: 30861 - DNA, 1893 bp, Homo sapiens
  chr1:91188998-91190891
  hyper
cgctgagcaaagatgccaatcagagaaagagaaattcatttgcgatgttaattaacaagcggctaattaaaacggcactttgagtgctaatcaatcgccttattaagttacagccatcactggaacaaattgaaacctccccgccccgttttctgcctttggtgcaggcggggccgcgttcccagataccgtgagaggccttggggcgcggaggttgggggcagcctcggtcagctttctcagtctctcccaggtctacagaatacgccactggacaagtgcctaagcagcgacttctggtccagacacaccgcccggggagtaagtagttgcgtcgaagaacaactcattcagcagcagttaacaccgacgtttcctcctagaaagagctcccgcaaagcggggggatgtgacctgtgggcccccagcaggggtaggaggcagttcagcccgagagggggcgctctagggcctggatcctgcatccctatttcctggaacacacccaacgcctcattctgaaaaccctgcttaggccctggccctggtgccgctcagcaaccaggaaagagctggacctgccttcaggcagcaagaacaggactgccagcctcctgtggctctgtctcccgaggctccatgagaaggggatgggggtgcaagaagggaagagtgaggtggtgtgctgggcgtcggggacgaggacgcacgccagccaagacgtgcctcccacccagcccacgcgcgcttccccacccccctggccctccaaaatcggtaagagaattaagatttcgaatccctattttgaggagccttccgcatttcctaattgttaaattcctgcttttcaccaaattcccgggggagaaacatttggcaataagaagggactgtgaatttaaatgctaattgagtgggtcctttttccgcagctccacctgcctggcagcctctgttgaaaccaaacacactcggagcgcccagtgcaacattcttggggtgccgagtagaagcgcagtaaagagagaccctagcggactcctgtctggtttgctttttaccgactcttacagaaaaaaagagaatgccattggaagaagctcttttgcgtggtgggcgatgtgtgggtgggggacttgtggcatggcccacggtgttgtttctgtgcctgcgatgacacacgtatgtcttgagctgtgggctcgccttcctggaggtgcgcccgaccgcatctgctggtgggtctgagcgtgcttggggtgtcccaggagaactgagagaacggctcccacgtgcaaagttccaaagcattaatattttcatcatattatcattattcaatataataatatttgttcggttagcggcactaattaggccacattaaaaccgtagtgtgtccctaatggtgcgtaatgtgctcacactcacatttttctctctgaggatgggcggctgcaggctggtaggggaggagagacaggcaagcggcgggctggattagggcgtgacgccccccaccacgcacacaaacatacacagcccactggatgtctgccgggtgggagccgcaatctccgcgcggtcgatggggccctccgctgcgcactcggccctgcgccgagcaccctgcagcctcctcccgcgacacggcgctttgaactcggcggattgattttgcttcccttcccccttttgtgtgtgtttgcgttcaattggttaggtttttaagatttgggagggctggtgtgaaagaattaaaatactcttaactggagcccctccgccgagaactggaggtcccgcctcctagttcggcgctttcaggaccctcttcccagagggaatttctttcagaaattccagggtgggcttgtaaaagacgcttcc

SEQ ID NO: 30862 - DNA, 1899 bp, Homo sapiens
  chr1:91190904-91192803
  hyper
cgtcagggtctttttcctgttcctggtgccagcggtcggcccgggcgccccgcagacctcggcgaggtagatgttaagctcggagagtgcccctcccgcaggcgccgtggcgagatcactctgaatatgtaacatatttgtaacgtgcgccgaggtgtgatgtgtgtgctgaaatagggggatgggggaattcgaagccggattgggaaggcgggggggaggcgcacagaactcacaatgtacttcgcaatctaacaatctgaacattcatttattaaaagctgctgcgtgacatttacactgagccaccagtctctgcctctaatccgggcgaaaacgattgtactgccgagttatggctgcagcgtatggggacgctgctgtccgcggccggacagagcccatcagctacaacgcggaaggcctctgcacccccttgggggcgggaggaaagtactgccagtcctgcctgggggccgagggtaacaagcaccgagcctctcgctccacgcagggccagctgcccagctcagcgaagctcttgtgatctggtgcgtgtctctcgctcttccctccccatcaaagaagtaaactttctacctactccccctaatccgatcgtttagagctgctgttttccttttgtcagattcctcctccccgatcagtctgagtacacgatcagaactgctcagagagcaggaagcacattgatttcagcttgttctgtccacagacaggccctgacaaggttgttagaacagccggagaggtctatacaatcacttaattaccaaaactgtcagtcaggcgggacgcggatccgcgtcccgggctgcgctaggcattccagcactgggccgcgcgcgtgattgatcggtgctgatagcaccgcaaaataattacggcgaattttctgatgtgtgattttatcccaagttcatgcttcagagaggtaatcggagaatgagaagggtcagtgccatttcggattacctggaatctgcgagaaagggtaaaatgggggaaggagctccgaggaaaacgggagagatgggggtgcagagagagagggaagaagaaagcgagttatggattgctggagggactgcaagcaattcgtcaaactgtgcaagtgatttccttcagagccagcatatggcagattgattttgtccaacgtcggttttagccacatttaaaatgatccagcggttattactgcgattggcttaggaactgacaggcagttttaggcgcaaggagtatagatcctgtttaccggagatgtgttcgtaactgctgtcaaatacagttaagtaaatatcattagcgaagagctctgttaagagaaatgccaatccaataaatatgcttttcctccccgccctccgcatggctgcctgcgcttcctccagaggttctccttcctgctcctttgctgcttgggtcagacgtcccaggcatggtgctgactcccgccaccttggagccccgagctgagcctcgggcagaagatgacaggccagccgtggggcaaggaggccgcggaaacgcggaacggcttcggggagacggaagcgcccaatgagattcaccctgcagcccgggtccagcccaccttcctcggagattgccgcggccctcgaacccgggcctaggtcttcatgtcccggcggccagaggacgttgcggggaccactggggagctgccctcagtcagctctctgccccacgccggaggtcctggcgcggcttctttcccgaactagactggcgactctgggccaggccccaaggaccgccccggcctctccggctttgcggggagaatctgaggaaccgagtccaagatagccgacctaggctgttttcacccagaccctgcgtccccgaccc

SEQ ID NO: 30863 - DNA, 923 bp, Homo sapiens
  chr1:91194554-91195477
  binary
cggatgtaatttcacatgcgtccgggttgatgtgatatgaccgtatcagggaaacaaagctaagtgcagtcaggatctgttagtacagtggcttttgatggaacagctgaggcacacatcgcccgtggcatggactccggggccgaacgctcacgaccaagacttttgcccttttgaaatgaaatagaaataggggagctgcaggaaaaccgaatcgcgcttagggtcaggagcaagacaggagctttcagcgaagatctgaacattcagaactggaacgggtaattagcagatagccaggaaaaaataaataaataaataaaaaagcctggatggacctctgtaaacaatcattaagaaaaataaaaatgaaccttcttattagcctgccttggaggtagtcagaaacaaacaaccaaagcaagagaggatgaagatttaaataaaataattatgtgcatcattaaaataatcatatatgtttgtacagacacgtatacaccaaggaacgtaatgggggctcctcgcacagtcccaggagatgcaggagcccaattggtgcccaggagctgcaggctcgggtccccagccaggcgggggactgcgggccgcccgcgctgcagggccgcgggtcaccgcagggggcgccggggcgctacgggtcctcgggcctggtcttttccggtccctgcccgagcccgcgcctttcccgcctttcgggggagaaacctgcctggacactggaactgggagaaagcagcagcctaattgctcttccgatcgtcgcttgggaaaggggggcttcacatttagaaacttctcgcacctttctctctcggtctctgccttttggtgcctgaaaaaccttcaaagatttgcttattttgattcctcgggcgttggagctgtattaggcagcactc

SEQ ID NO: 30864 - DNA, 612 bp, Homo sapiens
  chr1:91195894-91196506
  hyper
cgtgtcaatttaaaagaccattaaagcagcttattttggttttaattggaacctcctcccttccaactacaggcttaaaagaaaaaaaaaaaaaactctcccccacacccaggcgcgcgcacgcacgcgggcacgcagcagcgatggggatgtaggtcaccccgcgggttagggccacgcgcccgcactcccgccgcagccgcaaccgcagccgcagccgcagccaacgcggccgcggagcgacgcagtccgcagcctcgaatttccagaaattccagcactggcagcagcacgtctagttcgaacgcttccaattaaacaacaccgtattcgcttaaagattttcgcaaaaagtgcactggggccaaaaatcaatcactctccctagcctgacccggtgaaaacagatgcataacatattcatgcgctgagcacgccgagcagcccagcgcggaacttttttttttttcttcttcttcttcttcttttaaataaagcgaggaggacttccgcggctcggcagtcctgctaaagctggcagatgcagcaaaactaatatgtgtaaatgctttaaagcaataatctgcttacagcgacacttccccgaacggc

SEQ ID NO: 30865 - DNA, 967 bp, Homo sapiens
  chr1:92948641-92949608
  hyper
cggttgagtctgagggtgctgaaggctcccccaatcccccgaccagggcagccgagcgtcttcccctctccacccagaccccggccgggaaccctctcggatccgagggcaggcgcagagaggccatggcacctaggagacaaacccggaggaaccaggacagtaggaaacaaaaacagcagcaaaagggacgttggggcagcccctcccagctccggactaatggtgtgccgaggtgcagtaggcatccgggggagcagccccgcctggcccgcgcgcgcctcgcacctgctcggctaggcgccggtacattctctaaacggagggaatagtctggtcctggggagcgcggctggtggtagctgtgagccttcttgcttttgacgagaaatgagcgcggcatggtggtccggcactttccccactgcgccccaagagtccctggagccgctgtcacccacggtcactccgagggcttgctcagccccagcccggaggagacctgagagggaaagaaaaccaggtggagacgtgggtcagtactctccggtgcggcggactgggcacccaggcggagggagagcgcgggccagggaggcgcgcagagggcccacgggaggaggggcttgaccctgctgcgccgcgcttaccaggtggcacttggacaggtggcgcgaacccgccgtcgttgccgccgccgccactgacacagctcagcggtaaaacctgtcccggggccctgtctcaggcccctttcctcctccctgcccacgccccccagctcctcccctttcctagcgaagctcgctccggcaatcaaactccctggagagctgtagttcccatcgggtgggttaccccaactcagctactcatcgcctgcctggctgtgctttacggctggcgagggagggcggggacacgcggatcggtttaggggccggggatgcccagtggtcgaggaccc

SEQ ID NO: 30866 - DNA, 2943 bp, Homo sapiens
  chr1:92949665-92952608
  binary
cggggggaggggggaacagaacacaagataaaactgtggggcggcgggaggacagcagcagagggattggggacagcagaggccagagaaaggaggtgggagagcaaagggacaggaaagtgaggggaacaacagacgaccaacccccgccccaggagaaactcgcatctgggtgatcccactcgcccctcactagtgccccacgtaggagaaactttgcccttggactcccggctgcggcgggcaccggtcgaggctgcggcgagccatcccagaccatggagacctaacctcgggaatcaggtcccgggaaaaaagcactttccgttctgctcaccaaaaaatcttgtcctagggaggtggagcccgatccacgaacgttgactgggaaatgctaggtgtcccgagtcggtagtgcaccgacaatttagcagacaaaaaagacaggacgccagagcgcgcaggctgcattagcagagagcgggggtcgggcccgggcccgggagggaactagctgcccggggcgtcgctctcattaacccccaatcagttcacctaataccaggtcgaaatctgagcgcagcgggagggcgtggctgcgcctgccgctaggctccagccggctccgggggcggtaccccacagtcgaggtggtctggagtaaacgaatctgccttcctcccggggtgaaggcgatggtgaccgggttcacacgtgagctgcagtacagcagttctccgtggcctcggctggttcagaaacgagggtgctgggaactctgggccggggcaggacctgcagtcctccggcttcgcgctgtttccactgccggactaggagcccctcggcttcctaggcaagatgcaggccacacagtctacgtctgtccgttggcgctctcagctcaaacgagtcctacaggccttggtccctgtagggtgcaggccccctgctccagatccccagccccattgtgtccccttctccggaggaatgggaatagacctgggagaaaagacgcctgggacgtgtcgcggggctcccgcgaagtttcccgctacccaagcgccagaatgcccctaggggtgagagtgccatccgcctccctccggggtggctcctagggctagagctttgtcgcttcctgcacttctcgtccgtacaattagacgccacaaaccccaaacccaattctttaaacagccacgaaactcggaagaaaagaaaaacggagtggcgttgtcccgagggtcccgctgcagcttggacccacgttggctgggagcgggacagatgggggcggggtaactgtcagcgccggagctgggtctgggctggcgccaccagagaccaggcggacgcggaggccgcctccccacccgggctgtaagcccacgcctctctcgcaccccggcccgctttgctggttcctgtggggagcgacagagtttggaggagataggggccccggggcctgggccgagcgcgtgggaaggcaaccccgcgctgcagctggcgcgggaggtggggcggcccctccgcgcgctcaggcctctcctcaccgtccgggcccaggaaggagggagccgagggcgctaagggggcgtcctcccgagcgcagctgccgccgcctccccaccagatgtttccttccctggtggatttggctcccctgccgaaccaccagaccgcctgctgcgcgcccccagctccagatttccagtcacactgcgcgggtcgcgccctaacccagctgccggagctctctgggctcccgcacggcggtccgcagcaggtgggaaaccgcccgcgccctctgatcgcccccgcagtgccagtgctctgcgagtccccgcggccgcccccaccagggcaggaggcgcagaacaggctcggcggacctacctgcggagtcacggcgcgggcaccgcgctaggagagttttcaaacggaatcttgctttcgggagagaccgctctatctctctgacttaaaaaaaaaaaaaattctccttccgagctcagcccccaaaaccacaagcttcacttcctgagcgttactgagtcgctcgcatagccctcccagacctgctcccaacccccgtcgggcggccgggcgcgctcctttgcgcaagtggccaggcggtggggggcctggcctttccagcccgtcccgcgcgccccttagtagtcctcccagttctctccctgtgggtcggcaggggatgggggaaattggaggtccggacacttaggcactagaaatgacttgaaagaaaatgaactattcttggctccagggagacttccgcagcgagagaagccacagattgaggacacagattgactggcgagagaggggtggggggcgccccgctccgaggaccctccccgcccctcaggcctcggtcacccgccccccccacccccgaccccgccgcctcctagggctgcaccacccccgggtcgggaccgtgaatcaccggcccgcggtgccgccggcctggagcccggcgagtggccacggcgtccgcagagcgaaacctgccccgcaggccccgaaatagcttgttgtggaaacacttggggataaatacgcccaacgaggctgaaaataccttgacacccaatccgagaggtttgctcatttcccttcggatttaggtaatggttaaatttggaagaggtgggcgagcgccgagcccccggcggagagggccctggcggcgcgtcccgcgggcgcccggcgggaccggtgggcgcaccctccctgcgcggagctcgccggctctcgaccgggtccgctcagccttcgactaatttccggtggtcggagctgcaaaattaaaggccgcgcgggggcagcgccggcggctgctaggctgactccgccctgccggggcaagccagggagagcgggacctcgcacgcgggctctgccacc

SEQ ID NO: 30867 - DNA, 284 bp, Homo sapiens; identical to SEQ ID NO: 24884
  chr1:95428438-95428722
  hyper

SEQ ID NO: 30868 - DNA, 911 bp, Homo sapiens; identical to SEQ ID NO: 28389
  chr1:9712089-9713000
  binary

SEQ ID NO: 30869 - DNA, 1351 bp, Homo sapiens; identical to SEQ ID NO: 23016
  chr10:100993468-100994819
  hyper

SEQ ID NO: 30870 - DNA, 967 bp, Homo sapiens; identical to SEQ ID NO: 28392
  chr10:100995729-100996696
  hyper

SEQ ID NO: 30871 - DNA, 611 bp, Homo sapiens
  chr10:101279860-101280471
  hyper
cggggccaatcagcagccataaatcttagagaaccttcaccgttttacaagggagttcgcaggggctgcccttctccctcacgcggtctatttacaacgccgaaatctccgtgttaatggacctaggataatggtgtttactttaccgcgataaagcgctgggcttcctgggggagcggctgtaaaatgtcctggaggtagggatggaacgggcgccgtaaaagcgggcgctggaagggcgggggcaccaggttctccttcaggccggcgcccccgccctccaccctctaggccaggctgagcagcccaggcctggcgggcgagcaccgttcccacataaatcaccagcgccagagtctcgggaaaaggcgcatttttcattgctggctgcagggcgactccagaccgcgaacgagaaacagaagttgtctttagataaaccgttcaccggagcgcgcgttgtggcagcagggtccgcagagcacagggcaacctgggtctggcgctgcgcccccgccaccgatcacctcccagaggccccgcaagaaacccagatcctctcaagggctggtaccacgtcctcctgccagagaggagatagggagccaagc

SEQ ID NO: 30872 - DNA, 1111 bp, Homo sapiens
  chr10:101290132-101291243
  hyper
cgcttaggcctggcgcaaggtacctggcccgggagcggctggggcggcggaatttggggtagaggggcacccgtgggccggctggtggggaggagacagccccctgcatgagctcacagaggcgccctggtgggctccggcggctgcagagcgtctgtgggcgtgtattggcgatcaggcgctggaggggcgctttgtcctggtcgcagttttaagacctggattgttgggctagatttatgaaaggcctaggagcgaagcgagatgggaagcaagggaatgtaacaaggagaaatgcaggcttcggttggaaactggggagagagagattgtttcgatagcctttctccttttctttttccagaatcatgaaatcaccgaggagaagaaaactggggactagaagagagcagaaacatttcccctgagacagttttgccccggaggtggggtggggaagtggcgctggagctcagcttcctgcttttatgctcggcggccaccgtgatgcacacacactcgaggtccgccaccccgcagtgccgtgcacccctctgcccccacctcggaatttttgtgcccgagcgctcgggatccacggcaaaaccaggcacattcctccctctgcagactcaccgcctggtttgtagacactggtctccgcctggggcgtcaatagtttcaggatttaaagcagaaagacaccgggcgcccctgtggctgaggaatggcggttccagcacaagaccctgcccacagagggtctctccctactgcctgcgggccgccgctaccctaagtactccggggcgcacgtggcccgcgcggcatcccagctccccgggcggacccaggggctgcctctccacaacagttccgctcccttctgcagagccccgcctctcccacctcccgacaggctgttctttctcccttcaaccttgggcacccactcctgtcgccgttgcgggacccgcgtggcagccctccaccctcgtacccactcccagccggtgtcttatgccgctcggaggcaatgtccaccgtccctgcacctttcacctgccccttccaggtgagacgggtctctttcagctccgccatcctgacc

SEQ ID NO: 30873 - DNA, 1327 bp, Homo sapiens
  chr10:101292301-101293628
  hyper
cgtggatccagcgcccagtatttacccgccaggaagttttcctgccccgcgcagcagctgaaaaaaacacactcctggggcatccttccctggcgttggttcgtggacagcaagcctcccagaactggcctaggtcgggaaggtgcagccacgcgggaatcaatggttcaggaaccggatctgtgcagcctcgcccgcagcgtctcggacttcaggactctatactagtccttgtctatttctggtagagccgcaacatcccactcgcagagagcagggggcgtggcccacatgagccagaacctatagggagggaggttggggcgccagccccgcccccccaacgtgacgcaaatctcccggacagaggcttaggagcccgggccccagtccctgcagtggctgtaacaaaacccagacccccaggtcccggccaatggaggcgatttagactggagtgggaccgcgtctgtcaaaagcccgactcggcagcagcggcggagtccaggaggagagctggagccgccgcgctgcctccccgcccccgccgggatttattatttggactggacaattaagtggccctgatgatgttaccaagcccggtcacctccacccctttctcagtcaaagacattttgaatctggagcagcagcaccagcacttccatggtgcgcacttgcaggcggacttggagcaccacttccactctgcgccctgcatgctggccgccgctgaggggacgcaattttctgacggaggggaggaggacgaggaagacgagggcgagaaattgtcctatttgaactcactagccgcagcagacggccacggggattcagggctgtgtccccagggctatgtccacacggtcctgcgagactcgtgcagcgagcccaaggaacatgaagaggagcccgaggtcgtgagggaccggagccaaagtgagtagagggggaaagaaaacgcacccgcacacctggagcaatggcagagcgcacacaaacagcccacagaccttgccagcgcagctgcccatccctttaccctttggctggggccatgcctccgccctggtcaccgacagctccacaaagcgcaggtacctgcaagggagccggggtggagagacaaggacgaggtgaccctgacaactactccccccaaaagggggaaatgagggaagggaaggtggttactgctgccctgatgctgagaggcgacgtgggctcagcgcctgggtcctcataactggcagtatttttgctcttccccccgccccaaaaggctcttcccccaaaaagggcaggagcctggacctttttc

SEQ ID NO: 30874 - DNA, 855 bp, Homo sapiens; identical to SEQ ID NO: 29662
  chr10:101294530-101295385
  binary

SEQ ID NO: 30875 - DNA, 641 bp, Homo sapiens; identical to SEQ ID NO: 29663
  chr10:102497154-102497795
  hyper

SEQ ID NO: 30876 - DNA, 835 bp, Homo sapiens; identical to SEQ ID NO: 27460
  chr10:102894440-102895275
  hyper

SEQ ID NO: 30877 - DNA, 1261 bp, Homo sapiens; identical to SEQ ID NO: 23752
  chr10:102899421-102900682
  hyper

SEQ ID NO: 30878 - DNA, 940 bp, Homo sapiens
  chr10:102985376-102986316
  hyper
cgcttgggcttacagttccaggtgcccacattgaaattcagcctggccttgatgcctttagcctttggcccccgactccccaaggatgaggccctcggggctagaatcgaaacttgggaacccaaggctccaccccgcgtctgactgagtgatacctgcagcgctcccggggctcagccctgttttcggggagtgcagggagaatgcccttgggtctggggtgggatgcaggaaatgcagggcaagaccccctcccaccctttgttcaacacaaattaatgttgtactgtggtgtgcccccacatacacaggcattttctcccagcatttcacggctcgttttttaccccgacctggcgaagcccgcttctctcccgatttagcagctgcctcaggtttatgggcaagaggcgcctcctcctgctgcttccccctcgcccttcactcttaagcctgtcctgaaaatcccccccaaatctccaaggctagggcgaccggcacgaagagcggcaagaagcccagcctgccgctgcttctcggaaacgggcccaccactcagacacggtcgccgccggttctagtaaaatggcaaagactttatttattggagaaagaggccttgggtacagtctagggaggagaggggaagggaggagcagggaaggggcactcgcagcccactcacatccagccaccctcctctggccaagtcgggtaggagtggggtgttcgaagtggcaagagagacccagagctgtggaggaggtgaggtgagggcttgggtcggcctcctctctgtctctgtcacatgcaaaaaaattctaaaaagagtacaaaataattatagggctttgggttctgttttcgatagttggttggttggatttccccctgcattgtccctaagagccggactccaacagtcagtccgaggaaatgc

SEQ ID NO: 30879 - DNA, 1265 bp, Homo sapiens
  chr10:102986376-102987641
  hyper
cgaaaacagacttttctctcagagggtggggaggaaagatcgattttgaaacttgcaagtcaggacctgactgcccacctcttcccctcccacatgaggaaaaaaggcccgaggaaatagaagtcaactgcaataaggccgagggaggcgaggaaggagcgggccggtgcattcgccacatgcagagaaaaatcaaaacagccggagctgccactcccctagaccgcagggttagtgttccccgccctggtttctgtctcgccctcagcaaacccggcagcccgagagctttgaaaacatcgaaatctccgagatttaaaaaataataataaaagaaaggaaaaatcaggctgcggtgggaagaacccgctatataggtttaaatatttatatagaagccatacagaattgcacggcgagggcttccggggcggcggaggccgctggtggcggccggcccggccggccagcctgggtttattgcttcgagagggaagaggcggctgccaggagccgagtccggggccggggacaggggaggaggcgggagttggcagaggaggtcccagctcccctcggcggtccggtccgggaggcgttgggctttcgagcgctaggagcccagggcggcggaagacccggggcgccgctcaatcgtccacgtcgatctcttcgtcttcctcgtcctccgagcagtcctggctgctggccggctggtccgtgagcggagaggcaggcgagagctgcagggcgccagcgcccggggccttcggggcgcctggggggaggaccggagagccgggcctcgacttggccctgccgcagccgccgccaccgccggctgtggcctccgagttctgctcgagttcggccagcgccacgatgtccatctgcccgctggggcccagtttcttggcggactctacgtcggccttcatctcctccaggtcccgcttgagcttagcgcgccgattctggaaccaggtgatgacttgcgcgttggtgaggcccagctgctgcgcgatttggtcgcgatcggcgggggacaggtacttctggtatagaaagcgcttttccaattcatagatctggtggttggtgaaggccgtgcgcgactttcgccgcttcttaggggtctgccgctgcccaaagatggtcataccgtcgcggcctgggaggaaaggacagtgtaggctcgcgttgggagagaggaagcccaccctggctctcgcccccgtaactccgtaacccacccaggcctgtcc

SEQ ID NO: 30880 - DNA, 1584 bp, Homo sapiens; identical to SEQ ID NO: 24891
  chr10:102995986-102997570
  hyper

SEQ ID NO: 30881 - DNA, 601 bp, Homo sapiens; identical to SEQ ID NO: 23018
  chr10:102998293-102998894
  hyper

SEQ ID NO: 30882 - DNA, 273 bp, Homo sapiens; identical to SEQ ID NO: 29669
  chr10:105344345-105344618
  hyper

SEQ ID NO: 30883 - DNA, 792 bp, Homo sapiens; identical to SEQ ID NO: 27462
  chr10:11207098-11207890
  hyper

SEQ ID NO: 30884 - DNA, 236 bp, Homo sapiens
  chr10:1120729-1120965
  hypo
cgtgttaggtttaactttatacatctcagatttgccagtctgaagtagtttagaaagccaggttcgcgcaggcgcaggaggtctgtcgttgccgagaactgcgacgtccacgtgcacacagtgctggctgcggcctgaagagctggctgcttcccgcacgtgcgtgcaggtgctttcaggtgtgtgttggtgtcgatgtgatggaagaaattcatttaaaagctttgctgagtcac

SEQ ID NO: 30885 - DNA, 1291 bp, Homo sapiens
  chr10:112402953-112404244
  binary
cgcaaggcacgcttttctctacttcccggggacgctggcctcaggacttagaactcctgtatgccggacagccggtaaggtctactgggcggccgctttctctggtctttctctgctccgtagacatttctgtgtcaggtgcctcgcatattcgcacccacgcgccagggcattaagccgaaccttgcttggtggctctcagccttgaaaggccgcaggatgtccgcgtccacagctgtgaaccggtgagtgcaggtggacgggcgcacgcgggcgccagggtaattaacagggcttcagagggcgtgacggtgaccgtacgttgtcggcgaactctcttttcatcctttacatttccacggagatttggccaataaataacaagaataaaatgtacgcatggttttgtctttgcgctcgtggggtcgtggcggggtcttttaagtgaagagaaaaagaaaccagaaacccacggtggccccaccggctgcttccggggacacctgaaatcagcagctggaactgacaatttggagagccccggggatggtcatctgagacctgggttacaatacaagtctgacctcggggcgagtccaggctttcttcccctcagggtcgggtgcctcaagagccagtggcgctggccgggctccagccgcgagcagatgccaggcccggcacactttgcacgggcgatgcgcgcggacgtcccgggcgcgctcggtccgcccggcttggcaggagctgcgagaggccgcgcgcaccgtccccagggacagccggaggactcagggctcccgggtggagcgagagcgcggcggccgaccgcgggctgcgtgtgtcgccttcctcacgcggtatgctgcgccgtggaacgctgggctacggaccctgagggtgcactgtggcgggtggcgtacgccgcgctccctccccgcttcctgcgcccagggtcggcgggcagagttcctgggtccagcttggcgctgagcagcccccggccgcagagcagctcccgccggtcgggagacgccccctggcccccgcccccgcgtggccggccgggacgagctggagcagcgggaggaggcggcgccgccaggactgcctcctccccgcccctcgcgtctcctccccgcgccaccgggaaggacaaggggactgggcacggggaccccggccagtgagcgcccgtggcccgggaccgcccctcccttgagctctctcgccgcgatcccgggcgggtctcgccccgcatggtgctggcagcagccatgagccaggacgc

SEQ ID NO: 30886 - DNA, 654 bp, Homo sapiens; identical to SEQ ID NO: 13204
  chr10:114708972-114709626
  hyper

SEQ ID NO: 30887 - DNA, 2768 bp, Homo sapiens; identical to SEQ ID NO: 26151
  chr10:118890928-118893696
  hyper

SEQ ID NO: 30888 - DNA, 767 bp, Homo sapiens; identical to SEQ ID NO: 29673
  chr10:118893719-118894486
  hyper

SEQ ID NO: 30889 - DNA, 751 bp, Homo sapiens
  chr10:119300904-119301655
  hyper
cgccagcagcctggggatgtgatcataattatgccgccgcgcgagccaatggggacgagggaactcggtcctaaaatcatcccaaaaccgaaggcgagctcgaaaatgcggacacggcccgggaccggagatgcgatccgtagtcgttagttgcactgggtttgcacagcaaccaccacccccccaccaaccccgggacaacagatggcataataataataatagaaataataataataaaataatatcatctataataataataacattgaccacactgacaaaaataattacgacggaaccttaatagtacagtagcaccatatcgggctctcccctgaccttggactgccggtcccagatattccagaaggaattgttttggggaaggaggtgagcaccctcccagacagaaaacgctagagaccgtggggcgagagagggagagagttggaagcccactgctccggcggggtcggcagctcccggtctcaactcgcaaacgaacgagccgggtcaagaatcgcgaacgcaccgaccctgggacctcgaggctaagcgtggttgatggggtgggaggaccccgtacccctcactccaggatccctcctggcctaggaaaccgctgggagttttgctaagtgtggggattggtataaccgaacggcgcctttagcccgggaaccagcccctgcccgcttaccctcgcggtgctcttggggcgatcccagttctcccgacgcggggccgc

SEQ ID NO: 30890 - DNA, 259 bp, Homo sapiens
  chr10:119806965-119807224
  hypo
cggccgcgcctctgccgctatcagtgtgtgtgaccttggccgagtcatttcacctccatgagcctcagtgttttcacgagtaaaaaagccagttctacctcatgtctaagactccatcacgactctatgggctcgacgtcaaaaggacccccgtggggactcacactgtggtggactgtgcaaatcatgtggagaccatgccccaaacacgggtttcgagtttcaggggataatacatgtgcctttcctagcacaatgc

SEQ ID NO: 30891 - DNA, 388 bp, Homo sapiens; identical to SEQ ID NO: 24900
  chr10:122708510-122708898
  hyper

SEQ ID NO: 30892 - DNA, 959 bp, Homo sapiens
  chr10:123922619-123923578
  hyper
cgcagctctccctggtacagacttcagctgcctccaggacccggggcctgaaggaggcagaagccggcggtggaaaagggcgcacgtctctcccagcgtcgctcccgctgcccgctgcccactgcagcctatttacctgttcctccagccatccccttagtcctgggccgggagagaccatttcctccttcctggagggatgagccaacagggctgagccccctactctctcggtggtcagcccgcccgaccaccacgcccctcctttctagggccccagctcccgggccgcggctcgtttgcatttcaaagctacacaatgcgggcggtcccggcgaggcgggaggggccggggcagagggagggtcttcgcctccccacccccagccccgtttccggagcccgcgatggagctttgtgaagatgcaggcgttggggctgctcggcgatgatgacatcatcgtgtcacacacaggagccggctgccggggggtttaagagaagagcctttcggaccacaccggcgctcacgctcatacccgcacgccccgggcagagccgcgcacgccggccacactcgggcgcgcgccggccacactcgcgcgcacacatacgcggcgctcgccccccggcccccggctcgggccgcgagtcgcagctccctgccgccgctcccgccgccacggatgcccgcagctgctcccctctgcagtgcagcaaccccggccgccggccggctcgccccggctcccggctgcaggaatcgcgccaggacgctggccccgctcgcggctagcttgcacgccagggcacagcgaggatgggagggtcgcagtccctgcagccagccccagccagcgacctgaacctggaggcttccgaggcaatgtaagtgctccgcccgggccgccccgagtctcccggggaggaggagaggatgcccgggctttgttagtgtc

SEQ ID NO: 30893 - DNA, 1171 bp, Homo sapiens
  chr10:124899013-124900184
  hyper
cgctgactgcctctgcgctctctaagtacaacctggacgcacaaccctgtattccgggaggcggtggagacagaggcggctttgttcgcgaccagaggcactctctcccctgtactttccgcggcctgaaacgcccagcgagcagggaagaatgctgggcggaaggggagtggacttaggcttatctagtttgcgaaattgagcaaagcgacagcgcgcgaggcgagataccagagacagctggtatttccgaacactggtctgcagcctcccgttctgttcttaaacctgggttccttcgggagccgagagcttttgggcagggcatccctgggcattcgtcagctggttaacttcggtgggctctggttggagggaagaagggagtgagttcagagtttagctgcagccgtaggccgattgccaagtcaggctaggaaaggctgggccacaagaggacaaccccagggacagccagctcttgggacagcggctcccactaccaggagaggggaacttcctcaggtcttgcagagctgagattcccggggcgactcgagcatgggcgcggtcctgatgtgctaagtgtgagggaacagaggctacctagctgctgcagctgcaacagagaagaccttgtctcttccgtgccaggctcttctctttcccctggcgcccaacacctcctgggcggcatctctagatccccgaccctgtcctggcagacgccgagaagcgtagcgctcaccacacccgcgcgctactgggttccaggccgccgcgctcttagtgagcagcctgcggaggcacagcgcgccggaaccgcctggaagggtgggtccgcccgacagaagcaggtgcctgggcgacactcgctggccgggtgtggccgcctgcctttaagctgggggtctgcacgtacaattcctggcggggcacctttgaagctggggagccgaaagggggagatgaggaacccagagggtgaaaaagattccagagagcagccatagggcgcgaccgctggggagcgcctgcacgcctctctttcctctcgcagtgcgttgctaggctcctcaaattcaatcgacacaattgattctactgtggctgaaacgtccagtatagttttctgttaatggaaaactgccctccgaataaaccgacatgc

SEQ ID NO: 30894 - DNA, 674 bp, Homo sapiens
  chr10:124904560-124905234
  hyper
cgtctgggcctccgtgctcccggtgaagatccccatatgctagaaaggggcggcaaggaaggttgtttcttgtccctcccgtccttgcggtgtgacggctataggtgctggaggggcgggaggtccctcgggctatcaatcgaggggagctcaggggaactgcagtcagtcaggctgcagagctgggtctccaccacagccttccttgccccagccccgtgcccaccaccatctcttccctggtaaagtgcacgcactagtaggagctcagtgaacgtttgctgaatgaatgtgtgagtgtgcgcaggcgtttatgcaagtgccttcatgcgaattaatgcgtcctttgccgggtgtggcagcagaggaagtgcctcggtgaagatcagaccctcgaagcgattagagggacgggacagaggaaatacaaggcaagatggatctttttgacttcccaaactatccctaggggaaggagagatagggacgcaaggcttcataacttccttgtttagagtccgcaagccaggcttcttgcaagggtcgactccccagtctctcactgtttcagggcctgggagttgcttttccgaggcccacttcgaggtcccctgatctgacagagatcactccttgggctcttgccccacccatatacccgcccccgccatccc

SEQ ID NO: 30895 - DNA, 998 bp, Homo sapiens
  chr10:124910216-124911214
  hyper
cggcatgataacgcacggaaggttttcaggtttttcggtggaaagacttgcatgcgtctgtctgtggaagtttggctcgctccacgtggagggtgggaccggggtcaggggttaaaggtcgggaccttggcgccgcccagactgcacgtggctggagctgcccgcccactctccctcctaacgcccagaatcgtcgcgcgggctggggcgcaccccggctggaatccagctcaagagtccgcgcggagaaagacaaagactgggaggcaggcctcgccatttaagcgattgccttctgggaacaagcgagctgggtgcccagcggcatattcccggcactgggctcgccttgagcttggccacagcagctcccgctatgacatgccctgtgccgcgcacttcctctccaggggtataaagcaggcgatggcgctgcttgtacctagtaaagcctccactttgctcgccgcgagcttggcgcgaccagcttgtcgctgcgcccagctacccggccggtggcagagttatgtgtctcgcgcggagagggaactgggcgcggtgaggcagttctgcggctcaggagagatccgaggcccgggaccaggcaaagaaggtgagggaggcaaaggcgcttccctacactcttttgttgttaatagtttgcattggttcagcgtgtggctggatcaccggctagcacgcggccgcttgctctgaatggaaccttgacgcgcggcgggggcgcccacggacttcctcgccctgacacctgcggccgcgcaggggctgggagggcgctgcaccgagagaatagccgcgggagtatcatgcaaattgcagattctcgctcccaatagattgcagccacctgttcttggcaaaacctcggaaaaggaagcctgagcttggaggaagccggtggttcagcaccacctggggcgagctcctccggcctctggctgggcagagcggatgcaaaggagcctggagtccgcagc

SEQ ID NO: 30896 - DNA, 706 bp, Homo sapiens
  chr10:125650746-125651452
  hyper
cggcaacagggagattcccgggactggcccatcccagacacacacaatgggagaagccagttgtcccctggaggcgcgcaaccaccggcgccccctcgggctgcccagcgcagaaagttccttacctggtggaggcggctccggagccgacttctccctcttgggagctttcttgggcttggtggccctcttgggcggcctgggctcctgcgggcgccgctcccactcctccccgggccccgcaggcagcggcggagagaaggtctcgagctcgggctccgggcgcgcgtagtagggctcccggctccagatctcctgcccgtaataatcagggtcctcgagggctgcgccctgggctccgaccccggccagggtcactgccaggagcaccagggccagcgctggggtagcggtccccgggcgggacatgcctgctccgccccgcgcccagggcagggtcacggtcaccgggggcgccgggcgggctgcgggcgcagaagctggcgcggggcaagggcgcagggcacagcagagcggcgcgcttgggcgcgggaggcggccggctggctgcgcgtgtgaccggcccgcggggctgggctgggctgggccggggcggacaggggcgcgcagaggcgcggggcgggcgcaggggggccggccccgcccttccttcttccctccctttcccggcgacccctccgaggcc

SEQ ID NO: 30897 - DNA, 368 bp, Homo sapiens
  chr10:126331903-126332271
  hypo
cggctcggcagggccctcagcagttctccctattcacgacgcgcaggtggctgataaatttcccagggtttctcggcgcggtgattgcgcctggctctttcagcgtggctgcaggaatctatacaggtccacttaaatcagtctgaagctgtgaaagcctccatcactcgtcgcccgggcccggccgcccaaacagagccccgggagggccagcgggggggtgcagggctgggaggacagtgccaattaaaaatctgagcctgtgggcctttctctctcttgttttcattcctacagctacattgtgtccactggcagcggattccaaaggcgaagaggctgcattcacggcccggagctttagagcc

SEQ ID NO: 30898 - DNA, 287 bp, Homo sapiens
  chr10:127451818-127452105
  hypo
cggtaggcattgctggtcccttacctgtctctttttcttttttaaccctagcaataacatcgaagatgacacaattctcaaaaccaacaagcacatttactcccagcttttgagagcaactgcaaataaaaccgcgactcttctggaaagaatcaacgttatcgtccacctgctgggccagcttgccgccggcagtgcagcgagcagcaatgccgttcagtgactgcacagagccgtgtcccagacacgctgtcagtgccttcaacacggagccggtttgttcattc

SEQ ID NO: 30899 - DNA, 63 bp, Homo sapiens
  chr10:131936589-131936652
  hypo
cgggattacaggcttgagcccccgtgacctgccctgttgatctaaattgagtgaaattttgcc

SEQ ID NO: 30900 - DNA, 527 bp, Homo sapiens; identical to SEQ ID NO: 23760
  chr10:133951484-133952011
  hypo

SEQ ID NO: 30901 - DNA, 732 bp, Homo sapiens
  chr10:134699327-134700059
  hypo
cggtgggccgtccttggcagcacctgcacagcctcgtccagcaccttgaggccgccctcccagtcgtcctggtcggcatggctgtggaagagcaggccgtagagcgcagcacggagcgccaggtcgtcctcagcccctgggagggagaaggaggggtgtccttggagccgcctgatccctcatcaaaggcgccctcggacctcccagactaagctgcccatcacagtgcccctgaggtggaaccgcggctacagaggtgcccaggccagcgcatgccccgcagggctgaagtgagctgtggacctgcatggcccctccagccccacagtggccacccgggatgccctttccgttgcaggaagcagctgtcttgtctccttgctgcctgtcactctccatctccttggagaattctgcgttcacaaacacagacctgtgtttccacgtattaaagattggcgagcaggacttggggtcctttcaggagttgcatggaaagctcccccgcggccgaggacacagcgccacgtgcacgctcgggagtcctcatgcttggtgcccgcagcacgggaacaatccccgagtctccacgcaggcagcggagccatgtgacacgcagaggcaaaggtgcctgccttcagggcacacacaaaaatcgcctgcctgccgggaggtgagccccacccagcctccatagggcgccctgtgggccatcagtgcccccaaatgcac

SEQ ID NO: 30902 - DNA, 1457 bp, Homo sapiens; identical to SEQ ID NO: 23762
  chr10:134732799-134734256
  hypo

SEQ ID NO: 30903 - DNA, 232 bp, Homo sapiens
  chr10:134787917-134788149
  hypo
cgctgcctgtgagatgaggccagatcctcgccgcccgcacctgcctctccccaactcgccctgcgcgggacaggtggacgccgcccacacctacctctcccccactcaccctgcccgggagaggtggacgctgtctgcacctgcctctccccaacgcgccctgcccgggagaggtggatgccgcccgcacctgcctctcccccactctccctgcctgggagagatggacgcc

SEQ ID NO: 30904 - DNA, 230 bp, Homo sapiens
  chr10:134793882-134794112
  hypo
cgagtgcctggtgagagcccggtgagtgcccggtgagtgcctggtgagtgcccgcaagtgcccagcgagtgcccggcgaatgcccagtgagtgcccagcgagtgcccggtgaatgcccagcgagtgcccagtgagtgcccggtgaatgcccagtgagtgcccagagagtgcccagcgagtgcccggtgaatgcccagcgagtgcccggtgagtgcccgcaagtgcccaac

SEQ ID NO: 30905 - DNA, 290 bp, Homo sapiens; identical to SEQ ID NO: 23445
  chr10:134794144-134794434
  hypo

SEQ ID NO: 30906 - DNA, 379 bp, Homo sapiens
  chr10:134834577-134834956
  hypo
cgcgtgtttccagttccaaaaagccaaccaaatgctcagaacctccccctgggctggttggtgtgattgagactggtcgctccagtctgcacctgtctgcggtgacggccgcccttcccgtcagcccctccgcggtcccggccccagccctgggttgagggagggctggggaggagcagggacagacgggcaggcaccaggacgctggctgctgcgtgaatgtcacctgtggtcacggccgacgcccggcgggcctgggcatggagtcaggaccggaaagcgaggccggcagcagcaccagctcctcagcaaggcccccgctgccgactgggcacgggcactccaaggggacgcctggcacgtgccgggatccacgcgc

SEQ ID NO: 30907 - DNA, 1463 bp, Homo sapiens
  chr10:134941662-134943125
  hypo
cggttcccatccacactctcagcgactctagaaacgcccaaggcccccaagccgcagctgtgcaaagccactcgctaggccgggtgggtgcagggccctttgctctgcagggggcgtcctgagtcctggccgtgctggccccgctgacactgacgtgcgtctccccacagctgctggatggcctgggagcccagcctgggcgccttctacggcccagccgccatcatcaccctggtcacctgtgtgtacttcctgggcacctacgtgcagctgcggcgccacccagggcgcaggtacgagctgcgcacacagcccgaggagcagcggcggctggcgacacccgagggcggccgtgggatccggccaggcaccccacccgcacacgatgcccccggcgcctccgtgctgcagaacgagcactcattccaggcacagctgcgcgccgccgccttcacgctgttcctgttcacggccacgtgggccttcggggcgctggcggtgtcacagggccacttcctggacatggtcttcagctgcctgtacggcgccttctgcgtgaccctgggactcttcgtgctcatccaccactgcgccaagcgtgaggacgtgtggcagtgctggtgggcatgctgcccgccccgcaaggacgcccaccccgcacttgacgccaacggggccgcgctgggccgcgccgcctgcctgcactcgccgggactgggccagccacggggcttcgcgcacccaccgggcccctgcaagatgaccaacctgcaggccgcgcagggccacgccagttgcctgtcaccggccaccccgtgctgcgccaagatgcactgcgagccactgacggcggacgaggcgcacgtgcacctgcaggaggagggcgccttcgggcacgacccccacctgcacgggtgccttcagggcagaactaagccgccctactttagccggcacccagcagaggagcccgagtacgcctaccacatcccatccagcctggatggcagcccccgcagctcgcgcacagacagcccccccagctctctggatggcccggcggggacacacacgctggcctgctgcacccagggcgaccccttccccatggtcacccagcccgagggcagtgatgggagccctgccctctacagctgccccacgcagccgggcagggaggcagcgctcgggcccggccacttggagatgctgcggaggacacagtccctgccctttggtggccccagccagaacgggctgcccaagggtaaattgctagaaggcctgccgtttggcaccgacgggaccggcaacatccgaacgggaccctggaaaaacgaaactactgtgtagatgggggcagaggacacggtgttcctggaggagcttcagagcagagtggggggcccatctgccacatgaggtcactgggggtaccgaagtgaccccgcctttcagaagcc

SEQ ID NO: 30908 - DNA, 581 bp, Homo sapiens
  chr10:135030373-135030954
  hypo
cgcctgcggcagcacgatgaacctcgagggactcaggctcagggaaacgagccagtcgcgaagcacggacagtggacggctccacgtacacgaggcgcctggaggcgcaagattcacggagacaaagtagcagggtgggcgccgggggctgggagtggggcacggggagctcgtgttgaacggggaccgagtttccgtttgggaagatggagagtcgcagacatgctgcacagtgtggatgtagttaacacggctgaaccgtgcactcagaaaaggctacaaaggtaaatcctctattacatactttttacaattaaaaatcaaaaggttaaaacaacagtgaaaaagtgtggcgaaatagttttatctcaaaattacatactttgcatctacttaaaccgatgaagaaacagactgagacgtcagcgtagaaagtgtatccggtaaacacttctcaagctcctctcaaggcgctcaggcaagagggctggggccgcagtcggggtgagcccaggatcacatgaggcgccttcagctgcacaggggccctgcagacaagagttgagcccgggggcaggcgc

SEQ ID NO: 30909 - DNA, 107 bp, Homo sapiens; identical to SEQ ID NO: 13220
  chr10:135229000-135229107
  hypo

SEQ ID NO: 30910 - DNA, 95 bp, Homo sapiens; identical to SEQ ID NO: 23764
  chr10:14966103-14966198
  hypo

SEQ ID NO: 30911 - DNA, 462 bp, Homo sapiens
  chr10:1506151-1506613
  hypo
cgcaaacgcaaacccccataagacgcctggacacacctgcgagagtggctgcaataaaacaaccacagagaagctgatgacagtgaatgctgacaaggatgtggaggggccaggaccgccacacacatgcgctgggggcagtcacagcgggcagtgtgccggagaagagggtggacacacactcccccacacacgcgcggggggcagtcacagcgggcagtgcgccggagaagagggtggacacacactcccccacacacgcgctggggacagtcacagcgggcagtgcgccggagaagagggtggacacacactcccccacacacgcgctggggacagtcacagcaggcagcgcgccggagaagagggtggacacacactcccccacacacgcgcgggggccagtcacagcgggcagcgtgctggagaagagggtggacacacactcccccacacacgcgc

SEQ ID NO: 30912 - DNA, 341 bp, Homo sapiens
  chr10:1558541-1558882
  hypo
cggctttccctgctccctttcccgaggtgcagctggattcagagcttcccacctgcttgtgaccagcgtgcattctcgacatacacgcttcagaccaaatgtctgcttgttcacctgtgcgggctttgtgtgggctgctctgtgctatgcgggctgctctgtgcgggctgctctgtgctgtgtgggctgctctgctctgtgcgggctgctgtgtgctgtgcgggctgctctgtgcttgggaaaatgaaggttggcatgatttcctgcggcaatgccctcccgttttatgccttaataagggctagaaagaaaacattttcctcgagctgcatgcgaatatc

SEQ ID NO: 30913 - DNA, 313 bp, Homo sapiens; identical to SEQ ID NO: 13224
  chr10:16716483-16716796
  hypo

SEQ ID NO: 30914 - DNA, 1465 bp, Homo sapiens; identical to SEQ ID NO: 24911
  chr10:22541133-22542598
  binary

SEQ ID NO: 30915 - DNA, 1289 bp, Homo sapiens
  chr10:22624037-22625326
  hyper
cgcggcgggaatctcaagatctgggcaaaggctcgcgtctcgggacgcgaagtcgacgccaaaatgggtccccggacaaggcgaccctgggagtgccggcgcccccggccgggcagaggagcgggtgggccgaggctgggacatcgcctccgaaagctgccgggacgcggcggcttcctgcagagcctgcgcctgccggatccccagaacacagaagcttctcggacatgggagctccccgtgcgccctaaaaccaggagaggaagggacgacttgggaaaagggactggggaaacagcggagaagtgaaagcggcctaaaatgggcgacggcgggcgagtcctctttatcagtgcagcaggctgccggagccgccatttggtggcggatctcggtagttcagtagcacgttgtgctgaacgtcacaactggcttgtctacgtggcatcgtcatttcttaaccgcggttttacgaaatgcaaatttccccctggccttcctcctccgcggccgtcgacccccctcggcgctccgggtggacggctccggggcgcggctcgtccctcgggtggtgcagcccccgcggcccgagacccggggagggccgggggtactttctgcgaggcgccttccccgcggcttctgcccgcgccaaagcctggtggaatccagcgcagacctaaagcacgcttgacaccccgatttttcgagactaggacgactctctgagccagcagctttcctctccctctcggggagaatctcatttccttggggtggtgagggtgacgggcactgtcttttggccccgcgtgtccgttccccggtctcccgcctcacccctctgcgaggtgaggaggggaaacggcgagcttaggcctggcgggaaggagcctacccgacgagagggctccgcggggagggtcggttggaatcccgccctagcgcctcctgctctgcccggtccccaccggggacggggaatgccagtcatttctgttgagtgctagcagggccggtgtcaccacctcgggtggccgaggcttcgaggttttcatgaaaagcccccgaagcgtgaggcgcccgcccagtggagaacaaagggccgagggccgaaggcgaggcgaggcagcgcgcgcggctcccttggctcgacctagctgggagtcgggggcgcgggcagggctcactcccggcctagaaactggagcccgccacccccgccccgcaggcgaccgcagggatcccattcttggagcccgagctgccatgttgccttcgcggaggcc

SEQ ID NO: 30916 - DNA, 1368 bp, Homo sapiens; identical to SEQ ID NO: 23771
  chr10:22764575-22765943
  hyper

SEQ ID NO: 30917 - DNA, 273 bp, Homo sapiens
  chr10:22869787-22870060
  hypo
cgatggtaatgtctcgctttacagactcgacaggtgcagtgctctaatgcggcccgggaggctcctttgtagaatggatgagtctgccaactcctgtctgcagacactttgaagtcccaaggcagatgaggctgcaaatggaccaaacactgaacaatgctggccgtcccgtgtgtggctcagaaattaagagcacacaccagataagtgggcttattctcctgtgagagcacaggcagcatgaacacaataccgaagagtgttcctttcagc

SEQ ID NO: 30918 - DNA, 223 bp, Homo sapiens; identical to SEQ ID NO: 6743
  chr10:24863037-24863260
  hypo

SEQ ID NO: 30919 - DNA, 916 bp, Homo sapiens
  chr10:28034906-28035822
  binary
cgtccgcgcccgcccggccgcgggggctgctgttaacccctagcagaggagccgctgccggggagccccgggcccgccgagtcctccggagccgggcgcggctcccagatccgccggccttgcagtcgtggagcagacggggcttttcccttcgcactttaggagagaaattggagaagctgccgggagcgctcggctccggctccagaagctgagaggctgcggtgcaaatcccgtgtcttagctggcccgattgccggaaatttcactgcgcgtggctaggcgggagaggccactgtgacgcgccctgtattttcctctcgattagctggagggaagttagagctccgttttgcacctacagccctggagcgtattgcgggaagtgctagtgcccaggagcctcttttctgatgtcactgggcttctggggtcctagttgtctcagtcaaagccaggcacacattcacctccggggcaagggctggtgaggctgccctcgccgctgggtatagggatgggggaaagcaaggatgggatgagttcagcccaggtggccaacccgcggtggcccaagtgcagaagaggaagcgcgcccaaagccaaggatctgcacgcagcaaaggagatggaacttagaagaatcacaagctgggacacagggcaaagagagagaatggctaccagattctctgattgatgatactttgcttcctaacattaccgcaaatataagtagcgaaagcggcggtttaggtgcaactgcaagctcagagcttctggcagcccagaagatccccaaggtgccaacacgaagctgcctgcgctctcgccgaaggccctgtggtcctagcgaactttcgccctttttaaagaacaaacttagatttccccccaccaagcttaaagaaatagc

SEQ ID NO: 30920 - DNA, 547 bp, Homo sapiens
  chr10:3678612-3679159
  hypo
cgtgagacaccgtgcctggtccaaagagatgtttttatgtggttcaccttcgaccttcatcagggtgactcaggaggcacattctgaagccactctccaacacttaagttttttgccaggtatttttcacaaagcaacgatttgaacaatgaaggagaaaatgtagcctcgcaacttcattcgtaaataatccagactaaccgcacggagtataatggatcaaagtgagcagaatcgctcactttggatgagatcagccctagaatgaaagcaaaaccgagatgatggacggcgcaggctccttggagatccgtgttcatgacacctgcaaggactgtgggcaagctgccaaccagacatgaaattagcaattagttgcatattcttccgagtgggtcatgtgctccttgcaatccaggcacatctctttccatctggcaggggtgtggcgtatttccagagggcttcaatgcgcaatccggcagcgcactgctgggagccccggcacaggacgcctgaccacactgacatacacatattcgcgtcc

SEQ ID NO: 30921 - DNA, 764 bp, Homo sapiens; identical to SEQ ID NO: 23774
  chr10:43892377-43893141
  hyper

SEQ ID NO: 30922 - DNA, 489 bp, Homo sapiens
  chr10:50815014-50815503
  hyper
cgttttctcctacaggattggacaggaagttctctgttgcctgcaagttatgctcagatagaggagtccggaaaggaatttaccaagcgttcaagtgaagaggaagccagaggggcggggcctccgtgggaggcttcttggttgcggtggggccggggccagcaccctggacagctcccggcggctggcggggagaagaggctttgccaggtcccatctcggctcagaccctcccgtagccttttgctgcaggggcctgacgcctccttgcaaccccggcactcccgtatttggagccacgatggattgggggggcgttgccctctgatctgaaagttagagaatgagggagtttagtgtctttggagcctccttagggagccagcccaggaccttcctcctcccatgggtcttgatctgctcctcacccctacactgccagcgtgcggccaccttggagatggagcagcaggagcacgacgccgtgcc

SEQ ID NO: 30923 - DNA, 552 bp, Homo sapiens; identical to SEQ ID NO: 23777
  chr10:5874790-5875342
  hypo

SEQ ID NO: 30924 - DNA, 176 bp, Homo sapiens
  chr10:6042324-6042500
  hypo
cgtgccgttaaatattcgtaaaatgaacacatgaagagcctagagtccagaggtcctagcagatggtgttacatcctcatcgtgaggcacgtggacgggggtttccgaccacctgcgttcacccctagaattgggattgatctgggcacctctgggaaacatatgggacaggaccc

SEQ ID NO: 30925 - DNA, 316 bp, Homo sapiens; identical to SEQ ID NO: 28427
  chr10:72015065-72015381
  hyper

SEQ ID NO: 30926 - DNA, 285 bp, Homo sapiens; identical to SEQ ID NO: 29717
  chr10:7215989-7216274
  hypo

SEQ ID NO: 30927 - DNA, 76 bp, Homo sapiens
  chr10:7288715-7288791
  hypo
cgctaccgctgacaggctatgcacatcaagtctgttgagtttaattgataaataccaggtgaagcgactctgtagc

SEQ ID NO: 30928 - DNA, 755 bp, Homo sapiens; identical to SEQ ID NO: 24926
  chr10:73846836-73847591
  hyper

SEQ ID NO: 30929 - DNA, 99 bp, Homo sapiens; identical to SEQ ID NO: 24927
  chr10:74100516-74100615
  hypo

SEQ ID NO: 30930 - DNA, 96 bp, Homo sapiens
  chr10:76784656-76784752
  hypo
cgactcaaccatttaatttctcatgagctcttatgtgttatgtttggaattaatttcagaggccttttgtactaaagaagaaaaggggtcgtaaac

SEQ ID NO: 30931 - DNA, 983 bp, Homo sapiens
  chr10:8096629-8097612
  binary
cgtcgcgccacagctgtctgcgaacactgagctgcctggcgccgtcttgatactttcagaaagaatgcattccctgtaaaaaaaaaaaaaaaatactgagagagggagagagagagagaagaagagagagagacggagggagagcgagacagagcgagcaacgcaatctgaccgagcaggtcgtacgccgccgcctcctcctcctctctgctcttcgctacccaggttggtactggtgactttttttttttttaagtttgattttttgcccccaaccacttgggaggacctaaatcaattttaaaaactcaactctcctcttttggaggttttctaggggctgagaggacggtcccgggaccggtgtccccgagggagggacttgccctccaagtcgtaacagtcagccctgggacttgccctccaagttgctcagccagccccggctcccgcgagccgggctgcagggacgtccccgagagccctgcgggctccgcggccgtgtccccgcgctcccgtgcgggtctcgggtgcgctgggcgggcgggcggcgcgaggggaggttgtgccactccagcaactcaggggctcatccaggtctcccattctctcccttgcaggtgacccgaggagggactccgcctccgagcggctgaggaccccggtgcagaggagcctggctcgcagaattgcagagtcgtcgcccctttttacaacctggtcccgttttattctgccgtacccagtttttggatttttgtcttccccttcttctctttgctaaacgacccctccaagataatttttaaaaaaccttctcctttgctcacctttgcttcccagccttcccatccccccaccgaaagcaaatcattcaacgacccccgaccctccgacggcaggagccccccgacctcccaggcggaccgccctccctccccgcgcgcgggttccgggcccggcgagagggcgcgagcacagcc

SEQ ID NO: 30932 - DNA, 571 bp, Homo sapiens; identical to SEQ ID NO: 23452
  chr10:851108-851679
  hypo

SEQ ID NO: 30933 - DNA, 438 bp, Homo sapiens; identical to SEQ ID NO: 24937
  chr10:94180315-94180753
  hyper

SEQ ID NO: 30934 - DNA, 794 bp, Homo sapiens
  chr10:94450942-94451736
  hyper
cgccagttaggaagggaagcagggacacatagggcatatattccagaacttcggggcttgtcccctcaatgtgcggcctaacaaataagccgcccgtggtccgcgctgtgggtgacccttggcgccttcgaggtctggagccctagggtaaataaggaaacggggcgcctctagagttttaaatgaactctgttattggaagcttcagtagggaccctgaaaacaattaacgtcttaattagcattttaatgtctccattattacggcgcgggctctagctcagccctttaccttaccttctcaccgttaacaggggagggggattgtatttttagttcatctttttatgtttttgagttgttatcctgtctgtctgattccagcctcgagggtttgatgatgcggcccgagcctggctgtggtcgcctgtcggggctggagcgggaccctcagccgggccgggcctgggggctaacgttttcacagtgcgccctgagtttccttgggttactgctgggaccgcgcaggaggaagcaaagagtttttcgagctagaccaacaggaaacacattgacggaaatgttgccatagcccatggggtggctttaactggccgcccccgcgggctgggtgtgaaatcagaggaggccgcggctcccccggccaggattggaggctcctcgcgcaacctaatgcgggtgtccgggcccgagcgcttcccgcgcagccaggccttgtcggtgcagcagccccgctcctccccaacacgcacacacccggtgttcgcaagtgc

SEQ ID NO: 30935 - DNA, 577 bp, Homo sapiens; identical to SEQ ID NO: 23790
  chr10:98129733-98130310
  hypo

SEQ ID NO: 30936 - DNA, 371 bp, Homo sapiens; identical to SEQ ID NO: 13241
  chr10:99206760-99207131
  hypo

SEQ ID NO: 30937 - DNA, 510 bp, Homo sapiens
  chr11:1008033-1008543
  hypo
cgtggacccgaccgtggaggggggcgcgcaggtgcagcaggtggtcaacatagagtgcgtgtccgacttcacggaggcgccagtcctcaacattcagttcaggtaagagccgcctgtgcgccccgggccaaggggtgtgtgggcgcctgagctgtgtgcctgggctccatgactgtgcctccgtgtccttcctgaggggacccggggcgtgcgggtgctcacggtgcatggatgcggcctgagctattgctgcccccggctctgcagagcgcaggaaacaaggggaggcggagccctgggctccgggacggcaggtggcagctcccacatggggccttgctaggatctttctgggcaccatggggcccacctcatggggtggcagacagccagggcccccgcgccacctgcccggcttggtaccagacgacagctgtggggtgcaggcagctggtttccttcggccccctggcctggggggcgcgttttttgctcagttgagctcagatc

SEQ ID NO: 30938 - DNA, 452 bp, Homo sapiens; identical to SEQ ID NO: 24941
  chr11:119613005-119613457
  hyper

SEQ ID NO: 30939 - DNA, 346 bp, Homo sapiens; identical to SEQ ID NO: 23798
  chr11:121023460-121023806
  hypo

SEQ ID NO: 30940 - DNA, 67 bp, Homo sapiens; identical to SEQ ID NO: 13245
  chr11:124387399-124387466
  hypo

SEQ ID NO: 30941 - DNA, 355 bp, Homo sapiens
  chr11:124790854-124791209
  hyper
cgcctccgcgcacccgcctccgtctgcgcatgctcatacacgttcacacccgagacaccagcgcccccccgggacctcccctcgtccccagcgcgccgcgcccgggcttcccagccccagctttcccccgggccactggccgcagaccgcgggcgcctctcaggggatcccgaggcggctcaggcgctgatctccaccgggccggcctcgtcttgctcgcggattatgtgcacgcccgcagtccgcagtgtgcgcgaggcgctgcgcgagcggccgggcgagctcggggccctgggcggcgacgagtgtgtccggccggtggctggggagcgcgctggggagcgcgggtagcggc

SEQ ID NO: 30942 - DNA, 219 bp, Homo sapiens
  chr11:1254274-1254493
  hypo
cgctacgcctacgtggtggatgcctgccagcccacttgccgcggcctgagtgaggccgacgtcacctgcagcgtttccttcgtgcctgtggacggctgcacctgccccgcgggcaccttcctcaatgacgcgggcgcctgtgtgcccgcccaggagtgcccctgctacgctcacggcaccgtgctggctcctggagaggtggtgcacgacgagggcgcc

SEQ ID NO: 30943 - DNA, 252 bp, Homo sapiens
  chr11:1274017-1274269
  hypo
cgtgcatgttccctgccccaggtgaatgagacctggaccctggagaactgcacggtggccaggtgcgtgggtgacaaccgtgtcgtcctgctggacccaaagcctgtggccaacgtcacctgcgtgaacaagcacctgcccatcaaagtgtcggacccgagccagccctgtgacttccactatgagtgcgagtgtgagtgcgtcggtggccgcgggattaccccgggggcaggtggagcagagtgcaccgtc

SEQ ID NO: 30944 - DNA, 1308 bp, Homo sapiens; identical to SEQ ID NO: 22770
  chr11:128564211-128565519
  binary

SEQ ID NO: 30945 - DNA, 809 bp, Homo sapiens
  chr11:129242539-129243348
  hyper
cggagaggagtgagagcgctgggcgacgcggccagccaaggcgaggccggtccctcccgggcttgggctctgtccctgcgcgtgagccgcctgcagccttccgaggggcagcaccgcgaccaggaacacgcgaacgcgagtccagacccgggtttggaaaaagggaagaaggagaggaggagaagggaagttaaaaagagagagagaaaacaaggatgaacgatggggagaagggagggcagaagagagaaaacagaagcgggaaattcgacagaggaggagaggcccaaagggcggggagcaatgcggggaagggagaagtgggagggaagaagaggagaggagtcagtggcggtggaaggaaggggaagaaccagagagaagaaaagaggttaaggaaaagaagagcaatgcaaagtcggggccccgaatagtgccgcattctgtgggcacacgccgggcagatagaaagtatagacgcgacgcgctcggcccctcgtcgggcgtcgggtcctggtgctgtcgctcaggtgctggtccccagctccaagcccgcctcgtagtcggcgctgcgggtgagatcgcccgcaagcactcagtttactggcggctgcctaccagcggctcactttcctcggggcgcctaaagctccccgcccggcattgccccgggagcgaacgctgagcccctgggacccagccccgactcggcgcagcggtttccctctcggcttgcgcccgggagaaccccctccgtcgtggcgtcggacggcgatgccagggctgagcggtgagctgtcccgggtccc

SEQ ID NO: 30946 - DNA, 177 bp, Homo sapiens
  chr11:129565525-129565702
  hyper
cggatggaacctgctgtgttctgtcctcttccagctgagccaggcccgcgggccccctccaggagctccgggcaagcagcccctcatggcccgtggtggaactgcaccctcagcactggagagggcggtcgcaggagcctgcgaggaaggtggggtctcagtgctttcgcacagggc

SEQ ID NO: 30947 - DNA, 564 bp, Homo sapiens
  chr11:129993371-129993935
  hypo
cggccaccgggcctccaggctccgtccagtctcaggcctcccccagcccatcccccagctcgccagcctgtagcattttgaagcatttgacgtcactgcctctgtcctgctgacactctgaccattttcacacagctgtctgctcccaggaggcgatgacggggccctgccgggccgtgatgcctcgttggtacttcgacctctccaagggaaagtgcgtgcgctttatatatggtggctgcggcggcaacaggaacaattttgagtctgaggattattgtatggctgtgtgtaaagcgatgagtaagtcctgcctcgcgctggtcccgtgcggcagcaccgtcctgtctggcgtccgtctccctgccgtcttcgtggctgcatctgtgtggtgtccctgcccactcgggtgtttgctgtcggtcgtcttcccctcatctttgtgctttctagatctaggctttgctctcctgccggcagtggtaagctcagttctcgtgtcctgtgctcaccgtgtgtctggtggtgcttggtggtgatggtgcgtacccaccttggtatagc

SEQ ID NO: 30948 - DNA, 200 bp, Homo sapiens
  chr11:130089793-130089993
  hypo
cgtctgtttgccaggccttgttctaggaaccaggagtaccgctgggatcctccgaataacgcctggagggcagcgaggtgcagggaggggaagggacgcgcatggcaagctcctgcctcgcatccccacgcaccgagagccctcctgcctgcacgtctaccacaggcggaaggagggaaccttccagaggcagagggtac

SEQ ID NO: 30949 - DNA, 278 bp, Homo sapiens; identical to SEQ ID NO: 24946
  chr11:130785392-130785670
  hypo

SEQ ID NO: 30950 - DNA, 152 bp, Homo sapiens
  chr11:131799627-131799779
  hypo
cgtgaaggtttcctcgaaggatcgtgaaattccacgaagtccgcttgctttcctgggtgaataaacaccaggccgctccctggactttccttgtcgtttgtgatcaaaggctcagctacctcgtgctcatggtcctgcgatggctgaaatcc

SEQ ID NO: 30951 - DNA, 842 bp, Homo sapiens; identical to SEQ ID NO: 22771
  chr11:133938756-133939598
  binary

SEQ ID NO: 30952 - DNA, 138 bp, Homo sapiens; identical to SEQ ID NO: 13254
  chr11:134011321-134011459
  hypo

SEQ ID NO: 30953 - DNA, 446 bp, Homo sapiens
  chr11:134458219-134458665
  hypo
cgagtgctgcatctgcgatgtgaacctgtgctggattccctgctgagagctgcacctgtgatgtgaacctgtgctggattccgtgccgagagctgcacctgcgatgtgaacctgtgctggattccctgctgagagctgcacctgcgatgtgaacctgtgctggattccctgccacgtgctgcacctgcgatgtgaacctctgctggattccctgccgagtgctgcacctgcgatgtgaacctgtgctggattccctgccgagtgctgcacctgcgatgtgaacctgtgctggattccctgccgagagctgcacctgcgatgtgaacctgtgctggattccctgccacgtgctgcacctgcgatgtgaacctgtgctggattccatgccacgtgctgcacctgcgatgtgaacctgtgctggattccctgccgagtgctgcacctgc

SEQ ID NO: 30954 - DNA, 121 bp, Homo sapiens
  chr11:18512388-18512509
  hypo
cgttggagtattcatgcctcgttctgtgactgccttcgtgactacagccatatcatcatagcgctcagcctgctcagtgagttggctttctgtaccagctcacttttatccagtcgttccc

SEQ ID NO: 30955 - DNA, 689 bp, Homo sapiens
  chr11:19263432-19264121
  hyper
cgtccggggctcgcgggctgggccgcaggcgccctgcgattccccgcttggggctatctcacccctgcccagccccaggccggctcacctgccctcggactccagccggacctctcccccttgcacccctggcatgcatgattgtgctgcccaccgtctgccccgtgcctcgcagaaactggcgcgaggagggagaagcttggctactggtgcctaagctccgtgggctctgggccttggcccagcggtgagaactcaggtgtaggaggaagaggaggaaggcggaaaaccctccaaccctgtcctcgccgtctttcctcagggtctcccacccactcctccctttctcttccctgttgtctttccctctttttccggtctccgagcctcaggcagctttagcctggttccctgtagagccctagcagggtcggggagacacttcgatccttcgtcctcactttgcagaacgggacaccgaggcccggggcggcggcgctgcctcggctgcacctggatcatttgcgcccgcgttggctccctttgctctcctctgccttagacttttctgcggactggtgctgagtgttgcccaaccgcgccgagatctgggcgccggtctctcgatctggactcggtttggctcgtcctcctctgtaatcgcgtgtctttaggctccagcagggccc

SEQ ID NO: 30956 - DNA, 251 bp, Homo sapiens
  chr11:20230312-20230563
  hyper
cgcattcccactccagacgccgcagttttgaggcgcaatggggcctttggcctgatcatactcaggaatccttttaggccctttggcctagaggccagagccggggtctgcagagacgcaggcactctctgtccccgcgagccccaccactgggttgctgcttttgagccggttgcttcgggccggcagcccttcttatttcagcacaaaaggtttgaggtgcattgctttctttggcgtaaagcccttgc

SEQ ID NO: 30957 - DNA, 920 bp, Homo sapiens
  chr11:2278017-2278937
  hypo
cgtgtgcgtttctgcgtgtgtgtgtgtgtgtgtgtccatgcatgtgtctctatgaatatatgtgctgtatttgcatgtgtgtgtgtgtctatgtgtgcatatgtctgtgtctgtgtgtctttctgtgtgtgcggtctgtgtctgtgggtctacacgtgtatatgtgcatgtgtctgtgtgtgtcgcagtgtgttactgtgtctgcgcgtgtgtgcatgcatatgtgcaggagggagggagggctcaggccttagcagagtccctggggctctgggagtggagggcagtgaggctgaggctggtgcaaaggtggtttcaggcgctcaggtgaagtggagcagaaacagaagttggaatccagccccagcgggcgggcggcagcagcagtgccggccctgcccagaacaggttcgacctgagccggcactgcccggctgccctggggctagggaggctgagacagagaagggaagccagagggtgggggtgggggcccggcactggcagagctgcctgccctcaacgaccgcccctgccggagacccccgccccacccgctgtggttctgctggcccaggtttcgctgggcccactcccagggtttggcatcactggagcccagggtcccccccgcaccctccccacagccttggccctgctgctgcctgcctcctccagggtaccccgaggcccacgtcaggagacccgcctcaggcagcagtggcccggtggctgcttctgcctagcccgcagcacgtgccaccctgggcgcactgccttcccgaaggctctcctccctccccggggcgctccctcccactctggaatgcctccctgcctgcacagcaggagtgtttggctgaggtctgcagccccgacacaggtcacctcccacgcctatgggggcttcagaaagtccc

SEQ ID NO: 30958 - DNA, 2442 bp, Homo sapiens
  chr11:31819317-31821759
  binary
cgactcccccacccccacgataaacctaagtggtggacaattaagatatcttcttcaaaaggcgccccctcggagccgcgcaaagcaggggccttcagtgggtgccgttcaccttccagcctaatccgtgagaaagcgagtgaaagcgcctcccattatcccagccccaggaccatctgacgatgggaataggatttgtttcctggaaggaggtgagagagagagagagagagagagacagagagagagttgctgggaaataaaatcattccttagtttcttagtgtcttaatcagtgaggcggaaaacaagcaagaaaagatagcaacccggttgcggcaccttttcagctctggagcgcggatcaaaacattgtagcatctgttgaaagagaggctgactaaatcctatagagggcttgggtattatggggggtgggggtggggtgaggggaggagataagaaaaagtgtctccgtgatccctaaaaccaccaaatcgccggagaattggggctggatagagttgtctcttgttgttgtcagcccacgtcgtcgcgattttattcaccgccgcatggcgttgatcagatggaaaccatatttgtctccctctgagacctaacccccgccttatgcttttggagtatggactctttaaaacccaagaaaggcttcctgggctgggaaagggggctagggagggagggggaccctcttagcaccaaaaagtctgaggattccccgggaacgtgaagcgaagctcaccaccggtgcccgctacccccacgccggcaactctgtgcttcgtttggcccacgtgtcctccccacgcaactaggggcgacggtcctgtgcctgaggtgacaatcaccccccaaaaacctcacttgcgggtgggggggtggtgattgccagttgacccagaattttctagcaactaggcgcgttaaagtgaaaagcccctggactagctccacctccggccccaaccatcacaggcggaccctagctgatttgactctcacttcccgccctcagactgccggcgacgaaaatccgcccgaatcgggcgccacctctggtggaagctgctgtcctcggcttctgcccaactccaagaagcggaaggggggtgtatcctgcgccccaagctcatgggagcccacgcaccggggagagcccggagtggaggctctgggctcagccctcccaggcctaggccaccgtgccctgagtccctccccaagacttctcggactaagtgggccagactcttgtcaggggagggatcaccaggacctcagattgctgggggcggaggggtggacgctcgtgagtgcgaagttcgggtgtcacttgggtgtgtccagtgtctacaagtgggaatcctacggtttcaaaagtcaggcagggatggggttgcctacactcggtggggtcaatcgctagtctcaccagaggcgggagcgggcctgggggccctctgagctcgcggaggcggcgggttcggggcccgtgcgggcggggtcgcccaggggagcccgggccccgcgcgtcaggaggcctccgccggccgagcggccgcgctgggaaacaagaagcgagcgctttgctccctatcttcccagtgtccgtcctatattgttttctgctcttaaaactgacatgtctaattggcaattggtgccgaatcgtgtccagaggtctcttgtggaacatttctacagctgtctccttcaactagacgcttattcatgtcgccttaatgagaaacaaaacgttctctaatgagcaattacagagcgacaggattgttcccataacaaattcttgcgagtgacagaagcatcctttgtaccagatatttcgcatactgttaccgattttcccttccctcgcccgactccatggaggcgccgggcatccggagccggtccgagagctcacggatgcgccggcagcctcctcgcagtcccgcgcgccgcccctggccccgagcccctcggctccgttgtgctcctgggagtgagacgccacgtcccattatcccgcatattatctccttgtcacgaggacaacaaataccgattaatcttcggagtaaactgtttcctattcttgaccaagctacctcggggtgtggaggggagcggaggggagccaactgaccctcccctccgccccaccccccccatcccccgctcttcttcctccagcccttctcacagaacctggggtgtttcaggtcccatctctcctcccagaccagagcggctcccggcatcccgccgtcctgctcacagtatcttcacctcaccacttccacatagtcgccacccacagagagtgagaaagtgggacccagaggggcgaacgggggaggggcaaggatagtggggtggttttagttgggagaccaccacttccaatgccccatcccc

SEQ ID NO: 30959 - DNA, 931 bp, Homo sapiens
  chr11:31821763-31822694
  hyper
cgccctgcatctccctgctcaccttttcatgtgcaccctactcatagtcacataatttgtcaattacagcaaaaagcaacaggatacaattatgttaacctcgcagtctgtcagtgcgttatcttgtcacacttctacaagggggctctccctgcattctaatgtcaaatttgaatagtgcaccacgcagctcgttcttatgcacacagtgctgcccacaaacacacacacgcacccaccagccaccttcataccgctcctgacatacacaaccctcacattcccaggccaacaaaatggttcaacaaacaccacctacatacaatgtggtcgatgtgtcccaggccttcaaatgcagtctcacccatgacattccccaagcatggaagccctgagaggaaatggttgggagagtaggggacaggcaaagggatgcacatatggagagctgcgtggatggctgcttgggttttaccttgcgtaggttgccctggcaccgaagtccccggataccaaccagggcgggtgccccagcttccggtctgcccgttcaacatccttagtttatcatacatgccgtctgcgcccatctgttgcttttcgctagccaggttgcgaagaactctgtttattgatgacacctgcaaatcaaaccaaaatcaaaccaaatggtagtgtctcctgaagacacagtcacccatctcagctcacccacaaccttaaaaagcaactctcaacccgttaaaaagctcccagccaccccgggacagtgggtggatttgcagatacaccgtggaaaaaatgatagctatcactttgggcatggaaatttagttggatagagaattgggcggagggggtccttcaccattgcttggtgtctctggtgacctaactcacacggttgctttgctttgttaaaagactgccc

SEQ ID NO: 30960 - DNA, 687 bp, Homo sapiens; identical to SEQ ID NO: 26210
  chr11:31824579-31825266
  hyper

SEQ ID NO: 30961 - DNA, 2436 bp, Homo sapiens
  chr11:31825604-31828040
  hyper
cgccaggagcctgagcttcttagcaataaataagctccaaatatagaagaggggggaaaatatgatgagcctctctgacatttgtctttaaaataaaactagctgcacgtcaagtttgagcttaatttctggaaataggcggaagtcgctccggatcatgcatggaaggctaattgaaaagatcagtcggggcgcttgtggcagccttgtcactttgtgacagtgctccgctccgggaaattgcatcgtcacgacaaacgggaccgtgataaaacgaccctttccgtccttatttgtagatcactcagacgagattgaactgcacttgtttccccttcgaggggagccgcgttttcagggtagccgaaggcttggggctgagggggggccctcaccaaggcgcgggtgggggccggagcctcaactcgatgagaagtgacaggcgtttgggggatctgggctccggccgggaccagcgcaagcagggactttgcggggacaccgcttctccaacagagcaaggcctggcccacgtttccggtttctcctaacttccttttattgccttcctttgcttcgcaagttccatctacccctccagctacagagccccacctctaggcacaggaagcttcccggaaaaagaaaggctgtcccagaaagagaccgagagagactttccaaacttcgggcatagccacggcaattcccagtctgctaatgccaaggcgggcgcgtaaggccgcctaaatctagacctccctcctcactcatttcaaaaaataacaacgtgccagccacctccgcagataccgccggctggtgcttgcccaggagacgccagggccagagcgccactcccagcatcgaaatggcagagagaaagcgcagctccaaattccccttcagaggttaagcctcaatcattgtgtcccttccctagggactgctggcgctctcgcccactggcgatgattatgcgcctagaactcgaccgcgaagcaactaataggaaaacatatggtgtcaatttggatgctccgcgcctcgcgcacacccgggaacgagcggcacaaagccctgccggccggcccgcgaccccgcgcccctcggggcctgccagccgggccgcagcgacaaacgctcagggctgcgcgccctggctggggcccgcccgagagacagcctgcggctggggagtctgagctccaaggggagagcccagccgccgaaggcgagcctaccggccaagccctggggtccggcaggttctgcacaactactcccgcaaagctcgccacctttgtgccctttcctcagctacgcgcttaccagccccggaagcaccagggggcgaccggcgtttccaaaacagatggataaggtgctggggaccctccttaagcctgtgtggttcggccagggcaggctgctggaagacccgggcctttccacactttgagttcagttgagccccgacgccgtgtgcctcaaccgtaacctcaaaccgggcctggtttcgctgggcctccaggctcccaggtcggagctctagactagccctgccgcgtaccagcacccaccacgaacaggaaggtgggtgggaccccacggggtctgggcagaggaaagcagggaggtacaagggccataagtatcaaaagcgctctgggcctgggactatcaggacccaagcaattgcagttgccagggcagggattttccaattcctgggcacctccttaccagacccagtaaaccgtgctctctcccgcgccctgtaacagcgagtttaccacccctaccctgctgcaggcctgggggctcctctccccatcccttctaggcccgtagtggggtgaggaggggaggagctgccctgagagtgacttggggagagaagcccccaaccccgccgggttggtggagactttcagtcttggctaagcccaaaggggcctccttctcgctcaactaggagaagacttcgccccgccctgatcagcccagcccctctctccggggtcagagcccgggcaggggcgagagggggtgtgagttacaggatttgggggggatggggtttctctaccgcagcttcgaaaactcgggcgggctgttcttaagggcccagcccctgcttctccagtatcgagaagagccaagcaaacgccctcccctcccgggctgccgggcgcggagcggggagcagccgccgcaggtccccgggcctcagtcggtcggcggccgggccagcgcgggcgtcgcgagtccctgtgtcctcccctgaccctcgggtccgcgcaccccgagcccgaagtcccagaaagaccagaggcacttactgttctgcatgctggctctggctgggggccgcgggattccacggggctcgaatatggggctctgttagcaagaaaataggagttaatcctc

SEQ ID NO: 30962 - DNA, 2369 bp, Homo sapiens
  chr11:31836839-31839208
  hyper
cgatccccccatctctcttttccctgtaacctctgcccccaagaggcaagagttcagcttcaaaggaaaagcaagcaagtcaaggccacctcagtcccttctccctggatatcccctctctaaaccgctgcctattctaaaggccaacgacccggtcctgcgatttgtcccgttgtagacctgggaacaggcaggcgggaactgggggctttactgggggatttgaggctggggagggggagggagcaaatgtcatggctggctcgctcaagcatccagggaaccgaagctaagcgcatcctgacgggcttttaaaatgacattgattaggacaagctgttcccaaccccagtaagagttaatctgcctgttaatcaaggcactaaggggctcaatgcgagttttattagcgacaggagaacagaggcggcagccagggatcaaaagccgggatcccatatatttgtcagcgctatctccaaaaaaaaaaaaaaaagtattttcaatttgaaaacaattcggcgcttttcgtcacttcctaacccagtctcacagagggtgacttccaaacctggctagcggggaaaaccgctgcccgggggacagaggggctgacaggaactgcgggttggctcagccgaatgcggccggggagaatttaagaattctcagcccgcgcggcccgatgcctctgattcctcacgagaggaaagggaatgaaaaatgaagcaacaaatgacaccacccaggctggcagccctcgttcccggccagaccccgctcctcaggcccggctctggcgccgggtggcgtccagcccctgcacgcgcggcgcggcccgcgggaaagtttgtgcagcgagagtgactgtccttccgcctcgcgcgcgctgcccccttctgccccggaggggcgttgggttcccttcggttttcctttccaattctaaaataaataaataaactccgggccctggggaaatctgaatagtaattccagtcatccaaattctatgagagggtctgaggaaaaaaagacaagcctatcacgggcgccctccgatcacgaagggcacgggcatgagaaggcgacagaggaggtcctcggctcgccctgggcgcggagcgaggactctggtcagaggtaattatgtcaccgcgttttctcgccgtgacagccgaataaacacgatctccaataaacatctctaatgagggaggaggcccgaggatggctgggtttgatttatgactggaggagaaggtccacttcccactgcgaagcaggcgacctgctcgccgcccagctccagggagaggaacccgcggaggagaggatcccggcccaggtaaggcgtgcggccggactgccactgcgctcgtcccccgtttccaggtgaggtgagcagggggcgccaccgctcggagtcgggcggaggtcccaacacctgtcacaggtgactgagctccgaaggtgctcccagaagacctagaaagggggcgcaggagcgcgagtgggagtgggggttgggggctagccggggcctggcccagaggccgccccaaactcccgggcggggttcttgggtgccccgcctaagccggcctgggcgtctccagctgcttttagggccgggctcccaggactttcgcccggctgaaccacaagttagtctaagtttgggtcgtcccttccctgactcactaaggggacacttccgggccccggctctggccctccaagggccgcagggtggtgggcgcttctctttcccgggcttggcggcccggctcccatggcgcccgcgcgcttcccgccgaggcagccagcgcagcgcccgcagtaaccggagcccgcgttctagctcagtgagaatcgctaattattaggtcttccgaagtgaagctcaaatcacacgctgggagctttacgcgctgcccagctctgtcggccgcattctttcgtactccgcgtctttctgagaaacgaaccccatctctagactttgttgcggtccagccatctgcactttgcaaccgcgggaaacttctgctgcacctcgcccgacccgcggcagggtgtctttaagcgctccaggcgcgggtacggactttcccaagcgtggatgtcgtgaactgcgatgcagaggaggtctggatgcaaagtgcgtccccacctcctgcatttttcgcggtcgcgagtggctttagcagacagcagcagcagactcccgccccctactcccagctcagggccggactggaagtccactcttaggagtggaacattttgctacttttgcagaagagcacactcggcaaagacaagtccctcctccaccccccttcctatccctccctcagtaactc

SEQ ID NO: 30963 - DNA, 540 bp, Homo sapiens
  chr11:31840426-31840966
  hyper
cgttgtcattcccgtccctcatccctcaaaacaggaagcttctcaactccttcccctatgcttccatctggctctccaatttgaaagtgacagtggtggggcccggaggggcaggggtcacttgaggagtttgcgggagaggaaggggcggggcgtggaatttcctttaggcagctcgtggagacccagcctgggtggacccgggagtgtgtgtgtagaagcagggagggggacgcctgggccggagagggtcctagggccagtccctgcgcgccttgatccgggcggcggctaagggagagccgagcacagatggcgccgaggcggaggtctagtgattcccgctcccgcccctggcacacctggacaggtgccgggcctcgcaaccggccaggaggcagctccaggcagcccgtctgcccactcctcttagcccggacagctcctagctggacttgattttttgtcttgctcagcccgtcgaggactggagggcagagtaggggtgggagtgggggtaggggtagaggtgggggtggc

SEQ ID NO: 30964 - DNA, 1035 bp, Homo sapiens
  chr11:31841341-31842376
  hyper
cggataggcctcggacctgtgtaggccttcctagctggccagtttctgtccgggtctcgctccccacactgtaccaaccctaggccgccgagagggctgttatgggcttgtttggagtccaggccattaagtgtgcgcaaatccctgcaacccagcagggtgctcgagagcgactctggaaacgccacggcccccgcctgcttatctgcctgtcaataaagggcgcgttcgggctgcgcgggagcgccggtggtgcaggcgaggcccgaactaggcccttccgagctccgggccaacgcacgagccgctctccatttgtcccgggcaaggaggctgggagggagggagccggctctggggtcgccgagggagaaggtgcgggtttagccgctgcctcagctggattcttggagaagcgctcgacctcggagcactctggagaccctaccagaaatctagtgctgggggctcctctccgcgcctgccaccagccttggaggaagctgggcagggccccgtgtggtgcccagcctacgaggtcccacctcgcctctccctggcagaggcatcctctctaggccacactggctcgcattgcgggaagaagggcaccgcgggcggcccgggggcatcatcgacgactcgtagagccccaaatgccgagtgctacctgaggcaggctgtagctggggtgaaaaggaccggaagcgggaaagaaacctcttttctttcaggcctcccttcagcccggggtagcacagactgcaaatttccgacacctagggcagctccaggctctgattctccaccgcacagtgagcgagctcggcagccgcccagtctgcgtaggctcccaggccagccccggccccagagcttccccatcagccagcagaggctgggtggagagcctggatgggcgtgagaggccttgaagtaggggaagtagtggagagagagaaagatagagaaatcggctcttggcttgaactgttgttcttgtcgaaggtatgttttcccctcccggcctctgtc

SEQ ID NO: 30965 - DNA, 794 bp, Homo sapiens
  chr11:31846177-31846971
  hyper
cggcagctcccggattgcctgcggggttgttcaggccccgggcctgcacagctatgagaagtggggtgcagggtgctatttgcccagcaaaagctcatttcctcccaaatgagtataatgaaaacccgagaggcgatattagtgtaaagatcgggattagtccaaataggagccgcggacttgggcttcaaaggcgacccctactctttttgcccagtctgggggcggagggcgctcgaagggatacttcaaggacaccacatccaacttgtcgcagccccacgttcaggcacaggagggagcgaacattgggcagagggtaatttcaacaaaggacggcaggctccggggatcccggcttttccctgagttctctgggttggaaggagagggtccgggctctgtcggaggagtgggtacagcccagcacatgcttttctgacgcgcagcgctggcctggggagtgggtgcagctgctgcagccagcccccaccccgccccaggctgggaaggacgcagagtataatacgacggcccccttccccaaggggacactagatccagagctccaggcatatttgttgttcaaagttaattatacctgaaagcaaccaaaatgcgcacgccaggcccacggaggccgattgccgaccagcgtagccggcccgcagcgccagagaagccgctcactccggcggagtctctgcaagagaatctgaggctggggaataaaagccgaaactaaatcaggcagcaagagtaacaaaccatctggaaaatggacccacggagcc

SEQ ID NO: 30966 - DNA, 857 bp, Homo sapiens
  chr11:31847100-31847957
  hyper
cgccacacaacaacagtttaatttccattatccgacttcgggatcctagcgccagccgccggggcaacgtggcgctaatgcagaaatcttggctcctgcctgcattattcatttcggggacgtggggatgggataggagtggagagtgggtttcttcccctcccccgaacttattctgaaaatcccggggaccaatggacaccgaggaaccgaaagccgagagaatagctgtcaaggggccactttgaccgacggggctgcggtcgacggcgctccccggctgtctttttgtcccaggggttcccaggcccgcagggctaggatcccccagctcccaccctagtcagtcccagtcagggaggacctaggccagggcctcctcccaaggctgtcatctggcggggcaaacgctcttctctcattccttcgtctcccttccagccctcgcatcctttccttctttctgcttcagagctctcaggctcgcgtgcagggcgggatgggcccggatcgggggccccttcgcagatttgaaagttgcctcggccttgatcttctcccagcctccctgctggggactcacccccacatcccgctaccccccggggaaaagcgaagaaagccagagtctctttgcacggcggggacgctggcgctcacctctgggcgcggcctcggtggagcctcagggccagggcggggtgtggcggggtgtggcccggtggggtgagggagggacccggggtgcaagccaggccaaggcctcctcagtgcgcaggcgccgttcgggcccgccgccccctcccaaggcgtggggtcccggggacagaccccgagcccctctctgcgcaactacc

SEQ ID NO: 30967 - DNA, 274 bp, Homo sapiens; identical to SEQ ID NO: 23808
  chr11:34535022-34535296
  hypo

SEQ ID NO: 30968 - DNA, 431 bp, Homo sapiens
  chr11:406737-407168
  binary
cgtggtgccgcagagctccccacggaggggtcccagcctggagcccgggcaccgcccatctctaacccgccgctagccccggaccctcccgcgcctgctccgcaccacggagccgggcctccagagcagcaaggtcaccaggtggcggtgctggcgcagcaggcggagcgccgggtgcgcggggtcgcgcctctggccctcgaaggtgatgaagatgggtctgcgggtgagctccagcagccggcacaggccctccctgcggggcgggaccgtcaggggggtgggtgctacgctggggcccacccaaccccgcgcgggacccaccggaagctgtggctgcaccaggcccggctcaggaaggcgtccgaaagcaccacgatgaggcgtcggcagcggctcaggttcaccaagaggtcggcggagggctctgc

SEQ ID NO: 30969 - DNA, 144 bp, Homo sapiens
  chr11:407389-407533
  binary
cgggtgggcggggcacggggtggggcccgggataccagcgcgcggcaggaggtcgcggtcgtccaggaagagcttgtagccccgacgccgctccagctgcggctttaggatgaagttcacgaacttgcggtcctcggggcagtc

SEQ ID NO: 30970 - DNA, 1390 bp, Homo sapiens; identical to SEQ ID NO: 23809
  chr11:43602408-43603798
  binary

SEQ ID NO: 30971 - DNA, 134 bp, Homo sapiens
  chr11:46920025-46920159
  hypo
cgcgcccagccggtagtggcctctttggctccacaagccttctccttagttcaagcccaacctaattccatttccccactcactgcagttgcgctcatcagactggtcatcacagtccgcgtcaccatcgcagc

SEQ ID NO: 30972 - DNA, 433 bp, Homo sapiens; identical to SEQ ID NO: 23455
  chr11:47358910-47359343
  hypo

SEQ ID NO: 30973 - DNA, 117 bp, Homo sapiens
  chr11:47486010-47486127
  hypo
cgacactgggtaaacaatggttgagctggtctcagatctagtgacgtgagagtatggagaggagtgctctttagaagttgcccgtcccccacaggcagcagcgccctgcaggagccc

SEQ ID NO: 30974 - DNA, 98 bp, Homo sapiens
  chr11:57056851-57056949
  hyper
cgaaaacaaagggctgggtcaataaatctgccgcagcagccgtggatcagtgagggcaaaggctcccgcggggagcagccagccagtttctctgaaac

SEQ ID NO: 30975 - DNA, 238 bp, Homo sapiens; identical to SEQ ID NO: 24962
  chr11:57235266-57235504
  hypo

SEQ ID NO: 30976 - DNA, 198 bp, Homo sapiens; identical to SEQ ID NO: 13268
  chr11:60714083-60714281
  hypo

SEQ ID NO: 30977 - DNA, 614 bp, Homo sapiens; identical to SEQ ID NO: 23814
  chr11:60718609-60719223
  hyper

SEQ ID NO: 30978 - DNA, 146 bp, Homo sapiens
  chr11:61058227-61058373
  hypo
cgctgtccccctccccctcccccaccactcccaggcgtctcacctgtacacctgatgccaacagctgtctccgtcatcgagaagcccacggggcacactcgggccacctcctgacagcctccatggttgcaggtaaggtcacagcc

SEQ ID NO: 30979 - DNA, 525 bp, Homo sapiens
  chr11:63849170-63849695
  hypo
cgtgtggctgaagcctgttcctgcttgggggttggccacacagcatcccaactccaggtccagagccgagcctgacagccctcctccactgcctcctggagctgccggagagaggtccgggtccgttctccccaattcacagacatgaagactgaggccgtggttccagtggctgctcggtggtggggctggagcttggcagcatcctgcagccctctggactcccggctctcgagtgccgcgttctacctgctgtgttctaaatggacatgccatccccacagctgtgtcaataaagcagccatttacagagcgggcgccggatcccgtgacaggttgaaaagtgtgtgagctgcagcgtcctgggctggggcagaggggccgtggcgagaacagatggggctgtgcccatctccccaggccctcctgtggctgcgcctggagcctcccgggagggaggccagagccaggagcaggccagagccaggagcaggcgcgaaacatcccttaaatattggtgctctc

SEQ ID NO: 30980 - DNA, 573 bp, Homo sapiens; identical to SEQ ID NO: 23816
  chr11:64739249-64739822
  binary

SEQ ID NO: 30981 - DNA, 421 bp, Homo sapiens
  chr11:64977165-64977586
  hypo
cggctgtgggctgactgtacatggcttttgctgcttctcctcacccagccccaagtcgacttgccggctcggcggccatctccccttctgcacagttgcccactctcccatgactggtctaagtgatggaatttccttcttaacggccacccagcgtgatggcaatgggaagctgggcctggtggagttcaacatcctgtggaaccgcatccggaattacctggtaggttgtccccactcacctcagtcatgcaggtgcgggccgggcaggtgggaagggccgggtgactcagcctggccctcaccctctgccgccacctcagtccatcttccggaagtttgacctggacaagtcgggcagcatgagtgcctacgagatgcggatggccattgagtcggcaggtgagactccaaggctgac

SEQ ID NO: 30982 - DNA, 768 bp, Homo sapiens
  chr11:65185158-65185926
  hyper
cgcttatttggccaaggagggtggggagggttggaggaggtctaggggccgctggaggtgcagggcagcccggggaggcagggctatggggcccagccacgcattccacaggccttctctctgcgggaacaggagtgaggacacaggcgctcagcgtggcagggtgggaacaggaaggtctcgtgagctctgtgacaggatggggctacaggagacagaggtagcagtgagctggtgaagaggcaggaggaggcaaggaggacagggtgttctagggtgccagctcaggcaaggctccaaggagtgggtgagtgctcaggaggacgggggaccaaggcctggggtaaggggcaggtgcccaggcactctagcatggcacggaacaggggacagtcccaggacatccggatgcagggggctgacaccgcaaagttctttcctgtaaagcacagcccgaggcctggggcttggccctgggcagaggaagccccccttagatctgccttggcagtagtgaggaaagggcgtgcacagaccccacgcagcccgaggtgacgggtcaaatgcaagagtgagaagccccctcctgagggtcctcccctgcctcgccttcctggtgggcggcctgctttccagcacatgtggtggaccagcccacattaggtcaaagtgttaaaaatagccggagggctcagtatgtttgggggtggggggggaatgggaggtgctgagggagggcccaggacagttgggaaggaggaagggccc

SEQ ID NO: 30983 - DNA, 233 bp, Homo sapiens; identical to SEQ ID NO: 24974
  chr11:66513554-66513787
  hypo

SEQ ID NO: 30984 - DNA, 906 bp, Homo sapiens; identical to SEQ ID NO: 26225
  chr11:66625105-66626011
  hypo

SEQ ID NO: 30985 - DNA, 563 bp, Homo sapiens
  chr11:66633455-66634018
  hypo
cgcccagcagtctcttcccctgggaggcgccgcccctcctctgggcactgcctgcctccgtgtactctatgtccacttcagagcccacatgcgggtcctccctaactgccgggctgtggcaacttggcactgcagccccaggcaccaggcagaacctgtgcacaggtgagctggcatctccctctgctcgagctccgcccacctcaatgcggccggtgtccggctggaagctgcgcgcggggtcctcggtggtgacccggcactggatggcacacccgttgatgcggatgttctcctgccgcaggcccaggtcgggtaggctcctgccctcagccacgtggatctgagcatggaccaggtctacgctgtagggcattggggggaggggggaaaggacgggagaaagggggaaacatgaggcgggggatagacgaggggcaccgcagccagtggggcgtccacacacagtgcgactcctgcccataggctctgggccagcctgaacagccggttcctcccaaccagtggctccaccagcccctgccctgctcccgccgggagcc

SEQ ID NO: 30986 - DNA, 511 bp, Homo sapiens
  chr11:67781084-67781595
  hypo
cgtgatgtcatttaatcctcacaatgacaccaggtgccattagcatccccatttcacagatgaggaaaccgaggcagagaaggtgagtgatttgcccaaggtcccacaaccagtaagaggcagagcccggagacaggcctgatggtggctcgagaggctcgttcttggctcctgggtctcagtcctgctcccgtgacgagccatcccctatggggaccatggtgcctgtcctgtgtgcgggccactgcccagcttctcccaatcagagcaggaagatggtgggttcagcctggccccacaatcactccagctgagggctggcctggggctcctgaccaggctctcagtagcacactggtccagcagggccatcctgcagaccggagcaggtcccgccctcaaggtggccacttaacaatcacccacagccttgcgctcaccgatgctgggccctgggctcagaaccgactgtgtggtctcatcattagctggcaggtgccatcattacacc

SEQ ID NO: 30987 - DNA, 523 bp, Homo sapiens; identical to SEQ ID NO: 27529
  chr11:67895663-67896186
  binary

SEQ ID NO: 30988 - DNA, 311 bp, Homo sapiens
  chr11:68095765-68096076
  hyper
cgatgataaatttggcatgtctttattattattattttttcaacacttaaagaaaataaaagctggtacaaaggtatgtttgtttctgaaatgtgtttccttccccagatgttcttttctgccagttctaaaatgcgttctgagctcggtcctccagtttcctccctgtgaggaagaacaatgagacctttgtaaccacacaggggaaacggccgcttccctctgcagtgggcatgggggaggggctgggacgtcccacctcctcccacctcgatggaaaccacgagtctgtgccagcccagccgactgtc

SEQ ID NO: 30989 - DNA, 866 bp, Homo sapiens
  chr11:71955497-71956363
  binary
cgggcctccccacctgcggccccgcggaagggaggggaggcaggcctggcggcgctcgtgtgaagaagttaattcaattcgctctgataaccgagttattccgatctggcccctcagccccgcccccagcgaggtcccatcccggcggagactgcggaggcggcccaggaagggggatggagaccgggaagagacggagcctgggatggggacagggaagggacgtggatagacagaggaaacagagaccgggagagaaaggggcagaaacagtgatggagacagggacaagagatacaggtacacagagggagacaaggacggaacatacacagcgaaagacaggatggagcggggacagggcagagacaggagatgagggtaagagagagacaggatggagcggggacagggcagagacaggagatgaggttaagagagagacaagaggagacagggagacagggggacgagaaagagagtgagggaggcatggagacagaaggggtcgggatgagacatggacggcaaccaggactgcggtggagagcaagggagggatgagacaaaacagaggcaggaatcgtgagacagacacatatgcccagggacagtctgagagagacagggccagggacagccacaagcgcgggagcagaggctgagagcggagagaaaacgcctccggggagcttagacacgagggctggagcgcagaggggcccagggatgatgctggaggctctggggtgcggcctccacggggctgcggagagggagggtcgtgggagccaggtccctctaccctgacttgtcccgaggcccacacgaccttgcaccttcagggcccgcctgcctctcccccc

SEQ ID NO: 30990 - DNA, 293 bp, Homo sapiens; identical to SEQ ID NO: 24983
  chr11:72432852-72433145
  hyper

SEQ ID NO: 30991 - DNA, 224 bp, Homo sapiens
  chr11:72433395-72433619
  hyper
cgaaaagtcacccagaatcccccggggcagacacttcctccccgcccccaggctgcacccccacccaagctgggaagagacaaccaacagtgtccactgatcttgcaggccctcacagggtggatgcccaggaagtcctgactgacaagccctggcggtggcctctccaccactccacccgcataaggagacagagaggctaggaaagaggctctctgaagggc

SEQ ID NO: 30992 - DNA, 501 bp, Homo sapiens
  chr11:72475539-72476040
  hypo
cgcaggtgaagaaactgaggcaggccgggtcgtgggggtcaggtaagtgtccacaggcctccctagcctggcctggctcgtgccctttccatagcccccagcaggcagcactgctgcgctaagcagaagaaattacacccatctttgttcctgcgggcggcggtggccacgccccaaaggtgtaattctaagaggcttggggagggacaggtggcggggtagggctgagtctctggagagcaccaggtgggcgggccggtaccaggaacccccagctattaggccctggctgagtgagtgtccacaccagatgttgccgtcaggtgttgcctggtaggccatcttggctgcccccggagaaactccccctggaaacaggaacccaaggggtgttgctccaccaaggagccatgctgggcttgagtacgtttaaagcctggtgacagcagggaccccgacatgcagtggtattacatttgagaaaacaggccagccaggtgc

SEQ ID NO: 30993 - DNA, 888 bp, Homo sapiens
  chr11:763192-764080
  hypo
cgccctcacctgccccgccctcacctgcccccgccctcacccgcccccgccctcacccatccccgccctcaccgtccccgccctcacccgcccccgccctcacctgtccccgccctcacctgccccgccctcacctgtccccgccccgcagggagctcgaggagcagcacggcatccactgcaacatgacgttactcttctccttcgcccaggctgtggcctgtgccgaggcgggtgtgaccctcatctccccatttgttgggcgcatccttgattggcatgtggcaaacaccgacaagaaatcctatgagcccctggaagaccctggtgagggtccctctgtggtaatggggtaaggggagcagcctcagcagcacctcaggcaggaagagcccgagacggagctgccgcatcaacaagcagtgaggtgcacaggtcggcgcggggcaggcaggggtggcggctcaaggtagtgcagccggcaggcactgggagggcaggtggggtggtacctctgccgaagccttcctggtcacagcttggtctctttccaggggtaaagagtgtcactaaaatctacaactactacaagaagtttagctacaaaaccattgtcatgggcgcctccttccgcaacacgggcgagatcaaagcactggccggctgtgacttcctcaccatctcacccaagctcctgggagagctgctgcaggacaacgccaagctggtgcctgtgctctcagccaaggcgggtgaggccccactgcccagctgtggctcctgctcgggcaaggccagcactgccgtgccacgctgccctgtgggtgatccctcccacctgtggggcgagctcatcttgggagacatgagggtgaagtagacctcaac

SEQ ID NO: 30994 - DNA, 366 bp, Homo sapiens; identical to SEQ ID NO: 13284
  chr11:78534109-78534475
  hypo

SEQ ID NO: 30995 - DNA, 649 bp, Homo sapiens
  chr11:850444-851093
  hypo
cggagtcgctgccccggccaggcgttgggtgcggttgtggggatggtcccgggaggacccaagaccgctgctccggctaggagcctggactgggcgggtggggaaggtttgcaccatcgcggggtccgccccctgcactcagagcggctgccccacgccctggtcccctctcctctcctctcctctcctcacttgatgagacgggacacgttgcacacgtgcgcgccggacagggccacccgggcactgcgcctctcctagggtcggggttcgagtccgggtcgtggccagttttgcgcggggccccggtgcctcctctgcgcccgctccctcctcggtgcagccgttatccttgcctcggccccgcccctccaggcaggcgacctgtcgggcccagggactcacttccgagggtttgagccggctgccgccaaggtcccccagtcgccgggaggcgctgcggaagggaatcctggacactgagcagggccgtgggccatcagtgttcgcgggagacactggctttcccgcgcctccggcagcagaggcttccctaacttttgcggaggtggggtcaggtgtgctcagacctgcagtggtgtccgggggggccctgtgtgctggatggagcagagctgaggtagagggc

SEQ ID NO: 30996 - DNA, 659 bp, Homo sapiens; identical to SEQ ID NO: 28478
  chr11:858985-859644
  hypo

SEQ ID NO: 30997 - DNA, 513 bp, Homo sapiens; identical to SEQ ID NO: 6394
  chr11:993208-993721
  hypo

SEQ ID NO: 30998 - DNA, 838 bp, Homo sapiens; identical to SEQ ID NO: 24994
  chr12:104851980-104852818
  hyper

SEQ ID NO: 30999 - DNA, 294 bp, Homo sapiens
  chr12:105392597-105392891
  hypo
cgtgtgcttacatgggtagcagtggccactcagggtaagggggcgggctgctggtctccatgcatagtttcacaccactggcagtgttgacacaggggcagggtactggtggctgcgggactggtgccaaatgtgcgcacgtttatgctggctgcagtggctgcacagggcgcagggcaggtccactggtcactgtgcctagttttgcagctggtggcagtgttggtgtcggagtggggtactggtggtctccgtacctgcagatactccagtggcagtggcagcatggtggtc

SEQ ID NO: 31000 - DNA, 174 bp, Homo sapiens
  chr12:109488367-109488541
  hypo
cggagaaagcgattgaaagggagggaaaaatcttgctggctctaatgctttataaactgtgctgtccaatacggtagctgctggccacttggggctattgagcacatgaaaagtgggtactccaaactgagaggtacttagtaccaaaaaacaaaaaaataatgggccgggcgc

SEQ ID NO: 31001 - DNA, 389 bp, Homo sapiens
  chr12:109873137-109873526
  hypo
cgccgtttcagttctcgtttggatcagattctgttgttcactactagggtgtaaaaccgtgagagaccagccccttgaaattaaagtttacaaaacttcacttgtctgcgtgtctgatgttggaaagtttagcttcaaagcctgcagcctgggtgtttgctgggaatggtcaatgagaaaagttagatggggaaatgcaaaaagtaaaaaatcaaaactgcggggggagggagcgtctcttttgaaatgtaaccggtctgtcaagaactacgcttgagtcatttgagggcctgctgtgcgccaggtgaacactaagtcctttaaaccatggtctcattctgttctgagaacagacctgtaagggaggtgacataggtgctatcgtctcc

SEQ ID NO: 31002 - DNA, 168 bp, Homo sapiens; identical to SEQ ID NO: 27549
  chr12:111725459-111725627
  hypo

SEQ ID NO: 31003 - DNA, 499 bp, Homo sapiens; identical to SEQ ID NO: 24997
  chr12:111844290-111844789
  binary

SEQ ID NO: 31004 - DNA, 322 bp, Homo sapiens
  chr12:112605520-112605842
  hypo
cggtttggctttgatgagacacacactgcccgccaccccagccactgcgcaggacatgagctcgggggcgtggagcctcctcccggcctctgcctaccttgttcttattgacagctgagctggggcacagcagcagcagcgacagcgaggaactctgcagctccttacacacctgccacaggaagtggcggaaagagccgcctgtaggacagacgagacacatgggcacctggggtgtcccggcgggaggcgacaccgttccctccctctcacctgctggctggagcggctactccttccacggcctacctgccgctgtggc

SEQ ID NO: 31005 - DNA, 488 bp, Homo sapiens
  chr12:112610173-112610661
  hypo
cggggcctccaggcagcggcctgggcattccccgcagccgtgcatttctgtatctgctccctggctttgttgtcactggcattaaaaaaggccccagactaattaggccacagtcctggctccctgccttgccctccctgtttcgtcagcccactcttccttgcacacctggcgcatagcaggtgttcataagtgttcgttcgatggacgtctaaatgaatctagcccttgtaaatgccccttgtcatggggcatgcccgcatcaggcagcaggggaggggataggcccagggccacatactcaggagacaggccactctggggtcagcagcatccgcggggtccaggtacacctcatggggatggagccgtgcgggtgtgatggcgaggtggcggcatagctggttgatgtactgcacaagtgccacgtccatctccagggtccactttcttgaggccttctgtgcatgtcggacatcgatgcatgc

SEQ ID NO: 31006 - DNA, 432 bp, Homo sapiens; identical to SEQ ID NO: 23461
  chr12:113725566-113725998
  hypo

SEQ ID NO: 31007 - DNA, 772 bp, Homo sapiens
  chr12:114273212-114273984
  hypo
cgtgagcacctgacggcaggctgtggtactcgaggaggaccaggggaggggcatgacaagggaatcacgaaaaggagaggtgtgggggaaaagctgcatctttgacactctggctgggaggcagtgggggccggggtcagtgggggctgccgggaccagggctctagcaagcaggctccttccctgctcctcgcgaggctgggagggtgactgtttgctggaggccggcgacccatggggacagccacccgtctgtgccggaagagcacttctccgggcactctgctcatagatctcccgccccagcccaacctggcttgggcaggcgggggaaggccccactgccagccactcgccatgctggtcatgtctgcgctcccagctctggaggtgaaaggtagagacgctaaccacagcccatcagtcctccccagctggaataagacaacatgggaagcagagccacgctcccagccaaataaaagcctgtttgcccagcctccctggctgtgagtgctgtaaaacacagggttctgcgcacggatttcttccataccattatattctctcggctgcgctcgcaggtactgtggcctgccgcggccctgaaagcttctcgatgccgtgaccctgctggtttgtaacacgctcaggaagaaaaggacacagccagcggcggactttcctctttcttccctccttgctctctcttttcaaactcccacatgcaaggcagtgaagaatagcacttcacctaccacggggctgctgc

SEQ ID NO: 31008 - DNA, 321 bp, Homo sapiens; identical to SEQ ID NO: 24999
  chr12:114290596-114290917
  hypo

SEQ ID NO: 31009 - DNA, 528 bp, Homo sapiens; identical to SEQ ID NO: 25003
  chr12:116946078-116946606
  hyper

SEQ ID NO: 31010 - DNA, 182 bp, Homo sapiens; identical to SEQ ID NO: 25005
  chr12:117474002-117474184
  hypo

SEQ ID NO: 31011 - DNA, 62 bp, Homo sapiens
  chr12:119458734-119458796
  hyper
cgcccgtagagggcgctgtagaggcagcgggaaagtgattcctagagacggtggggggaggc

SEQ ID NO: 31012 - DNA, 289 bp, Homo sapiens
  chr12:119499064-119499353
  hyper
cggtgggggcagagtgtccttgagatgtggttagaaaagaaaaaaaggtgtagccctgcgtgtgcacttgggtgtgttggcagaacttccgctcaaatccaggggctttgctgattcatgtttcctagagcctgacggcggttcagcaccagggacagcgaccactgattaaataacaggctgcagtgaatccaaccatgaaagcactacctggctgttgcagccgtccttgcctattgaacctactagttacattacttttcaggtgtctctcacttttacggaatgc

SEQ ID NO: 31013 - DNA, 1351 bp, Homo sapiens
  chr12:120147746-120149097
  hypo
cggtggtttcgttgcaatcaggacaaagggtttggctttagatagtcttcgaggcttagcactcttcacttggcctaacagtgggatgttctttgggaatgtcagactgtgctaaactggatactggaagggaactgaatctggacagagggggtccattagctgaggcttgggcatctatggggacacagagataagagctacaacggctcctctctactattttgtgttttacgagcatgaaacgtggcttcaacatattggctcccttgaaagtaaagaaaaaacaccatgtccttggcctcacacctgctatcatgagtagcttctccaggtccttgataatataaatttggaagactgctccaattcctgggacatgggttagggagtttttcaagacattcagggcgtagagcccttcctcggtgcccaccaacaccacctgcaagggcagaagtccgaaggcagaacataagcacggtcacgtcaccagaacaatctctagtaagagcaacaaggcctccacagccctttctttcttgatggggtgtggctgtaaccagacaccagctggccgtgcccatgcaagcattacctggtcactgaagggcagcgtgcagttcatgtctagacggtcatcaccttccagtttcagcagggagtttccaagcagtttcttttcataggtgaaagaaaagaaaaacagaagacatcgtgaggctgatctgtttatgaccaaaccatccagagaaaccaagagaaggttaaggccaagttattcctggaaatgctcagaaacgcacatatgctcttagctcagcccgtattttgatctgagctccaaatgcaaaatgcgagtgctattggtatctctggggcagctgttaattagcatctgagttataatttggctgggatgcagaaataagggagggtagtagacatggaaagctattctgtaataagaaataagctgaagctaaggagatttcacctgcgcagggttaataagacacatgaaagactccttcccccataaggctgcagcagaagtgcaaaggcgccgtgttagcagcgagccagcacgcctctgcatctctttacctgaacccaggcaggcagaagctcgtaagaaacacagtcgcgggcctattgtacacatattaacaaggatttcagtaaaagctcacgtgtgaaacgaccaacaagtcatccaaacaggtctaaccactgagtaaagcccttttcaggaggcttgtggttaagaatctgccaattgctaacacataaagtgtttattaggagtgaagagtctgaaaagagctgtttggtcttcgctggagcaaac

SEQ ID NO: 31014 - DNA, 56 bp, Homo sapiens; identical to SEQ ID NO: 23844
  chr12:121667875-121667931
  hypo

SEQ ID NO: 31015 - DNA, 972 bp, Homo sapiens; identical to SEQ ID NO: 23463
  chr12:121687598-121688570
  hypo

SEQ ID NO: 31016 - DNA, 751 bp, Homo sapiens; identical to SEQ ID NO: 13307
  chr12:122231543-122232294
  binary

SEQ ID NO: 31017 - DNA, 487 bp, Homo sapiens
  chr12:124879871-124880358
  hypo
cgccccacccccgctccctcctgccatcgcctggaacacacagccattagcagccaccctgagcagtaattgtccagattgctgtaattcacggcagacgaacatgctgctgctcacgacattattacaaatgtcactgagcagggcctccgcgtgcacggcccccaggggacgctcactgccgtctccatgggcaggacccaggatgagctcactgtcatcactgaggacccaaccttgagatggtgggacacgggctcctctccgccggtgagtcatccccagccgtcctcccagcctccggatctgcccttccagaaggcaaacagagggcaggcactgtcttcccagttctcaggcaatgggcggtgggggcgggggtggtcaccggtgaggaggtggtagtgacaacacgagacacgagaagggatggagaggcggtgggaccctgggctgaccgtttggggatgtccacgcggagtcctcc

SEQ ID NO: 31018 - DNA, 617 bp, Homo sapiens
  chr12:125102111-125102728
  hypo
cgctgtcttggggaacagggtgaagctcaggaggagccccccaaccccggcgtgcccccattttgcctcctcagaaggccctgcagctggcctttcctgggaggcgcagagcccacagagcccaactctggtggcagaattagcctgtcctcgggctgcgctggctccagtcccagtgaggtggtgactgtcactctccataggagaggacgcctctcgccatggcaacggggacgtcaccagggacgtgtttgccggagcacaaaagagggtgtcggggaaacacccgcactctggcggcagaaacacagtgcacggcctcactccccatctggggatggctgctgggaggtgaccgagcctccctaggcagccggggccctcctcagccctcgtgcttgccttccaaagagctgtggctgttttctccgctcccctgcggtggagaaggaagagggcacatcgctggaggcatcttgtctgtgcctatgcagttctgactgcgtttgtgccccttcgattcacgcccattgcacaaatggggacactgaggcaatgagaggcgaggagacttgcccaagacctgcaggctccgtcaggggcagggtcaccggtgc

SEQ ID NO: 31019 - DNA, 122 bp, Homo sapiens; identical to SEQ ID NO: 13310
  chr12:128247754-128247876
  hypo

SEQ ID NO: 31020 - DNA, 186 bp, Homo sapiens; identical to SEQ ID NO: 25015
  chr12:12848356-12848542
  binary

SEQ ID NO: 31021 - DNA, 344 bp, Homo sapiens; identical to SEQ ID NO: 29772
  chr12:128899673-128900017
  hypo

SEQ ID NO: 31022 - DNA, 272 bp, Homo sapiens; identical to SEQ ID NO: 27554
  chr12:130821386-130821658
  hypo

SEQ ID NO: 31023 - DNA, 839 bp, Homo sapiens; identical to SEQ ID NO: 23851
  chr12:131271740-131272579
  hypo

SEQ ID NO: 31024 - DNA, 289 bp, Homo sapiens
  chr12:131418203-131418492
  hypo
cggggcgtccccacgtcagatccctggggtcaagcctgtccccaggatgactccccaggttttgacctgatcgctgcacccatgaggctcccggtgtccgggcgctcctcaggtccccgacacggaggcaggcttgggatgactgcaacctgctctcatgagtcacagcaggtgcctgtcgagacccacacggacccgggcgggcaggacctcggatgctgactccctgtggggtcaggacctccttcctccaggttctgccgtctgaggccgcagcctgctcctcccc

SEQ ID NO: 31025 - DNA, 504 bp, Homo sapiens; identical to SEQ ID NO: 13317
  chr12:131478681-131479185
  hypo

SEQ ID NO: 31026 - DNA, 742 bp, Homo sapiens; identical to SEQ ID NO: 23854
  chr12:132221511-132222253
  hypo

SEQ ID NO: 31027 - DNA, 463 bp, Homo sapiens; identical to SEQ ID NO: 27555
  chr12:132423564-132424027
  hypo

SEQ ID NO: 31028 - DNA, 804 bp, Homo sapiens; identical to SEQ ID NO: 26251
  chr12:132643296-132644100
  hypo

SEQ ID NO: 31029 - DNA, 635 bp, Homo sapiens; identical to SEQ ID NO: 23855
  chr12:132665953-132666588
  hypo

SEQ ID NO: 31030 - DNA, 258 bp, Homo sapiens; identical to SEQ ID NO: 28503
  chr12:133481383-133481641
  binary

SEQ ID NO: 31031 - DNA, 1267 bp, Homo sapiens; identical to SEQ ID NO: 23049
  chr12:14927051-14928318
  hyper

SEQ ID NO: 31032 - DNA, 454 bp, Homo sapiens; identical to SEQ ID NO: 6830
  chr12:1943616-1944070
  hypo

SEQ ID NO: 31033 - DNA, 155 bp, Homo sapiens; identical to SEQ ID NO: 11058
  chr12:1992067-1992222
  hypo

SEQ ID NO: 31034 - DNA, 972 bp, Homo sapiens
  chr12:28127663-28128635
  hyper
cgctcccactgcagcaagggaggcctgagtctcttagggcaggggtccagggtcttgggagaggccttagggcaagggggatgatctttttcagcctcccctcccctcctcccacccagcgtcctcatccccaccgcctgcgatagacttgggtcgcccattaggaagctgatccgcagggacggggcaggcttggctcctggggatcttaggctccatgggaacttcgggggtctcggggcccgtgagcggatctagctactacttcccctaggttctcctcgggcttcagtccctaagagtctggactccggactgccgcacagaatccttcttgcccggagcggtattattgaggtctttgcgttctgccccgccctgtcccgccggcttgggtgcttggtttctaacccgagtatactcggagtctctggtcctgcgcgcccccctcctcccgggagagccccgtatctggctgcgggtaagggaaaacttcgggaaccccgagacccaaggacagggtcggagggagcgcgcgaacttcctctgagcagggctcttcctcccctcccctctccctccaggtcaatttatgactcaaacatgagataagccctaggcagacggtgacgctgacttccccgtgggggcgcggggagagaaggatgaggcagacgtaccccctccctggcctggccctgtccggggccgcgtcggggtgtggaggggcgactcccttcctccgggagccccgactcgctctctcccagcgcgcctcccctgcgcccgtaaagctcggccctgccggagccccgggacccgtctgttttatttcacttaaagcgatctgcaaagtcaaggccgggtgaggtgcggcgcgggagaggagaggatatgaacggacgtggaacgaagttctgtctgccaactccctccgtctgattcttggaatccggtggcatcttaaaggac

SEQ ID NO: 31035 - DNA, 809 bp, Homo sapiens
  chr12:29301988-29302797
  binary
cgaatggaagcgcggggcgggcctgcgcgcgcggccgccctgcccacgatgctgtcgcccccgcgacctgtagggccttcgctggcccctcaccctcctcccgccccgggctgaggctgccgccggtttcgcgcccagtgccgaggcagcggcggagccggggaaggtcggagggagggtggtttcctcccgccccacacccagtctccgagccggatatatagagtgtcacgtttgggagccgaaagactggagccgtttccttgtggctggagcgcttcccgtagcctcggggaaggagcaggatttagaggaccactagttggaccccatcctcgtgctggaggaacaggtattccagggtccccagccctggcgctcgcagagcccacgcgctccaaaagcagagaccggactgggggtggcccaggagggagggctcggctgggttcgcagggcggggcggttcccggcgggacctcgaggagggtgggtgtgaggccgggtgggaggagagaagcatttgcggaggctctgccccctgaagctgcccccggctgcaccccaatcgtcaccggccgtttacgcgcggttggcgtcggcggagcccgccaaggtggggcgcgcgggggttgcaaagggcagaaagccgggaaggacccagcaaggttaatgtggggggccgcgccttggggactggggacccgggaagagaggcgcggggccgagtcccacccaggcctcctgggcccttggggctattcctggagagagcgcgaaaatgccggggccacgtgtgaaacggcagc

SEQ ID NO: 31036 - DNA, 221 bp, Homo sapiens; identical to SEQ ID NO: 23862
  chr12:29373882-29374103
  hypo

SEQ ID NO: 31037 - DNA, 145 bp, Homo sapiens
  chr12:31255196-31255341
  hypo
cgcacaccaggtggagcaggtgctgctggcatattccaggtgcatccaggtgcgggcgtcatgctgggcttgggtctgagatcgtgtgggggtggcagctggaaacgttgtgggtgtcatccaagttttggctcagcaactcagc

SEQ ID NO: 31038 - DNA, 2373 bp, Homo sapiens; identical to SEQ ID NO: 29795
  chr12:4377809-4380182
  binary

SEQ ID NO: 31039 - DNA, 1374 bp, Homo sapiens
  chr12:4381232-4382606
  binary
cggtaacaatcagcgcgcagtagcaggagccccagagctattggctatgcaaatagagggaggggagacggcgccccaaactcttcctcacccttttaaagcgatatcccctcctttcccccccaccaccccttccgccccaccctcgtttaaagaggctggctccggggcctgagttaatcgcttgcacctctagtttattcgctcccctcctccgccttgcagggaacctagtgtacggctcacccagcccgcgccccaccccgccttgctggctctccgcgcccctgcccgggccccctctctcggtgagggaggcactcagtcggcctcggtgtgcccagagagctcgagccacgccatgcccgctgcacgtgccagcttggccagcacatcagggcgctggtctctccccttcctcctggagtgaaatacaccaaagggcgcggtgggggtggggggtgacgggaggaaggaggtgaagaaacgccaccagatcgtatctcctgtaaagacagccttgactcaagcatgcgttagagcacgtgtcagggccgaccgtgctggcggcgacttcaccgcagtcggctcccagggagaaagcctggcgagtgaggcgcgaaaccggaggggtcggcgaggatgcgggcgaaggaccgagcgtggaggcctcatgcctccggggaaaggaaggggtggtggtgtttgcgcagggggagcgagggggagccggacctaatccctcactcgccccctccccctcccgggccatttcctagaaagctgcatcggtgtggccacgctcagcgcagacacctcgggcggcttgtcagcagatgcaggggcgaggaagcgggtttttcctgcgtggccgctggccgcgggggaaccgctgggagccctgcccccggcctgcggcggccctagacgctgcaccgcgtcgccccacggcgcccgaagagcccccagaaacacgatggtttctgctcgaggatcacattctatccctccagagaagcaccccccttccttcctaatacccacctctccctccctcttcttcctctgcacacactctgcaggggggggcagaagggacgttgttctggtccctttaatcggggctttcgaaacagcttcgaagttatcaggaacacagacttcagggacatgacctttatctctgggtatgcgaggttgctattttctaaaatcaccccctcccttatttttcacttaagggacctatttctaaattgtctgaggtcaccccatcttcagataatctaccctacattcctggatcttaaatacaagggcaggaggattaggatccgttttgaagaagccaaagttggagggtcgtattttggc

SEQ ID NO: 31040 - DNA, 128 bp, Homo sapiens
  chr12:4734887-4735015
  hypo
cgagcgagaaggcagagaggagagagaagagaaggttgtagggatggtctttttaattcccgcacttcagtgtgaagcatctggggtaagtgtgcgtgttctccagactcaaaccctccctttggcgc

SEQ ID NO: 31041 - DNA, 598 bp, Homo sapiens; identical to SEQ ID NO: 25035
  chr12:50297476-50298074
  hyper

SEQ ID NO: 31042 - DNA, 1389 bp, Homo sapiens; identical to SEQ ID NO: 23870
  chr12:52400270-52401659
  binary

SEQ ID NO: 31043 - DNA, 501 bp, Homo sapiens; identical to SEQ ID NO: 25039
  chr12:52652140-52652641
  hyper

SEQ ID NO: 31044 - DNA, 291 bp, Homo sapiens; identical to SEQ ID NO: 25040
  chr12:53359290-53359581
  hyper

SEQ ID NO: 31045 - DNA, 211 bp, Homo sapiens; identical to SEQ ID NO: 23468
  chr12:53662999-53663210
  hypo

SEQ ID NO: 31046 - DNA, 295 bp, Homo sapiens; identical to SEQ ID NO: 13339
  chr12:53685907-53686202
  hypo

SEQ ID NO: 31047 - DNA, 114 bp, Homo sapiens; identical to SEQ ID NO: 13340
  chr12:54122178-54122292
  hypo

SEQ ID NO: 31048 - DNA, 813 bp, Homo sapiens; identical to SEQ ID NO: 23874
  chr12:54145145-54145958
  hyper

SEQ ID NO: 31049 - DNA, 949 bp, Homo sapiens
  chr12:54378056-54379005
  hyper
cgcccaccctgccaggcccaggccacagctctcgggtcggggatcgggtgcctctggtctctggcttcctctttcccctaccccgcgtccattcggaacctccttttccgagcagccatgaagtgaccgtgaccccctccctggcccaccctagaggctggagattcccagtcaacccccacaggaaacttgcaactccagcgccgcggcccccaagcttccagccccgagggccaagcccggggaaaagaggaggcgggagagcagaaactttagtcctgtttggtattccttaactttttttcccctttctctgctcatcagatccccccaaacccccccccccacaaacctcaccccactcccatccccaaggtaagaagtgggagtcgggtccggggatatggaaaggggagatgaagagtggggagaagtacctgattcgtgtctcgaccttttaatttgaatttgactgttttgagccccgggttgcctcgctctctccctctctcccgcatttcccccctctccgcccccttctccccaggagttacaggctggttactggataaacaaaccccactcttcctagaacccccacccccacccccacccccctccacccctctacctcccctgccgcccggggggcgcttcctttgttcgcggggaagggctccggtgcccctaccccgaggcagctgctagatggcgctgttactccactctgcgcgctccgcctgccgacaacttgaccccgctgacgtcacggccgtctgaatcatcaaggccattttcaaatcccattggtctagccgtcacatggtgagaaccgaatgcgcggataattacggagctgatatttccccccctccccttctttttcctccctcccctccaaccgcgccccccctcccggatggggaaaaaaaaagatgtcagctcctcc

SEQ ID NO: 31050 - DNA, 956 bp, Homo sapiens; identical to SEQ ID NO: 23051
  chr12:54379055-54380011
  hyper

SEQ ID NO: 31051 - DNA, 1464 bp, Homo sapiens
  chr12:54393256-54394720
  binary
cgctccccttccctccttccctccctgtatctcagcttccccagtcccctcccaccctccctccctcaccgcccctgctgctcctgaaagaaatacatacatacacactatttaaaaacgcatttttaaaagccacgttccgaactgacaatcgctgatctcggctcgcgcagagactgcgggagcgtcggggccgacagagacggattacgtcaagaaatagttcctccacctacctcggtcggcctccccgcccctgcggggctcccgcgcccagctcggccctgggggtccgagaaccctggcttcggggactggcattttcaccccattaaaaaatcctcatggttggggggaggccatctgcttatgggtggacatgggcacaggggcttctcagatgagctaggagccgtcctgagggggtgaccggtgccttgggtccagagttccggacccccaggaaatcgcaggtcgcggggagcagcagagagaagggggtgggagagggggaaaagaaggcaaggaaaaaaaagcccctgcgcattgatccgcgccgtatttttgggtaaatacgatcacgtgggggccggggagccaatgagctgtggggaaaaggctggaaaaataattacctgacttgattgttctgtgagcagataaaaagtacatatacagttcatacaataatcttatgtatgtaaaaccccgttacgatgtcggcgacggggcccatcagtaactattacgtggactcgctcatctctcacgacaatgaagacctcctagcgtccaggtttccggccaccggggctcatcccgccgccgccagacccagcggtttggtgccggactgtagcgattttccgtcctgtagcttcgcgcccaagccggcagtgttcagcacgtcgtgggcgcccgtgccctctcagtcgtccgtggtatatcacccgtacggcccccagccccacctcggcgccgacacgcgctacatgcggacttggctcgagccgctgtccggcgccgtctccttccccagcttcccggccgggggccgtcactacgccctcaagccggacgcctaccccgggcgccgcgcggactgcggcccaggggagggccgcagctacccggactacatgtacggctcgcccggggagctgcgcgaccgcgccccgcagacactgccctcgcccgaggcggacgcgctcgccggcagcaagcacaaagaggagaaggccgacctggaccccagtaagttgggagcaattttcctttacaaccggcgcgggaggggaggggaggacgggcgggggcagccgaattacagccctcccgaaccgtgcagggagcgcgggagaggggcgagggggcgaggactcaataaaagcgaattaccttggggagctttcaggggcaggaggtctgagaatggggcccagggagacaggttgggagagggcc

SEQ ID NO: 31052 - DNA, 852 bp, Homo sapiens; identical to SEQ ID NO: 25049
  chr12:54520189-54521041
  hyper

SEQ ID NO: 31053 - DNA, 757 bp, Homo sapiens; identical to SEQ ID NO: 25050
  chr12:57618589-57619346
  hyper

SEQ ID NO: 31054 - DNA, 185 bp, Homo sapiens; identical to SEQ ID NO: 13344
  chr12:58284105-58284290
  hypo

SEQ ID NO: 31055 - DNA, 861 bp, Homo sapiens; identical to SEQ ID NO: 29815
  chr12:62584265-62585126
  binary

SEQ ID NO: 31056 - DNA, 988 bp, Homo sapiens
  chr12:62585144-62586132
  binary
cgccgtcaccatccaggggcatagggaaccgaagtctggtgctgtgtgatcgtggagggcggcgtgtgagtgtggccctgagcgtgcgagtgtgcgcgcgcgtgtgtggatgtgtttcctcctccgatggcaaagacggttcaggaatctgacatccaagctggaatccccctgaagcgggtgaaggtgagcctgatccttctccccgcttctttattccacagtgtcaaagtaatcaaaagatttgtttactgaggaaaagccaaagtcccgcagcccttggcagcgcccgcggtcgcctcctgtcctcgccggatgcgcgcggtgcgctcagctccctggactgcaagaatcaaggcggtcttgctgcaattaccgctcttattccatctctgatttgtttgcttttaaggccgactaaagacttttcctctcgcctcacgtcgtctctccctctcacacacacacacactcacacatcctccgttccctctctcccgccctccctcttgttctctggggaaaggcaattggacagaatgattcaccttcaggaaagcagcctcggccacgcacttctcgagttccctggctctcgcaggtaccgggtctccaacgtggcggagttgctgggaagctcgggacaggaaggaggagaggctctgagctcagccgatgtcccccctccagacgcccgcgttcctccgtccaggtgcccctgttcccactgctcgcagataggtccccgctggtgccctcgcggagacttggcgccttccactcgaatccacttagcagcaactcctggccagcttcagcccctcaatcccgcctcgaagtgctgcgggcagagccccacgcagcccacccgctgcccttctaggcatcgtgggctggaaggaagggaaacccgccgatgtccccctggtagcagtgccctggcaccgtcaccaccgaggaggtgcgagttccaacatcgaacacaagc

SEQ ID NO: 31057 - DNA, 852 bp, Homo sapiens; identical to SEQ ID NO: 23052
  chr12:63025588-63026440
  hyper

SEQ ID NO: 31058 - DNA, 267 bp, Homo sapiens; identical to SEQ ID NO: 7917
  chr12:6344323-6344590
  hypo

SEQ ID NO: 31059 - DNA, 196 bp, Homo sapiens
  chr12:6444937-6445133
  hyper
cggagcaggaggccagtcaccctgagtcagccacggggagacgctgcagctgtaagctgtgcaggcccggaagttcaagcctcagccgcaaacaggggaagccacacacagaaacacaacagcagcccccgcaggtggaggcgtgtgcccctgctcagaggacaacaaccttcccctgcccgcaccagccaacacc

SEQ ID NO: 31060 - DNA, 520 bp, Homo sapiens
  chr12:6483496-6484016
  hypo
cgcaggcaccagggaaggggcagagggactaaccgacctgtagggattgagggtgcagatggtcactgcggggaagacgagcttgtccgagttgaggttgatgttgaggctgacggggtagctgaagtactctccgaaaagcaggccgaattgccagtacatcatgccaaaggtgcagagccacagcactgcccagaaggccgtcttcatgcggttgtgctgggagcacaccaggcggatggcgccgtggatggtggtgttgttgcagaagaactcgaagagctctcggtaggagcggtggaactcgatcagggcctcctcctccgccgtgggctgctggggcgccgcaggttcggggcccagcccctgctcctcacgcttgttccccttcatgagccctggagtggactgtggagggctagagtcctgctcctccagcttgttcccctccatgagacctggtatgggctgcagaggtctagggtcctgctcctccagcttgttccccttcatgagcccc

SEQ ID NO: 31061 - DNA, 326 bp, Homo sapiens
  chr12:65220127-65220453
  hyper
cggcatgatgcccagcaggtgccccggaaaagtcagaagagcatattggtcagacatacagggaatccttgtagtgtggcaagaataagtcagcgcgggaccgaatttcctggtctttgttatcaagcaaacgtcatgattatacgctcctccattcagcacctcgcgtccggacagcaacctcacttgttttcagcgtgccttaaagcgtgcgctgggctggaaacactcccgtggccgttgttatcaccgttctatgtttgggcaggacttcgtttaaaccacctcagagagaggcggatccatgtggtacttaatattccttc

SEQ ID NO: 31062 - DNA, 1118 bp, Homo sapiens
  chr12:66122434-66123552
  hyper
cgtgttcatataataatctgtcaactctgtgatttgcttattatgtgaattaactccataatcgctctgagattgaattcagtgacaccgtttaactgcttctggtttgggggcttttactcgatatttttaggtaaggagctgtcaggctaatctgaggacatttagggaaagccaataaactgtcacgaacttaaaacaagtgaggtttctcgtggtttggtcgaaattttaacacttctcctctcctacccttcacctcttctcctcaaaacacttttttttcttttacaataactgtaaatgccagctctaaatttccctccaatctgggaaagtccaatctcccttcctcgagaggtgtctgggcgcaatactctccggcccgaagcaaggggacgtttgcgaggagggagaaatttaaacccccttcgctccgcgccacctgggagcactttggcgccgcagactcaggagccgacgccatctccaggacggcctcggtggcctcggcaggaggcaccttcggggagcggtcccgcactcctccttcctcagtccccggtcctctgcaccgctccctctctgctgccagaggacctgtccgcgagctccccgcgctgccctggggacggaaaagtttgtttctccaacgcgcaactttcccgctccaggcggcggggaccccgagccggagttttggccaaaaaatcccagagtcctatacctcctgcgcgcccagacctcgggggcgaagggcggctcccccggcgcgccccgatccccgccgcaaagaggacttggtggactagaggtgcaccccgcgggcagcccttggcgccccgctctgcgcccgccggcatgaggactcgtgcgtggcgtttcgaccctccgcctgaactgagactgggtggggaaaggggcagactgctgtctgtgactctgcgggaggtggagcacgaaacacaaaagctgtttgaaccacaaacgccaggctggacacccaacgaatattaatgacctgcagcctccacccacccgcaaacataatattatgtgtacgtgcttaccggttagcttaacagacttgccatcataaattcctttttcactgcagc

SEQ ID NO: 31063 - DNA, 1362 bp, Homo sapiens
  chr12:6664180-6665542
  hyper
cggaaaagtaggaatccccccgtgttccgctcccagcgtccttcttcctgtcacgagcagggcttctgcattctctgcggattctagtctccctgcatccaattgcttccaagctcctcattacacagcacaaactttactctcattcttttcacccctgattcttcggaacccacaccaactcgcggcccgttgtgagtggtatgacacagagagacctgtccccctttcccaatccctacctccgcttgtactcgtcccgctcccgcttcactttggccagcacgttgtagagagcgcggatctcgggcgtgatggtgtcgatctggacgcccaccccatccgggtgcacccacgacaagccaggcccttgcaccagagtgggctccagtcccggcccgagccggcgggcgtgcgagaacgaccagatggtgccgggcatgaagcgggccgacgaggaataggtggtggaggtggaggtggaggacgacgagaggctggccgcggagggcgcgagggggccggccggggagcgcgcgggcgagcccagcacgcgcgccgaagggctgcagacagcggccggccgggcgcccagctgcagccccaggggccggatggggctgacgaagccggtctgcactgcctggtcgcgacgacccaggccccgccggccctgcttaccctcctccagcgcttgctgcagttgcttctccaacagccggttccggcgctccagctcatgcaccttggccaggaagcagcggaaccggaggttcagggtcttgagcacgttgatgttggagcccaggtcattgcggagggccatggcggcaggcggggccgggcccggcccgggcggcgagtaggcagcagggccggccggcgagagaggcgccgggggcaagtctcctcccccggcgaagtggtcgcctcccagtgagtcccccagtggcccggccaggccctgctgctcctgctgcaggaggaagaggttggggccgaataacggattcatggctgcgccttctgctgggagatgcagaccggtgcaggagcagggatggaaggcgagccagaagagccaatgcggcgccggcgggacagagccgaccaatcaggcggctcggcagcggggcagaggtcagggggcgggccgaggggaagccaatgacaggctccaattggaggccggaccctggacctttccgggtctgaggccgagccctgtgatgaggggagccaccgcctggactccagccggggtggcgtaaagcccaggacctccagtaccccatgggttctggtggcaagcccatctcccctacacgactttttttttttttgagaccgagtctcactgtc

SEQ ID NO: 31064 - DNA, 563 bp, Homo sapiens; identical to SEQ ID NO: 22786
  chr12:8171309-8171872
  binary

SEQ ID NO: 31065 - DNA, 1852 bp, Homo sapiens
  chr12:85673120-85674972
  hyper
cgtggaccaaagggaagggtggcgaagagggtgtagggaattggttggcattagtataatggcttcattgcctcttgctcggcttctctctcccacccatcgccaccgcgtccacactccgccgcattccagagaaaaagaaaaggccacggcctcgtaaagctcccagctggcccggaccccgagctcctcccggttagaagccgaagcggcccctctactacggcggctgcgattaacagttgccaatgcatctggttccttgggcttcggattaatgtgaatcttccacgtaaacgatttacggatgaaataaaagccttttagagcaatatttcctttcaagttcttaagacgcctctaaatctttctggtagtgagtggccggcatgggggcggggtggggacgggtggctcaggaaggcgcaggcagtagggagtggaggtttaactgctttgcgatctcaccaagatcttccgaaatgccagtccactgtcacggcggcaatgaatctgggtgtcaggggctcgtctctcctggcatttgtctgaaatggagctgtctgtctgtctatcctaggcctggacgccctctgcccgggtaagtggggaaaatgggggtggggtaggggcggagggggacctggggtggagttagtcgcccgcctattttcatattcattagaactgggaggctgcccgaggaggccagctgagtttcaagatataaaagcaacttcgggtgctccttttccagccgggacgtattaaagggaccggagcggggcagttcccgacgccgcagcgctcgctttcccttccctcctctctggccctccctcctcccacccactggctccctcccccagcgctctccagtttctgtgccccaggagctacgcgacagtcttccaggattatggagtttctgagcgagaagtttgccctcaagagccctccgagtaaaaacagtgacttttacatgggcgcaggaggtcctctggagcacgttatggagacgctggacaatgagtccttttacagcaaagcgtctgcaggcaaatgcgtgcaggccttcggacccctgccccgcgccgagcatcacgtgcgcttggagaggacctcgccctgtcaggacagcagcggtgagtcgctagcgccccagccggagccgccgcagcccttccgcaatcgaaaatgcaggatcggtctgatcaggcagggagggagaaaggagaaaagtgggagcgagggacctggaaggtggaggaaggtagtggaaggtgctcgctttatgaagcggtgttactgctgctgcagcctttgggggcggagggcggagggagggagagatccagcaccgggttgcctctgagcgattctcctttcgctgtagggtctggtcgcctacggatccctgagtccttctgtaatattggttcctggagtaaactgatagggcgctaaatagagcgtaattgagtcaagacagaacgcttcctctgcgagcccgccttgcagtccgggcggtaggaactgaaatcgatcacagctcgttagagtacgtcactgtcgtcacgagtagggaaaaaaaaaccggaaaacaaaaacaaaaaacaaaaaaccctttgagctcctttaggtaaagataaatctttttaattttccaagacgtggcgatatattttcaaagtttgaggatccctagatttctagcgtgtgtgaatttgtaatttctgcttttttttgcgtttgcaatacaacacgcgttgaatgtttgttaaacactaaagcacactaaatagcttcgggcaaaccatccccggcctaatcactcattcccagattctac

SEQ ID NO: 31066 - DNA, 117 bp, Homo sapiens; identical to SEQ ID NO: 11072
  chr12:94145777-94145894
  hypo

SEQ ID NO: 31067 - DNA, 247 bp, Homo sapiens
  chr13:100575352-100575599
  hypo
cgtctggggccttcccttctgccccggcctgcctggtctctgctgccagagcaaggtctgcagcttccgatctccccgcctttcccaaatatgcacgccctgtaccgccgtcccaggctccgtgccaggcggcagcagccactgtgctcacactcatgtgtcgtgtctctcctcccaggtaacttgtttccgtgttaacaggtaatcttcctgctgaggatgtcaggcaacatgccaacctgggaac

SEQ ID NO: 31068 - DNA, 482 bp, Homo sapiens; identical to SEQ ID NO: 29824
  chr13:100630645-100631127
  hyper

SEQ ID NO: 31069 - DNA, 871 bp, Homo sapiens
  chr13:100641316-100642187
  hyper
cgcccctctctgggatcccgcgctgcgctgcgggtagctgcccgcagggaggcccaacctgccgcggctggagcacggtttctgctagccgccgccgtcaacttgaacttcagtgagcctaggccggcttccttcgcgctcacctccatccaccacctaagaagtcccctcagcgcgagcgtcgctttatccggaggcagctggagccccctcgggaggcccgtcattattattattaattatcgtgatccttactgcattattaatgcccaggatgataaccggcatcggtatcagctttccctggttcagtgatatcccacgaagttcggggcggggaggaagtcactccaggatcagaggccgcgtcggttctgcttggggcatgggcagagggaggctgctggggccaagccccggctggacgcgagggaagaaactcgtcccaggacccgcacgcccatacctggctgtcccagagctcttccctaggccggcaccttcgctcttcctcttccccaccccctagcccttttgtctctttttcagacggatgttttcagtctcaagtggttttattttccgcacaaaaccctgagatcaagggcagatcacagactgtaccggaggctcgggtttccctggactctgtgctgttctgcgtcccagggttggctaggaaggaaggcctgggccggcgaggtgacgggtctcccgcccaggtcggcaggacggggggaggtgtgtcccggtaggtccctggtgagctcacccgtggcatcggggacccgcgggaacccaccgggcgcccactagagactcgggtcctaccctcccccacactactccaccgaaatgatcggaagggcgc

SEQ ID NO: 31070 - DNA, 761 bp, Homo sapiens
  chr13:100649330-100650091
  hyper
cgcccctgggcgcagggctgtgtgtgcgaggacaattattttcatcagctgcttgctagcccgcgcccgactgctcctctttgcagaaccgacgggctttcaactctggaagtgaagcaggacgaattcctccatggagactccctccttgggaacgtcgaactctctctgccttggggagtggggctcgataaagggtacctaggtcgcaccctggcaggggagcactagagggccgcgaggtcccgggtttcgccatcctgagacccccgcgcggatggcccaggaggggcgcggcggccctgagtcaaggtgggcgggggcaggtgcttccctccaccgcgttgtcctatgccggcgcggtccccaccgcccgacctagcccggcgccggccgagcacggcggccgcgcttcgcactccttcctcccaccgggtccgcaggcccggcttcacgattcccgggccctcgggcatgtgagggacttgagtgaatgcagctccctcaactcactcccgcaaaaccacagccaagagggccttaagtcagagaacccggcctaggagcctcccctagagcctcggcgcgggccccttccccttccccacatcggtcggccgagggagcctagagccggtgggagacgggcagcggcctctcctgatcctttcctgcggtcatacaagttcctagggtgggccgaggacagagcgcctcaggcatcgtcggcttcccacggctgcggcccaggcccagcctgc

SEQ ID NO: 31071 - DNA, 141 bp, Homo sapiens; identical to SEQ ID NO: 13353
  chr13:112786406-112786547
  hypo

SEQ ID NO: 31072 - DNA, 926 bp, Homo sapiens
  chr13:113350364-113351290
  hypo
cgtctcggctgacggctgcgtggccttggcaagttggttgccccctgtacgcttggtgccccatctgcaaggtggggactatgatggtgcccacctggtgggtctgtgcagtgacgggacaggtcacggcgctcgtgcacgctgggtgcccagtgcacggggcgtctttgttgcgcgcatggacctgcggctgcatcaccgtccatgcttctgggcttcttaaggagaccgcctctcaccttgggctttccggaaccttctccccgcactcctcttcacgtggagagtgggtgaccttgccctgctctcccggggagagcggtggtcactggtgggaacgcccctgccacgcccagcagcctttctgcctctgcgcttgcctcctccggttggagcgagtgacccgttctgccgaagtccagtcccgtgtgtgctgcggccccgtctctctccctctctgagtgacactgtctgccctgctgcttgccgtcccgctgttggcaccgctttagaccccatatttcccagcggtcaccgtgctcatttttggcttccagctaccgtttttcttaggttaccccgcgtagctggcccgtccttccttctcctgtctcttctgtgcctaccgcggggggttcccttaccaaggtctccatcacccccaggcccacctccctcgggcccctctctgcccttgccctccacctcagcgactccgtggggcttttgtgatcccagctgcagttagcgagcgcccctgtgtgctcagagacacgccagtgagccgggaaggacagagacccaagtcccatccctctggggcccccttggaatgggggaggcgaacaggaaaccaccacagtgagtgttggggtgccccgcaggcgacggtgctgagaaaaagagagtggggttgggggcagtgc

SEQ ID NO: 31073 - DNA, 667 bp, Homo sapiens; identical to SEQ ID NO: 25059
  chr13:113400167-113400834
  hypo

SEQ ID NO: 31074 - DNA, 253 bp, Homo sapiens
  chr13:113424750-113425003
  hypo
cgttaccatgagtgtgacgagagtggggagaaccagtggagcttctgatcctgtcccagcagatgccagtggctcggaccaaggaggacagagggatgggcgtgcccacgtgaagcctcaccccagaccccagaccctgcttacatgccgggacgaaggtgggagagaaccgtgcatctcagcacggcggtggaaacgtggtccacctgcggagggcctgtttgcgtttattacacccgagcaaggcccgcac

SEQ ID NO: 31075 - DNA, 288 bp, Homo sapiens; identical to SEQ ID NO: 7925
  chr13:113667314-113667602
  hypo

SEQ ID NO: 31076 - DNA, 484 bp, Homo sapiens; identical to SEQ ID NO: 23887
  chr13:113985425-113985909
  hypo

SEQ ID NO: 31077 - DNA, 759 bp, Homo sapiens
  chr13:114107410-114108169
  hypo
cggtatcaggtaacaccatccgctgaaggaccgcactgccttcaaagctctcggaggcttactgggagaactcgagcagccagtgttccctccagcccgcacaccggagcgcggtgggcccagcctacctgtggtgagggcctcggcggttgcgatgtgcatgatggtgttgtcactcacgggccattctcctggcgagagtacgaggtggtccaggcccccggaacgttgcagctcctcctggatcttcatgcctacagtgctgttctccttgcagacatttctgtagccaagagcatcgccgacgctccccagcaacatcgcagccttaaatttctccatcccaggaggcagctcctcttccccaacagctgcggagcgtcctggcctttgtctcctcctcagcccgcctgacttttatagtggtcactgtgtcactgtcaggagcgtcctctgatggccaggcgctccttgtctatctctgcaggtggcaccaatgagaggacctttctgtcccccacgtgggaggtgtcagttttcttctgcgtctggacaggcaccagctcctcagcagaggagcctgctagcttctgccggcagccgcagcacattcagagcgttgacagagcaggggctcctctcgctgtccctggaaggagtgcgcacacttccccgtgtgtggcgtggggtgatgcgggagcagatgtgtgcaggcgtgcctgtcactgccgcccgctgcggggcgtgccctcacccctc

SEQ ID NO: 31078 - DNA, 110 bp, Homo sapiens; identical to SEQ ID NO: 23890
  chr13:114188365-114188475
  hypo

SEQ ID NO: 31079 - DNA, 225 bp, Homo sapiens
  chr13:114271763-114271988
  hypo
cgctcacctgcagaaccgttcacctgcagagcccttcacctgcagaaccgttcacctgcagagcccttcacctgcagaaccattcacctgcagagccgctcacctgcagaacccttcacctgcagagccgctcacctgcagagcccttcacctgcagaacccttcacctgcagagccgctcacctgcagagccgctcacctgcagagccgctcacctgcagagcc

SEQ ID NO: 31080 - DNA, 932 bp, Homo sapiens; identical to SEQ ID NO: 13366
  chr13:114283923-114284855
  hypo

SEQ ID NO: 31081 - DNA, 267 bp, Homo sapiens
  chr13:114302291-114302558
  hypo
cgtgtcttctgtgctggtgtcgcacccgccggccaccgccaccctgcgtcttagacgtcccgccgcagctgtgtttccacctcatctccagcttgagtggcagccagcggcgccacctgcacacgagccccctccattcgagaagcacagactatgagtgtggccacgcgtcccatgacgtgaactcacgtctgcgccgagacctttgccggcggttttttactgacggagtaagcactggagatgcttggtacagcgtcttccatc

SEQ ID NO: 31082 - DNA, 115 bp, Homo sapiens; identical to SEQ ID NO: 13368
  chr13:114302660-114302775
  hypo

SEQ ID NO: 31083 - DNA, 284 bp, Homo sapiens; identical to SEQ ID NO: 13369
  chr13:114303512-114303796
  hypo

SEQ ID NO: 31084 - DNA, 541 bp, Homo sapiens; identical to SEQ ID NO: 23891
  chr13:114304580-114305121
  hypo

SEQ ID NO: 31085 - DNA, 404 bp, Homo sapiens
  chr13:114750972-114751376
  hypo
cggacacctgagcacgggcggccccacccgggagctccctgcagccccacccccactgcaatctcccgcccactacactggccgtccagggcaggcacgggagtggcactcactggcttccatatttcgtcttcttgaacttgtccctcttatactgggcgtgctcctgctccaaagccccaaccccagcgatgacttgctttagcgtcttgtaggtctcctgggggtcgtcaatgacgaacgtcgaatactcctcctgctccgggccgtcatacacagatttgctcccacaggcctctgtggagggcggaggggtcagcgcagggcaggagcccaggccaccggccccgtctccacacagctgcgtcgctgcaggccccacccacagtacacatccttccaac

SEQ ID NO: 31086 - DNA, 530 bp, Homo sapiens
  chr13:114780539-114781069
  hypo
cggaaaaatccagcatcggaactggggttcacgaccccgcagttctagtctagccagggctgcggggggttctgcctgggtgggagtcaccctgcacagcgctatggcagtttctcagcaacatgagggtgttcagggcactcaccctggaagcgcttggccgccgcctcccggagggagaagaagatgtcacacatgacggtcgggcagctcaccccagactcagtgatggcgtggaagacgcggtccacatactgccgtaggttctcctgcaacgggacacggcactgggacccactcccgaggctgcccacaggtgcgtgtagcaccagggcacgcccagggaggggcgcgtggggaggggctgagggcgggcgcagggcagctgcggcagtgagacacgtgtgaacagccactccctggaaatctgtgctgggagctgtggcaattcacgcgtgaaaatcactacacaggcaccacgtcggctccccggctcggccccgacctcgtttactgagtggggaatggac

SEQ ID NO: 31087 - DNA, 341 bp, Homo sapiens
  chr13:114961716-114962057
  hypo
cggattccaaatctaagcacgagcctctttcagaacttcaggccgtgtgctgacatggaatccctggtgccacgaaagaccccagagcagcacaatctgagctcactctgtttccaatactgcgcccaggtaacgctgcctcctcatgccacaggtccagagcgcccagccgctggtagacacccgcgccccgctgacgttccgccatctccacctgaaactcaagaggctgaaggtacactttcatttctaccttacttaatgtaatagctaactagaaaatgccagcttaaaagcccaggaaaatagaaaaggcagggttagtaaggaataaactcacc

SEQ ID NO: 31088 - DNA, 366 bp, Homo sapiens; identical to SEQ ID NO: 23898
  chr13:20392340-20392706
  hypo

SEQ ID NO: 31089 - DNA, 839 bp, Homo sapiens; identical to SEQ ID NO: 29832
  chr13:20735265-20736104
  binary

SEQ ID NO: 31090 - DNA, 400 bp, Homo sapiens
  chr13:20875608-20876008
  hyper
cgggggctggtccgattgcgccggctgcgcagcgcttcccagaaaccgcgcttggtgatgttggaggcctggatcgggctctggtggagggtgtttaccaccaggccccacgccctgggtcttgccctctggaacggcagcaggcgcgctcccggcgaatctgcctgaatcgccgtgaatgcggtggggtgcagggcaggggctggttttctcagccggtcttggcttttctctttctctcctgctccaccagcagcccctccgcgggtcccatgggctccgcgctcagaacagcccggaaccaggcgccgctcgccgctcgctgggggccacccgcctctccccggaacagcctcccgcgggcctcttggcctcgcactggcgccctcacccacacatc

SEQ ID NO: 31091 - DNA, 1051 bp, Homo sapiens; identical to SEQ ID NO: 23056
  chr13:28491488-28492539
  hyper
